United States Patent Application Publication US 2014/0057251 A1 - sequence listing, part 174

SEQ ID NO: 345141 - DNA, 862 bp, Cannabis indica
atggatgtatgagagtccttgggtgatgagggagattgttggaaagtatcgaatatggcatgattagaagcattggcacgtcagcttagtgttggcatcttgccacacatgctaccctggtcacgagtgactaggtgagcaatagtgttgggattcaccttattatagtgagaacttatggacaatgcaagtatcttggttagagtgcctcgatgcatggatgcactcatggatggtagcgagcatgactcgatgggagtttttcaagagacgaaagtgtgcatgaggcacacggtcatgcaaaaaatgagcccattgttactcaaataattgaaaggttgaccttggtgtatagaattcaaggtgctgcacgtgtgtgccgcctgaaaaaggtgagcctgtgacaattagtatcagagctaggttcatcttaataggaggtgaacctggttggcctatcctagaggagatgtatgtcatggagcccaaaagtctcctaaagtggatcaatagaccaagatggagttgagattgggttgcttttctttatgggaatactggacatcctagagaggagacgatgatggttgcttcgaattaagttcagggatgctagaaagataactaccacgtgcaattatagagaggcgcaacaaaatatttgaaactcattggcgtagtacaaggttagattgggtagtccatattgtatgctttgtacactaagccaagttttcctgagtgacatcgtaagctccaagaggcgcctttgttgaaaaggaagcttgttcgcatgggagttgaagtattgcaagggccgtaagattcttgttagtcacgatagtggtcgagagttgatgac

SEQ ID NO: 345142 - DNA, 1157 bp, Cannabis indica
tagtgtgtaagactgtgaagaatccaatcaacaagaaggagaatcagcctcaaggaaggagtgaaagagatccaggttcagatcttgataatgctcttatatagaaatgaatcaagggttagagatctgaacggaaggagtcattatattccgcggcacccaatgtaaagttttcaaactttatatatgtttatttcattattatataaattcatattaggatgttaatgaaaaatacttgttagtaaatccaggtcctggtaaaatatttccaacaactggcctcaaagccatggttatgatttactttcatgaaatatgaattaaaacgatgttatgtcttgatttgaatggcttcatgtggtttatgtgttttttgatgaatgtatgttttgtacggaactttattccatcaaagttttttttttatttttgaaaatattttatttgggttccttatgaaaaattaagtaatttttgtttttacagaactcgattctgataaaaattgagaaagttatgattttttgaaaattggatgccatggctgtcgagtgggtgcatcgagtgcactaggcactcggacatccaggcacacgcgcgtgcataggcttcagacaagccgtgtctacagacacgatcaaccccacgcccagacgctacatccgcccgtcttgcaccctgctagcgccgaggtttctcggcgtccccttctgctccgcccgtgtaatggatgttttgcagcctctagaggctacacgtgcagcctcctgggcagcctacgctccaaacccgatttctagggatttttttccaaaaacccgatttttccaattttcaaactccaaatttaaaataaaatattatttttaaatatatttgaacttaaatatcatattttaaattaataatatttatctttcaatagattattattaactttgatattttgagaatttaaaaattgattattttattttttaaattatggtcagatttaaaatttgttaatttctttaatatttatatattatttaattataagattagatattttgatatttaacatattttaaattaaaagttaactttatcttttttatttgaaatattatattgaaattatcttatatgacaaattaaataattaataaatt

SEQ ID NO: 345143 - DNA, 869 bp, Cannabis indica
aaactctaaacctaattatttttagttgaagcttattagtcctataatatatttaaatttgtggcataaatacataagtttaacttacggttgcaaataaatacctaagtttaattttttgcgataataatacctaagatggcgtttggttagaggtaataaaatagaataccggaagagaaaagaaagtaaataatttccattccattcttttgtttggttgcatattaaagtattggaatgtcattctaatggaataccctttacaatattttggtgaaataactattctattttgatatagaaggaaagactattctaatgcatgatgagaaaaaaatcaataattttttatcaatttttgtatgcattttaaattttattcaattccattcttattcctattctcattctcattattattcttatgttttcattccttctaaccaaacgccatctaagttatatttctgtaactctacctaatcgttaaatggttaaatgtgaagcagggccggccagagggtggggcagccggggccttggccccaggccccacaattttggaggccccgaaaaaattaaaattaatatatatatacatataaaaatatataatatataaatatttaactcaataaattacatgaaaagcatacagatggtaagtagagcttgtgttagccttgaggttcaaggttcaatccctacgctagtcatctttaatactttttttgaaaatacaccttttatacttttagttatttgtgaaaagttttacttagcatttcaaaaataaataaataatattataacttaaatatttgtattacactatataaaaaaatatattaaagtacttttaattt

SEQ ID NO: 345144 - DNA, 845 bp, Cannabis indica
gtttcctatccatttgatacagcgcattaaatgggtgtcattcgagtactcaaacgtttcctaccgccttgatgaacgcttgtcccaactgtcagatctgtagaatgcgaatcgattgctattctgaccgtacgatgatggtcgatcacagctgtctcacacccgttttggcctataaaagccagccttttcatttcatttggttactttcaccattttaccaaattttcccaaagcttccacagagaggaaaaatttcagacaccatagattacctgcttcttttccttcgccgttgccagtcttccctttaccggcgatcaacaccaacccccagagttcaaacttcatgtaagttctcaggacactttacactcgcttactgtttgcttgtattgcacgtttagagttttctgggtcgaatgttgaacttctgggaaatgattttgcctgagtttgctttgtaatgtatagaatctctcttttttgcaccttggttgtttctctttactgcattttcttttgggaatcgcctttttctgtcgtaataatgcctttagggcttagagtggccaatgctttttcggctttgtcttctttccctttctctctttctttttgcaatgtcactgcctttgggatttttgcacccgatgcttgccaaggaaagtcttatggggtttccttatttggcaagcaaccagagggggcctctttccagcggttaggggacccccattccctttttaaacattagggtttggtttggggcctaactgctggattttcttaattttttcagaaccactatgtctgcttctacatccagttcaaagtcttccaag

SEQ ID NO: 345145 - DNA, 2181 bp, Cannabis indica
tattatccatcatcacataccgatgtgcctgatactgtagcggatagggccctttcttgaggcaattgacctttctttatgtatctaatgatggggtccatccaacttggatcttgctcggtcgcagccactgtatctttgattctgatgcttggcttcgcgaggtgttcaacaggtactacccccagtctctctatctcactgtctgatgccaacttggccaagcagtctgcgtgagcgttcttttctctgggaattctttccactttgtactctgtgaactcatggagtagttcccggacaatagctacatatgtggccattttttctccacgcgtttggtattctccaaagacttgattgaccaccagttgcgaatcgctgaagacttctactcttgcggcccccacgacttttgccaacttcaatcttgcaattagggcttcatatttggcttcattgttagaagctgggaatgcaaaacgtagggctgcctggagccgaagtccatctggcaatatcattgctatcccagcaccggatccgttttcgtttgacgctccatcaacgataccttccatgctggggtttgcggtactaacacgcttcaactagcttctacttcattaaaatctgttatgaagtctactaaggcctgtgcttttatggagatgcgtggtacgtagtgtatttcgaactggctcaattccatggcccatttgaggagtcttcttgacgctttcggcttctgtaagacttgccgaagtgggtggttcgtgaataccttaatggggtgagcctggaagtagggtctcaactttcttgaagccatgaggaggcaaaaaactaacttctcgatcaaaggaaaccttatctcagcccctatcatgcgcttgctaatgtagtacattagatgttggactttatcctcttcccagactagggctgcgctgacagcgttctcaaagacagctaagtttagtaacaagtcttctccgtgaactggctttgatagaatcggtggtttagccatgtgttcttttagtttcctgaatgcctcgtcacattcttcagtccattcaaacttttgacatttctttaagatgttgaaaaaagggatgcacttgtcggttgatcgggaaatgaatcggcttaaggcagcaacctttccggtcaagctttgcacatctttgtgcttcttagggaaggaatgttcaataaagcttgaattttttcagggttttcctctatcctttttggttgacgataaatcccgaaaatttcctaacttgactctgaaagtgcatttcttttggttaactttcattccatacttccagactacttcgaagcattctgtgaggtcgtccgcatggctcacgcatgctttggatttgactaacatgtcatccacgtaaacctccatatttcttcctaggaggcctttaaacatccggttcaccattctctgatatgttacaccagcgttttttaatccaaaaggcataaccaggtagtagtatacccccttatcggtcctgaagctagtgcactcttgatctgcaacgtgcatcttaatctggttgtatccatattaggcgtccatgaaagacagtagcttgaacccagaggtggcttctaccatcttgtcaatctgaggtaaagggaagcagtctttcgggcatgccttgttgaggtcggtgaagtctatacatactccccatgtcccatttggctttggcaccagtaccggattagccagccattctgggtagtacacgtcctggattaggccgttggtcattagcttgtctacctccttttccagggcgtctgcttttactggatcaaggggacgccacttctactgtactggtggcaaatctgggttaatgtttaggacatgggtaatcacatgcaggcttatgtcggtcatgtctcctttgcatcacgcaaaaacgtctatggcagcccttactgcttcaataattttgtttctttcctccgtctctagttttttcccaaatggaggatcttggtagggtcgaggtcgcacacttgtacttcctcgatgtcctccataggctctacagttctttcagatcccacgcggagatccaactcatcttccgccaactctggttcaatgccctcatggaccacctgttgggttttatgccc

SEQ ID NO: 345146 - DNA, 538 bp, Cannabis indica
tgccctatttgtgttaactggagcatctcttgagcatccaggtgagaatgcaaccaaagcagtgaaggagaagttcgagcgttggcaaaatgccaacaacaaaggtcgatacttcatgctttctcgcatggttgacaccttgaaaacaaggtttgctaacactctaacggctacagaaatcgtgaactagttgactgaactattcagacaggcatcaattcaagctcgctttgaagcgacaaagaatttcatcaatgcagggatgcaacctcatcagaacatgtgtgatcaccttctccaaatggcaagttacttccaagaagctcagaatcatggagctgaaatggatcagaccactcaagtgagtctgatctttaacagtttgactccatcctttctaccttatactttaaattatgtcatgaacaagttggaacttgttacgaaaattatgtttatacgcaagtgtacgcaatcaagtagtatctcacgcaagtgagatcgaaccacagggaattggattaagtactactaaact

SEQ ID NO: 345147 - DNA, 883 bp, Cannabis indica
taaccatgttatttttgttccgtgcagacatgtctcagaagatgcttgatgctctgaagaagaggattggcggaagctccagcacatctcccccggccaagaagtctaaaggcggtgaggggacctgttctaaggaaaagatgcctgtcggggaggtcatcgatctttctgaggagctaacgattgtaaacccctctactccaaaagtttccaagtctaaggagtcctgaggagggagttcggacaggtctgaacaaccgagaggtgggtctgagcaggtgtggacccctactcaacctttgccagtgcttctagaggccaagaaagggaaggagatgctggactaacttgccagtaaaagactccaaaaataaggccttaactttcttgtggctaggataaggcagtaagcaagtttctctatcaatgggtatcggccttcgacctcaatgagtcttttactgatgtaatagactgggtgctgtatgctgttctcttctctaatttgcacggcacttacggcatgtttcgtgacagctaggtatattccaagttcttcttcgtctaggggttttgagagtaagagaggttttgcaagttgcacttttagctcttggaaagctttttcacattcctccgtccactagaactgcttgtttccccgtaggatattggaatgggacacacttatctgttgattttgaaacaaacctgctgagtgcggcgattcgaccagtcaaactttatgcttccttggttttagttggcgacttcatatccaggaggggcttcaatcttctctggattggcttcaattcctcaggcattgacgatgaagcccaaaaaactttcccgagctgactccaaaggaacactttgaggg

SEQ ID NO: 345148 - DNA, 1154 bp, Cannabis indica
gtcgtgaacttcatatagaagccctgcagcttcatttggtgtgacgcaactaagtaatggcattgagaatcctcttctgtacatgatcccgtctacgacgatgtaccgtgctgcctttcttctcattttccgagcttcatttcaattatctgggagttccctagagttgagataggctactattagcgtcatccagttcggagatgtatcgatcatttcgatttcttccgtgcctgtgatgctaggctcttcaagaaactggatcgggaccaggttcgccttgtcacttatattgctgctcgccaaacgggctagcgcatctgcagttgtattttcctctcttggaatctgcttgaggctgtagcttttgaactgtgcgagcagatcatgtattttgctcagatatgctatcattttttctccccgagcctcgtattcgccagatacatgattaaccactagctgtgagtcactgcagatctcgatgtgctcggctttcatttccttcgctagtttgagtccagcgattagggcttcgtattcggcctcattgttggaggctttgaatccgaatttgaccgctgcatgcaggtgttgcccccaggtgtgacaagggcaattcctgcgccggatagctgatctgtggccgatccatccacgtgaagcttccaggtcggcttgctttcagtgctggtcggctgtggtgttggctcgggatcgccttctgggatgctttcagtttttcctgtgcattccaccacaaagtcggccaaagcttggcctttgatagctgttcggggttggaaattgatttcgtactgccccaattccaccgcccacttgagtaatcgcccagaggcatctggcttttgcagtatttgccgtagtggttggtcggtgtacacccgaacaggatgagcttgaaaataaggtcttagctttcttgttgctaagatgaggcagtaggcgagcttttctatcaacggatatcggccttcggcctcgatgagtcttttactgatgtaatagactggatgttgcacgccatcttcttctctgattagtacggcgcttatggcatgctccgttactgccaggtatatccccagttcctcaccgtccagaggtttagagaggacgggaggttttgcgag

SEQ ID NO: 345149 - DNA, 637 bp, Cannabis indica
tgtgaagttaaaattaaaaatgaagcccaaacctagtagcctatttaaattagttatctattttatagtaaaaagtgacaaaaaaaatattttatcttttatgatagaaggcaaaagaatatagttatactcaatatgacataacaaaaattaattattgttcatttttaaaatataataatttaaatttaaactcactacacatgtctcttatcttttatcttatattaaatgtagttatatcacataaaatattttctaatatagcaatacaaatttaaacatattgtacatacgaaaatagtcatcaagttgaaggcttcaaactttgctttaattgaagcaaagtacccattccctctgtaggtgatacggcttggaaaatgctcagccaatgacagaatcagttatggagtcatctgcaatcaaacaaaaaaaaatgcttatttatcataaatcgcataaaatcgcataaaaatcgcattgaaatcgcataaaaaacagagaacaaatggtgtaagtcatcgcaagaaaatcgcatgaaatcgccaaataatcgcacaattcttataggcacaactatcaggtgaacatcgcacaaaatcgcgcgtaactcgcacaacatcgctcaaattcc

SEQ ID NO: 345150 - DNA, 1170 bp, Cannabis indica
ggctggtgttgtcttccgcatcgtccttgattccccatttcttaagggagtatcacagctctccggttggggggcattctggggaacttcgcacctatcaacgcttgaaaggcgatgtctattggatcggcatgaaagcgaaggtgcttgacttttttcgcccctgtgagacttgtcaacgcaacaagcatctgtccatgtctcctaggggtttattacagccattgtcactaccagctcaagtttgggatgatctcactatggattttatcgaaggattacccaaatcggagggagttgatacggccttagtggtggtggatcggcttagcaagtacagccattttattaaccttaagcatcccttcaccgccaagtcagtggctgaagttttcaccaacacagtggtgaaattacatgggctgcctcttactatcgtctcggatcgggatcgtatttttctcagccatttttgttcggagttgttcaaactccaaggcacggagctccgccatagcacttcatatcaccctcaaacggatgggcaaactgaggttgtcaaccgttgccttgagacttatcttcgttgctttgcttcgaatcgtcccaaaggatggactaagtggttagcttgggcggaatattggtacaacaccacctttcacttttccttgggttgtacgccctttaaggtgttgtatgggcgtgacccccaacctttggttcacagcgggatctactgcggtcatggttgttgaccagtggcaggaagagcgagactctttctcgatgatttgaagatgcacctcttgcgtgcgcagcaaaagatgaaggacgtggcagaccagtctcgccggcaggttggatttgaagatgtgagctgaggtagaagcattgtagagaactgactccctcatttgatactccacatgatgacgcctggtgtggcgtgctgtctcatggcacacctacaatggggccattttgtaacatgagcatgccttggtgcttgatcattagtcaagtcttgcaccaagcacctcattggggtattttgtaacatgagcatgccttggtgcttgatcattagtcaagccttgcaccaagcacctcattggggttgggagtcttttgttgtttaactttctttctttgtatttccactcacat

SEQ ID NO: 345151 - DNA, 673 bp, Cannabis indica
aaagtttaggttagagttttccttttatcaatttcttgataatttcagatttggcttcttcaatgttttgatgatctttcttgtttcttgacgttgtttccaggtgttgttgaatcttcttgcttcctcgagctctgataccactgtaggaaattaaagcaacccgaaaatgcccctactacacacaacacccaacagtcaaaaaaataggggtaagactgtcctttttctttgatgcggatcacaagggaatattccctttttcaaaatgtgatccccccctttcaaaaccctacaaccattaaagcaatataaaagcctatttttatttgttgatgaaaaccctagccacaaattctttgtacacagccggccctatttcttcttcctctcttttctttgcttagaaaacgcagtagccttcttttcctccttcaatctttgaaacgcaccagccttcttcttttcttcttccttccttcttcaagctacagcagtagcttcaatggctgaaagcttgtatcccttcaaagcctgcaacacacataaaaccgagagacaagaaagatctaaaatgatctttgttgatttagtagagtaaagtcgaaaccatagcagaaaaataaagatgaacactacaaaatttaatttcggagttccccttgaaatcaag

SEQ ID NO: 345152 - DNA, 674 bp, Cannabis indica
gtgcccaaaatttcaatgattgagaatattacaactattagttccaacatcactttgtttattcaacactttttttcttttcttttcttttttctattgttttttcatcatcgttttttagataacataaataacattagtgatgttgaaaaatacttttataattcacacattgtctcaatcacccacttaaaataataatttcatccacacacaattcatttcccctaaacttatttctaagcttatggtataattcaagggacaaagatagagaatcgcaagtggattcaaagttagtagcataaagtggctaaaaacaattgagcaggctaagctcaaacaggcaaactagggataataaagataaagataagcttgaaaggctcaaacgatccaaaaaaaattgcctcatcattttccaaataagcattgtcaaggatttttcctcaaaaaaaataattcatgcaagttctatcctattcaatcaatcttaccacaaagcaacgtaaaataattatgatacaatccaactattgacaatttacatcaatacaaaaattttacaagcatctaaattaatttaaagagtaaaaaaaataaaccagacgatttaaaatttcaatccattccacaaataacaacagcagaaaaatcgacattagcttaattaa

SEQ ID NO: 345153 - DNA, 1061 bp, Cannabis indica
gaggctattttgccgaagtatgtcagattctttagctttcatttttggttactcttcatgaagaattgatatttgggcctctgccaactttcattgagacggattgctgttgtgttcattaaattttgtagataacattgatggcgggtcaaggacggaggaagaagaaaaaatttactcttggttgtatgcattggctcggtctgaaaaggatttggtttttgagtatgttcaatccactgaaaggagtgtgtgttatttatttatttatttttaacatttcttaacattatggttcttatttttttaagtgttttaaaaaaatcatcatagccacatatctctctaactattatatttttttttcattaaaatttaaaaataaacccaataattaaacccaaaaaatatctatctcttctttattatcgactaaatcatagcatacataacttatggtatatcagacactgtttcacatctcattccattggcagtgaacaattctccattgagtgtggcagtgaacaattctccattgagtgtgtgtgatatatatcaggtatatatctcctctatttattagaattatatttattcaaatgttttgtttataatagtattatatatcctcaatatataacaaagaaaaggaaattaaggaattatatttttcaattaatttgataagcaactttcaggtagaactcagccaaaagattttccagctaatttgtttccaaaagtttgaattattacgactaatcaccaacaatctgaaattagaggtatgttctatttgaattaatttattcattgggcttatatatttgtgtatttatgtcgatttttttttttttgatgaattactcttttaaaaataaatatgtttatataaatttaaatttaaactctatataaaataatactagaaacataaagctacagtctaatctcattaaccaccatcaatataaaatttaaactctatattaaaaaatacatttttttttcctagaaacataaagctacagactaatttcattaacaatcatcaatat

SEQ ID NO: 345154 - DNA, 587 bp, Cannabis indica
gccggtttgcagtgccacaaaaactggctagccggttttggcagggttccccaggcctttcattttctcaactttcgtctttgcggtgcctcggttgggtgtttccccatttccagagttagaataacccattgagagtatagcagaacctagggttttggttttgggtttcccgggattagggttttaatcatgtaacttacccggttttaaaatgtgattagggcatccatctagcacaagatttccgttcaggtcggccagcacacttgaattcaaaaatcaggtaagaactgaatataatgtgtgatatgattatctgaatgtatgtatatgtgtgtgtatatgcatgcttggattgttatttgcgctaccaacacttgtatagttatgatacagagtgcattggtatagtgagtgttgttgtgagtacgatacagtgataccaacacgagtacgggaaagtgctaaggtgtgtggtatatcactcagtggtactcagggtacgaaataaaccctaccaacactcgtacagtgaggtacgttgtgtatgtggtatagtggttgtaccctagtattgaacgttc

SEQ ID NO: 345155 - DNA, 499 bp, Cannabis indica
actttttatttgtttattttattgaaattttttttcttagtttatttagtttcaaaatttatttattcgattgccaaatagaaacaagaatttaattgatttgtacttagctacaatcctcgtgagaacgatcttacttacttcagtattacttgtttaaacaatatgtatacttgcgtgttggatttatcacaatattttttctgtttaagtcgtgcattgccgatttcgaactctgtttttataatactataatattgtagtagcacaaccattatttaactaatttgtaacttaattgcaactagaaataataaatgtgaatgtgtatctacaaaaaacaatttgtcagtggtattttttttgtcaatgatcgataattaattgtaccttaatagtaatatgtggagaaataattattagacctatgtaaattaactttatatcaactaatttagtatattaataaaactaaccatgttattgttgggttttatgc

SEQ ID NO: 345156 - DNA, 556 bp, Cannabis indica
ctaagggcaactccaatgggtctctataaacttaaaaatagtgagatttcaacactaagggcatctccaatagagaaacttaaatttggtgttaaatcaatactaaaaaactactatttcaatactattttttttttcaattccaaccaaaacactaaaaattacactaaattttatattctttattattttataatataataaaaatattttaatactaaatatatataattatttactttttcttctttaaagtattatttaattattaaaaacttttttttaaaaaaaaaaagcgtagtctacagtgtaccactaaatttggtgggacactgtaaacaaagacatttatgaggataggtttagtgtcctattggtaaaagtcatcctatcaatgagtttatctatagtgttctactaatattagtggtgcactatagaccactgtataatttttgttttactttttaataattaaataatagtttaataattaaatattatatattatttataatatatcttcttggtgtaacatatgcttttattatattaa

SEQ ID NO: 345157 - DNA, 737 bp, Cannabis indica
ttgtgagtgagtgtttatatattattctcttgttgtatatatacatatattatattacatgtgttatatcttcttctacctttcttctataatatatagtgtatatattgtatatgtattgtaacatttatttaatatctttgttggttcttgtattatattgcaatagagttgtaatacatcttgattttcttccattgtaataatatctctaacaaagagtattttgggttaaagggtattagagcatctctaaccatgctctctaaacacactctttagctaaaataaagagcgagacttaaaaatataagctccaaccatagaaaaaatgattttatagtaagaataaataaggaactctctacttttttgataaacttttttaataatatttaataaaaattattattacttttttattattttataaaattaatttatatttgaaaaatataaattataaaaatattattaaaataatcaaacaataattataatagagagcatagttggagcaacaacaataaaaatgaatttctattttaatttttagttattttagttaaaaaagaaatttttacaccaaaatctattttgcacattttattacatttttacccctacatgcctacatcaacttttttacttcccatctttgttttattacaaaaatccacttactcatcattcccatgcacagacacgtgtgccatcccccatcacacatcaatcaa

SEQ ID NO: 345158 - DNA, 583 bp, Cannabis indica
ttatttgattgttgtttcttggcgaagaataacaatttgctaagctagatcctataccggaagggctagatctagtagttcaacttgaatggagcaagtgaaaacctaaatttaggtttttctttgtacgtggaataggaatatttcatttaccttgcataacttataaaattaatgtttgaatagtgttctgcttgctggtttgaataggaatatattgagctaagtggtagaattaaatttgtgagtgttggaaaattctcacaagcttagagaatttttttgttatctctgtgcagaatgctgaattgatgctgtaacacctgggaaaaaacctaactagaaggaattagttattcaagtcatttttaccatattacattttttatcttgcaagcaatttttcgagcaacagtaatattaattttatcataaagagtaaaaaaaattaagcagacgatttaaaatttcaatccattccacaaataacaacagcagaaaaatcgacattagcttaattaataactaaaacaaacaaataaagcgaaacaacgaaaaataaaattaagcacttccctcaaac

SEQ ID NO: 345159 - DNA, 810 bp, Cannabis indica
aactttaataaagaagttatttttgtactaaatatttaagaagtgtcaaaactgtcaaaaaacgattttgcaactattaccaaactgtttaaaatttttcaaaaataaaatcccatgtgtatagaatataacatatcaacctgtgtgaattctcacacagaattaaacaattcaaataattcatctgtatctattttattgcttgattgttgcatgtctttcggttgtgcccgtgttgaccacatttgctgcacctgttatgtttttttgtatcccaatcagataaaaaccttcgtttccttggtcttccagatcttattttctggtttggtggcagaacaatgatatcttttatgttttgtggtacatcccatgttgtgtgattgtgtaccggatatgttgagccgctgtatgtttcaagccatgttcttgtcgtgtaataacctgaacaatagttgtaaacattcaagttcatctcttttataacagcaagcgcatgagcacacggtaattcgtcaagttggaatcggttgcaactgcatgttttctccttgagattgatgacccatgatctggttagttctaccacttcgaacatggtctcgtttattggctttacctgtgaattaagtcaatttataaaattgttattatgttccagaaacggaaaataaactattaagaaaccgtaatgcaacttaaagttttaagagattttacattttctgtcaatgagtccacaaagttgttgactaatttcttctctgatgtaggtgttaaaaatgttgttgttttctgtgcttttttcct

SEQ ID NO: 345160 - DNA, 706 bp, Cannabis indica
actactttcaattttagggttaaaaatggtcaatgagaataaaaatggtcatccctgacctttcttagcaggattggggctctgtggtcaatcacaatagaggtttgggtttgagagagaagattcgcaataattaagtataaattataaattcgaataagagtttatttttgctgaatattcgatttaattgaaattaagaatcataaattaaattggaataagattttctcttttttttgccgaatattcgaataagtagttaaagtaacttgctgaatattcgatttaattgaaaataagaatcacaaattaaatgggaataagattttttttttaatttttttttgctgaatattcgaataagtagttaaagtaacgatgttaaactcttccgttaaaaaacagaacaaaatgttaaaccaagaattgccgttagatagacacttttaatatataaagatatagtattataaataaattcttttttttttttttgtttagaaaagactattatattaatctgaaaaaacaaattacataacagtcattagatgtggtggaacttcctctaaccaaatacaatctgaatccaccgtaagagcaaacttagccaacaagtggacttcgttattagcagacctataaacatgagagatctgtgctcgtgggaaattggataatagaaatgtaatatcattaagta

SEQ ID NO: 345161 - DNA, 515 bp, Cannabis indica
ccaaggtgtgatcatagtgggaaaggagtaagctcaagggcccgggatgatcgatcgttctcgaagcaagtcagccaacatacctaaacaagaacttgaggtaagaaaagtattaagtattgtttatgattaatgatataattgttatagtctcgattatgatgaagattccgaaatgcgtttattgtgactcgattataatcgagaataatgatatatatttgttatgactcgaccgtgatcaaggtaacgaggagaagcaattattaccgtttgtgactcgatagtaatcgaaggagaggcacggttattaccgttattgtgaataaataatgattggaaacagtcattatcgttacgagtatttacgcttgaaactccagttaggtttcttacttatcgttcgctttatcgggcaacgatagtgacatacatagctcgtggataacgagtggtgaagattaaaacgatcattaccgttacgagtatttactcttgaaaccgcggttaggttt

SEQ ID NO: 345162 - DNA, 676 bp, Cannabis indica
tgaaactaaaatgaaagttttggggattttgccgccatttacccttaactttttactttttatgatataattatttataaattagcattttcgacatgacaaaatgcatcaaggtttgagttttgttagtctttaagaaaaatataattttttaggtccttattaaaaaataggtgatatttttaaaaatctctaaaaaaaaatgatcgtgtactttgaagatgattttcttttttgatcttttaatttttggtgggccctagacgagcttgcacctaaggctgtttgcagtgcgggtggtgtagtttttgactattttttaaaattcgtacatgcagtttttccaatctctaaaactgcacccgcactgggaaactaaaaagctgtagagactgcaccgtaaaaaatggtgcggtgcggttttcagggtttatgcggtttagactatcactgaataattaaactatcacaaatacaataaaacttgagctacacttgtcaaaaataccataagggttgagaatatatattaaaaaaaaagtttcaagtttcaacaatacaataattagtggattttggactggacattcacatatggacctaaataaatatcaaaatttgtatttttataatatgcagtgcggtgcagttcagtattaacaattcaaaactgcaa

SEQ ID NO: 345163 - DNA, 673 bp, Cannabis indica
aaaataatatttattatttacttatagaaaatttaaagaaacaagatataggttttgcaaaaatttaaagcaaacattatgtaacaaaaattaaaaaaagtgtgcgatcattaaatagaagaaaaaattattaaaaaaagtcttaatatatggaatattattagaaaaactaaaaagattatagtgaaactttttcttaatcttccattggtttagctgcttgaatggtgaattgattgtactttggactcatcgttcattttggatctacatacaactgaattctccattttttggccgataatttctcgtaattttttggacaaacaacctatgtttctataaaaaataattattaataagatttattatacttttatttatgaagatgtataaattttatatatttatctttttatatttacctaatatgactttaattgaactgcagtacatgagaatatattttctgcaacatctccgaacatcacagcatctagcaactcggtatcatcgtcgagttgtacatatatccttgcactaataatttatacaaaatatgtcacggttggtatgaatgtcaattaagttcaaatatcactttagttatgatgtgtttaccgtggtttaggaagacatcttttttcgcaatttggattttcacaatctgttt

SEQ ID NO: 345164 - DNA, 799 bp, Cannabis indica
aaatctaaatgtctactttaagtgaaaacaattcacttgtggaagggtcatcatcttcttcaacacaagatcatctatctaactatgacttatatgttagagcttcatctggtgcaatgaatgaaaagtcagagttggatctctatttagatgaccaagtgttacccaggactgatgaattctttgatatatgcaactattggaagataacaggatctaaatatcctgtgttgaacatgattgccagagacatatttgctgtgccggttagcactgttgcttcagagtcctcattcagtactggtggtagacacgtgagtccatcgagcaagacttcatcctactactttggaggcattggtctgtactcaaagttggttggcaattgacaaacaaggtataattatttatttcttattatataagtttatacattaattaatagtatttattatattattttaataattttttttacaggcacaaaaactaaactaattaccgtaaatgatcaagataatgatgtagatccgaatatggtaattgttttcatttttaaaatttataaattaaattatacttttattattaacatatttatttttttgcaggagccgtacacagtaaatcttgaagactagaagaacaacatataaaaagtttatagttaatttcatgtatttttttagaggagatttatttcatgtaatcatcatactacattattattgatgattatattagtggaatttctaaaatttggtaaattttttaatttttcaatagtaaaattacattt

SEQ ID NO: 345165 - DNA, 583 bp, Cannabis indica
ggagatattcttttttcagtgatatagaatcattgttaaaggatgtaacaagtatgttatctgaattttttagagtgtttttaatccatatatattgtcatatagattagttgtgcatattctttatatgaataaataacttatttgcctattttttattatttagaatgtataatcttttagctcgtaggacattattcaattatgatattggtctttgaaaaaaaatttagccatatagttaaagtggagaccatcacattgtaatttgagtttgtgataatcattattgttttggaaatttatccatagaaaattcaaattgagttcattcactttttatctatttatccatagaaaattaatttttttttctcaatagctaattagatcactgttgcgctgtagggctgcacataggtcggatttttgggtggttgggtttgggtttttggatttcgagtcttggaaatacacaatcaaatccaatttttgggtgtttgggtcaggcgtagtcgggttgggcatggtcaggtttgggtgttattgggctgagcccgaatatttcatttatgggataaaa

SEQ ID NO: 345166 - DNA, 707 bp, Cannabis indica
tgatgagctccctcagcccagccaacactggatttcctcttcttctccttcacaggctaggaaatgaaatcctttgggtagagcccgtactccacaaagttatcgtctgaggtcaaaaaagtgatattccgggcagcacccgacagctgagtgattctttgagccctatccctgagagctcgtgtgaagggtggacgaaaatatataagaatctgctggaaccgagtataggtggtgcccttaccttccaccatgtaatactcgtcaacaaatttcccgattttgctcaaggccttgtcctcggtgcccatcaaccacttgaagtctggctgggaaaaataaaagtatcctgacttgccttgcttgggagtatacttcaagtcaaaaaactagctaacctcgtgcggggatggcataccccacttctgggtgctgtagaaaacgaacagggcagacgaagaattgatgcccttgggagtcaattgggtcagacagagaaagaagaagtctaccaccttcctaaagtacgggtgtaaagcccgcttagtttaatttggaaattagcagttaatcatgattaattatgaaaaattatttatagctatttaaataatttattatactgttattatggaattcagaaatgcattgctatttcattcagtagttttcaaattttgcattttcggtgcccggtattttggaac

SEQ ID NO: 345167 - DNA, 532 bp, Cannabis indica
tgcatgtggtatagtggtcgtaccttagtgcaagaatatttttactcatttgataagccttgtggataggtgaatgggcgcctagatacaagtcggtaatatatcgtatgttatatgtttttcttactgagtctgttaactcacaaatactacttttgtgtgtaggtaaaggaaaggctaaagttgaacaacagtgagttccaagctcaggggatgattgtacatgtcgagacggtgcgacctggagagttccgtcttgagacgacttgggccttattttgtagttgttgtgcgacatgtctgtaaatattattttgaatgtaaagtttaaaaaagggatcctagtttcttgtaaatatatgtatatgtttataaagtttaaagtttactcgaaattttaatttatcacgattttcgaaaaaatcctttgattagcaaaggtgtgcactgcatttagaaagtcactatagcgtgcctaagtattagggcgttacaaagaggtctaatcactggaattgattatatcaatgga

SEQ ID NO: 345168 - DNA, 590 bp, Cannabis indica
ttcccctttaaaaccctaccacaaatttacttcccattcagattttctaccctaaaacagcagcaaccttgtttcttttctatcaaaatctcactttcaaaccctaactttcatcttcgaaaaatcaaacaaaaaaagtgtgttattcatggcttcttcatctaatccctcctcaagagcaaacaagagattggctagtgcaattcaacaaagggagataagagcaaaagcaaggcaagagcccacattattctacaatgatgaggatcatcacaaatttgtcaatgacttctcttcttggaatattctcaaaggtaaaatttgtgatctacctagccttgattatgtagattttagtcatcattttgatactctaggttgagcatctttcattcaaatcaatactccaatatatcttagactagtacaaggtttttatgcttgcattaaaccttgcttagaacctttaggagttaatggaacccttagaggaatggcttttaaactaaatgtagaatctctcaatgaaatcttaggagcacccaatagtggcatattgcttgaacccaaactctctcttaaaaataatg

SEQ ID NO: 345169 - DNA, 651 bp, Cannabis indica
ataaataaacagagcgccctagaccacccgcagttatatggccctcagcgagttcacacacacaagcgtccaaagttccactcgccaccgacattctagactttcagttaccttggtctgcacatggtaatttgataagggtgagctactaaactcagtaaggaaatgtgtgtcaggtagtcacataaataaaaataaaacacaactaaaacgtacatgcacatatttagacaagtagcaatacataaacttaattttatcactagtaactaataactagattctaagctaaatcatataataatgattatgcccaagtctgactttggcaaataaacccgagctattggactaaaatggcggagggctgggttcagtaaaatcgtacccactattaaatggccccctatctaccgtatagacccaatagtccagtatttaaccattatcttctcggtcaaatcatgtcacataaactataatctgcctaatttaaataatgccaaactactatacattatttaaataacataacaatcataactaaataatgtgaaacttataaacacactatttacatacatacttaaataatatgaatcgtataaacatattatttaaatatatacctttagcaatggccatgctcta

SEQ ID NO: 345170 - DNA, 566 bp, Cannabis indica
ttattttagtgtatttttactgcaaagtttggtagaaaacccttgcttgtcttatgtgaatattatgcagtgctttgggataaacacttattgttttatcattgttgtgacatagggtcgagatcatcggtcatagttctccacttgggttggccgaaatgtgtgaacctggattaaaggtaagaaaagtatattgtactgcttagtacattgtgtgtaatacaattactattgcaatgaattgattaatattaagatatagttaatactgttatataatgaaaagattgattggttgagtattgataatgtgatgatattatgcatgtgatatatgggctcacctaattaggtgattcaattttcctgactacgtactgggcataagtacgacgttagtgatatatgatgagtaccgagcgtaagtacaggctcacctgattaggtcatgtgatactcctggcgacgtaccaggcgtaggtacgggcatcagtgacatatgagtatcgaacgtaggtacaggctcacctgatgaggtgatgtgacactcctggcgacgtgtagat

SEQ ID NO: 345171 - DNA, 777 bp, Cannabis indica
tattgtgggcaggaatgtaacaggttaactcgcccaggtaggcatcctggtcgagagcccgcaggcgcgcctcggtcaccttggacggagggctcacccacctggcaaccaaggtaccttgccttctatgaggaacctcagctgtaagttccttagtgacgtactccacgatctcaaccaggacgtccccaacaacatcgactcgctctccagcctcattttatcccccttagtttgggggtgcaaccgcctcctcttcctctgactcgaagggactgcttggatggacgtcgtgctgctcctcaatttccttgacctcagcgtccccttcatgatccccctcctcctggacggttggatcttgttcggtgttgggcaaagtggcgtgccgagccacttgagggtcagatgcattagcaatgaacgttgtctttttagtgtgagccatcatcctatggctgggaaaaatattcgagtgagaatgtctttcactggaagaaggtgggctagaatagagacgaggatggtcctcgtgcaagagttgaagcaagtcctagtcgattcgatgttcgctctcccaaaactcacatgggttcatctaacaaagacaacacacaagatgagtgtttggtcagaatatcgaacgttaaaataagcaaatatgtcgatcaggagtactcaacagattaaagaaaaagaatgttcagcgaaaagtcaaaactcagaaagtttgaaactttctcgagttaaggaaaaaaatttcatgaaacttagaat

SEQ ID NO: 345172 - DNA, 1236 bp, Cannabis indica
acttacaatcaagaaaagaagacaaagtcaaaagcttaccaagagttcaaaatcgcttaaaatctgctggaatcgacaagaagaatgagaaaaacacagcaatcccagctggttttgagggtttcgaaagagagagacaacttgagagtgaaatgcaaacttttgtctaacttttgattttggcataaatgaataaaataattgattttccttattttattaaattgtttcagccatacaaagctagaaaaatcagattaatccacaaaaaaacaaagcacatatgggaaaaatgacctttttgccctctcacattaaattgacataaaagggtactaagggtattttggaaaattctaaattcccgactaatctcaacatttccaatatctaacaataccgccccgctatactaaaataccaagatgtgattctactgagccatacaccgcgttccaatgttgccgggcactgaatatgcaaaaatatgaaatttctatatatgacatataaaatgcattttgaattcaaataaatcatcataaattaataattgagaattaataactaattcatagttaaaccttacttatctgctaatttccaaatttaaactaagcggtctttacagataatagagcctcttcaaacattttgtttaagacaacatacgtgaatatggggctccaacttaaagatttaatcccctgtactcaattggtgtatggtttttctacccaaagtgttgcacctttggggcaaatccatttacccctcaatgttgggcaagctccgaagagcatgactgtgatggcacaattcctgataattgatgttccatttgcttttaacgtcatgttaggccgaccagccctatatgaattgaaatttgtcactttagtttttcatttgtgcatcaagttcccaataaagaatggggtagggtgcctaaaagggaatcaaaaagttgcacgagaatgttataaccttgccctgaccaaggtcaaaaaagagaattcctccggccaaagtttggacaaggggaaaagtactgctcagtaggaagtttcccaaggcgaggacgaagatgttgatccctgacttggggaaccaaatacaaatgtggggccagtagaataattggaagagatagaaatcgacccaaatgtcctgaccaggaaactcaaaattggcaaaggtttgttgctcgaagtaaaattagccttaataaaattt

SEQ ID NO: 345173 - DNA, 982 bp, Cannabis indica
gtggaactgcaaagacctaagctaaggtcacactctcgtaggtgcagagagacacgagagcagccgccgccgccggtagccaacatttgcggtggaacaactcggcaatggttgaattgaaccgaaaacgggtttagctaaaaacccactttcacgtagttagttgttagacatatgtgtggtacttttggccacatcatatgcactcaaatcaaaatgttaacataatctttgttaagaaacaatcccctcaaaaaaaaaccataatcacatataatttcttctctttttcttttcttaaagagaaatttgccatagatgcttaaattagtttcttttcttaaagagaaatttgccatagatgcttaaattagatttagccacttaaattatgctaatctattttttttatcataataaccaattttattgctgaaagtcaaacaatatattggtcattaaggaatttcttccaaccaagaaatctcgttttccatctgtagtgcatatcttgctaactcatgtgcagcggtattaccatttcgcatcacatgaagaagacatacacccagaaagacaaataacaaagacctaatagatctaacaatacaaccctattggaaaacacattctaaagaagagttgattcaattgacaatgattttagcatcactctccacaaaggaaacggagcaattccaaacaccattttaaaacataagaaatagccaaagcttcaacttctttaaaggagaaaaaaccagccaagattagcaaaacatcccaacggaaagtcatcagaatcacgaaccaaggcccctaagccaatagtactattttcaccacaaatagcaccatccacatttaactttagcgaacctgccggaggtgccagacctggccagggcattgagcagcttgggccattgtacaaagccccaaaattaaaaaggcctattttttttatatccctttatatata

SEQ ID NO: 345174 - DNA, 883 bp, Cannabis indica
aaactagttttttacctcctaatggcctcgagaaagctgagaccttatttacaagctcacccaattaaagtattaaccaaccacccgctctggcaagtcttacaaaaactagaggcgtctggacgacttcccaaatgggccatggagctaagccaatttaatctacattacatccctcgcacttccataaaaggacaggcgctagcagacttcatcacggagtgccatgaagcagaggctactgctagcatacctacaccacaagtcccggcgtggaaagtatttgtggatggcgcctccaacgagaatgggtccggagcgagggtagcgatgatatccccaagcggacttcgactccaggcagccctacggttttaattcacagcttctaacaacgaagccgagtacgaagccctgatagcaagactgagattagcaaaagccgtgggggccaaaagagtggaagtctacagtaattcgcaactggtagtaaaccaggtgtcgggagaatatcagacgcgcgaagaaaagatggtcgcatatgtggcaatagtccgggaactgctccacgagctcacggactatagagttgaaagaatccccagggaaaagaacgctcacgcggactgtctggctaagttagcttcatacagtaaaattgagaaactgagggtagtacctgtggaacgcctggcggagccaagcatcaaagtcaaaaataccatagcaacagttgagcaagagcccagctggatggtccccatcatcgaatacataacaaaaggtgagttgcccaagagaaggcattatccagaaggatacaatatcaagggcaccgttatgtgatgatggaaaaaaattctctaccgaagaggactcagca

SEQ ID NO: 345175 - DNA, 937 bp, Cannabis indica
aatcaatctctaaattgttgataattgaagataacatctgtctaaaaattatagataagaaaaataatgatactcatgggtagattttaatcttcctttgcttcaacatagacaatagtgtaatttttatattttacaattttcattctagtcgagtccgcatataattgagttgtccattttttcgttgataaattgaatatagtagtgtcgagtcacgtaaatattagttttatttaagtttcagtgaatttttcattttagaatttggtaactaattttgaattattatttgaacgacttgataagtataccatgtgtatataaacctatgatatgcacaattgttattaataataaataataagctaatcttaatatattcatactcatatagtaagttaatctcaatttgaaaacatgtgtatgataacattgaatattatttaactaaaactattataagaaagatgtatctatctttcttatcacttttagacacatataaaaagaataaaatgtaatatcttactaattttgtgttgttataagcatgtctaaaaataaaataaaacttttaacttttatagaatgacaaagtaattaaaattcatgatacaatcaacttgatttggaataatttagtgctcgaataatttagaactataaactgatgagagtagtcagtattattaaatacaggaatactcatcgttctttgaagagctttgcgaggtgaaaagacaagtaggtgtttatgtctaatatattatatacagaaatcattattcaattttaaaaaagatgaaaaaccgtagtttttgcaaatgtcaattatatataagaaaatataaaacagtatgcgtctgcagaagcagaaagtaattctgctacagcaaaacaaaacaggcaaaatataaaatatttagcagaaaaa

SEQ ID NO: 345176 - DNA, 532 bp, Cannabis indica
atcatacctaagatcaaagcttcaagatttggataaaagaggttgagaagagagaaggaggtttgggaagctttcggttccagagagaggcaaatgatcggcacgatagagagggtttcagagagagatagggggcggcacgaaacaaaaaacggtagggtttggctgggctcttccatcttttttaagcccattttttgagaactttttatcccagttcttacatataaattgggataaaaagtttctcttaaatgttaaggctgtgtttggaaaatacataaaaatgacccttccaatccagttttttgtttatttgccaaacgagacccttgttagaacttctaaattttatttctttcaagctccaaatataaaagtgggattaaaagttacaccatatcttttatcccatttttaatttttcaagtgtaaatagtgggataaaaaatcccttttcttgtagtgattaatgttctcattccacttattaaagttagatcattcagcttgttttcagtcaacagtgata

SEQ ID NO: 345177 - DNA, 767 bp, Cannabis indica
acgaaatccttttaaggggggaatagttgtaaagaccgcttagtttaatttggaaattagcagttaatcatgtttaattaggaaaattatttatagatatttaaataattatttatactgttattattgaattctgaaatgcattttatgtcatttagtgattttcataattttgcatttccggtgcccggtaacatggaactcggtgtttggctcagtaaaatcacaacttagtatgttagtattgtgggacggtttattagacattgggaatgtcgggattggccgggaatttagaatttccccaaaatacccctttagtgctctttatgttattttagtgtgaaggggcaaaatggtcattttgccccattgttagtttgtcctttagtggactttatttggttaaattatatggttttaattgaaatgtgttggctgaaataaggttattatttgtttatttactctcatttcattaaaagtaaaaagttagaaatttttaaaaataaaaaaaaaaaaaagaaaagactctctctcttttcctcttgctttcggcctccttgagcagcaagaaggtgggattcttcttggtaattcaagctctttttagcaagttttgtgatctttgattgttggtaagtttcttcatcttgctatttgaatttcttgagattttttgaacaaagtgcttaggttgcatgctagtttttaatgttcttgctgctgtgttttgatgttgttttcagaggtttatttatgattta

SEQ ID NO: 345178 - DNA, 689 bp, Cannabis indica
gggacatatagtacttatcacatttgttcacacattgatttgttcttacctattgaacctaacactagtaaagttactagtattaagataggttaccctcaattgtgaactgatttagggagttttagttccattaaatctctagttagtggctttgtaaatgaatccgccaagttttcacttgatctcacataggatattgagatgactcctctttgaatcaactcacttacatatccatatcttagactaatgtgtctagacttcccattgtatactcaactatatgctctagccaatgttgcttggctatcacaatgtatcgatattgtagatacatcctctttgataattggaatctcaatcaagagatctcttaaccattcggcctctttctcagtggcagctagagctataaactccgcttccattgtggaatgagaaatgaaagtttgtttcttagaccccaaagaaaccgcccctccacctagggtaaatacccagcctgttgtggacaaattatccccaaggttggctatccaacttgcatcagtatatccttccaaaatggaaggaaatttggagtagtgaagcataggtttttgattttctttagatacccaaaactctccctatcgccttccaatgattcacacttggattactagtaaactgttgggttttatgcc

SEQ ID NO: 345179 - DNA, 1680 bp, Cannabis indica
tttatgcacaaccctacctacaatatttttggtcaaaattttatacattataatatacctcaatattttaaaatggttttgaaaaaattattttaatttatatgttaatatatgaagaggctcatgagcagccaggtgaaaatgcgaccaaggcagttaaggaaaagttcgagcgttagcagaatgctaacaacaagcttgatactttatgttgtctaacatggtcgacaccttgaaaacaaggtttgctaacactctcatggctgcagatatcattgaactgttcgagatggcatcagatcaaactcggtttgaggcgaccaagaatttcatcaatgcacggatgaaacctcatcagaatgtgtgtgatcacctgcttcagatggcgagttatttctaggaagctgagaatcatggagctattatggatcaggaaacttaagtgagtttgatcttatatagtttgactctagcttttctgcccttcacctcaaactatgtcatgaacaagttgacttttgacttccacaagttaatctacaaccttcagacatttgagaatttgattagaggaccacagaaaggaggaaacaaagctcctagttctagcactgctaatggtacggccaaggctgaggcaaacactctacttcgaaacccagcaaaatagaagaagtggaagaatagcaagaagcctcataaagctgttaacacaactaataagaaaaaggcttctataggaaaaaggaaagtactcctattgcaacgaaaaaggccactataaaccccaatgtcctaagtttttggtaaagaaataaggtatttctatctttgttataaactcatgtgttttagagaattattatccccttgggttattaattctagatctactaaccatgtttgttttcttcttattttagctcaagctgcttaaacttggattgttattctagcgagttgagtcggatggttagacagaaggatggagattgtccaagtgaagatgaagctcgaatcttctttatttttgaattaattgtttaagtttatgaacaatttagtttcaattttagtttgggattttattccctatttcatatttatgcagaaaatttattgtgacattgttgagaatgttaataaaattttctcttcaaaaggtttttattatgaattgagcttcgtatttactttaaccaattgtattttatgtttatcatgtttgtatgtgtttgtgttttattattgatggaaaatccagagaataatatcagttaaacacatagaatttaaattcagtgtttatgaataattattatttcttaaccaattattcagattttgtttaataaaaagatcatttgatctgataggggtggaagaagttaagaaataatgtatgcagttcaaagatttttttatatcttttgaactatagattatattcataactccacaagatctctataacactcaggggtggaataagctattgacatatgtagttctttttttgaactctagacaatactcaatacaccacagtatctttatgacacacatattttgattaagactatgggtataatataatgaacaaattaaataaattaattagtaacttattcttgacattgtaattgtttccaattaacatgttactgtagtaatagaaat

SEQ ID NO: 345180 - DNA, 675 bp, Cannabis indica
ataacataaaacataataacatctcgggttataattaggcccccatacacccaaccataaccttatccccgtgtcccacatggtactgagtctcgaacattcatacggtaatactatcaaccatagtgtcaggttatactcaatatgccagtcatactctagccatattgatgtgatagcatcgatcagtatttcagccaacattcatttatcagtaatcagtacaactctatgtatactataactactatcaatgtactctaccaggcataaacaatatgtacgctaaatatgtaaatacatatgcataaaattatactaatcttactttgtttcgaattcaggtgtgtcggtcaacctgagttgaacaactgctcggcgaattacaagctcctaaatcacatcgttcacaacatggataagtgacacgctaaatcacaactggggacttaggttttaaaccaaaaatctatctactgaaagttaacatgaaaatgccctaaactattagggaattttccatccaaagctctaaaactaacacaaattgacaacacaaaaaatttggggaacccagcagctgatccggttaaccggttatacagggcctgtaaaaccggttaaccagtttacactagaaaaccccaaaaaattgaaaacctaaccaaatcgatt

SEQ ID NO: 345181 - DNA, 638 bp, Cannabis indica
tttgggaagaacgttggtgatttcttgcaggtgacctccattctctcggttgagtcccaagatcctcctcattctcatgagggatttctcattcataagttttcggttatctcccatcttgctgttcattctgattttagggagtgtctcattttccctagattgttcttcccagaccttttcctgtctcctagtgcacgagccacgaggtatgccttaattttgagcatttgtcccctgtgccgccctggccgaggctgcatcacgttctaactcagtgtttctatgctgcaccttttccaaacggcgtctcaagcggcaattttccatttcataagttctttctctcatagactgggcacctccacgattgagctcttcatccctcgtcgcggggttctgaccactcccacgctgagttttcctcgagcgtgttgtctgcgcactagggccacccttaggttgagcctcctggaatgggtggtccttctggactgcgggttggtagaacttctggagcccatgggctctttcccagaacgatgattggtttcctcatgtggggtgttaacattttctggatttttggccatgaaggaggtggtttttcttcaaaagaagggagtgttttttctgag

SEQ ID NO: 345182 - DNA, 874 bp, Cannabis indica
aagaatgcgtcgcaccagaatcaattagaacagtcaataaagtaccagcaacagaaagctgacctgtcacagtggaaggaccagcatcagcctcagcctgagtcagggcaaacactcgagcaggagcggttgtaacatccttcttttgctctagtcgtagcagctgtggacaatttctcttcatgtgacccaccaccccacagtggaaacaggtcctggcctgacactcgccctggtggcgccttttacacctcggacattcaggaaaagtccgccaattttcgttcccaccaggacggaaaccttggttaccctggaaccttttgtttgggcctgtagctgataattcactaggtcttttcttgcggtcaccgggatcagtacccctaccagaaccagcacctgatgtttgcttccatgaatctcttctggcaatatttttctttcgtatctgagcttctgcaccctcagaaactagggccagttcaactatctgagcataagttcgagcaacccccggttgtttagaagcaacaatcacatctcgtgcgatatgttcatccaaccctcgaatgaactttgctttcctagcagcttcagtagccacctcatctgaagcaaactttgccagtcgatcaaacttagtggcatactctgtcacagtcatactgccctgagtcaatcgtataaactcttctgcctttgctgcccgaatagactcattataatatttctcataaaacaaggcccggaaggcttcccaggtcatgttattcagatcatgaccctgagatacaatctcccaccaaatacgggcatcatctcgcaacatataaatagcacacctgacccggtcattatcttcaacccgcat

SEQ ID NO: 345183 - DNA, 1266 bp, Cannabis indica
tgctctttcttccttccgagtgagtagtagttgggcagtattacgggatttgaagtaagcattatctgttaaacataacaaagtaaacaaatttaatttttcaatcccaaaataattaatatcaaataaaatcacattaccacaatataaccaaaattcgatgtaccttgtcgctgttgggacccccattgtctttcacaaatttgtaagcggacttacattgtttactaccccaaaaatcaacggggagcactgttcggtcaacatatccaaagttccactccacgtgagtcaagtacaccaactgtgacaaacaaacaatgtattagtaatacattcaactaataaatcagaatattatattataaacttaataaacacattcacataaatgaaagataacaaaatcaatgtacctggaggaataaggtgcagccagacacattcttcgtatgcttatttcggaatctgaaaattgagttcatcagatacctgaacccgacagttgcccagttcttgtggcgaatgtccctggtaaccctaagggagtgcaggtaccccgaagtgatatcgcagcccgtttttggcgcaaggactgtccctatcaccaccaaagaaaatttaatcagaaataggctgtctgcctcaacgcactccaataaagatttctccaaccctgtcaacgacacggtgtagtcgacaacgttcaatatctcctccagatatcgagtgtcactatcaccctcggtgactacaggatcccctccgtcctccacccccataacatctccgaacatcgcggcagataagtgaatttttcttccatacaaatccagtatgctagtggttgggtcaacatgtttgattaaccaactcactagtcgggtgtcaatgtatggtgcatcctctctgatgaatgatccaaatccagcattttggatcacatctttctgctccaagttcaggttcttgcaaatccgcattaaacggttgaaggagcatcgaccgtacacagatgcttcttcactttcagaggcaacctcttcctcatccacctccactttcttccccttaccctcaactgcctttgctttcctccctcttgtttgcactggcttcttggcgggagtagggttagggtcatagtttctccactcagacttctgatcgtcggtgaaacctttaaattgcacttttaatttatcagtaacctgaaatatgaggcaaacttacatcaactcaagagtacatggaaagcatgtcaaa

SEQ ID NO: 345184 - DNA, 1357 bp, Cannabis indica
tggttattttcatttcaaaaattttcagttaacaccccatttttctcaagcttccctctcacctccccccccccttttactgttttttttttttcataaatactttcatcctacatctaaatggttcttacacggtcatccccatcatctgctaaaactaaaaatcccccaaaacaaccccagaaaatgaaacccaaacaaaaaatgggtaagaaaaatctcaaagataacccacctagccctacttctcctattgctcctaaaagaaaacaagctactggaacttcgaagaaccctcgagggaaatgtcctcgaacttttgtggagaactcagactccaattttgagttggaaactgagtttgtaaagtctcttatgtctgtgaaggtattttcgtattgatctagtgttgtttttgggttttttgcagttttagtttatttgttcatatatctgtatattagttggggttttcattgttcatgttaattttttcatttcttgttttttatgattttatgtttatttcttgttatttattgttgtttttttggttttctttcgtttaattttaggaaaagggtaaatcccctataagatttttccatcaacaggtcttgttgaggaaattattggcaataggattgtagaggtgtgtgatttaattcattctgttctatttttttaccttgttttttgtttttattgattatttttcgtattattttatgtttgttttagtagtatttttgttgttttttttaggattgggaatccaagtacacccgatctcaatactaccattctagagtagtgacatctggttattactctgtaattgaagatataaaaaaagttctaactaaaacccaactagaacttttttcaaaaactgtgtttggatattttctctgaattccagagtacattatccattatcaacttcttcatggtttgctgttgggggaggttcaacagcctaatgaattggagttttcggtatgtgtccaaggaaaatatcttaggtttagtattaaggagttttcgttagttattgggttagattgtcaaattgattctgctttttatcagttcaagcaagatggtaatacattagttaaacagtgcttaaagggttacaaaaaaattaccaaggatgctatttaaactgcctttattgctgacaatctcaagagtaatgacgatcttgcagtcaagttggctgtgttatattttgtgcagtgttatttgttgggtggtcctccgggtaaagctgtttcgatagaggaaatatatgttgttgatagtggtcggttcaatgaatttggttggcataagcactgttttgatatgacta

SEQ ID NO: 345185 - DNA, 589 bp, Cannabis indica
ctttactgtttgtgtgatcatctgtttaccgctttccattttaggcagtatgcaagcatctagagtatttatgtgttatgtgatgccatgctttaaatgctatttgattaatgaatatttgtatggggtaaatagttgagttagggtttaaggcaataagcgcataagtgtggtattggtgcttaactcgctagggttgttgattataggggtactagtaatggaccctccacaatcatctagaccacagggcgagcaagtagagcctggggctgcccaaaccaatccaccggcaccgcctccacctccgcagaatccgggggataatgcggaggttggtaaggctaatcctcctgctgactggcaacagatgttttaagaaatgcgaagtgtcatacttcgtcaagaagaagagttgcgactattaaggcaaccggcaccggctgcccctgttgatcaagtgttaccacccaagcaccctgtgcccgagtggtggggtaaccaggggtttgttatgctgcatagggactcgatatttgagcggttcgtgaagctgcagcctccaacgttttctgggaagtattgatat

SEQ ID NO: 345186 - DNA, 958 bp, Cannabis indica
cagctagacgaactaaaaaatatggttcacgacatggctggacaaagaaataatgatcttgagctagagcgaggatgcggaactcttttctcgccggagatcaatctcatgccactgccccacaagtccaaaatgccgacgtggacaatgtacatggggagagaagatcccctttcccacctcaattacttcaaaatgcaaatggatttgcaaggggtacgaggagatgtatgctgtagaatctttccggccactctgtcagaagtcgctcaacaatggtatttcaagttggctcctggaatgtttagttcatggaaaaccttctctttggaattccatgcacaattctcctcctcgcggcaactcccattgtatttgggagacttggtcgaagtcaagcaacgaccaggcgagccactctgggcatacatcagcagattcatgaaggaggtgaccaaagtttcatgggtaactgaggatggaaagttatccgcaatactggggggcatctaagtcctcggtgaactctggaatgatataagaaagaatcggccagtagactcaatcagtgatttccttgatcgagccaaaggttttatcaagctcgaagaagctattcaacgagcagaaggtgaataaaagcctggaaagtcaaaggctccttccactggaacatccgcccaacttcctcaatacccaaacaattcaagctcagttggtaagcgctccaataacaaccataagcaagggaatgggaagaaaggaaagtttactggcaaatctgaacaagctccccgggagaatcatgccaaatacactgcgttcattatcctgactgaagatatagaaagtgtatacatggcaactcagtcactggccccgtataaaaagcccatgcccatgaagaaagatgcaaacaaaagggacatgacaaagttttgtcggttccacggagact

SEQ ID NO: 345187 - DNA, 1161 bp, Cannabis indica
attaattataaacattaaaataatacacttataataaaccaggatcccgtttacaaaaataattactaaagtttgtctcctagcaactaaactaaagagccaagcttgagttcataaactcaaagcttgctcaaaccttactacagccaccaaaatcaattcacaacaacataattcaccataattaaacttcagaaacacataccaaccttactccacaactcagaaccctaaatactcaaaatcatgcataattctaaaattaaagcctttaaactaaaaaaggagttgctagggactttaccttgatttggatacacttaaagcttgctggaaattactagaactgatgaagaaaatcagaaccctagctagtttctatggtgttcgaaagagagcgagaattttggagagagagtgatttatgtgattcctcaaattgataaaaatgaaaataaaataaagaaaaggttttatctaagtaattaaagaataaaatcatattatacatttcaactaatgtcactaaagcacaaaaataccatttaggcaaaataaccattttgcccttcccataactaaaaagtcataaaatcacttaggggtattttggtcaactctaaaatcttgactaaccccgacattcccaatgtctaactatattgccctgctatactaaaaattctaagatgtgattctaataaccaaacattgcgtgtcaatgttgttaggcacaaaacatgcaaaaatatgaaattccatatatgacatataaaatacattacgaattcaaataaatctccataaaatgataattcataactaatatgcaagttccataattaaaccctatttatttgctaatttccaaattaaagttaagcggtctttacatcaagtcaagtactcaatcatagtgagtaagacagtggtaaccaaactcgaaggagagaatcaggcttagatcttgataatactctatgacaaaaatgaataagggttagagatctgagtggaaggagtcattatattctgctgcaaccaatgtaaggttttctaaactcttatgtgtattaatttatattttagagatattcatatttaggatgttcatgaaacatacatgttagtaaatctagatcctaggtaaaatattcccaa

SEQ ID NO: 345188 - DNA, 971 bp, Cannabis indica
ggggttgttgattacagggttatttatgaaaatggaccctcagcaatcatctagaccacagggcgagcaagtagagcctggtgtagaccaaaccaatccactggcaatgcttgtgcctccgcagaatccaggaataatgcgaggattggcaatgctaatccgcctgctgattggcaatcaatgtttcaagaaatacgaggtgtcatacttcgtcaagaagaagaattacgtcggttgaggcaaccaataccggcagcccatgtagaataagtgttaccacgagctcctgtgctagtggtgggtaactagggatttatattgccgcacagagatttggtatttaagtgctttgtgaagctgcagcctccaacgtttctgggaggtactgatataatcaaagatgagcaatggatgagtactagcacctgcatcctagataatatgggggtgaggggaacagagagagtgaattgtgttgcctttatgttataggatcatgcccgcatttggcgggatattgtggggcagactcgagatgttagcacgatgacttggaatgagtttaagagtctgtttgaggaaaaatttgacaacatcgttgtaaagacttcacacatagaagattttgtgaagctgactcggggaaaaatgactgtggccgagtacactttggagtttgatcggctatctaaatttgttggtgatctggtaccaacagacttcacccggaaacaaaaatatgtgaggggactgaatgccacaatcagtcgggactggaaaattaccaccgctcacgacactttgtataagaaagtggtcgaatcagccttgatagctgaagaggcagagcaacacgtgattaaaggacaaaccgcaaaggatgtcgccatggcattgaatcctcttattagggtaatgtcagtaagggtaccgacagtggtaaccatgatcatgttggaattattttacca

SEQ ID NO: 345189 - DNA, 714 bp, Cannabis indica
ttaaaacgatgatatgtgttgatttggatgatttcatgttgatctgtgtgttatatgatgattgattgatgcttgtgaaatttaatgaaaaatattataattttcatttctgaaattatttttgttggatattttggaaaaaattaagaattcatttttttacagaactcaatttcgattttatttgaattagttatgattttttgaaaaatcgaaaaaatcagaggaggtcacaccccatacgcgcacggatccgagtgtacactcggtcacgcgcgcatcagacaaagagatgtccgaattttctcgaacgggtgtctctcgttttgtctcaatgccaggcaccgtttgcggaatggctgcttgcagcctcaagcgccgagaaacctcggctagactccctctcgtgcgcgcgcggatggtatgctacagataaattctagtcaattgtacccaagggtcccttccatttaaatcacatcgtacaaggctgagtatcagcaaagtactgtgtcaagtacatttacgtagacatatagtgagtcctaagttgttcactcgactattatagactgattacgcccaaacttgtcttcacaaagcgaatgttgtagtgtagcatgggcggtcgtgtccacagagagatatcttatcaaaaagtgattagtagaactttaagcgcaaaaagtaaataaatcgttggtggtttttgag

SEQ ID NO: 345190 - DNA, 1364 bp, Cannabis indica
attaaaattgttttaattaatttggagggtttaaaagatctcttaaataaaaagtttatttaagaataattaattaaaaatgtcttaattaattttgaggcttacgactatcctataaaattactaaaatgccattgctgctatggagattagttttgtaatttaatttttaatttcaaaggttgtaaaattagtaatcctcaattaatacctcggtcatcatcattgtttatttattgcttttaaataaatgttcattaatagttgattaataacatgctcatgcattagtgaataacatgacatagataaaaatctcacacaattatattattatgcatctcatagtagaaacatgagataataggactgtcctatgtgtttacatatttataatttttgaaacttaagcatgtaaactaacttattttaattcataatgaacttgataatttaaaagagttttatattatgaattaaagagttaactcagatttaataattatggtgagaaatttatttataatttgagacttttattataaataaattaatcataattattcaagttgttgacatgtgttaattctaagaattaataaaccaaacacattaatctaaaatagtgagtaggagaaagagtatatgtcaatgtatgtgacatgcgacttccattattagtcaataccgagggagtatagactggccttgagacaagtttattttcatctccctaagataagagaaagtgatgtattttagtgtgacatcaacccttaaggtgacacactaagttaagtcatgaattctgaaataatgagttacactcacaaagtgcaactaagcttcatagtggttagttgttaaagtggtcaaaaagcagtactttatattttgaaaagaaaatatgagatatttaggtttcaaataacaaagatgacaattgtctcataaactcaatgaaattgactcgatactgaccctaaggcggtgataattgtcaaagatttttattgtggaataacttaaataatattttatgtattttacttgtatgcgctcatgcatcatatttacagtaattttaaaatgatatttattatttattctatcactttatttatttcaaaaatatctactatgccaaattcccttaatgttttactagcaattgaaaattgaatggtgaatatttccttaagtagaaatctaatttgaatatgatcttagtttgtgagaaccacacatttgtctttactaagtagtgtctctatcaaaactcatgtaaagcacataattacactaatacatgaggcggagacacataagtctattgtagacaagaggactcaagtgaacattat

SEQ ID NO: 345191 - DNA, 1031 bp, Cannabis indica
tggggaactcactatgagggtgaatgatcaaaaagtcacttttaatgtttttaatgctatgagatttctggatgagatcgaagaatgctcccatttgagtgtaattgattctattgtggctgaaagttttcacaaggaagtgtggaaagatgaaaggttgataagttctcttgaagagcttgaagctttgagtaaagatgaagaaacccaagttgcttgagttgagccaatgcagcctttccctaaattcaagagaccttttgactctttagagctgaaggaaagcaatttcaagcctccaaaaccttccatccaagaaccaccaaagcaagagctaaaacccttgccaagtaacctaaaatacgcctatttggtggagaatgaaatgctgccagtagttatttcagcgtggttagaggctgaagctaaaggtttcttgctagaagtgttgaagaaacataaaagagcaattgggtggactatggcaaacataaaaggcattagtccaacgatttgcacacacaagatactcttaggagctggctgtagtaactccattaagcatcaacggaggttgaatcctatcatgaaggaagttgttcgaaaagaggtgataaagtggctggattatggtattgtgtacccgatttcagatatttcatgggttagccctgttcaatgtgtgcctaagaaaggaggaatcatggtggtggctaataagaacaatgaattaattcctactagaaccgtgattggttgacaggtgtgcatggactatcggaagctgaataatgccactaggaaggatcatttcccgctgccatttattgaccaaatgttggatcatttggcgggtaaagaactctattgctttcttgatggttatttgagctacaatcaaatttctacagcgctagaggaccaagagaaaataacctttacttgtccatatggcacctttgcctttaggaggatgccatttgggctacgcaatgctcccgccactttccaaaggtgcatgatggcaattt

SEQ ID NO: 345192 - DNA, 488 bp, Cannabis indica
aaaagaaagagtttttaggggcatatttgttaattaagatactttgtttggtctaattaataaatatgataaatgacaatattatttaataaatatttatagttattaaatagttaaaattgacatttagatggttgaatttgaaaattggcgtttttgagaaaatgagatacagaaatgataaaacagcgaaattgtaaaagtgaggcccaagtccactaagccatggccggccatctttgtaggttttatcacaatatttttattattttaatgccaaataaatcaaacctaaccctatgtggcatgctataaatagatagtgatggcttcaggaaaaagtaactttttgtattttgtttcctacagagaaaaacctgagccataactctaacctagcccccactctcctttcttcttcttcattgaatatttcgaacccacttagtgatagagtagtgcccatacacagcaagtagtacctcaat

SEQ ID NO: 345193 - DNA, 766 bp, Cannabis indica
aaaataatatattaaataattcccctattatatattatttactgatttttacaaccaacaacaaaatatttagtgactttaatcttaatagttattttttcagtaaaacttaacaaaaggtcaatatgttttgaattaatatataaggtctacaatacataaatgatgtgttgtatttttaatttttaattttcaaatttaattggggtatagttgaaattacttttcttaacaagggcatagctgaaactttatttacatgtacgtaaatgtaattttcattattttcttacggggagttatatttacaccccacaaaattctaactacaccccaaaattataattacatatttaacctttaataaaatgactaaaataaatatttttaatttctttattttattttttataagtacaccccaccactgaaattttataagggatacaccgatacatctctatctattttagtatccgaaataattttttagtcaaattttttctcatggtcatgtaaattatatttatttaagacatcctgcaaatttttaagaaattcagaaaagtttaacacgccgaaaattgtgttcaagtagtgtgttgcacgcgtgactattttattttatacgcgtgtaaaatagactatttgaacattgttttctatattgtaaattattctaaatttcttaaaattttgtagaatatcttaaatagctataacgtatatgaatatgaaaaaaattagactaaaaaatttttctgga

SEQ ID NO: 345194 - DNA, 1143 bp, Cannabis indica
tcccgtacagacttggggggcaaatgttatcccaaattttgcactctaatgtggcatcacgagaacggtgacacgtggagtccacttgaagcatctgctcgggaatatagaccgagcaggttgcctcactgtcacatccagaataagatattcaacgatccgtgcagagcactcagcacttggcgaattcagctttcgcatcatgagtcatcagctcaatccctataacttagggatcaacttacgtggatacgacatacacacgattccactattagcgtattcagccttaatcccatgatccttgcattcagtattgatcacatgatctttctgtttattcgcattgtaaggagagaggaaactcttcctcctcaagtttcccagccctataaatagtggtacatgttcactgggcaaggggaccgagagattgaaagtcgatacgtagctaagctaagactatattattatctaagaattatatatttagagatactgttgtaagagctataagaaaaggaatcttcttccttgttcttaagtcaatacaaataatgaggattaggctattaccgaactgctcggggctgaacctctataaaattcccgtgtcttattattgctttattatatatctgttactacttatcgtttatcgcttataaaatagacttgttgtcgttggctaaaagcgaagtcaacattaatcaatagtggaaagtgagtgggctatataccccctatacttagaaaatttatgtagagaaattgactaagtataaatacataacaagtacagatgatacactacgagtactattgataataaaacttcaagctttcgccattccaggctctttggattgcagtaccatcgagttctacaagtcgatatgttgtgttaccaatctttttagcgatgaggtatggtccttcccaattgtctccaaaaaccccatgcgctcggttttttgtgtttggcatgacttttcaaagaaccaaatcccctactcacataattctctccttgaccttagagttaaaatattgcgcagttcgctgctgataagccgcatttttcaagtgagcctcgtcgcgctttttcttctaaaaggtcaaggtggagcaattgtttttctt

SEQ ID NO: 345195 - DNA, 739 bp, Cannabis indica
tgcaagaaacaccagaaaaaccaggaagacaattttgccctaacagagcaatatcctaatcaatgaagaagagttagttaaaaaaactgataatccctgattttataataacaactcttaagctaacaaactttaacagctcagccaacaaagaaggatagctgtcctcggtttgagattactaagctgacctgtcaaagaaacaattagaccacatggttagatgaaactaacaaccaggcagatgaccaaagcagcataatttgccacaaataacatctgggtcttacaatctcctatttggaaaattatgctcaacgaaagaacacatattcagacaaacagggcaacaatcaagacaaacaaaaagatacacaccaccattaacaaagagcaccaaagtttaagaaaacaactactacatgacagcgcaaaaggacacaacttaatcacaaaaaattacactaatagagattgtgtcaaacagctgcaataagcaaaacagctaaataaggaaaattacataacaactctccctcggtgagcatgattagccagtagtattcagagaagcatcaacaccagatcttgtctccccctggattggtgcagtaggatcatcaaatgagcttgactgaattggagtagcctcagagattggaccagattccattgattttagtacttctaacatggccgtgagcacagtaacaaccccttgctcaaaccttttctgacg

SEQ ID NO: 345196 - DNA, 656 bp, Cannabis indica
aggagtttcgcgtgctcggtccatctgaagatcattgtttctttgtccagccatgctgtggaacatatttttcagttcgtcaggctaagccagtacggctgggctaacttgctcggcattttggtcaatttgaattacgtcagcatctttctaagcaggaatttgagtacgtgctccaggctgcatgatcgtcgtattattatgttcgtctactcccctccttctattcagatcattccttaggtcatgggttgctcccaacctttcgaacatagaagtgcctggttgccttagcgattgattcgcttggttgacgggtggaatggaaccatcaggtatgacttctcctgatgaattaccaaacagggtctgctcgcctaccgctgggctcacgagcggaactcgtgaccggggattgggcggctgaccatttgtagtctgagaagtattcatcgttggatcttcgtctgttccacccaggggaatgatgttcagcagctgctgacctacagtttgataggcttttcgtatcagcacggtagcgtgccgactacagtttttgatctcttcatggtgagcccttaatgcctccatctctctatccctccattcggcgaacatgtgcctttgtcgtcgaatgcaagatttactgcagc

SEQ ID NO: 345197 - DNA, 498 bp, Cannabis indica
ttcgaaccctatagaaccagctatggttctttgttttccttcataaaattactgtgttctctagaaattctaagtgaatccaagccaaggtaagcttctagcaattacttctctagttttcttgaattttaagaaatggattttgcatgaaaatgaattattagctgttgtagttgctgctggtgttttgtatgcatttttgaagttaaattatgtttagaaatgtgagattaagcatgcattggtggttgttagtaggtttaaccaagttttgagctttagaactcaaacttggagctttaatggtgtttttcaattctgagcttgggtagttattttgttgcttggaaatggtttgttggggtataatatgcaggtctggaaggtttggtaaagtttggaattgttttggttagggttcaaaattgtttgggtttttcagggtaaaaccagtttaccggttttacaggtacctgtaaaactgttgggttttatgcc

SEQ ID NO: 345198 - DNA, 619 bp, Cannabis indica
attgctaataccgttgaactacaccattatgtggaattggaagatttggtgcacatggcaatcaaagttgaaagacaactcaagaagggtagttcgagctcaaagccaaggccaagtccacacaatccaaatacaacaccttggaggtcaaacttcccaaagaaagaggatcaacctagttcatcctctgcacccaaaccagccaccacaactacaacccctcaaggaaaagcagcccctctttcatctcgttctagtgagataaagtgtttcaaacgtcaagggcaaggacacatagctagccaatgtcaaaataagagaattatggtaattcaggaaaatggtgaagtaaattttgaagatgaagaagagcttgctgatatgccaccatttgaagatgcttctatagaagatgaaaagtatgggccagaatacggtgacatgcttgcactagtcaccggacgagcattaaactcgcaagtaaaagaagaggaagaagaggtacagcgtgagaacatttttcatacccgttgtcatgtgaaagacaacgtatgtagtgtgatcgctgatgggggtagatgtactaatgttgctagttcatccatggttgagaagctgg

SEQ ID NO: 345199 - DNA, 690 bp, Cannabis indica
agtacaccattaaaaccacatttttttatgaaacatgcatcatttaaactctcatggtgttgcaaaagtgaacaagaccaacacaagcatgacattgtctcttttgagaaaggaaatataacaaccgcagagcgcagccgtaaataggttactccgctatctatgaattgaatgttattatgaattacatagttcaagcttccatcagttatgacctaaaatctatgacctaaggtgaggtctccataaatgtatggatcataggatcataggaatgactttgaaggattccataaatgtattcaccaaaccaaccaaccaacatatatatattttaagaactaattatataattaataaatatgttcacatgctctagaagtttataatgacgaccctaaatattataccttacctaatttggattaatgtttaataatatatttgattgtttccttattaattgtttcatataaatgtgatttgtggattttactaattatattttacgtcaactacgtactattattcatgataaaacatatacgtacgtacacaattggtatacgtaaacaaatatttgacaaattattcggaatcaattaaataaagataataataataataaagtattattatatatatgccacgtccaattacctatatatatataacaccaaaatgttagtt

SEQ ID NO: 345200 - DNA, 584 bp, Cannabis indica
taggggtattatttgaattatatgtgaaatatgttatttttccaagtttttgctcggcggcaacagaaaatgtgatggatggctagtttgatcacatgggtaagtttagaaccttatttcttagtgggaaatattttggagaaaattatataccgggattaagcggggttatggagtttgaccattttacccctagatttggaaataccctaagtttaagtcaaagggcaatttagactttttgcaaagtaaaggttaggtggctacctagttatttgactcctagcaagctattttttttagcaagggaaattgattttccctaaccttcatttcatttagtgaaattaaaagaaaagatcaaaaaattagaaagaactctcttcctttctctctctcttcaaaccagctcagggcaagggaatttgctgctggtttttgggtatttcagcagggattgaaggatttcttagccaaggtaagccctagcttctctacccccttagttcttaaagttttgcttggtttaattatgtgattttgtgaattgggggttgttagggttaggtatgcttagggttcga

SEQ ID NO: 345201 - DNA, 701 bp, Cannabis indica
attgggggctgttagggttaggtatgcttagggttcgaattctaagcataatttgagttggttttaggtcctagtagctggtattgatggttgtttaggttttgtgcaagtttgagctttgagttcaaagatttggtctctaatgtcataatttgtctatgcattgtttaggtactctggaaagtttggttgcatttggtggaaaattgagcaaagaatgaaaagtttggggtggactggtgcaaactggctagccgattttaccagacctctctagccgattttggcagggtccccaaacgcttcattttctcaattttcgtccatttcagtatcgtggttaggtgtttccctatttccagagtttgagtaacctctagggagtatagcagaacctagggttgtgggtttgggtttccgggattagggttatgatcatgtaacttacccagtttcataatgtgattagggcatccatctggcgcgagactttccgttcaggccggccagcacacttgaattcagaaagaaggtaagaactgtgtatgatatgtgatatcaatatctaagtgtatgtatatgttatgtgtatatgcatgcttaaagtgttagttgcactaccaacacttgtacagttaaggtatagagtgcattggtatagtgaatattatttgagattacattacagtgacaccagcaca

SEQ ID NO: 345202 - DNA, 604 bp, Cannabis indica
aatccaaagcatcatacaaacaaggtttatgcaataacatgctcaattcaactaaagaacacaaacatgcaactacaagctcaaaacaactttttccatgcctttacaaccataaaattcagtaagaagacaaggttaaaaatctgagaaagctacctcaaataaagctagaacttcctttaattctaaactcaaaagaaatcctccaaattcaagcttcaaatcaagcaatccataaaagatcaaattgaaatttcaagagagggttgagagagaggggttcgggtatgggaaggaaaaaactagaaaattcttctcctttttcgcacaattcatcttttattaaaataaatttaataaggtcaaaagacccaaatgcccctagggccataaatcatgcatgcacactcacatgggaaattaagtcatttcatggacccataaatccaatataatttcagattatcaccattaaataaaaatgcaaattatttcaattcaaattgcatttcgggcccgaacctggttcggcccgagatacccggttgtgactctaccgcgccaacctgtcagaacacacctgaaaagacaacacaggcatact

SEQ ID NO: 345203 - DNA, 731 bp, Cannabis indica
ctgcagcaacctgatctgtcttccactatttttcagcaaactgtgtgtaaaaattcatgtaataatgtccattcttggcatgcccgtcttggacatccttctatggttactacaaactttatcaataaaatgcttcatttcaaagattctaatcaagccttaccatgctctatttgccatttagctaaacaaaagaggctgccatttccctctcataatacttttgcagcctctagtttcgatctcatacacatggatatatggggcccttttcatgtacatagcatagaaggttttcgttattttttaaccatagttgatgattacagtcggttttgttgggtttatatgttaaaatctaaagctgaagttcaacagctcatacctcaattttatagctttgttcacacacaatttgccacaaatataaaagcaattcgttgtgataatgctaaagaattgaacatgtcatccttttatgctcaaaaaggtatacaaacaaacaattcatgtgtggaaacacctcaacaaaattcagtcgttgagagaaagcaccaacacatactaaatgttgcaagagctctcgcttttcaatcttcccttgcacttgcttattggccatactttataaaaactgctgtgtatctgataaacaggacacctacacctcacttacatcacaaaacatctcatgagttgctctataaaaaacctcctgcttatgaccatct

SEQ ID NO: 345204 - DNA, 697 bp, Cannabis indica
aatggtcattttgccccattgttagtttgtctttttgtggctttataattgaaaaataaatgttatttgattttaattgttggctgaagggaataaatgatccttgttattttcatttttacaaagtttgaaattaattagaaaatttgaaaagaaaagcaaaactttttctctcaaatctctctctatacttcggccctcttggagcagcaagaagctggccattttcttgggattttcttgtgatttcatctcttatttaggctcaattcaagctaggttagctcctcttcttttcttcttcaagattgttgaattttgatgaaaatagtgtaatgcatgcatgataatttgaggttgttgctgctgtgattttgtttttaatttctgagatttaaacatgtttattagaggttaattaagctacttgtggtgcttgatatttaggttttttgaagttatgaattttccatgctaaagttttgttttcaaagagaaattgtgtgaatttgtggctgtagtgtttgcatgaattagggttagttttctgcagtgttattatgcttgaatatgagtttgaatcatggtttggatgcatgttagttgttattaaccaaatttgagtttggaactcaaagcttgggctttaatggtgatttccatttctgtactttctgggctgtgttgatgctttaga

SEQ ID NO: 345205 - DNA, 512 bp, Cannabis indica
ctttaacctctccaaaataaaaccgaagtcactagatcgattcttagaaagaaacatcggatttcccaaataaaaccccgcagcctctgaacttttcatttgaaggatccgttcaatctcacttcttctgccatttgaacatacctcccttatggtaactgattacccatctaattattcttacttgattttctcacaattttaactttctcttcaatttttcccataaaataacttaaaaaaaaaatcatatttttacacataaagtattaaaaactcataaaattaataattttcttttataatatttaaataattaaaattatataatataataaaatataccacgtgtatgttagtgtagacattagtagtataccttgacatttaacaatagaaatttaacagaataataaaaaataggaagaggtttcaatggttacatttttattgtaaccatcatggttatatttttttaagccattagattactattaaatagttgtgattaa

SEQ ID NO: 345206 - DNA, 630 bp, Cannabis indica
gctcatcgtctaaccgtagagcatgctttgccaagccatgggccgctaaattctcagagccagctacatgggataaaactgccccaagaaatttagacaataaagctataacatcttcaaacaatgctcctaagtcgttgaaattcatcttcccgttgttgatatccgtcaccaaagctaacgaatctgaataaactgcatgaattggaagaccacacaaatgagcccagtcaagactaactaacagggctaaagtttcagcatttaacactgaaattccagctgaaaaacaaataaaaaaagtagaaaatttttttattagaaaattatgaaaccgatcaaaattactcaaaactcaaaaattgaaaaactagatccccctataaaatactataactagccaaagggaaatcctttggctattagtaacttaactctagtattttacttcatcatcatcttaggattactattccttactaagaccctcagacctaaaaagattttgatatgtaatctagtaataataaaaaaccctgcaatactcccatccataggatatcaaaagtttactttagaaattatcgcaataataaaataagcaacaaaataatgtacttcaataacctt

SEQ ID NO: 345207 - DNA, 1476 bp, Cannabis indica
atctacatgtagtttccaggtcggtttctcttcattgtgacttggctaaggtgtttgtaccggatcgcggttgctttctggtatgctttcttttttgcctatgcattctaccacaaagtctgccaatgcttgtactttgattgctgttcggggttggaaagtgattttgtactggcccaactctactacccacttgagtagccgtccggaagcatctggtttttgcattattttgcatacttgttggtcggtgtatacctgaacaggataagcttgaaaataaggcctcaacttccttgttgctagaatgaggcagtaagcgagtttttctattaatgggtatcaaccctcagccttaatgagtcttttactgatgtaatagactgggtgttgtacgttatccacttctctgattagtaccacactcacggcatgttccgtgacaactaagtatattcccagttcctcgccgtccagaggttttgagagtacgggaggttttgcaagttgtgcctttagctcttagaaagctttttcacactcctttgtccactcgaactgcttgtttcctcgtaggatgttgaagaatgggacacacttgtctgttgattttaaaacgaatctgctgagcgcggcgatctgaccagttaagccttgcacttctttgggttttggttggcgagttcataaccaagagggcttgaatcctctctggattagcttcaattcctcgggcattgatgatgaagcctagaaactttgttgagctgactccaaaggaacactttatgggatttagtttcatgttgtattttttgaggacttcgaagcattcgtccaggtcgtctatgtgtcccccagcctttctggatttgaagagcatatcatccacgtacacttccatatttcgcacgatccggtctttaaaaattttgttgaccaatctttggtatgtagctccagcgttttttagaccaaaccacataactttgtagcaatatagacccatatctgtttgaaaacttgtatgttcttggtctagtggatgcattttaatttggtggtagcctgagtaagcgtccattaagcttaatatttcgtgccctgttgttgcatctacgagctgatcgattcatggaagtgaaaaacaatcttaagggcatgccttgttgaggtctgtaaaatcaatacacacccaccatttcttgttcggcttgggcactagtacgggatttgcgacccaagccgggtagaaggcttcgattatgaagttgttgttgcgcagcttttcaacttcttcctttagggctactactcgttctttgtccaaaagccttcatttttgttgaactggccggaagttcggatcgatattcagaacatgtgaaataatagaaggatcgattccaacgatatccgcatgtgacaaggaaaaaacatctaggtttgctctcagaaattttatcaattttgatt

SEQ ID NO: 345208 - DNA, 861 bp, Cannabis indica
caaagactgcagtgaaacccacttcaacaagggtgttggcgataactcaagctgatgcagaatccagcccttcagtggtaacaggtcagctcttggtcaacaactcttatttctctgtgttgtttaactctggggccactcattcttatgtggcagccagaatttttaataagttggatagatcgcatgatagctatgaatcagggtttaacaccctactgcctggtgaagaattagtcatttcataaaggtggattaggtctatgccgatcagaattgagggtagagagttaagtgctgactgaatagaaatgtgtttggcagattttgatattatactgggaatggatttcttgtccaagtatttagccagtattgattgtaagaggaagatggtaatcttctaaccagaaggcaaagaactgtttgtttttgttagatcagttcagggatctcggatactagtaattttgatactaacaactacgaattgttccgagagggatgtctaggctttttggccgtggtattggataccactcgacctaactctgttcggccagaagacatcaaggtggttcagaaatttttagatgtttttcctgatgaacttccgggtttacgaccgcaaagagaaattgattttgtcgttgatttggcacctggagcaaaactggtttctaaggccccttacagaattgctccagcagaacttaaagaactgaaaattcaactccaggggttgcttgacatagggtttacacggcctagttgttgggttttgtgccctaaataaaacccatttcaatataatcagatttactaataaagatcacaaataacattttatgttgcatggtt

SEQ ID NO: 345209 - DNA, 759 bp, Cannabis indica
ggcataaatacctaatatttcagattttatacacttaaatactttatctttatttttggaggcaaaaatacccaatgttacaattctcttacacttttactaccacttccgttaactcatagatatggacacgtggagggtccagatgcattacatttatttattttaaaatttaatattctgaatatcaaaaactaaatgatacttgtttcaaaaaatagaaaagtaaaaatattttccaaaatcaagttcatgaataagattatttttactttttattttttaattaagaatcaaaatttaaaaaaatttgaaaaaaaaaatcacttttaaatttttttaacattttttttcctcaatcaatatcttagactccgaccccaacctaaaccttgcaaccagacttggacccctggcccggcttgatcttagacctagactcgaccccgatctcaacctcagacccgacaaataaaatcaacaattgaaaatgaatattaagtttatagaatgtatttttattttctgttttcaaaattgaaaaacaaaagttgtcatagaacacatttttattttcaaaaataaaatctcaaaacaaaaagtttacttgcatttttgtgattaaaaaatttaaaaataaaagtgttatcaaacgatacctaaatcaattattatttttgtgataaattttaatttgagaactaaaatgtaaaaacatattattaaattaaataagggttaaaatgaaaaaaaaaaaaa

SEQ ID NO: 345210 - DNA, 719 bp, Cannabis indica
actttgattattaagcattaatgcccatttattctataatccttcctaaaatagacaaaatcaaccattttaattcattattaatgtctccatttccaaaatattacaaatttctttattgtacttatccaataaagccatttttatacatatttatttatggtaaaacttgattataattaatctatattgaattgaaatgacttaaaataatccaattcagttattatgacataattattcattctttaatttccaaaagataggttgtaaaacttccaaatattgtagtcttttaagttaccataaaaaacctttataatgataccttcctataagacttagattacaaaccaaattccataaaatttgacttcccaaatatatctgaagacaataaattcagatttgacaattagtgtttccacctccttttattacaatatttccgtatttattagtcttcaaattacttgattaattttaaattataatattagaatctgaatactaaatttccaccactttccctttaggctaataattcctaaaaatatgaaccaaccatagctaaaagctataatcgtttaaacttaatcctctttaaaccctatttcacttaaaaatatttataaaatatcactttaaaatcttctttacatcataccttaaccaaaataactcttatatcccaactagtaaaatttgtctagtgcata

SEQ ID NO: 345211 - DNA, 580 bp, Cannabis indica
ctccaaacacgattaaaacttaattaaaaatatactaaacttaatactaaaattaatactaaaaataacctaacaggtgcaaaattcatgggaaaaggggagcaaaaaattgagagaaaattctattaactatctttattaagaattacaccccgaattcaaataaatatttctaataatatggactcgtagagtatgtagatttaactacaaaactacgtaaaatatctagtgttcattattattaataaatgttgtagtatatttattgcataaaaggctatttatttagttaacaaaaatctgcgttaataatttggtgctttcattgatagccttagtgataaaaattcagaaaaaatctctctttataaacacaattacaaacccatatcaatggcagataacattccacatgaaggcaatcatccagagggaactacccattatcctagaaaagaacctataggatctcagagaaccaacacgacggaaacacaacgtttagggaggaacgtgttgggttttatgccctaaataaaactcatttcaatataataagatttacttattaatatag

SEQ ID NO: 345212 - DNA, 687 bp, Cannabis indica
ccaagttccgttcggcttgggcaccaagaccggattggctagccattctggatagtatacgtcgcggatcatgccgttggtcagaagcttatccacctctttctctagagcctcggctttcactgagtcgagagggcgtcgcttttattggacggtggcatgtccggattgacgtcgatacctgagaagcaccaactctgagtagctaccttcatcgtaggcatactcatcgaggtttccctcgtagtcatcatcaggaattccttcttcttcctcagagccctcagctgctcttgaggcaacattttcctcgtttggatcttgagcatcttctagtgggcgaggttgacgagtacttctagtctccaccattcttgtggagtgaagtgtatgtttacagtagctttcttcagctctcaatgaaagcaccaaaatgttgaccgaggttttcggcaaccaataaattattataagtttatagagctataagaaaattagagaaggatttttacgtggttggggcgttaatgagccttagtccacgagtctatcttatttatggatgtatttaatacagagaatgtatttggtgagtgtttcactcttataaatacagagaatgttcttggtgagtattttctcttcttgttcttatgcaacccaagattctcgaccccatttaatgag

SEQ ID NO: 345213 - DNA, 455 bp, Cannabis indica
ataaaacccaacagaagccacataagagttagagtccgacatgagggctcaatatccagagttgtttaggttaggttttggggaagaaattcttttaggggggggggataattgtaaagatcgcttaacttcaatttgaaacttaacaaataattagggtttaattatgaaacttgcgtattagttatgaattatcagtttacagagatttatttgaattcagaatgccttttatttgttatatatggaatttcacaattttgcatgttttgtgcccgataacattggaacacggtgtttggctattagaatcacatcttagtattttagtatagcagagcaatatagttggccattgggaatgctaggataagttgagattttagaattgacaaaaatacccctaattgattttatgaccttttagttataggaagggcgaaatggtcaatttg

SEQ ID NO: 345214 - DNA, 1110 bp, Cannabis indica
aatcgacctaagagttttcaaaaacccaataaaactcgaaaggaaggatctcaaagtgagtggagattgagggctgatcgtgaatcgaatgttgggttggtagctcaagtttcactgtctgcatttctggaaggacagtggtacttggatagtggttgctctcgacacatgacgggcaacaagaaattgttagtcaattacaaagaagcaaaggagggagttgtcacttttggtgatggaaataagggccatattattggaaaaggagacttggtgatgagtagagctgcacctcttactgaagtactgtatgtgaaaggactcaaggcaaatctgataagcatcggtcaactttgtgatgcaaattacactgtaagtttttctaaaactcattgtttagtttcatttgatgggtgctcagtcttaacagggaagagatctagtgatggtagttatttgttggacaatgttgtcctatgtaatagtgcatcattggataaatcagatattggagactttactgctattccaaaagttttaaccaaaagaaataagagtgttaaatcatcacctcgtctttcaagagctcattcactattattagtgctatggtatggtcttctaaaccttatactgttgaatcttgggtttaaacaaagaaatgatgatgtttttgtcctagtgtatgctggttttgatcatgttgtacatcgtactcccttgcttcaaaagaaatatgatacacacatgatatgttgtctagtgttcctcattgcttgtttatgtgtcatcatgtgtgataatgaaagttccacaaacattcctcaaaatgcatgttgactcaaaatatatagataacggatatcattttttagaattggttgagtaaaaatacattggataatcacatattattcttgatgctctcttggatttttgtttaataaagccttgaattctcgtattaatgtgtgcaacttggaaggttttttttatgtgttctatctgattaattcgttgtggtatatgatcattatctttctcagtttgttcagctaagccttgattgctatcatttttttctatgaggcacttcatgtcccatctaca

SEQ ID NO: 345215 - DNA, 540 bp, Cannabis indica
tgggtctaagtccttggttctgatcctagtctgggttcgagtttggtccgggtccgggtctagcttttggtctgattctaggtgtgggtggttgagttcgcgtccgagtctgtgtccgagtttgtttccaggtctgcaccctgatctgggtctaggttcgggtccaggtccaactttgggtccctagtgcgggtccaagtttggctgtgggtcaggatttcggtcgagatctaggtccagcattacgatcacagtgtaggtcttggtccgagaccaatttcgtagccggatccctatctaggtccaagtctgtgcttgggatcgggtccgagatttaggcccaggtccgggtatcagttccggtctgggtacacgaccgtgtccgggcgcgagttccagtctcagtttgggtctgaggctaggtctgtgtttggttctatgtctgggtccgaatcctggtcacgatcctagtcttgttctagtgtcctagttcggtgattcttatgcaggttctaatttttggtcctaggtctaggtctg

SEQ ID NO: 345216 - DNA, 775 bp, Cannabis indica
caatgaacctcgggctaagctttcctttcttcctaaagcgtttaatgcctttcatcggtgatattcggagaaacaccttgtccccgatttgaaaatcaatatcccgacgctttggatcagcataacttttctgtctactctgagccacgagcatttgcactctaatcttgtcaaccgcctcacttgttctctgaatacccttgagacccaagaactttctttcacccacttcatcccagtgaataggtgatctacattttcttccatataaaagctcgtaaggggccatcccgattgttgcctgatagatgttattataagagaactcgatcaggggaaggtactttacccatgatccttcaaagtgaagcacacatgcccgtagcttgtcttccaaaatctgaatagtccttttggattgcccatcggtcagaggatgaaatgctatgctgaaatttaactgagtacccatagctcgatgaagactttccaagaatcttgatgaaacttcagatctctatccgaaacaatggactttgggacaccatgaagacgaacaatttctctgacatataactcagcatactggtcaatggagaaactcatccgaacaggtaagaagtgggctgactttgtaaaacctgtccactatgacccacactgagtcaaaattctcccatggtctggcaaaacctaccacgaagtccatagaaatatcttcccatttccactctggtatgttcagtggctgcagtaaccctataggttctgatgt

SEQ ID NO: 345217 - DNA, 553 bp, Cannabis indica
tatatttaaaaatattattaattatattatatgatttttgtgtggttactttctatcaaggggtgtacgtcggtcagtttgatcggtttatactatattttatttaacccaacgtaaagatcgggttacaaaaatctaaatgcaacctacccaattaagaaaaagaaaatatagtaacccacctaatgaaatttgtcggtttggtcgggttaacccgtccaaaccaactactaacaatttttttattttttatttttatatataattattatattttagttaattgtaataatgagacaaatctatatagattgcatttaatattcaaatcaactaccataaaaaaatattagtttgaaatttatatttttaaaatagtcatataaattatatgatatatatatatataaaaaataacctcttaatcgggttggtcaggttagtttgggttaattgggcgggttagtattattttcaacccgccccaatataaagattgggcgggttatattttcgtcgggtttttcggtttatatttttcgtcgggttatct

SEQ ID NO: 345218 - DNA, 689 bp, Cannabis indica
acctagatccagaccgagaccctaacaagacccaaacctggacccgcacctgggacccaaacttggacctggacttgaacccagaccgggatccgtacctggacccagactcggactagtactcagaccccgaccaaaacatggacccaaacccgaacccaaacactcaatcgaaattaaaactgggactaggacccaaacccgaataaggaccctgaccgggacctaggacccggacttggatggggaaccaggacgtgggccttagaacctagaccaagatcaaaactcgagacatggactcagacttggacctagactcaagatgcgaacccgaacttagacctagactaggatctaccagccggactaggatgggggacctagaccagggacctaggccttggaaccagacccaaatctaaatctaggactcgaacctcaaccatgacctgacctagacccggaaatcctaagtcggacccagacccagacccaaaaccttccccggacccaaactaggatagtaacgtagacatgaacccataccaggagcaaacccaaactcatagccagacccaaacctagacctgcaccgagacccgaaatcgaaccaagactaggatcggaagccaagacttagacccgaaactaaacccagactttgatcgagattgaaacctgggact

SEQ ID NO: 345219 - DNA, 1259 bp, Cannabis indica
ataataaataaaaataaaaataacttttttcacagaaccgattagccaagccatgggcagctttgttagcttgcctacgagcatgattaatagtaactctagggaaagaggataaaagacaacatatatcatcaattagatcattaaaacatgataaatctttatgagaagagttcagagcagaggaaactcttagcgcattcgtctccacaatatcaattgaaaacggacattgtgaagcccaattaagactatgaaaaagcgccttagcttccatttcatcactacgaaagcagccttgtacacgtttggagagagcagcaagaacatctcctctacagttgcgaatcacagcaccaatgccgagtgtttgtttgttgaaatttgctgcagcatcaacattcattttaagcatatgcacagcaggaggagtccatgtaatattgtctaagcttcgtggaaatgtgctacttgcatctgcatccaagttattcggttggttccttgttgtagcagcaggttgctggtgcaagtctgtagaagatggaaccaaaccagtgtgacaagtggatcgggtaggatggtgtggtgctgttggaggtggcagtgctgtagtgtcaacataattgttgtgttgccggtgtagctgctcatttgcaaattcggtctgttgaaagctagtttggtgagtgactggttgctgcaatttattgcagagagcacctttagcacctctatacttttctatatagctcaatgtgaatgatgcaattgtaattggatctctgtgtttgccaccatgaaggactttgttcctatcattccaaatgccccacatgacacatatgagtgcttcaacatcctttttgtccatagttgctgccaaatgaattaggtagtctccattaaacattccttgagcatggttagaatcaatgaggaaattagtatgtttccaaacagccttggcagatttacaagagaacaaagcatgtccaattgattcccatgcgtgtttacaccttgaacataaagctgaatcaatcactttacgcttgtgcaaacccgtggcaactggtagtgcattttggacaactttccaagcaaatattttcacttttgggggaatttgtagtgcccaaaaatatttccaccacgtcttataatcatccgaggacgattcttggtctttctcagagatagagcttgcaaggtggaagccagatttaacactaaagataccatttgtgttatgatgc

SEQ ID NO: 345220 - DNA, 568 bp, Cannabis indica
gaaagaaatcgtcatttcacttctatgcatttatagaagctatagattctttatctatgattagccctcccactcaattgaactaccatgttcttaatctgtaagtgtcaggaagatccaattggtccactttaatgaattattcaaagaacataaataatacaattgaactagaacctaaccatctcaagattgagatcattgatctaagatcaactaggtgatattatctcatatagatattacggtaagtttatgatactttatgtaagttcaatatcggtctaatgcatgtaacaatacattcaatccaagctcactttatcaatgccctaaaaatgacataacacttatccaaggtgtaagtaaactacattgttgatcatcattacagtagaaatcctgtgtactgataaatcatagaaatttttatttaattacataatcttgattattttctactgtgttgataatacaataatcaagaatatcaatgtgataagaatttagatgaatttataaatcaaacaaatgatcatgaaataaacatgtgaaccaaataatatat

SEQ ID NO: 345221 - DNA, 750 bp, Cannabis indica
gttcaaagctatataatagtccgaatatatggggcactctaatccttttttgtctttttattttacttttatttaacatataatttccaatactttttaattattcaattattattctatatgttcatcattggtcatgtttggaatcctttatttattcctttactatatatatttttgataaccaatctaacaataaacattattcagtttgctttattaaagtaccaattcctccgttttttttttttctctttcttctaaagcttctcagctgattttgatgtttataaattttaattttcatatatgggatatatatatcttgaagaaaaagaaaaaattaataaagaagaagaaattaaaggaatcgttttataggcttttttaattttatatgggatctgtctcagtcacattatcatcataatctaatatatatcaaatttcaggtacaaattaattttcatgagtggataatatataaataaaagtcgacattttcattttgaagatatttttcaaactcatccttaaaatatctgaattttcctatacacacgtaatatctatacatttatatgcataaatagtatatactagtccatagaaaataataaaaatacaagggaataatataaactcaagttgggtacgtattgtaatgtgacatatttttgtagtatagggtttttatatatagtaatttaatatatagaattaattgcatgagtatatatatatatatat

SEQ ID NO: 345222 - DNA, 640 bp, Cannabis indica
taagttgatatgtacatatgtcaaaaaagactattgtctcatggttgttctagttttcacttgcccttacctgcaccacaaagaatccgtgagtcgcgagactctacaagaaaagtaattaacaacataaaccaaatagataaccaatcaaagttaaagcacgaataaaatccatactcattatcataagtataacaataatccataataaacaagaaattatctcattagacaaaccatcaatatcactttataggattgaaatattgatctagttacaatctagtaaaatatccttgatacctaagccggtattcatatatcactgtcgttgtcaaactagacaacccggatacctagccaccagtatccctgatatgtcactgtcgttatctgatgagataaccaacaagtagaaaacctaaaaacagtttcagtttagattcatgactattcttttataacggtttggatcgcttcttcactttcataacaataatgactctctcgttggtttcataacggtaacgtacgtctctttagtatcataagggtaatgaccatctcgttgctttcataacggtaattaccattgtggtgaatcttcaccctcaaaacaggttgttatagtagtaacaat

SEQ ID NO: 345223 - DNA, 678 bp, Cannabis indica
atatcattgataaataaataatgtcgtacatgctaaaagactatacattctaaataataaaaaatgagttgtctttagccaaacaagttgtttatccatccaaagagcatacacaactaattcatatacagccacattggtcgatcgatgtatatggatgagggacactatgggaaatctggataacaaacttgttatatcctctaacaatgatctttgatcactgaaaagagaaagtcacctagcaaagactaacacaattgctaagggatcagaatcaataaattcaacgaacattgaaggaaaattatccaacgtgactaatatatcaaacaatacgcttgaattacagccgcttgttctacttcttccaaatgaaccaaacaacaatgaacaactctcggcatgaaggaaatcttagcagcataagtatgagaatcttgtgaggattgacttccttgaagagagaaaaagttttaactgcaaataaataaaagggataatttcacaaatacacaaaaaaacaacaaaaaaattacaaaaatacggtttcacggaattttaaatatttttatgaattttttgaatttatttacagaaaatacagtctttttatgttgtattcatgttaacttgttgttaattttttgttatatgtatgttattttgatgttattt

SEQ ID NO: 345224 - DNA, 504 bp, Cannabis indica
tacaaacatataagcatgcatatacaataaacatatacatacattcgcatatccatatcacatattatatacagttcttaccttctttccagattcaagtgtgttggctgacctgaacggaaagtcttgtgcgaaatggatgccctaataacataatgggtaaatcacatgatcgaaaccctaatctcgggaaactcgaacctacaactctaggttctgttatatcctctagggattacactaactcaggaaatagggaaacacccaactacgacagtgaaatgaacgagaattgagaaagtgaagcattcagggaccctaccaaaaccagctagccggtttacaccatttcacccccaaaaccccatttcttactcaaaaatccaccaaaagcagccatactttccagaacacctatacaatgcatatacaacatattccaaccagaaaatcacaaaaaaacttagtgaatcaaattatgccattaaagatcaaagcttaggt

SEQ ID NO: 345225 - DNA, 737 bp, Cannabis indica
aaaactttaggtacttatgctactatttacactttttattttatatctacttgttattatttgtacggtatagtaaaagctcatgcacctttctctcttaaaaaaaatattattggtgtttaccatttttcttcgtattatactattattggtgtaattaagtagcaggtctcttgaaacttaagaaaataatttttaggaaatatcgctaaccaatcgtatagcactacctatggaaagtgctcaacaccactaatacccaataacatttttctttataatcaatgcacatatttaattattttctcatttctgttcatacttaataaaacagtactaatcaataaagagggatgcttcacaaatacaataaaggaaattttaactacaaaattaaatgtgatgtactttactaaaaatatttacggttataatttaatgaaagtataccgcattattaccctttccataacaaaattagagttcaccatactattgtaagcgtgttgttctggtccagtttgtatttatttatgctttttaaaaaatgggctgtgtcgtgctaatatttttaaagggtaaacttagtacgacccgtagacttaatatttttgtatcgtgctttgctcgtgctagcccgtatttcctaaacaggtcatcctatttttatatccacttaaatttactttttttttttatatattcttttatactattataaagggaaatttgacatt

SEQ ID NO: 345226 - DNA, 925 bp, Cannabis indica
cagggcccgatgccccctcgagcaccccgcacagaaaaccctcaggtaacaaactctaggcgtcgtaataaccgtactcgcagggaacaaagtgccaacccggaaggactcgacttgaatcaaccaagctcgagggaccaatctgggagatatcccaaccaggaggaacagactgaagaagaccctgaacgacgcaatcctcgtagcagacctcagtcgcgagacaatgacattgaatctgcctcctcatccccgcatggtcgcacacccagcaggtatactaggtccgattctgtggagagaccacagggaggacgatatcaggtgcacagggatgatctatgcgatcaccttaacgctattttcagggcactctcccaggcacctcgtgacgttgaagagccccgtgatccccgaatggacgatcaaggtgtaaataatcgcaccaatctgcctaacgcaccagctgcgaatactggagtcaatatccaagcgaacctcgctgcattagcaatagcacatggagcagcaccagtccctgctcccttagccgagaatattgatcaaagcatgcttttgcaagctttgaaaatgctcgagcagtagagaaagcccatttacaagctgcacgggacatctccttgtaccgcagaagtgcgacaagctcgactccccaagggattccggttatctgaatccctaaaatacaaaggacccctaatcccatagactatttagaaaaatttaatactattacggaagtagatcaggtacctcagctagcgaaatgtcgcattcttgcggcaacattggaagagaatgcccacgattggtttagccaattccctgaggcttctatctcgacatgggaaacctttgtcgacctattcctcaggcatttccaagccacgatgacttataggcc

SEQ ID NO: 345227 - DNA, 844 bp, Cannabis indica
ggctcaacagatgagtaagaacgttccataccagggtatagccactataccacatatactacgtacctccctgtacgagtgttggtagggtttgttttataccccgagtacctctgagtgatgtaccacacatactcagtacctcaccgtacttatgctggtatcacggtacgctcagacaacattcactataccaatacactctataccttaaccatataagtgttggtaatgcaattaacattttaagcatgcatatacacataacatatacatacactcagatattcatatcacacactatattcagttcttaacttctttccagattcaagtgtgctggccgacctgaacggaaaatctcgtgctagatggatgcccttggctttaagaacccttgaatcactactgaatttctagaaaaacagctaggaatgagttggttcttccttggtttggtgctgcacgaagagaaggggagaaaaagaaagagtttctctaatttttggctttattttccttttaattcttcaaaatgaaaagagttatttctaacttaatctttgctgaatttgacttgctaggtgtcaaataattgggcagccacctaactctcccctttacaaatgactaagataccctttaagcctaaacttaagcatttaaaaattagggctaaaatggtcaaattccacaaccctgcttaacctcggtatttaattttctccaaaatatttcccactaagaaataaggttctaaacttaccaatgtgatcaagctagccatccatcgcgttctccgttgtcgccgagcaaaaattacaaaaataacatatttcacata

SEQ ID NO: 345228 - DNA, 509 bp, Cannabis indica
tattataataataaattataagattttttaatatgtcgttttgtgcttttcgagcttgtcgtgtgtcatacttttcgagcaaatctattcgtgcttacgtgtcacgccttttgtgattctcatgttgtgtcatgcttaaggatatatttttcgtgttgtgtcgtgtagggctgttcattcgatcaaatctgcacttttttagtcaaacaatatccaatctgcactaagtgtggattttatatttttgatccaatctaattcgcataagagtttaaatccaatctaattcccaatatgcagattggatcagttacttttttttaatgataatttattttattttttatcaaaatgcaaaaaaaaaaaaagagaacacagcagcagcacaaccaaatttaacaaatattaaaaaaatatttctaatctccaacatcatctctttccatctccatttatatacaaaacaagccgatattatatatatcaatatatatgtactcatctcagat

SEQ ID NO: 345229 - DNA, 660 bp, Cannabis indica
gaaaagggccactggaaactccactgttctaagttttggcaaagaaacaaggtatttctatctatactataaacgcatgtgttttagagaattattatccctctcggttattaattctgcatctattaaccatgtttgttatcttcttatttcagctctagctgcttaaacttggattgttatcctagcgagttgagtcggatggttggacaaaagggtggagattgtccaagtgtaaatgaagctcgaatcttctttaatttttgaattaattgttttagtttatgaataatttagtttcaattataggtttgggattttattccctatttcatatttttgcagacaatttattatgatatttttgagattattaataaaattttctctttaagaatttttcattatgaattacatttatgaattgagcttcatgttttctttaacttatatgccaataccaattatatttatatatttatcatgtttgtatgtgtttgtatattattattgatgtaaaatcttggtatattattctctgtaaaaagatataccacataaacccttgaatttaaactcaatatttatgaataattgttaattcttaagcaattattacgattttgtttaataaaaagatcttttgatctgataggggtg

SEQ ID NO: 345230 - DNA, 882 bp, Cannabis indica
gtgccaaatatatttttgtaaaaaatatttatgcaagttatgatttttaggtttattgaaaatacaactgttatgctgcaagattatctagaaaataaaaaagaatatgttaatttgttattcttattattttctttgctttcagtttatattgatgagagccatgtttatgatgatttatgcatattattatttaacaatccagtctttgtatcatcataggtagatcaggtgtgcactcacctgtaagtgaaagacttagaatttgtacagggagtgaattaaatgtgagccccgatattatggttgttattaggtacaagtactcagtttaggatgttgttttctatgattgatattgagtgctagggatctagtagacggtttgatatgtatttgatggttgattttatgattatttgtggtctctctaatttgtttatacattttgataatggtgatgagataacttattttaatgctaaccatgcaagaattttaaacaaaacaaagggcccttgaatattagttattttcctactgggctttataagctcactccctattttctgccatttcaggaactcagtttgatgctagtggatgaggatggtaccattgaggaagaaatttattattagtttagtcttattctacttattaaacttccaataaaagtaatttgtatttaagtttgaatagatagtctggatgacttaaattagctatgtgctagttaaaaaatgagaaatgatggatgctagatattaattctatctattcggtgactacataattgtggagatattattgttctttttatattaatgagtggtctcattttattactaatattttcttatcgatataggatttaatcta

SEQ ID NO: 345231 - DNA, 1160 bp, Cannabis indica
ttcctttcttaccaaagcgcttgatgcctttcatcggcgatattcggagaaacaccatgtccccgatctgaaaatcaatatcccgtcgctttggatcagcataactcttctgtctgctctgagccgcgagcattcgcgctctaattttatcaactgcctcacttgttctctgaacagcctcgggacccaagaactttctttcacctacctcatcccagtgaataggtgatctacattttcttccatataaaagctcataaggggccatcctgattgttgcctgatagctgttgttgtacgagaactcgatcaggggaaggtactttacccatgatccttcaaagtcaagcacacatgcccgtagcatgtcttctaagatctgaatagtcctctcggattgtccatccgtctgaggatgaaatgctgtgctaaactagtactattctatatataaatcaaagttttatgaatttctaaggcaatttattataaattttcaagaaaagaacactgccttcctagtttcaattcaagataataaaggaatataaaacatattcatcttcttcgtaaaaagtgtaatcaataataagagataagatactcttaatttctctaagcaccacttcagatgaggctctaattctaggaaacatctttcaactaaaatctacgtatcacatataaaactattaatggaaataccaagcatattaaaattaacacttacgttatagtgagagggatcttttctagtcttctgtatgtatatcgtgagtatcctttgagctaacaaaagatcaaactctgataccaactgcaacgccccgatattttgccatactttacaaaaatactattttaaattcataatttgaaaagataaaaaaatcctggctaattagcaattttcctccccaaactttaacatgtactaaatcatgccctgtgaagttttttggccgttaaaaattccccctaaactattaaggttgttagatttcaggacttttgcctaatttcagtaaatgaattctaacatagatgaaagttcagggggcatgatttagtacatatcaaagtttgaggggtgtgatttggtagatatcaaagtctgggaagcatggtttagtacataaacaatcactgaaacagtaaaa

SEQ ID NO: 345232 - DNA, 555 bp, Cannabis indica
ttttaaaaaaaaaaatatttcatagacacatttaataaaatatatatagacacatttaatagattataaagttataaaatatattcttttttaaataagtgttattcatttgatctatattttataaaccaatttaataataataattatttttgttttgtcgcttgacatgtctgaggacttctctagattgacttgttgtcttgtcgcatggttggaatgatctttttccagatgcaaggttagaaaatttaaaaatttttgcttctgaccattgtcctattttgttgaatcttaatttatttagaaaagtggttagtttaaagaaatttcagtttgaaaatgcttgggcgcgtgagcctatgtgtcgccaaattgtgcatgataattgggatgttcatgagtcgaattctttgagctcaaaaatcaaatgttgtaatactgctttagtcgaatgggagaaggatagcactggtaatttcaagcagcgaataaatagttgtcataaaatcctgaagcttttgaaaaatagaagggatgttgaatcggttaaca

SEQ ID NO: 345233 - DNA, 598 bp, Cannabis indica
ttcttaagaattaaattattttttgggttttgttgtgtttacctctgttattttgttgggacagttttctgtacgtcttgttcttcaattctgattcattttcgaaaaactcttcgccggatttaatggttttttcttggtgatttccgtctccggcgtctccccacacacgaacaaggttgtttcccgtgtgttttactgttcacagtataaatgaaatgatgttgggcttgggcagtacaaaagtatgaaattgggctggggcagtaaaaatgttgtttttgccgtgtcccagtataaatgtaaagttttggtccaaaagcagtatttttgtaaaattccctttaagattcacgagagaacacgaaatataaggaatagaagaaataaattagatcaccaaagatacattctgtcacattgacttaaaagacttaataacaccatcaattccaccatagaccataccaccagaactgactactatctatagaaagcttgattacaaaaaccataagataaaaagtagagatatggaaaaacaggaaaccattgaatatcaacccagttcttaaattttttttcctccttttatact

SEQ ID NO: 345234 - DNA, 822 bp, Cannabis indica
ttaaatatttgtaattgaaaatgtttttactcttgaaaaatatcacaataataatagaaataataatagttgaagatacaaaatttaaacatttaagtctaatcttaaatatttgtaattgaaaatgttttcaaaatttaaaaaactcaaaagttaaaaatatttctacattttttttcagcattacaatttaaagtataaattttacattcttataatttgttcaaattaattcttttatctaatatttatattgaaaaattcaatcaccaacatttttatataatctcattttcagttttcaaaagtaaaaaatattgtgtgacctattttatatcctacattcacatttgttgaaaagacatttaatttttgtttacacgctccgtttattaaacttaacaagttatttttttaatttaatttagtgcattgctataaggcactggtgtctagcaaatttttatattcattgctttgcgattggttagcaatactccctacaaattattatattaagttattgggaactcgatacttaattgcacaatagtgagattgatacgaaggtgagtactaggcaccacttgtatcttttagtatttctctctaatttattataatgacatgcgattttatttaatttgttaatttcactacctttctaatatttgaaaatagtaaattatatttctaatttcataactgtttctttatttataatatacacacattaaaatattacatttcaaactatatcacttaatcatttaaaaaaaaaaaatactaaaatagggttgaactcgcgcgaagcgcggctta

SEQ ID NO: 345235 - DNA, 594 bp, Cannabis indica
ttgatataatcaatctaagtagtttgtcctccaattattagttcattattagagttggtaaaaattaccattttacccatctaattatctcttgattctttgtgtaccattaattcaatgtgaacagttaatctataacttattatagatttggatccaatattattagcactctgagaattaaaactataagaaaactaatattcaatctattagaaaagcttggattccactattatataacatgttcccagccactcatgttattgagctcccaaaacagaggttgtaagaatcattttccctgagaaactttaatgagtgcatcaaagaactcaatgaatacaaacatgagttcatatatactcaagattcaggcttatctactaatgatcatcattgtgatatgaattactctttcatggtaaacgacatgttaataaaagatgtttattacatatcagttcagtcatgcatgatcaaattatacacaacacctttactacatgtctatctacatatgtgatttgaatcaaaatcacacacactagaagtctagtgtatagtaaattatacttagcagttccatattaa

SEQ ID NO: 345236 - DNA, 1248 bp, Cannabis indica
ataaacctcgttgattagcatcgagctgcacagtacgtttaaaaatcacgtaatacgcctaaattagttagggtgttacagcgtgggtgacatagctcgaaaagcctcagccatctcagccgcctctgccccaaggatcaagaaattgaagtctggaatcttggaaagagttgtgtatatgtagtcagagaccgcttggtcatactgcttctttccattctccttctcggcctccaagtcgcgagacatctccttaatcttcgcctgagagtttttggcctcgagttcgacttcctcattagacttacggagttcctcgagctctttgtccctggtagtcgcttcctacttcaacttcttgacgttctcctgaagctggacattttgcttcttcaaaaacttgacttccttggaaccgacaacgaaagccctcaaaaacatagtgatgaaccgcgaagccaattctgcagaacgaggcattaattcctcagtaggagtcctgtcgaccttcgatatgaactcatcgcccacgaacttctcttgaagagttaggatgtcgcgggctcaaagggtcgggtcaatcacgactttcttctccttatcttgcgtaggcttagctagcttcttggatgaatccgcggtagggataacaatgacgtcgctcttcctcttctggggaacgacaggggaagtcgttgctgttccagtcttcggcttgggattgagaacaggtgcttgctttaggaaagtcatctttgcaaggacaagaaaagataagttaagataacaatgaattcaaatgcataagtctatatatatgcgatatgttacctgatgtcggtcgagaagtctgcttagaaagacgcttgtttatcctctccttttgcttctcagacggctccttgtacactggctcctgatgaaggctagctttctttggaattaaattgtgttcccgcagcttcaaggtcgtgcacagtagtcgccagtcgcgatcttgaatagggaggcttctgagaatttcagcaacttctctaggagttgggtccagtacgggtcgagccggtctatctggaaacaataaggaagagcgtgttagaccataccacaaggtaacatgaaaattaactaagtgttaaagtatgcgacgtactaggtcgaagattaaaatcagtcctaattcctggtacattaaacacgtaaaccacttagatttccaatctcccatattggaaaccatgccttcca

SEQ ID NO: 345237 - DNA, 816 bp, Cannabis indica
tcacaattattgtaattacatataaaaataaaacatgtaaataatttaccaaattaaaaactttctataataatttattactaaataacatataacatataatatatgaagatatatgttaaataaaaatggaaagtttaaacaaatgtaatttaattgactaactcaacaaaaataaagaaataaaataaaattccaaaaataaaataataaaatttcggaattttttaaatttttttcataattttcctcttttttttttttttgaaaatctaccctaaaaaatgacacgtcgtacggagttggactcaaaaaattcatgctggaaaacgacatgtcgtttttcacataagagaaaacgacatgtcgtacggccttgggttcaaaaattacatgctgaaaaacgacatgtggttttccgcataagggaaaaacgacacgtcgtacggagtggccaaaaaactctctacttaaaaacgacatgttgtttttcacataagaaaaatgacatgtcgtacggagtcgtctcctacagccaacccgggtcattttgacctatttttctgcacgtaggtccgacggacccgacccaaacccgatcggaaaatagaattttgacgaccaaattacgtatttttaatcacgaaatgatccaaatgaaaaaataaagagatctatgtgggttttatgcatctaaaacacgtaaaaagtcgattttaatgccaatgaaaatgagttgggtccaaatgtgttcttcaaatttttttccagattttgatatttattcaaatctttttcatgcacgaaatcactcta

SEQ ID NO: 345238 - DNA, 786 bp, Cannabis indica
ttcatatttaggatgttaattcaacatacttgttagtaaatctagatcttggtaaaatattcccaacaggatcgtcttgagcaaagaacgattcatcagttgattagagcagaaacgccccatcgcacatagcttccccacctctgttcccccatcttcgttaatctcccatccatcttcatctagaacggtaagattatgggttctcaaaagcaattcgtccatggcgatatcaaacgtgttaggcattccttcagaaaggctcctctcacaagagagcatgttttcctacttctcatagtttttatttgtaatatttactcaaatttccaacatattatgttaatgcatttgaacgagtacatgcattgcactattttttacaaagaaattaaaccacctcagtacgacttaattatttactgttcttgacatcattaatacataacacattaaaattattgtctaatgcctaaaaatttatttaaaattatataaatatatatataaataacacttctattactcaaaaaattaactataaatattaattttaaaaatattaaacaattaaatcttaattcaataggaataataaaaaaaaactaattaggattaatgcctctcaaattttgacatgtaccaaatcatgcttcctaaacttttaatgtcgttaaaaatgcctctgaactattgacattgttgaatttaaggacttttatctataattttagtaaaaagaaagtctagcatagatgaaagtttagggggcataatttagtacat

SEQ ID NO: 345239 - DNA, 563 bp, Cannabis indica
catattatttcatgtaatatcaataaccccaaaattatcattttaataataacaataataatttctatgtatatagatacatacataaccgatttcatttttttttctagctttttagattttattttatctttgtactttaaaaaattctattaaaactatgaattagtaatttaccattaatttcaaaaatcaaaagtcaatcattaatttaccaatttaatgacatgcattagtaaaaaaaaaattattattacactacgaagaccaaaaatcactctttaattttccaaccatcacatgcattagtaattcaaaagaaaaattcatttaattagaaaaaaagcatattatttcatgtaatatcaataactccaaaatccttttaataataataataaaaaaaaatacatacacaacccataactcttatatataaatacatacttgaatgttattgagttaccaacctttctacttaccaataaccccttaattaattattttatatttaattactactgtatataaatacatacatatattttttcttttgtgcacca

SEQ ID NO: 345240 - DNA, 952 bp, Cannabis indica
tttttttccactcctctagagaagcgtactaagacaaaatgtccatttgttttcctaggtttattttttttttctttttcaaggaaatactgtataacagtgtgaagagccatcgtttggggttcgacaaccatcgtacagaggcatgttaggttcaaaaaatgatgagctatggattttggagtgaaaagtgcagtccaaaagggaacaagattggcaaaaggatactttggatgaattagaaaatcatgttgaaaatagggtccacatttggggagaattttttcgtgagtataaatagctctatgagaggccctttgttttgttgacttttttgatttagaaaggatgagctttgcatctcggggaaatgagaaattctttttttattatgataatgatgccattatatatatatgtatgtatggaatgttatgggaagagttgtggctgattaaggggatggttttgagtgggtgtgaggagaccatatttatagacgtaggtctaggtagaaggtttgccaaaatattttcttttccaagaaggtgttttatttcaaaagagtaatgatcaaactatgttgccaatctcaaaagttaagcattagttgtcatgttgtttattaggtttatcattccttttgatgaagcaaaatcagcttccactatgaaatgatggccgatgaggtggaactcaaattttttgattcccatgttgatagcaatcaactctttgagtgtttaatgataatggagctgggaatctttgaggggcatttgatgaacttgtttttgttctttggatttttgcaagaacacaaagattttgaagggcatttgatgagtaaatctcgtgtgctacaaattttgcctagttttttggattgcttcataaattcctggcgaaatttcttctgggagcacattttttcaagggcctttaagactag

SEQ ID NO: 345241 - DNA, 786 bp, Cannabis indica
ttttttatatatatttttgtacggatgtgtttttctaaaaggaaaataatgttgtttttatgttactgcaaccttatactatatttgtgcaatataaacataacgtgccaatgatgttttttttttaatttttttttttcatttttgcacttcaaaatagttatttttccctttttaaggaaatcacaaaacaacctacatagcaacttaaattacaactaaaattcatggtaatccacataaaaaccaccgaagtaaccaaactataaaatgtaaaaataaaattaaaaaatagtatatgacgtaattccaaaaaaaaaaaccttaaaaacaatggtctataaaaaaaaatcgataaaatagtaaaagatgaaaaaaattcttaaaaatgtaaacttttctctatttatgagtatttatgaaataatgcttaaaaaaaattaaaccaaaaatctaaaaactcaagaggctagtacactattttagtgacaacaaaaaaattttgtgattaaatgtgacttttagtcacaacaaaattacttgtgactaaacataatatttaattagttacaagttgtcactaatttagttttagtcacaacaaatattgtgactaaaaacacatttagtcacaataaattgtaatttttgtgactaatacttttagccacggattttttagtcataacgtaggaataacaatttataattagtcactactttcttacttttagtcacaaattttgttgtaactaaaagtaagatcttttgtagtggtataagctt

SEQ ID NO: 345242 - DNA, 825 bp, Cannabis indica
ggtgcggaactcttattcccagtctcttgcacaccaggcgggatttcatctagaggaactgttacaccattccccacgttcttcggttgtccaggattaatagttggtggaatccttgcgtttcctaggttctacaatgcaggatccaccgtctgtgaatttgctggatcagtcaggcctctacgagtttgcacaatcgtatttgtgattggatgttgaataaagagcgattcgtgatgcttctctcaatgaaagcaccaaaatgttgacctcgcttttagccaacgacaacgagtctatttttataagcgataagtgatttatagcaataaatatatgataaagcaatgtaaagacataggaattttatagagtttcacccccgagcagttcagtaatagcctaatccttgttatttgtattgacttaagatcaaggagaaagattccttttcttatagctcttacaatagtatctttgaatgtataattcttagataatatatttagggtatagtgttagcttaacagcttttctgacctcttgcccagtgaacatgcatcactatttatagggctaataagcttggagaggaagagtttcccctcttgttacaatgcgtataaatagaaagatcgtgggatcaatgctgaatacaaggatcgtgggattaaggctgaatatgttgatagtgggatcatgtgtatgtcatatccacgtaaattgatccctgagttataggaatttcgctgatgactcacgatgcaaaagctgaattcgctaagtgttggttgctctgcgtagattgctgaatactttgctctg

SEQ ID NO: 345243 - DNA, 1013 bp, Cannabis indica
aaaaaaatctctcatttgtatattatatgagttacgattgttccatctgctgaaaaaaaaaattaagaaaaagtgttttttgactaaaagaaagttaaatttagcttaagtattttgtacataaacatatttttaatttagtgtaaaaaatgatattttttttaattaaatagctaaattaagtataaaaatttaaatttcctttttattattcatcattggatcaaaatttaataatttaatattttaaaaaattaataattgtagttaaattgtttagtaaccatgaatgggtaatacccattaagaagtgttccatatatatgtatatatatatatatttgttttagggttatgttatagtgagatttctctcacctagaaactcgagaccagactcttatttagaggacacgtgtactcagatttttcaatgaaagctgagacgtctcaaagagactcctcgaagtttaaacctcgcccaagatagaatcagcgagatactgcgagtatgacctaagtctgatcgcataactataactcgtattatgcgagataggagaatggatctaactcgcatatatcaggatatgtgcgagtatcctctctatattcctgcgtaagcatagaggatcgattctttataatgcgagttggtcaacagccttgataagccgatatagactcgcatgtctaggttctatcagctcgtcatacgatgtccaaagaggcgactaaatgagaacgcagacatcctaaacgcaattaagtgttaggcccgcgagcttaccattagaatatgaacagtcaactcgcatgttagagggcgcatacgttgctgaatttagtaactgctattcatttattgatgtttacgttattcagtttagttattgtaattcaatgtgtaaacggattgacaatgaatgcaatctttgtataactaattggacaccttgctttgtatataaagtggttgatccgccgtgtaatgggacctacgaaaatcttgc

SEQ ID NO: 345244 - DNA, 1032 bp, Cannabis indica
gagaacgacattttctaccatataaccaattttggtgccgtgaggacgagccgatgaagattgtacatgttggggcggttaggcctggagcgtacgatcctcgagacagcaatgcttttgtagttagttgttgggcgacaagtattttgtaatagaaagtaaactttctataaagtattttgtaaatgggatcccaaagtattttgtattaattattatataagtttaattaaaagcaaaatttttaattaatcatgatttccataaacctcgttgattagcaacgagctgcacagtacgtttaaaaatcacgtaatacacctatgctagttagggtgttacaatttggtagtaagtatgtaaataggctgttgcctgaccaggctgacttactaactgacaggttagtcttatagaatggacacctggtgcaatatggagagtcagagtaaagtggccagggctagtaacggttggagagaatggattccaagttgtccccgtaaccaaggtgaaagcccttggagggcttccgacgggagtgatgtttatccgtcacaggctccgttggatttggagcaaaggttttcaaaactagaagctgtgattcaacgacatgaagaagagatttagaggttgaaacaacaaaggtctcctgtagtatctttaccacatatgccaatcatttttgactcggtattaccaacgaagcatggaatggctggtaatcaagtggaaccattgcatgaaaagttttggatgcatgaatcctcagtctttcagggagattcaaatatgaagaacgcttttgggctgaaagccctgagaaaattatcctgagacctcaggatattatggttgaagtggtaggagctccatgattgagcggaagaggaaacctacgacatcagtggtgggtttaagacagaacaagcggttccaaaggtttcaaggcaaagaagtacgccagggttattcttaccctgagtgcccacgttgcatgaaacatcatcccggagaatgtaaccgaaa

SEQ ID NO: 345245 - DNA, 562 bp, Cannabis indica
aatagaatttatacattaagtataatcatgaaataaatcatgtgaaccatgcaacatagaatgaattatgatctttctttaattagtaaatctgattattagagtaattttaggttttgggaggataaaaatgtttggaaaattctataatgcgccctcttaaaagggatgcactgatacatctctattcattttagtatccaaaagaattttttagttaaattttttcttatggtcttataaattataattatttaagacatcctataaaattttaagaaattcagggaagtttaacatgccaaaaactgcgttcaaacagtgtgttgcacgcgtgattgttttattttatacgcgtataaaatagactgtttgaacattatttttttaattataaattattctaaatctctcaaaatttcttttgtatgccgaaataagtagagggtagatcaatatatctttgtagaagggtacattgtaaaatcagcccaaatgtgtttgggatttttttcactaatatacataattagaaaattatttacaataataaccttacaca

SEQ ID NO: 345246 - DNA, 707 bp, Cannabis indica
aaaaaaaacaaaaaaagaaagaagaaacctctccttcttctttcttctctcgacaaccctaggaaacaagtaacaaccagaattttgactccaattctagcagagattgattgcagtagtgaggtgaagaagctgaacaacttggaggtaagtatcctttctagttcatagtgttttaccatggtttggattaggtttgggatatgaactttgtgattttgggactgtagtaccaaattgagtttaaattgtgttattaggattgatttagaatttaattaagcttagattaaatgatttgagtggatgttgtgttaaaattggagaattgagcttagaacacaattttaaggttctaacatggtgatttgtgtaattggatgaattattgtgaatgaatgctttgaacatgttgtatttatgttatagaactgttctgtgaagtttgggaacaattggttaggtttggagcaagttttgggactttaaagatctggaatttttgagtttctggtgtggtgaaccggaattccggatggtaaaaggctgcaccaaccggaatttcggatggtcaattttcaggaatcgccaatttttgtattttagccataacttttcactcgggtgcccgttttagacattctatataccgttttgaagcttatgaagagctctatagtatgagacataaattagagccaaaatat

SEQ ID NO: 345247 - DNA, 798 bp, Cannabis indica
atccctccaaaagactctaaatggatgaatagtatttaaaataacctaacaaattaaaatcacactaatcaataatttaaagaatcaatttaagaatattaataaataaattaatcatatttataagataaatatggactcatcattgacaagcgtccggagggggcctgtttccaacggttaggggacccccattaccttttttgacttagggtttggtttggggcctgactgctgaatttttcaatctttttcaaaactgagatgtctgcattcggttctaaatcttcaaagaaagggggaagcgtctggacaccctggaggaagttatgaatggtcttgtggcccaagaaagggcacaagtctcgtgctaacgggtgggaagcgactgagcttcattctactttaacttgccctcaccagctggagcatatcgtggtggtggcgggtatcaagcctgcgacctccgggacctatcaccggccgcctcgggacgcggagacgcccaaccacaactatgggggctttggagcctggagtcaaacgcacttgatggtcggggccatgcttccccttcaagattactttatgaattttctggtatttgtcggcctagcgccataccaactcatttctcaagcttactgtctgctttcagggttatttattttttactctgcccggagctggggctctccaaattcggcagagattttgtatttttatgaactcgtttccatccctgaaaagggagataagtttaaggacagtttttacggtctccgggcccatcctttg

SEQ ID NO: 345248 - DNA, 539 bp, Cannabis indica
tagacgagataatgctaactttaaagacccgaaacataggctaaatataacataacacttaacagaggaatgtagtgccataattcagaaaaagctacctcaaaagcttaaagatccaggtagcttttcaattccttgtgaggttggtggtataaaatttgagaagtctttatgtgatcttggggctagtataaatttaattccactttcagtattcaaaaaatattggtgaagtaaagcctacaacaattttgttacaattggcggatcgatcattcacttatccaaggggaataatagaagatgttctaattaaagtgggtaagttagtatttccagatgattttgtggtactagacatggaagattgatccttgggcgtcctttcttaataactagtggtgcgcttatagatgttcgaagaggccacttaaccttgagtgctaatgatgaagaaatcaagtttgacatttataagtcttctactcaagccaatactgagaaaacatgcaatacggttgagtcttgtaactccaatg

SEQ ID NO: 345249 - DNA, 1035 bp, Cannabis indica
ccactgatattttgaattttggatggtccccatatatcaccatgaatgagtgagaatgggtgagagggttgataaggtcttggaatgaaagagtggcgagagtgcttagaaaattgacaaatatcacacttgagagactgaggatttatattgacaaatagggatgggaacaagtgtttaagatatacaaaatttggatgacctagacggtaatgccataacatgatagtactgattttattggactgatttactgaggaaagagattgaccttgggagaaacaacaacgatttccatgattaaacatggggttgtcgatttttagcagatacaagcccttactgaactcagcatagccaatcatcttccccgattccacatcctgaaaaacacaaaacttagcagcaaacttaacttcacaattaagatcactactcaatttgcttacagaaagtaaattgcaatcaagctttggaacgtaaaggacagaatttaagacaagacttggtgagattgttatagttccaattccatcaattattgaacacgaaccatcagttatgcgaacagtcctttcatgagagaacttacttagaaaagaaaatagtgatctatcacctgtcatatggtcagaagcaccaaaatccacaatccaagggtcatgagggatttgaataacctgaagtgcatgagtattgtattgtcttgcgactaaagagatggatcttaatgagttttcatctgcgagggagaaagacaccaagacaaaacaagtatagaaccccagaggagacaaacaaagatagaggacgctagaaaaaacgtcgatggagttgaagaagagccagagatgaagaaacccgagagagacgatgagaaaaatatcgctggagactaccacacacgtacacgtgccgatgcatggagagagtcgcgatagatggaggtggcacgtagggcccatgtgcagctcagatggacaccatatttttgggtttttccgatcggaggtgggacaagctccctgggttgga

SEQ ID NO: 345250 - DNA, 1626 bp, Cannabis indica
gataaaacttgtctcaagggctgatcggttaacacttttatggggtgtgctcggaagtatggccgtagcttgcgagacacgtggactaggcataacgcaagtttttctagagggggattctgcccctagtaaccttttacttacgtagtaaataggttgctggtgcttaccctcttctcaaactatagctacactaatcgcatcttctgagatggctaaataaagaaataacgtctctccagttattggtttcgccaaaactgggggcgttgcgagatgcttttttatgttttgaaaggcctcctcgcattcttttatccactcaaacttttttttgcctcgcaatatgttgaagaacggtacgcacttattagttgacttcgaaatgaatctgttaagtgtcgccattcttcctgtcagggcttgtacttctttgggctttgtcggggatggcatgtctattaatgccttgttatactttttcgggtttagcttcatgttatacttttttaatatcttaaagcattcggcaaggtctgaggtttgatccttacactatcgatttcaccaacatattgtcgacataaacttccatgtttcgccctatttgatttgggaacacttcatttactagtcgttgatacgttgccccagcgttctccagtctgaatggcatgactttataacaatagggtcccatgttggttacgaagcttgtatgttcttgatctgggacatacatttttatctggctatatccagaatatgcgtccataaaagacataagctcgtgcccaatagttgcatccactaacaggtcaatcttgggaagtggaatacagtctttcaagcacgccttattcagattagagaaatcaatacaagttctccaagttccgttaggtttcgggacgagaacaggattggctatgcaagaaggataaaatacctcgcgtataaaattgttgactagtaacttgtcaacttcctgtgttagtgccccttgcctctcgaaatccaagggcctcctaatttgtctcttcgttgggtagttgggaataacatttaagtgatggcagataatcttagggtcaatccttatcatatctccacgactccacgcaaattgatcctggttcgccttcaaaaagcttattaatttctatttgagttgctcgtccaagttcttcctaatgtacacatatttggtgggatttcctgggtcgagaataaactcttccaattcttcaattggttttagcaagtttctttcatcttgaactcgaggatcaagatcttcatctttcttctcgttttctcttgccaagatcgtcatcagttgatgaccagctttcctatgctgcagctctatgcgataacaatcgcgagccagcatctagtcaccacgcaccaccaccacgcaatctggggcacaagaatagaatcatcaagtttattaccaagagcaaaatattcattagcaatatcagataatttctcatagaattcagttagagtttcattatctagcatcctaagctcatcaaatttagtttgaagcataataaatgtaaagcccgcttagttaatttggaaattagcagttgtttatgattaattatgaaa

SEQ ID NO: 345251 - DNA, 659 bp, Cannabis indica
ttttatgatttgtaggttcctgaccagggcatctaaactgttcagcatgaagaaaaagggaagtgtctgatgttgtggctcgacaacagaaggagattgaaaaattaaaagccaaactccaatcccttaaatataagaaaaacactgccgaacaagaggaagaaggagagttggctagtgaggcgtatgttccacaacaatacgctcgtgaggatgagagtccaccacaaacctatgctgaggagtttgtttctctcactgagccagctctcctgtaaaatttcgatgaccatacgacccttgatcagcaagtatatctctgctctgataatatcgacaacattgtggcccgagtgtatctgtaagagcatgttggtaaaattactgttcactgcacggactacgatgattcacatgcccgggttctgatttcagaaatgctggaagaggatgctaaactcccaatctcaattaaagggtacagatatgtcagggaagtaccaaacatgttccttccttggcctaaatacttaattgtaacatccgaggtaacttctcttataaattaattattaatgattagtggagtttgcatatcttcaatattcaaccatagtgaagtagattttacgaatatatgtgctgcggtgggatggatg

SEQ ID NO: 345252 - DNA, 518 bp, Cannabis indica
tgctcatagcagagtaaatagtttcactcttaagagcatgtaaggatggtcataagagaagtaatttttttataatattacaagcatgctattgcaaaattatgtatttaaagtatgtatatgtaagttattatgacagagtacattttggtatttaagtaatgtatagagaaataatattacttaattaagttttttgtattatatgtattgtggattgaccgataagacataggttaaatacatgtttgttgggttcatatggtagatagggagacaatgcggtaagtggtgaaagacatgaagactcaatactccaagtttttggtaagttaaatttcgaggacgaaatttcttttaaggatggtagaatgtaatatctagattaaaatagtatttaattttttttctcgggatattaattgtgagagaataatgtctcatttatttgtattgttagtgagttattattgcttagagtagttgtgccaatttttctagagagagttaaagttgta

SEQ ID NO: 345253 - DNA, 732 bp, Cannabis indica
tatatacaactgacatttgctaaaacacggtttttcaccaccttaaattggtataattgacaatgttagttatagctgctacacattaaatagcgagtactttttcagatactgactcccatcttactttagttgaagattcgtttggggatcttattttgtgtttcttattcgaataataaacttaggtagatgtgcaattgaaagagtgattgtttcaatagtaagagaaacaccatagcaagaacatcagataagatcagttgagtgaactaagttgctctataaactgtggatgagtgaggtgttttcaatgtttatatgtatctctggtgaaaagtttgtaatatatacactgagattgcataattgaaagagaggtctcagatggtgtgtatctatagtttgtgtcttgtaatctatgtgtaactcttggttaattaatagtggactaaacatggcaaagttaggaggcacattgtctctgaacaaataggataaatccatctttcatattttgtttgttgctgaacttggtgatatgtatttgtgatttagtatatctcaacagactaccactcactgctctctcttcaattccctaatctaaatgaatggtggagaagttgatcattcaacttttgctgcaaatgcaaatgcaagaaatgttgctctctcgtctcgttattcacaccagttttgctcctctagtatgcatatatgtgtagtttt

SEQ ID NO: 345254 - DNA, 656 bp, Cannabis indica
gattatttattaaaatatatcatatttttaaatttcaaataaggtcattttataaagttatttaaatactcaaaatttaaaatatctgaccttagatttaaacataagataaaataatcaaatttcaaaataaccaattacaaaaaaaatgtagaaattatccttttttaggttgaaaatctacgaatatctaaaattaattaataaaataataattaattttaaactgataattagatttcagatttgaaaaataaaaaatccagataaaattttacctaaaaatttgaaattaaattccaagaaaaacaatgaaaaattgaaaaaatttcatttagtacggatggtatgcaatgcataccatccacgcacttgcaaggggggacttgacctagggatgatgcacaaggaggctgctggcagggtgttcgtacacaggaggggcttgttcaggcaagcttgacagagaatcctcgaacaaaacttgtccgaatgcacatcttgacagagtgaaccttgggtgtgcgcgtgcacaggggagtgatccccaccctaattttttctaaatttcaaaaattcataactaattcaatttaaatcgaaatttagttatgcaaaaaagtaaattgcttttttttttcatactctctaaataa

SEQ ID NO: 345255 - DNA, 788 bp, Cannabis indica
aagaggttgcaacccctggttgtttggattattaggcttacggggctggttgtctccctggccctgccttctcacatactgcttaaaatggcctcgagcaatgacactctctatctcatctttcaacttgcggcattcgtcgatcgtatgcctatatctttatgaaatttacagtactagttacgatctctttttctcctcgaattcctcataggctcgggtttaccaaaggctaccttctgctcatgtgcgaggtaaatattttcccaagtttcattaagctcggtgtaaatagtatacactggcacatatttgtaatgcttcttttgtttctttctatctttcgacggttccccacctctgtcctttcttttcgaactagaaacctctgagttatcaattctcgtggaaacaatcactgttgaaacattgctgggtttacctcccgagctagttttcaacaagtttatttcctttctggcttcttccttctgaacaagcacttgatctctctcattgaactcagtgatgtttcgtaccggacgtccttgtagttcatcccacaactcgccctcggcgattaatggatcagtggagattctcgcctgaagggctgtgagttgcatgctgtcatccaagtttttaaccctactggaagccgtgctaaaacaacttaagtacgccttaagtgtttcttcaggctgctgcatcatattggttagcgaggccgcttcgagtcgcctatccctagcggcttggaattgcttcttaaaatccccggacagctg

SEQ ID NO: 345256 - DNA, 697 bp, Cannabis indica
aactcaaaaaattaaatgtgtggaaacattgtataaaattcttaataagatattcacaattaattttaaattatattgaatagaattaaaaatcacaaaattaattttataatgtaatcatataaatcttaaaattttaattttaaaattctcccaatttacccaattattttatgcatataatatatcatcagaaagagaatttaataaggaataaaacatataaagttttaagactaaataacaaaaaaatttaacaaataataattacaaaattaatatgtaataggaataattaacatatacatgtcaattgttatacaaattatatgttctaaatcatatacaataggcaatctgataccacatgttagaaaattaataaacccaagatacaaatttgtatataatctaagacacaataataattaggtatacatacttgattgatccatagcaattactataatttgattgtgtaatactatcaattaagtcttcctccctagatctttaaattagaaacagttttatttatcttattatcaaaaaatatacaattgtttgtgatgagacaatatgtatttatagagttaggaaagggatttagctacatgatcctagttggactggatctgctcatcaaaggctttcgttaattagtttagcccgcatttttgtttcaactagactttac

SEQ ID NO: 345257 - DNA, 713 bp, Cannabis indica
ttttttttttttgaaaaattgctctgggaaacgacatgtcgttttcctttatacaggaaaaacaacgtgtcattttctttatagaacaaattgtagcaaccttataaacgacgtgccgtttccagcaatatatggaaaacgacttgcgttttgttacaagaaaaactaccgtttttgtaaacgacatgtcttttgtagttatgaaaaaacgactaccttcagtcgggtcacttttgacccgttttctacacgtgggttcgacggacccgacccaaactcgattggaaaagagaattttgacgaccaaattacgtatttttaaacccgaaatgatccaaatgaaaaaaataaagagatcaaagtgggttttatacatctaaaacacgtaaaacgtcaactttaatttcaatgaaaaattcgggtccgaatgtggattcttcagtaaattttctagattttgatggttttcaaaaccttttcatgcatatattaaatgtataacatcatatgaaaataataaggctattaatgttgaaaaacacatcaaagatccaaagaaaataaacaaatttttgaacccaccatctcgaaaaacatgtaaacacgtgaatatatatatgtacatatacaatcgccactactacaaaaaggggtattttcgtcgttttataagtgacatataaagattttgcgtcggtctacagaaccgacgt

SEQ ID NO: 345258 - DNA, 565 bp, Cannabis indica
ttaggatgttaatgaaacatacctgttagtaaatctagatcctggtaaaatatttctaatagggagttccacgagcacggtctaactcaagatccttgttacagtgtccggccatgccatgaaacatattcttcaactcgtcaagctgggcctgtacggctgggctgacttaatcggcattttggtcagttttgattacgtcagcgtctttctgagcggggatttaagtatgggctccgggcagcacaattgttgtagtattttgctcgtctgttccccttcttctgtttagatcttcccttaggttatgggtcgttcccagcctatcgaacacagaagagcctggttgccttagcgattgattcgcttggttgacaggcggaatgactccattattctgattggatccgtcaggtatggctcctcctgatgaattcctagacaaggtctgcccgcctacctcttggccaacgagtggaactcatgaccggggattggacggctgaccattggttgtctgggaggcattcatcgtcgggtcatcctccgtttctcccaagggaat

SEQ ID NO: 345259 - DNA, 1318 bp, Cannabis indica
atgttcccaaaatgtacgtatcaccctgaccagaaagtaggcttaactaacaaatcaaagaacatgaatagcactcctgagattgaacctaagcatgtcaggattaagatcttttgatctaagatcaactagtgatattgacttagaaagatacaacggtaagattataatatctttaccaagatcaatatcggtcccagtccaatgtatactccatacattcgaaactagcatactttgccaatgttctggaaagaacataacacttattcaaagtgtaagtacacttcatcgctgattatcacatcagtgtaaatccaatgcactgatgaatcagggactttgtcttttgaagcatataatcacaatcacattccactgtgttgacatcactgtaattgtaaatgactatatgttctggacttaacagattttgtatatattaaaccataaacatgaaatttgatggttaggatattattatttattaaataataaataaacaaaatatcctaaagtttgaaaaattttataggttaccaaaacctaaaatttctaattcaaaccaaaaataacaaatttttcaaaatttcatgttatttaacaaaaataaaattttaattaaataaatacctaataagaaaaaatgtcaaaactaatatttttctaatcttataatttaataaaatacatttaagaaaataacaaattttgaaaaatctgatatagttagcaaatttgaaactttaactagattattttaaaattttattaatatttaaatatcaaaataagatcatttcaaatttaataataatataagtaatatctaatcttataattaaaataaataaaataattaaaaaatttcaaaattaatcataagactattttgtggaaaatcaaatttttaaattcaaaggctactaatatctaaaactaattttaattaattaaaaaattaataaaattcaatttattctaacaattaaatttttatttaaaaatttagattctacacaaaattctactcaaatttgaatttttttttcaatgaaaaagtatttttgaaagttaaaatatcacaaaaacaagatttggcacagagagtatgcattgaatactccctaggcgcggatgggagcagaaggccgagggaggggctgcatgcagtctccatgggcgtggaacctccgtcagatgggggaagcttaggacacgcccttttctgaagggattgttggaaatattttaccaggatctagatttactaacaaatatgtttcattaacatcgtaatatgaatttctaaaacaat

SEQ ID NO: 345260 - DNA, 822 bp, Cannabis indica
agcaaaggtttgcgaaaatggaagctgtgattcaacgacatgaagaagagattcagaggttgaaacagcagaggtctcctgtagtatctttaccacatatgccaatcatttttgattcggtattaccagcgaagcatggaatggctggtaatcaagtggaaccattacatggaaagatttggatccaagaaccttcagactttcagggaggttcaaatatgaagaatgcttcttgggttggaagccctgaggaaattattatgagacctcaggagattatggtagagggtcagaatattacttgcctgaattcaaattatggtgaaagtggcaggagctccatgattgagcaaaagaggaaacctacgtcatcagtggtgggtttaagacagaacaagcggttccgaaggtttcaaggcaagggaggacgccagggttattcttaccctgaatgcccacgttgcatgaaacaccatcccggagaatgcaaccgaaaggtatgttttcaatgtggcaaggttgggcattttaagaaagattgcccacaggtggagaaagaagaacaagagcagaaagcggtatttgttcctaccacggtgaatgctaatgctcaagctgatgatgcagcaagcccttctgtagtggcaggttagctccctgtaaacgactttcttttatatcgtgttgtttgattcgggagctgcacgttcatatgtagctatgagaataattcatttttgggtaggccttgagatattttaaaaagagggtttggaaccctaatgcctagtggggaattggtgatctctaataggcgcatta

SEQ ID NO: 345261 - DNA, 1393 bp, Cannabis indica
ctcttggtctcatgcgaaatcaatttttcagaatgctctacactacgatataatcgtttatgtcgcggaatcaaagtaatgccacatcactttttgggatagttttattctccttactcttgtttactttatggcgagataaaccacaattcaggcaataatccatgtctgcatatccccgatgatataaaatgcaatcttttggatatgcacaaattttttcatacttcaatcctatggaatttaaagtcttcttcacttcatatgtagattttgggaagcagttgtcaaatggaaatatatctttaaaagaagcaaaaaattgaataagacatttatcgctcactctatttttttgctttgatgttgtaaaatttaccattgatggtaatcttagttttttacaatcatcaaactggggtttatcggcatcacttagaaaattatcgaattttttaggatcattaagaaattcctcctgtgcttcgtcaaccaagttcaatggatgatcatcgaagtcattatccttaatatcatctacccccctcttcccaaatggatatggatcatcagctaaatattcgtcatgccaataccaagtagtataacttctattgaaaccttgtaaatacacatggtccttaatcatcataatatttccttaagatctattacaacaatctacacacaaacaatgaatacgttcaagagttttagaattctttaaggcaaactctaataaactatcgaactctacttgaaatcgcattgtgtctctctcctgacgcatccatggtttatccataacaaaaatcctaacaaaaaaattaagtatttagtaattaattataacaagttactacttaaataatgtaactaactaggtttctcacacctaattcatattaatttttatattactataattcatgttttagtttagttcatgttattaagttgtattagctgtaattaactaactagagtagtttttagttgattggaatagatccaggaatggaatgacttttcgtaaagtgaatctattcatttatttagtttgtcatttataataacaatgtttatatatatatatgtgtatataattatttgtgttatatcacctaatttcttaccactagctagtaattaactaattatttgtattatgtacttttccttcaatatttatacttttttagtaaaatttatcctaattctaccaaagtttcggcagcataacgacaattattggacattcccaaaatttttaaaaatacctaaaataataaagaaaacaaagaaaataatacagaataatacaaaatttatccacccatccagccgcagtacatgtattcgcagaagatattcaaactcaactaacatgcat

SEQ ID NO: 345262 - DNA, 674 bp, Cannabis indica
ggagattgtctaatgcaggaattgttcgaggattacctaaattaggtaaggagtctttgggaaaatgtggaccatgtcagcttggtaagcaactgaaaatttctcataagagtgtttctgatgtgaatacttccagagttctcgaactcctacatatggacttaatgggtccaatccaggttgaaagcttgaatggtaagaggtatatttttgtgtgtgttgatgatttctcttggttttcatgggtagaattttttagagaaaacattgatacttttgatgtttttaagtatctttgcttgaaattaaaagttcaaaaagattgcaacattggtaagatagttcgtggtaagagtaatcatggaaaagattttgaaaatactgtgtatggtaaattctgtaaatcttatggtatttttcataatctttctgctcctaaaaccccacaacaaaatggagcggttaaggattcccaccttcttgatcatgttttagacgaggctttgtatggcttgaaacaagcaccccgtgcttggtatgagcgtctatctgagtttttacactctcatggttatagaaaaggaaatgttattaaaacacagttcatcacacacattcaatttgatattattttttctatatgttgatggatctacttctaactctgaagtgca

SEQ ID NO: 345263 - DNA, 528 bp, Cannabis indica
tccttaagggagctatattaggtcccacctttgaatagtattatccctcagtatcaatacaactaaaatgggagtaggtcattacccgctatcaaaaggggccagacctctataacaattctatgtgttctttactttctcattctatttgtgtaacacgtggcaaacatcaggttcatacgaccctgctgttggttgaccactttttgacctcaacagtttggtgctttcattgagagtgaggataccgtatctaatcaaacgtcatggttagcacgagaagagccccagtcgcaccatggccatctttggttctccctcaagacccacacactatagaatttgatgctcaggttccagccacaacttgaattcctgtgaacactgtagatgtggtcaatcttgtcaccacaagaggcaccacaagcttggccactacagctagccaaacagataccaactgttgggttttatgccctaaataaaactccatttcaatgtaatctattttattcaacatcaataaag

SEQ ID NO: 345264 - DNA, 504 bp, Cannabis indica
ttaagcagtgttttgggataaatacttattagtttactgttgttgtgacatagggctgagttcatcgggggaggtttctccatttaggttggctgacgttcatgaatctggattaaaggtaagaaaagttattgtactgcatagcatgttatattgcaatacaattaatattgttgagaattaattgatattgagattaaaatatggttattattgttatgtaatgaaaatattacctgattaaacaatgacaatgtgatgatacatgaatgtgatatttgggctcaccttattaggtgatgcgatatacctggcagtgtgccttattaggtacggacaacagtgatatgtggtaccaggctatggtacgggctcgtcttattaggcaatgtgatatattggtgccaagttttagcacgggctcaccttaataggtgatgcgatatacctggcagcataccttattaggtatgagccacaatgatatgtggtaccaggctatgg

SEQ ID NO: 345265 - DNA, 626 bp, Cannabis indica
agatgaacccaggtgagtcttgggagcccgagcattagatcaaccaggagctaattcaacttctgcacgaagtcaacctcgtcttcgcgctaatcctccttcaagagaaggatattcttctgatttcgtacccagccataggatgatggctcatactaagaaaactacgcgtctggctgacgcttcaaaccctcaggtggctcggcttgccactctgcccgacgccgaacaagatttggcggttccaatggaggaggaccgtgagggggacgccaaagtccaggaggttgaggagctggacgaggcgcgtctgggcagccctcccgctactgagggagaggaagagattgaaccccctaactatggggagtacaatgaggctaggcaaccagttgatgctgacggggacgtcctggttgagggcgttgattacgtcaccgaggagcttgccgaggtagttcctcacaggagggagggtgccttgggcgccaggtgggtgagtcctccatccaagatttcggaggcacgcctccgcactctcgaccaggacggatacctgggcgagctggactgctacattcccgccacgacaatcgcgctacaaaccctgagaaggggatgtgcgc

SEQ ID NO: 345266 - DNA, 606 bp, Cannabis indica
cgctaggcgacaacttttgtatatgttaatatgttatatatatgttaatattttggtatttataagtaatcaaataaagttttaaataattacattttttaataaactcgttgattagcaacgagctgcacaattaagttaaaattacattaacatgcctaaattagtagaatgttacatatatatatgtatacaaagtacaataagaaagctatatatagcttgatggtggaggatacaagttggttactattattggaatatgttttaccaggatctagatttactatcatgtatgttatttaacatcctaaatatgaatttctaaaataatgtaaataaacacatataaagtttagaaaaccttacattatcggaatattaatggctccttccactcagatctctaacccttgtatcctgtctgtagcagagtatcaccatgatctgagcccgaatgtccttctcttgattctggattcttcacagccttacacactttgattgagataccacttgatgtgtgtgggcactcactctatcactcaaggtatgaaaatatgatgaagaaggaagagagaggtggttcgaatatatgtatagaat

SEQ ID NO: 345267 - DNA, 538 bp, Cannabis indica
taaaataaaaaataagatataattaagactaaaaaaaaaaatagatatttacctattttcaagttcaaattacactaatatcttaaattaattttaaaaaatccaattaatttaattctgataattagaattgaaataggaatagtaaatatctaaatacaaaactacacaaaaaaatcggaagttaattccatgaaatagtatgaaaaaacgaagaaaaatgaaaaatttgtgggttgtacggatggtatgcagttgcatactcatccgcgcgcgccacaaggtgatcagccgaggtttctcggtgctggagtgtcccttgcatgatttccgcgcgcgaaatggggtatgagacacccctctgcgtgttgctcggacaaaatcatgttcgaacacgcatctggcagagtgaatgggccatccgcgcgcatgggatatggtgatcaccttatcctttttcaaatcttcaaaaaatcataactaattcaaataaaatagaaattgagttctgtaaaaaaaatgaattacttaatttttt

SEQ ID NO: 345268 - DNA, 1051 bp, Cannabis indica
ctccaatgctcatactttagattcagtttagagagagagagtccaagatcatagtgagtgtgtgtggagggatgtaaaaagggagtatcactcttgaagtgatttccctcaatgtgaggcatttccttgtaattacttgttgtgttgagttgtaatcttgggctcaatctattgtgtactactgacttattcctattcaataaagatccatcattcatccattattgagttaagttttctttgtcttatttcaattaagttcaagttttggttttgtgattggttttagttttgatttgtgtttcttgaacattgttactgccgtaacaacttgttttgagggtgaggattcaccacaatatagaaaaatattaaataaaaaaacaaaattatttagtgtactgtgtagtggtaaagagtcttattttaaactaagagatcaataaatcaattcgcaacttctgcttttctatttttttttttaaaaaaaatatttaatgtgtagttataaagaattgaactaaaagttttactattactctaaatcactagaactataattttgataatagttaaattatatatataggggcttcaaaatttcatttcgccttaggtcccatatatttgaagaccgtataatagattttcttatatttggggcacatttaaatgtgaattttattatttagtaatggatttaaattttaaaggttgaaggtgctattttccaatattggttctccaattatttaagatgtaaatatataaaatatttgagtcctgaaaaattgtaaataaaacattttaaattcttttttagggaaagaatatcaaagcttcattcacacattttaaattctaaaaaaattatatatatatatatatatatatttatatggaacactttttaatgggtattaacccattaatggttactaaacaatttaactataaatattaattttgaaaatattaaagtattatattttgatccaacgacaaataataaaaagaaaattttgaatttctatacttaatttaactactt

SEQ ID NO: 345269 - DNA, 702 bp, Cannabis indica
ttaaaaaaatagtattgaagtaattcccaaaaataaaatgttactaaacgcccaaaaaaaaaatgctataaatgagtttgtttttttaataataataataataataatggacgataaatgggcaatggaaatgactatggatgaaaatgaccgattaatttagaaggatggtaggaggaaaattaatagagattcattggtcctagacaaaattcttgatcctttctttgttttcatttggataagcctttcttaaagtcaattactccattaacctcatatgcttcattctatcgatccatgtccccacacaccacaccaccactctctctttctctctctctcaacttgcactcaacactttagtgccctttcaaggaaggtgagtcactcactcacaaacccctttcatatttttattataatattattggattagattaactatattccttgtccttcatagaagtaggaccaatggctcaaccccacttaaatctagttgtaataaagccactacacacacacacacacacaaaacctttcctctttgtatttcatgtaatataagtttgctttttaatggttggtttgggttgtatacctttattggggatttggattttcggatagtgatttccacaacttgtatatattatcaatcatgtactctatttttctttatgattaaagaataaccgg

SEQ ID NO: 345270 - DNA, 1000 bp, Cannabis indica
acaatgatcaattccaaatttaatgttaagaattttgaacagaatttgtcaagtcattctttattattttagtttgaataatttaggtgtttttatttaattttaattagaagatttttagttgattatatttacctaagtgaccttcaataatttaatactgccaataccgaaatttttttaataaaattggtacgcttgtacgtagacaaaaagttgagactcccttcttgttttttttttttttaaattttatttcttaagcatttttcattcaaacatcaacctgtcactttattaattattttgttactttttcttttaattgacataacatctaaatatctctcttattttattttatttatattttttaaaaacttttaaaataaattttcaacttcatatacttattctttaaaaaaaaaaaacttcaatatactcatttctctctctttgctcttacaagttttaaaaaattatttttactacacaaataattattttggttttaagagttatattattacaatcaatttttttaagatgatcattttaatatgtgagtaatatatattttttgaccgtcaccaaaaaaagataaataaaattaaatttaactttaatttcatttatattttcttaaataattaatctttaaacttaaacaaaattaatgtaccaaacaacttgacaggttactgtagcccatgttttttatatatggctcaatacttttacatttaatctatgtgggacaatgttctccaatatcccccctcaatatggtggctatttttgctcactaatcttgaatcagcttatcacaggccatgccatttgcccccctatttttgttcggatctcaggcgtctttgcaccatctagatctcgtgcggctggctaaccatctggataggtgtggatcaaaaccccgctagagatatggctctgctgataccatgttgagaatcatagagttccatctcaaaaccaattg

SEQ ID NO: 345271 - DNA, 992 bp, Cannabis indica
ttagatagaaaactaagcataaaaactcaaattttcataatactacccatgaatgggtaatacccattaagagtacccacatatatatatggaatacttttcaatgggtattacccattaatggatactaaaaaaatttaactataaatattaattttaaaaatattaaaccatttaattttgatcgagaataataaaatagaaatttgaatttctacgcttaatttagcttcttaattaaataagatataaaaaaatatattacattatatcaaaaatatgtttctataaaaaatatttaagttaaactcaaatttcttttatcatttttttgacgaaaaattatttatttattttttagctgatggaacaacactctagctcatacaatgtaaacatgagtttttttttttaattaaatagaaaaattaattataaaaattaaattttttttaatattattcatgggtaatttaagtagatatttaagattatagcatttttttttcttcacatcaaagcttaaactacctcaatattaacataaggtacttaactttaacacattttttaacacaactttaacacatatataatttatctcgaacaaaaaattgatattatatattaattctcaatctcaaatcatgggtgacaaaaattaaaaattaatctgaccataactcataccaacaacagctccaccaattaattcttaattaatagacttttgccaccaaaataattacacatgtactattgaaaatacaacttattaacttgcgtgttgtgattcactttaataaatatttattatttattattcaacaacaatatataaatgcagagaaatactaacactacaaagaaatgttacttttgccaacacatttttgtattggtaaaagttggtattgcgctggtaaaatagaatttacttgtgatgtgttggcaaaagggggttggcatatcaatgttggtattagaacttt

SEQ ID NO: 345272 - DNA, 1458 bp, Cannabis indica
aacataaaatgttatttctgatctttattaataagtaaatctgattatatgaaatcagttttatttagggcataaaacccaacatcccaggtccaaatcaagatcatggtccattttctagctgatgtcttgggtcttggttcaggtctaaggtctaggtttgggtctaagtttgcgtcttggatcctgagtcatgggtctgagttcctgattcaggtcatggccctaggtccctgtctaggttagggtcccagtctgcgtgtaggtctcggtctgtgttcggtactgatgcttgtctcgggtcttggcctggtttgggtttgggtctcggttcgtttcttaggtcccggtcctgggtctcgctctcagtcccgggtcctggtctctgtcctagtccgagttctcgtcccaatccaggtttaggtctcgatcctagttcgggtctaggtctcaatcctaatctcggtccgtgttcgagtcctgtgtttgagtccgagttctagtacgagtctgggtctaggtctgggtctgggtcctggtttcagtctgtgtctggttatgggtcttggtctgggtttgggtttgggtttgggttctggtacgggtctcggttctggtccaagtcttgggtaacgagtcctgggttctgggttcttggtcgtaggtcctcgcaaaattctgggtctgggtgcgggtatcgatcccggtctaggtccagttccgtgtttggttttgcatttagatcttgttttgggacaggtccaattcctgttctagggtcttgattctggttcttgttcgtattttaggtctcgggtccaagtctgggtttgggtcctggcctagaaattgttccaagttcaggtccaagatctagacaccgactactggttgggtccaaggcccaggtcgtgggtcaagatctagatcccaatcttgggtctcgatctcatttcaattcggatcttgggtcacagtccgtgttcctgtccgggttcgggtctgcgaccgagactgggtcgggtcttgggtcccagtcccattattaggtctcgattctacttctaatttttagtttgggtcctcaatttaggtcagggtcctgggttcaggtctgagtctctaatccctgtttgggtcctaggttcgagtatgggtccaagtccgtgtcttggtttgggtacgtgccccgagtcccgatctgagtttttattcgggtccgcatctcggtccgggtctaggtctgtgtcctgtcagattccagttctcgactcaaacctagactcggactgggacctaggtttggggtacgggtttgggtctgggtctgggtcttggtccgagtctgggtctgggtttgagtccggatatgggtcccagatccaaacaccgacaacaggttatgtccaagcctcgggtctagatctggataacagtctcgggtcccaatctagttcc

SEQ ID NO: 345273 - DNA, 510 bp, Cannabis indica
aacttgaatttttgtttgatagtgaaaaataaattaatcatagttctcgtgggatcagctcttacttacttttatactgaaataattaaaagtattagaattaaaataatagtattatcacatttaattgttcttctattgtattttatttaattctcatattaaaattcctctttctaattattgtcactaattattgaataatttaataagcatagtctttgtcggatcgaccctaacttacttttatactgaaataattggaagtattaaaataaatatttgtaaatttgttttggtaaatgacaggtgtgtgcatgagttggggctcgcgtgtgagcccatgcgaggggctcacatgcgagccgtggagtgtgtctgtgtgttgtgtaatgggcgtgtgcgagtgcgtgagttggggcctcgtgtgggagcccatgcgggggctcgcatgtgagtcgtggagtgtgtgtgtgtattgtgtaacgggtgtgtgtgtgtgtgtgtgtg

SEQ ID NO: 345274 - DNA, 665 bp, Cannabis indica
tcttatatactttgtgcaaggatcatttttcaaaaatcatcatcgatcccaattgattatctccccctaatcgagagaattttttaaaaattatgatatctaataatatcaatacacttgtaaggatttcaatatatactatatgatattgaatttcaggttcaataaacttcaagttcaagttcaatagttatgaccttaattcatttcttagaatgaggcatacgtgtataattagaaacacataaattcacaaattttataaatccatgatcatatgatcttatcacatcgataagaaactatgcaataaaaatctaacaatggctcaagattattaaagaaatataatttaaatattttcttaaaaaataatttaatatatatttattttctagataaataaataaaatcatatatattaaaataaattatataaaataattatcaataaaaatataattttatcttataaacaagttgttatacccgaaatttagctggcacttcagagaaggacacgtgtcaacctaggagaatacgaatcaacgaatataatggcccaattatatcaaaggatattaaaatggaataactcattaaatgcggagttgacagagtatatttataactcgctgactgtaaagccttaagcgagataagga

SEQ ID NO: 345275 - DNA, 1555 bp, Cannabis indica
atagttatggagattctgaccttatagaattgttcttgggtagccatgggactagtttgatgtttacttgttaaaattgaggtgatttttagttagaaatcgagtttggaactttttaaagcttaagtccgagctttaatggtgttttctgtttaagagctcgattttcattttttaatttttgttacgtaaggattgctgtatatatggtatatatgtgccctatgaagtttggaatgatttggttaggtatcaggggtatttcagtgagtgcaaaatttgagattttcgtgctaaaaaatgattggccgtttttaccaaaacggcctatcatttctaaaacttccaaggagattaaaaatcgtatttttatcataacttttcactcgggtgtccgtttttgacgttctatataccgttttgaagcttacaataagctctaaaatatagtgtatgtttaagagacaaaatataagttttattttagtgtatttataccacggggtttggtagaaaccttagattgtcttatgtgaacattaagcggtgttttgagatagacacttattagtttattattgttatgacataggaaccaggatcgtcaatcattctccaagcaggtcaacaaacatacctgaactaaaacttgaggtaagaaaaatatattgtactgcatagcaagttatattgcaatctaattaatattgttgagaattgattaatattgggattaagatacggttattattgttctgtaatgaaaagattgtctgattaggcaatgataatttgatgataccgtgaatgtgatatacgggctcacctgattaagtgatgcgatatacttgtcggtgacacctgattaggtgcgggcggcaatgacatatgaatgtcgggttatggcatagactgaaactgttgttaggtttcttcctgtcggtgatgcctgattcggcacgggtgacagtgacatgtaagttccaaatttgggcatggactcacctgagtaggtgatgcgatatgttggtcccagtataaggcacgagctcttctgattaggcgatgcaatacatgggtgccaggtttcgccacgggctcacctaattaggtgatgcagttatgcgatatatgggtgataggctatggcacgggcttgcttgattatgcaatgcagtatacgattactagattaaggcactgacttgcctgattaggcaatgcgatgtaataaagatggttactttatgaggtaaaatatataatttatattattaaatgaatatattttctattattggtataatagttttgtattactaaatatctttatactgatatttattcgtgacagatgtcagtagtgatttgagttttatcttatgagtaatgcgtgatcgtttgattctgattgtctaagtataaatgataatattcgaataataaattatatgattattgttattatttttctggttgagtccttatgactcacatgtgctatgtggtgcaggtaaaggcaagggaaagctagatcaaccatgaggtgatagtc

SEQ ID NO: 345276 - DNA, 1384 bp, Cannabis indica
aggtttccagccagttctttgtgatgtagtaatctgaacagtaattttgtgggtcaagatacatctctttcatcactgctaaggcatgcgcacatggcatttaatctatttaaaacctgttgcatgtgcatgtttttttgttctagattcacaacccatgatctttttactttgtacacttcaaatatgtgttcatttgatgctctaacctgagaacaaatttgttgtgtatattgtttgttaaaataacagaaattaaacattagttcaacattatgaaatataattctagaaaaattgtgtacctttaatttcaaagcagttttgtagttgcccttcatcttcatctctgcaactggagtcaattttgtgaatgttccttgtgccattttcctgtttttgcatgtccattcctggattaaagtcctcaaagcttccattagtgttgttattgggagttctctagctgccaggtttgctgcattcaatgattcaacaacattggatgtcattgtactgtatcttttgtgtttggaatacaaccttgaccatttctcatatccaattttttgtagataaggtcgaactcgtttgtctaaggcatcgagctctctcatgtgatattcgaattttttagcagtgtatgccttggctgcacgagaaaatggcttttcgaagaaccttgcatttttcttgaatgttgttttcaggttgttgagtaggtgatacacacaatatccatgttgtatttcagggaagacttgttgagctgcctttattatactttcatgtctatcagatataacacactgttcttgtctaacaccaaatgttgctcttaatttttcaaagaaccattcccacgatagatcattttctgaatctaccacacaaaatactaatgggaatattttacttgctgcattttgtgcactagctgttagtagtgttcccccatatgtagctttaagaaatgttctgtctactactattataggtctgcatttttcccatactttcagtgaagcatttagtgccatgaagcacagcaagaagttgttgttttcttcaattttaatgtgcactacagatcctgggttcgttttttggagcatatagaaatagctaagcagcaactgataagactcctttgctttttctttaactatgtttagagcatgttccctactcctccatgccttcatgtaattcatttgtatctcatatttgtcattcatctcaaatcttatatctgttggtgtagttgttgtctttatgttcaaaaacttgtatttaacacagtcccctattatttttgttgatgcttgtctttgatctccaaatctgatgcttagtgagcaagtgtgtttttctatgtatttcc

SEQ ID NO: 345277 - DNA, 656 bp, Cannabis indica
gaccgcacctgtcacatcgcgaaactaggggcatgtgttatagtgagatttctctcacctagaaactcgagactagactcctgtttagaggacacgtgtacttagatttccaatgaaagctgagatgtccatgagagactcctcgaaattttaaacctcacttaagatagaatcagcgagatgcagcgaacatgaccaaagtctgatcgcatgattataactcgtgttatgtgagacaagagagtaactcgcatatatcggactatgtgcaagtatcctctccatgtccttatataaacctggagaccgactttctgtgaatgcaagttggtcctaagaaccctacagccttgataaaccaatatagactcgcatgtctaagttctgtcagctcgtcatgcgatgtccacaaaggcgatcatataagaacgcagacatcttaaacgaaattaaatgataggcctgcgagtttaatatcagaatatgaacagtcaactcgcatattcggaggacgcatacgttgatgaacttagtaactgccgttcatttattaatgttaacgttgtttagtttaattgttgtaattcaatgtgtagaacggattgacaattaatgcaatccttgtataactaattggatacctgctttgtatataa

SEQ ID NO: 345278 - DNA, 706 bp, Cannabis indica
taaacttccaagatctttgagcttgaaatatgaatcaagtgtatatgtgaagtgttgcaattgttctagactgtaagttgtaactatatcatctacatagtttaatagcgcaatgaagatgcatgttttgtacctaatgaacagggagtgatcattttttgattgaatgaatttttgttgtagtaatgtggtgctgagcttggcataccaccgccttgagccctgtttcaggccataaaggctcttttgcagtttgcaaattgcattttttagaattggtcctttgggagtgtagccttgaggtaacttcatgtagacatcttcatgaagatcaccatggaggagggcattattaatgtccatatgatggagataccagtttttgattgcaacaagggcaaacaacaacttgagggtgttaaatttaactacaagggcataggttttaaaataatcaacacctttttgttgagtttagccttttgctactagccgagctttgaagcactcgacagagccatctagattgtatttgattctatagacccatttattattgatgacatgttgtcctggtggagggagacagcaatccagatttcattggcctctagtgcatctattttagtgtccattacctggttccatatatgttctttaaaagcttagtgtaacaccctaactagcataggcgtgttagcgtgat

SEQ ID NO: 345279 - DNA, 574 bp, Cannabis indica
ttaatattttatgtaattattccaacaacgaaaaccatattttatttaatttgcagttgcaatttagaaaaaaatattaatgatatgggcctaattgtatttgtttaaaacagtctcaaactaagacttttttattaaacccaattttcactgtggtttgaaaattcataatgagtttgtccttttaaaaacaatccttaacattataagcaatgggcctcagcccattgataagaccagctgagttagcctccactctctccacaccataacatatatttatgacaccattgagcagcaaggcttagacaaagtagaacatgaaacctagtagtagtgactgcatggctcaagcttggaacatgaaacctatttcatcaatagaagtacaactgttaatttcttggcccaaaatattgctaactgggctctttattgtaatgtttctgctcatattgatgctgttttagctatacactgaattgatcgctggacctctgtaatgcttttatagataagttgaaaaatatatatttttttttggggtaagttgaaaaatgcctcttttattaat

SEQ ID NO: 345280 - DNA, 902 bp, Cannabis indica
ttgtaaaatgataataaaaattggttttatttgaattaaaaatcagcttacaaaagtaataaaaatatgattaataaatttacatcccaactaacaaaagacaaaagacaaatggggcaaaatgaccatttttcccctcccacactaaaagtcataaaatggcacttaggtgtattttggaaaaattctaaaatcctgactattcctgacattcccaatgtctaaactattgtcccgttaaactaaagatactaagatgtgattctaatagccatacaccgcgttccaatgttgtcggacaccaaaatatgcaaaataatgaaatttctatatgtaacataaaaatgcattcgtaattcaaataaatgatcataaattattaattcaacaccaataaatgattttcataattaaaccctaattatctgctaatttctaaattaaagctaagcggtctttacacaattgcagttataatctgccttaagaaaacttaaatatactttaaggattttatcactttgtatatttttaatttgctcacttgaatagtgatattatctattcattttctaggtttaagtacgttatcaaggcgtcgtgatgcctcgtttactactttcctagctcgtgagaaccattagtattcagttttgtacgcgagatataaattttgatttccacccccgtcagagaggttataaatcaaaaattatagttgtttgatctattcttcgtcaaaaaggtttgatcaaggtgttataacgattcgacccctttctcgtcaaaaaggttttgtcaggttgttataactgtttgactccactttcgtgaaacaggtttagtcaagaacctttgaatttcaaaaaaaaaattgaaatggcgggtttgcattatacaat

SEQ ID NO: 345281 - DNA, 561 bp, Cannabis indica
cttatatgataaattaaataattaataaatttaaaattcacctagacatttttatagatattctaatcataatattttacaaatttaaaatttgttattttgttaaatatttttattgtttataaaatctataaattaaaaaaaaatgatattttatatcatttggcttatcacaaatttataaaagacttaatttgagatattttgagatataattaggataattattatttatttattattttattcttaaaataataattgtctaaccatatctattttaaaattggtttattttgttatttaaattttattaaattataagattagaaaatgatattgaaaatatctatttggttattttcaaatcatttatcttattagatatttaatttaatttgataaaataattcaaataaatctagatattttaaattagtttcatttttaaattttaaattttgaaaagacatttaatgttatttttaacaactctaaattttcaaatagttgattagataaaataaaattattatattaatatcttatttcacatttgtt

SEQ ID NO: 345282 - DNA, 398 bp, Cannabis indica
cattacttattagtaaacatattgttaaaagaaaacaattaaaatgtaaatggtatagaaaaacgtgaatattttatattaatttgaactacaatatttatataaatagattatttttaacgctggatgtaaattttctttgtttaaatgtatttaggtgtaaatatgagtaattaccaatttctataattgaaatgttacaacttacaaatcacatatttacgagaaaaaaaaaaaatcaacttctaaacatagtcttgccctatttttttttttctaaaaattcctcaaaatgcattaattatagtatagaataacgtgagcacaataggggtcatctctcaaaaattaaggtggcgtttggtaacaattttttaatccgttttctgtttttaaaa

SEQ ID NO: 345283 - DNA, 586 bp, Cannabis indica
atggtaaataaatacctttttaaattttacaatttaatttaagtaagaataacaaaattaaaaagttaacaaaaataccttatttcctctttttaaaattaccatgattatagtaatcttattctaaataaggtcaaattactaaaagaatatttttataaaaaaaaaattaatttctgaccttatatttaaaaataagataaaataatcaaaatttaaaagaaataagaaaagaggtaagcaatacttgattttaacctattttcaaattcaaattacactaatatctaaaattaattttaaaataaaattaatttatttctgataattagatttgaaaaatgaaaataaaaatcaaaatacaaaactgcacaaaaatcggaagtcaattccatgaaatagcatgaaaaattaaagaaaacgaagaaaaattacacactgtacggatgctatgagttgcataccacccgcgcgtgtagagagggtgatatcccgagtttcctcggctctgggaggctgcaagcagcccttccgcgcgcgtgagaagggtgatcaccaccctcatttttcccgattttcaaaaatt

SEQ ID NO: 345284 - DNA, 1310 bp, Cannabis indica
taaagttgtatctcattcgtaattaactgcttcacccaagggtttttcttagagacaataacccttcctattatatccttttatttatcaacaaagtttattcgattttgtttaacttatatttttttaattttttaattataactgatttaagttaatttgtgttatttatttttattcattatattatagaaccggctctactttaattataattggtttgagttatttcgtgttatttgtttttattcattataaaactgttatagaaccaattatatcttaattataactggtttgagttattttgtgctacttatttttattcattatgttacagaacagttatattttaattataaccggttttattaggtattatgtgttatgaggttttttttattgtagatttagttttgtttttaatttatgtttcagtgttttaggaactggtttcccctttatgtttcaaaaacctcataacacataataccttataaaatcgattatatatatatatatattttttttaaaagtagagatcaattttaaaaatattgaggtataaatataaaagaaccaattccataacaaaataaataaacacaaatagtaacacacaataactcaaatataatataaagaaaccagttatatttatcaactagttaaaaattgaagacaataactggttccgtaaagcaaataagataaaaactcacacacaaaaactagttaaataaaatagctcaaacaaagacattcattcaacatgttccaacgcaccaaataattacactcataccatatctaccccaaaaatatacttctgtgttattagattttttattgtagaactagttttgtgttgaatttatgtttcggtgttttaggaactgatttcccatttattttttaattgtaatcagtttgaattattgtgtgttacttgtttgtattaattatgttatataaccgattctattttagttataataaattttgaattatttcgtgttattggtttttattcattataacattgttattgaaccggttctattttaattataactggtttgagttattttatgttaatttatttttatttattatgttacagaactggttatatttcaattctaaccggtttgagctattagattttattcatagaaccagttatatttttagttatatgtgagacatctatttcgggtgactttgccagtgactttttggtgactttcccgatgacttttccggtgactgactttttcggtgacttttccagcgacactaacttttcc

SEQ ID NO: 345285 - DNA, 1046 bp, Cannabis indica
aaccaactccaaatagtaagtgatttttctttttattttcttacatgcttttaatgttgtgttctctaggtttgcttactgattccttagttagcacctttgttacctcattcgattttagcaattttagggctgaattgtatctgggtaaatgttagggtttagatagaatgtaggttttcgagattttacaatttaccaaattctagtttgataaatttcttccatgaattgggattgctttctccttgcagcaatgtcccaatctggttcggaagtttatcgtccagaagatttagaaatagagtatcctatagaaccttccatcccatacaaacccgaaatttcaagagccaaatccaaattagagataagtgatgcaaaaattagggaacgcttagtgaaaacccatcaagaagatattgctagtcgccatagacacttcttgaaagaaattatagaaggtagacgccgtttctgggtagatgctgcttggcctgaacctctcagtttgtcttctattcctttggctaagcctttgtttttacccgaggtcacaattgcttttgaaccaagtgacttggactttgaaattatgtcttccaagccacgtaaatcaaagactccccaggaccctaacgtcaccttcgaggtcgagctaatagagtaaaaggtgcaagccatcagagattatgtaggtaataccctaagggcttgtggggttgaatataggcgagactgccgggttatatcggtacgtgcttgcgagttcagttgctatccactagtgcaacttacatgcaaaacctctgaaaaggccagtggcgagagtagtacaagttgctcgactgggataggagctttgagcctcgaacacatcaagtgtggagcaataatccccctgcgagactatttcaaggacttcctaaatacctcgggcttgccccattccaactaaatcccatttcatatagaatccttagaagtttgagggtttatacaaaatcttggattgggagtgccccactgttggaaatattttacca

SEQ ID NO: 345286 - DNA, 509 bp, Cannabis indica
taacatcctaaatatgaatttccaaaataatggaatttaaacacatataaagttcaagaaaccttacattaattttagtggaattaaatgtctcattctactcagatctttaacccttgttcctttctgtcgcagaatattttcaagatctgaggccgattctccttcaggtgttggattcttcatagtcttacacaatatgattgagtataagacttgctatgtgtgggcatgtactctataactgtgaggctcgagaattaaagactctataactatgagtctttagttgtctgacaaataatgaaaactagaatgagaaccatcttattccttttagaggatttctcctagggttagatttaaattatatgacattaaaaaatgttaaaaattggctaaaaatcaccttaagtggccgaccataagatgggccccactaaattaaaattttgccatttttattcaacaatttatcatttctttcacaaatgccatattttctaatt

SEQ ID NO: 345287 - DNA, 801 bp, Cannabis indica
ccaaattcaagagaaggacattcaggctcagatcttagtgatactctgctacagaaaggatacaagggttagagatctgagtgggaggagacattatattctgctgcaactgctgtagggttgcttatactttatatgtgtttatttcatatcgttttagaagttcatatttaggatgtcaataacatacttgttagtaaatctagatcctggtaaaataattccaacaactagccttagattcaggttattgatttactttcaagaaatttggacttaaaacaatttgtgtgtgatttggatggttttatgttgatctgtgtgttatttgatgattgattgatgcttgtttaatttttataaaaaataattgaattttcgttctggaattatttttgttggatagtttgggaaaaattaagcaattcactattttacagaacttaatttcgattttatttgaattagttatgatttattgaagttttggaaaaagataagggtggtgacacaccccatgcgcgcgcggatgcacgtgcacacgggtgtcacccgaggttcagacagtccctatccgaagaacctcgcctgtgtgttgtctgaacacctcgtccgcgcgcggaatggctgcttgcagcctccagcaccgaggttactcggtcagcattccttagatgcgcgcgcggatggtatgttgtgcataccatccgtacagcttacaattttttttttcgtttttcttcattttttcatggaattaattttcaattttttgtgtagttttgtattttgatttttact

SEQ ID NO: 345288 - DNA, 651 bp, Cannabis indica
gtatgtgaaaagggtttctgatgaattcatacattatgtacgtataatcatgtgaaccatgcaacattaaatgctatttctgatctatattaataagtaaatctgattatattgaaataagttttatttagggcataaaacccaacaattcaaactatcataccgccaaccctagtcaagcatataaaataaaatctaaaatattacatttggaaaaaggaaatattaaaaatttcccacacaacctttcaattgaactctaaaataggcatgtcaaaaagatcaatttagttggagcgggttggagctccgacccgacggatcacctctgatccgaaacattcagatacttattggatcttggattagatccgctccgccccgcctaatttttttctggttcggatctgatcccacccgatttcaattaatttttttaaaaaaacttaattcaagacttggatcccttgggacctggactcagacccggacccagacttggacccagacccggacagggacccgggaccctgaccaagactcgggcccagacccagaccgggacccagacctggacccggacccgaacccgggacccaaactcggacccaagaccccagaccccggaccttggacccggaccccgaaccc

SEQ ID NO: 345289 - DNA, 559 bp, Cannabis indica
ctaaaaaggctacctcttttagatgcaatgggaagagctttctttagtccatttactaataagtagtatgctccttctatattagtatttctgattataagaggacgactacatctctgaggggagttaaagcggtagctggttgcaaaagaaagagccggagtgtctaaagataaaaaaggacaaaaaaaaaaaatgggcagctgtctatttcggttgggactcgtagtgttttgtatggggttcgtactgttagtgttagtccacgtcagcaaagatattttaggtttcaattgttcagatggtaacagctgtctatttcgggttacttggtttagctggctataagtacgatttctgggtattttgttgacgaacttttttatcggagatttgggattacgtttcttttttcttgtttcttctgtatgttccatggcaggtcagatcttggagcttgaggatgttcatcaatggcggaatgatctgaatctagaatttggtgagttcaaactgaagggagttaagtgtcatcttcatcatcagatctgaagggatt

SEQ ID NO: 345290 - DNA, 666 bp, Cannabis indica
aaagagcacatggctaagccaccaatcctatcgaagcccgttctcggagaggacttgttcctatacttggctgtctccgagaatgcggttagcgcggccctagtacgggaagaggaaaaaaactcagcatcccgtgtactatgtcagcaagcgcatgataggagcagagacgcgatacccggtgattgaaaaactagttttttgcctcctaatggcctcaagaaagttgagaccttacttccaagctcacccaatcaaggtattaaccaaccacccgctccggcaagtcttacaaaagccagaggcatccggaaggctcctcaaatgggcaatggagttaagccaatttgatctacactacattccacgcatttccataaaagggcaggcattagcagacttcatcacggagtgcaaaagctgaagctaccgcaaacatacccacaccaccagtcccggcgtggaaggtattcgtggatggcgcctccaacgagaacggatccggagcaggggtcgcaatgatatccccaaacggacttcgactccaagcagccttacggttcgaattctcagcttctaacaatgaggccgagtacgaggccctgatagcagggctgagattagcaaaaaccgtgggggctaaaagagtagaagtctacagcgatt

SEQ ID NO: 345291 - DNA, 553 bp, Cannabis indica
aactgtttaaaaatattgaaagtgaagtgattttttttttgtttttaaaattttaattctcaattaaaaaattaaaaagtaaaaaaagtttcatagaatatgtttttgaaaaatatttccacttttttaattttaaaaacagaaaactaattaaaaaagtattaccaaacgagaaaatacagggtctattttgtcatttaacaaaacagaggatccaattaataacttttgtaaaatacaaagtctaaaataatatttacctttatattaacaagatagtcttcacattaaaaaaaattgaatacccaaagaactcaaatatttagttaattatacccatacaatcagtgacgaagccagaaatttagttgagtgagggcttgaataaatattaagtcaaaactagtaaaaataatgataaatgtatcttttaaattttcatcttcaacaaaataaaataatactgttgacaaaaataaaataaaatattgtcaatggtattattttattttttaataagtattatttttttattatttgtattggactactt

SEQ ID NO: 345292 - DNA, 777 bp, Cannabis indica
ctttttcgttccatcctagagaaagtagggttgttggtttttgctgctcaagtagggatttcatcaaggttctaagtttaatccaagctctaggtaaggctcttagctcctatcttcatgttttcttgaattgtaagaaaagaatgattgcatgctttgagtttatgcttgctgtagtttctgtggtgaattgttattgtgttctcaggttaaagcatgtttgatggtgttgatttaatctagttatagtggtttttggttggatttatgtaagtttggaattttaactcaaaactttgatttttaatgataaaatggtgtttttgctgctgtgttcattgtttgtgtttgagttcggtttctggatgttacttatgttgttttagcctgatttaagctagttgtaatggctggttgtggtgttagccaagctttgagctttgaagctcaaacttggagctcacatggtggattctgattctgtgcatgctgggttgttttgttgcttttgaattgttatttggggtatttggagctggtttggaaagttttaggtggtttggggttgaattcgtcgagttatggaattttgaaaaattcgtgcattgaaccggaattccggttcagggaggcctgtaggaaccggtcgactggttggcttccaggaatttttcccagaaccggaattccaattgaggaaccggtctaccgattggggaaaatttgggaaccctatttcttcccatttttgtgttatttagggtgttgccatgttat

SEQ ID NO: 345293 - DNA, 1546 bp, Cannabis indica
gttccttatgcttcagtagttggtagtctaatgtatccaatattatggactagacctgacatatgctatgcagtaggaattgttagcagatataagacaaacccaggagaggaacattggactgcagttaagcatattctgaaatacttaaaaagtacaaggcattacgtattagtctacaagggtggtgctttaaatcatgtaggctataccgactcagatttccacgcttgtctcgatgaatgaaagtctacatcagggatggtttttactcttgggggtggagcagttgtttagagaagacaacttagctgatccgttcaccaaagttctgactgtaactacattttaaaagctagcacaaattgaatttaggattaattgaaatgtactaattgttttatgttagtgcaagtgggagtttattgggctttgtgccctaaataaaactctatttcaatgtaatttttactattcaattatcaataaaaaatagtattaatttcattacttgttaaatgtgttatttggttcatgtgatcatttatttatttatttgatttataaatttatccaaatccttatcacactaatattcttgtttattgtgttgtcaacatagtggaaagtaatcaagattgtgtgattaaatgtattcctatgatttatcagtacacaaagtttaattgatatgataatctacaacgtagtttacttacacctcggataagtgctatgttctttccagggcattggttaaagtaagtttgggttggatgtatggagtacgcatcggaagggcccgatattgaacttggattaggtatgataaacttaccataatatctatacaattcaatatcacctagttgatcctagatcaaatgatctcaatcctgagatggttagcttctagttcacttgcattatttgtgttcttgaatctattaattaaagtcgaccaaatggttcttaccgtgagtataggttaagaacatggtagttcaattgagtgggagcactaatcatagatacggaatctatagcttctatcttgacatagaagtgaaacgatgatttccttcgagcttggctaaatagagacaagtgatagagcgctcattttagtgatgatattagttcactgaaatatcatttataggttggtaagtgttttaaggataaaatacattgaagggtgtaacggtaattttgttcctactcaatgtaaatcatctatagaggatcattgattattaagattataacaatgaataactaatagcgtatctatatcttggaacatatagagcgttctacataattgagaatgcaattccaaattctatagtggtgccaggaggaattaataagttagagaaattacttggtaaattctagatctgcttattggaagctcgattatataggcccgtggtccccatactagttgagacaaactacttgtaagacacagttaattgattttagttaatcaattatgattctaaaattagactatgtgtagtttatgaatttttcacta

SEQ ID NO: 345294 - DNA, 485 bp, Cannabis indica
tttttttttttttctttttggaataacattataacacggtgtttaaatattgactacctttttcttttccaaaaataaattatgctatcgaaattagaacacgaactatatataaatataataataactacaatgtacgtataatatgtgtactgttatatataaaaattaaatgggatattcgcggctagttaaactctacgactaatcatatctaactacgtaaatagatttttttttttttttaaaataaaacactcaaaacttatttttgaatcagctgtgtttcatactgcattaaaccaatcttattgtcactacaaaaaactgttatttttagtgataactttttagtcacaacatacttttttcgtgactaaatgtgactttagtcacaacaaaatattacttgtgactaaaatatatagtacttagttataacttattactaatttagttttagtcacaagtaatattttgttgtg

SEQ ID NO: 345295 - DNA, 569 bp, Cannabis indica
acactagtgaaaacttaacacagtatactgcagtatgaaacttataaaaaaacacagtaaaaaagtaaaaaatactgcctgacagtatttttataaaaaaatggcaaaagtcagtataccatgtaaatttccctttcaaaattaaaaagaaatgttgaattgaatgggctattatatgactccaaatgatcaatgaaaatatttagatgtactgccattcagagtgtacatgtaaagatttataccaactttgttttttatttgatttagggctacttcataattacaactaataatttctaaatgatgaatcacctattttgaagattcttttaccttcattgtagtagtacaccccgtacaatccacattatatttagcctttaaaaaagtggtatgaatcagataaaatttaataaggatggtacaaatcaataatgttcactcatagtggtggtatgcctaaataataggggtaagttgaaaaataccatttttttaatcaattttacctctaattttgtattaattgaaatgtacctcttttcatatgtattgtacccaaaata

SEQ ID NO: 345296 - DNA, 911 bp, Cannabis indica
acaaaaacacagtatttttgaaaaaaaaaatatttgtgtgaacagtatttttataaaagttaaacctaaatttcagtattttttgtaagttttccaaacaaaacgtataagtataaaaagaggtttgctagcatctccaacgggccaacacccttaattatcaaaaggaaatttgatgttctatacttacatatacctcatatttttcccctaaacacataacacttaatatttgtgggatatgacatattttaaaatatccctaaaatacccctatttacattaccccctcccttttctcttcttctctttactgtcgagcttcccagggctaaaataagatacccatcggactccaatcgggtccccatcggacccgacagacccaaaagaaaatttcagcacatgcatcggaccccatcggacccgtcgaacccacaaattttttttcccagcacgcacatgcattggacctcccatcgaacccgtcggacaccccatcggacccgtcgaacccaaacaaaatttttttcccagcacgcaagcatcgaaccccccatcggggtgcccattggaacccatcgagccatcgtcttccccaaactgcaattttcccaaatcgcagatctgaacctaaatctaacaaaactcacggtgcacacataaacacatacattatacattataaccctaaaatcaatacctattaatactccaaatcatatatcacacacacaaaaaaaaaatgacaaaaaaaagggggccgacggtgtaggcggtgagagagaagtgctcggttttggtttgggagggggccggcattgtggacggtggtgaggggccggcattgtggacggtggtgaggggggttttgggtcgtgtgtggttcggtttagagagagagagagaga

SEQ ID NO: 345297 - DNA, 1247 bp, Cannabis indica
tgggttcaaaactcagagactccattccaacagctcaaaaaaatgcatcaaaaactcaccaaaactcaccccaaacatgcatatatctcaaaatcatttcccacacaatataattaacataacagagagctaatacacacatttaaagctcaaaatcaaagctcacatgcatcaaaattagatttacacaatatacaatataggctcaaaacttgagcaaaatatcaacaaattcaagctcagactaactacgggtcaggtcaaagcctcaggtctagattccgatttcggtcttggatcccggtcttattctagtttgggacctgggtctcgggctgagtcctaattttgggtttgggtccaggtttggggttgtgtccctatagtcaggtaataggttctgggtccaaggtcaggtcatgtgtctcgagtttggggtcgagttttggttctcggtcccggttctcgggcccagttttgggtccaagtcccccatctaggtctagatccttggtccatgtttgcatccaggttcgggtttgggggctaggtcccccatctaggtcacggttcaattttcatgtccttggtccgagtctcaggtcccgggtcccggtcccgggtcccgatcccaatctcggatcccagtccaaatccgagctctactccctgtccaggttcagggctcggtccttgtttgggtttgggtcccagtcctaatctcagtccaatctgagtcctaagtttgagtctgagtcttgggttcgtgtctgagttctagtaagagtctagctctaggttccagtctgggtctgggtttggatttcgatccgggtatgggtccaggtccttgtctaggtctgggtctgggtcagtgtttgggtctgaattctagtacgggtctggattctagtgcaggtcacgggtcatgggtcctgggttccaggttctgtgtcgcaggtcctggcgcaagtctgggtccgggtatcgatcccagtctgggtttgagtccgtgtacggttctgcgtctagatttggttctgcgtccaggtccaattcctattccaaggtcctgattccgattcttgttccgattttgggtcccaggtccgagtctgggttttggtcctggtatggaaattgttccagttttgggtcttgggcaagtttttgagctctatccctaagagcaagtgaggggaggacggtgatatgttggaatcggctgaaactgagtccgggtgatg

SEQ ID NO: 345298 - DNA, 924 bp, Cannabis indica
tgcaacataaaatgttatttctgatctttattaatgggtaaatctgattatatgaaatgagttttatttagggcataaaacccaacagttattacaatcattaacactccctgagtggaagtgggaagacattacaatagaatttgttgttgggttacctagaaccacgggaatgtatgactcagtatggtttatagtgcatcgtttcacaaagtcaccacattttttgccagtaaaagaaactataccgtggatcaatatgcagagttgtatgtgaaggagatagttcatctccatggaactccaaaatccattgttttagatagggattcaaagtttacattgaaattctgggtaagtctttagatagttttgggtacgaagctgaagttcattacaacctttcatcctcaaactgacgcgtagtcagattgaacaataaaaagattagaagacttattatgagcatgtgtcatagactttgaaggttcatggagtaaatacttacctttgatagaattttcttacaataacaactatcaaagttgtaatatcccataaacttaattatgaataattagggtttattatatattacagattaattaggtagtaatgagtaggattatgatcctgctaacttaatttagcataaattataaattttgctataagtggataaataagtataatttatttattttggagatttatttagaatgtattgtgatataaaaatattttcaagttcagcaatcctagagacttgatttgaggccaaaaatttcacaatgtttttagttagaaatattgatgggattattgagataagttgattttaaaaataccaaggtattttggggtactcagagttgaccaaatactctaagaatagaaatttcttaatagctaaggaatgataaa

SEQ ID NO: 345299 - DNA, 1141 bp, Cannabis indica
tttctttttcagcagcttcttctcaaactcatcggcttgggctttgacggtcttcttggcctcctccttcaccttctcggcttcctcttttgccttctcggcttcctcttttgccttctcagcttccttctttgccttctcggcttcctctttcactttctcggcttcttgcttaaggcgggtattttcctgttgggcgtcgtcccggtgcttactcacaaccttacattgtgataatagcttgtggacctcgccctccaagtattcaagtcgctcagagagtaatcgatgagaagcaaaagaagcctggagaattgcaaacagatgaatacgaaagaggtataaaaagaataatataattataataacaaaggcaacgtaccatgaagtgacggtccaagctccttaaagcatctcttttggactcctaagattgagaaaatcccaatcatggcgaagaagattttaaagtttgtgccaacaagcaactccatatgcttgggcaaattcaaacccggcctcccctactgcgaccgacaaggtctcaatggccttgctcgaagaagcggtagcgggagttgcctcaggacgaggagcattagagtcggaaacgattggaggaggaacttgttcttggatctcgttgttagaaacctcgagatcaatgggctcgactagagatttcttcttatgggcggtagttttcctttgcctcttagaaggaaccacttcggcagcagtagggactccagggttggttgtcattttcttccccttccgctccatgatatcttcataacccatgtctgaaaaacaagacaaagcgttacaattattaaaaaggccgatgaaaaagggaagaatataattttccacctaagggatttaccaaaatcactaaaaggtgagctatcactagatgaagggctagaaggaccataatatccactaaaattcctacagtctgtaatcttgaatatatcaaagggctcgattggttctaaatcccagctcgcatctatgtgacctgccctatcttccatagtaccgtattgctcagctataccataaaatgactcgtgacagttaacctggacgtggaatctagggtaccagctgtcaaacttatgagcaatgcggt

SEQ ID NO: 345300 - DNA, 951 bp, Cannabis indica
actcttatgtgtttatttcattgttttaaaattcatattaggatgttaatgaaacatacttggtagtaaatctagatcctggtaaaataattccaacaatatgggtgctcgtttttggcacgggctcacctgattaggtaatgcagttatccaatatatgagttcaagctatggtacaggcttgcctgattaggcaatgcaatacgggattatcaaagaaaagcataaacttgcctgattagggaatgtgatgtaatgaaggtggttactttatgaggtaacatatatataatttatatgattaaatgaatataaattttattattggtataatagttttgtattgctaaatatttgtatactaatatttattcgtggcagatgctagtagtggtttggatttcatcttatgaataatgtgtaatggtttgattctgtttgtgtataaatgataatatacgaataataaactatatgattattattattgcttttgttgcggagtctttgtgactcacgggtgctatgtggtgcaggttaaggcaaagaaaagctatatcaaccatgaggtgacagtcttcttcagcaatataatgtacatattgacctcgccggcctgcgtaccgagttgccaggagttgttttgggctggttgtatctgttgtgtattttgattttctgtttaaatggttgtcgtaaatatttctttagtaaaactttttatagcagggatccccaaaacacactttttatgtcgttataatgttcgtttttagtattttattttagttaagtttttaatattatcacggtttttaacaattaattatcctattagtattaaactagtttatataatcacacacgtggtatccctatagattagggtgttacaacttggtatcagagcaaccatggttttaaaggtcgtgaagactggtcgaatatgta

SEQ ID NO: 345301 - DNA, 611 bp, Cannabis indica
tctttcttgttttagtcaattttccacaagcataatcagcacaagtatcccaactagaagcattaagaggatgaagactttcatgtttaattgaacgatcaaccctttcttatctaatttgtatataatatagaacacaataataattagataataattaagtatctatatatacttgattgatttataacaattacaataatttgatagtgtaatactatcaattaagtcttcctccttagatctctaaatgagaaacaattttatttatctgattatcaaacgtatacaattatgataagacaatatgtattaatagagttagaaatgagacttagctacaaaaccctaattcgactggacctaatcatcaaaggtttcagttaactagaaaagttcacacttctacttcaactaaactttacacataaaaatgctaagcccattaactattgatcactaacaatatgggctaacacaacaaagaactatctaatcaatctaaattttaataaaaccaataaaaattagagaaattttcatgggccaccttattttggcaattattttcaaaaataacgttatttttgttatgttaagtttccgtatat

SEQ ID NO: 345302 - DNA, 526 bp, Cannabis indica
gcacatgaaaacaaagcggtaaaactagtcctaccctaactatctaactcaaccctagcaaagtcttgcactacaatactagcttcatcatccccaagaaagctgtccgaggggagaaaccagctggaagacagataagctgagtgatccacgggaatgggtgcaggaggtccagaacccatctggcaccggccaaaaaaatgacctatgttggaaaaataaaaggctttggcatgatcaccccaccgggtgggtggcatcctaaatctaagaagacgctcgtcaaatcctataggcctacaccgggaatactcttgggcagaaggaacatgatgaaccgttaagggagacttactggatctggatgtgttggtgcaggagccccagtattgggaaccgggaccagcaacttaggccgagaaggcgtccgttctttgcccgcctccagtcgaagggtcctcctggcagcggcccgagccttaatataggccaactcctgttccctcctaaagaggtacttttggta

SEQ ID NO: 345303 - DNA, 506 bp, Cannabis indica
ttatgcaaattaaactaaatttctcgttaaattttagtttcgtaataatttttctacactttttttttcatgaattcgaaacagctcctattttgattgattttggtcgtcttctcaggtgaagtcgccggaattaatggtagtgctctttctggttgaatttttatttcgcttgcgttaagttgttgcgtggttgtgcaatagttgcccagaaagcatggatcctgagttgaaggtgtgtgtaacttgtatttgtgtaaatttttttatttgaactgtatatttgtttatttggccagctggaagtatttttgtaatattgttacttttttttggttaaaattaaaaaaagcccaatataaggggaattttaaaaatatcattttttatattttatttataattttacgatttaacatttttatttacaaaaatacacttgtaaatttttaaaattataaaaatacactttgttcaacaaaaataagaaaataactaaaaaataa

SEQ ID NO: 345304 - DNA, 900 bp, Cannabis indica
tcttctctcttggatatctcttctttgtacctgcaattaacaagtttaaagctttttaagcttttggaaacttttttattcatgtttgtttgtaatatctttggtatatagatcctcatgacagttttggaatgtgcaatgtgtgactttttgatagaaaggattcaatttggcattttctatgattcttgaatctttgagtcataaagaatacgagacacatatttaagttttgaaagataaacacacattgggattcaaaacttacgttggctagcataggaggtcttgcttaagacttggccagccttaaggcttgatcatgggatttggctagctttagggttttgccctataaagattgcatgttcatgcctgggtttggtgacccttgctagttattgggtaagtgatgggaccctagctgcaaggcttatgaaccttggccgttgtaggccttggttccaagtaggtggctagttttctatcctctcctgacttcggaaagaatttggctctataggcatatacaaccttagttttatgtgtggtttcctttggaaactttgcatgaaactgaatggtgagtctattatagtcgaatgttcaacttaagactcaacatggcttggttcctataaggaactctaccttagtcgtagcctggtacgtggcccctataggagctctatccatgtcctttttggctttacggttctagtagggtcttcgcctcatgcatgcaaaccgatctcatatccggcctcaaggctttcatgttcttgctttggcctataggccctctattttcaaacactactattttttagccttgaagccatctatgacagacatatgattgtcttggctgtcttattatggccttgataagtaagggtc

SEQ ID NO: 345305 - DNA, 357 bp, Cannabis indica
agggcataaaacccaatagattgtacatgtcacagcggttaggcctggagcgtacgatctttgggacatccgagcttttgtggtatagtcgctaggcgacaaacttttgtatatgaatattaaacttttgaaaatatattttgtaaacgtgatctcagaatttttataagtatgttactttacgttctcaattaaataagcaaattttaattaatcatgattttcgataacctcgttgattagcaacaagctgcacagtatgctaaaaatcacgctaacatgcctaagttagttagggtgttacaatttggtgtcagagccgccaggttatcttccgaagatcgtcacgacatgtac

SEQ ID NO: 345306 - DNA, 539 bp, Cannabis indica
atggccttgataagtaagggtcctgatttactttgttaagctaaagtatgtctgcacaagttagaggtaggtttagtagcttattttaagcattaaaatttctttgcataagttcattgtgccagttcgatgtgttgtagggtatgggcgcccttcaagcgaccctgctagcaagtctcttggtcacttactattcaccaagtttcacagactttgtctggattcttccttggggtggtgtccatagtatgcatgtggaactgaatgagtaactttaagaagttaatcttatgagcaagtggtttagacacgatcagtctaaagtgtaacaaaagttgacagcttagtgttcgcttttcaaatcacatagtggctacccctacgcggctcagcaaagaagaggctgccattgaagaatggtgggagaccatgccaagaaggtcatgggtactagcacttttatgggttcatgcacgatgaaatggtagaggaacttaattgacaatttggctattaagagtacttaccgagatgttccc

SEQ ID NO: 345307 - DNA, 578 bp, Cannabis indica
gaaggtcaatgccttggagacagccgatctcgagctcttctttgatttttggaaggttaattcccgggccaactttgactacttgggtgaggctaaggatatgtaccttgagtactgcgcgacccaagtagcttatggtgggaacgaggcggctgcttcaacctccgatcaagctgcttcaacttatggtcgggctgctgatgcttctcctattcaaacaacagatcctcctattccagttggcccagaggaaccgaaccaagagcctgggactccagctgtttaaacatttcctttatctctctttttatttatcttattcagccttcaggctttttctaagacatctcgaccggccaagcggtctttaaacttggaattatttttcattttttggacaacgggctgaccgggcagcttttaatcccggtactacgtgcttttgtcatccttaatgaatttcattctctgtttataattgtcgtgcaattgtgattgttttatttttaccaaatgctttgtacaggtataggtgccccccaagtgaccgagcagacgtatgactcttggtcacttgt

SEQ ID NO: 345308 - DNA, 1198 bp, Cannabis indica
aagtagtagttggaattggagttcacaaattggctcgggtcaatggctcgctaataaagaactactggaacatggaacatttgcgaccctactacaaataaataaatgatgtaactcacattactgatgtacatttttaacttcagtcatgaataaagagaatcatttctatcatttaagtaattataaagttttactcttttaaattacttaaggggcatttatgtataattaaccagaattcatctgcaaatacatagtataatgcaaacccatcatttcaaaaataaaaaaaaaaattagaaatttaaaggttcttgactaaacctctttgaagaaaaagaggtcaaactgttataacttcacgaccaaacctttttgacgtagagaagaggtcgaattgttatagcatcctgatcaaaccttttgacgaagaagggatcaaacaactataattttgaataaaacctaccgacaggaaggaaaatcaaaagttataaatgagatataactcataactcgcgtataaagctgaatattaacggtttgtgcgagctaggaaagtgctaaacgagacatcaagacgtcttgataaaattacttgcacctaaaaatggatagataacctaactatccatacgagcaaatctaaaatatacaaagtgataaaatcattaaaagtatattcaagtttgcttaaggcagattataactgccatagcgacgcagaattgacaactactcgaaaatcaaaaagtttggtagagaactaactacttaaacaggaagattacaagcaatggaaaaacccaaaagtactttacatttgatcaaaatatagttgtttacattgtgaataaaaataaaagcgaacacaattatattaagttcgaatgaaaagagtacaaagcatttaagataagagaaaactcaagttggtttacaaacttgtctttacaaaaatgccactaagggaaaaccattaagtcatcttcctaaacaaagaatacaagggggttgataaacttgagaaagaccgtctacatatagttcagagaaagactatctacacatagcttggagaaagactgactacacatagctcgagaaagaccgtctacacgtagaaggtctcgacctctacatagacctcattctccacatcagaagatctcatttcctacagccacccatttcc

SEQ ID NO: 345309 - DNA, 609 bp, Cannabis indica
tctgttttgtacttttaaaatgaaaagactagacttatatatataggcccttactcaaacaagaatagcaccaactaactaactaacataaccgaaagttagttaagttagttggtttaaggagttggatagtaagttggtttagaggatcaacttccacactccgaatcatgtaaatagtaacagccattacaacattgatcagtactctatttctcatattattgtcagaaatcgaacaccaattaataatgaatcaattcttttaggtcccttggccactgaggcacacccaaccaagaatcaatctcggcaacaaccttcgtagtaaaaatacagtctatgaacaggtgattatgcgattttttagctaactcgcaaataagacattgaatagaggggatattcatgaatttgctcaaatgatttgtagtaaacaactatagttgttgatggttccaataagtgaatctatatatttgggaatgataagcttaccttaatagtgatgatcttaatctatcttgtagaaataatctttatttgtgatgactttgggtaatgatcttccaagaaaacaagacttagggttttctaattttttctctt

SEQ ID NO: 345310 - DNA, 1149 bp, Cannabis indica
ggctttaatggtgaaacttgattttgtgcatgttgagatgttttattgctttagatatgttctttgtggtctataaagcaggtctggaaggtttcattgagtttggggttgaattggttgagttatgattttttgttggattcctgcaatgagccggaattccggttcagagggacctgtaggaaccgaaattccagttggtccccaggaaaccccgcagaactggaattccggttgggaactggtctaccagatgggacaattttgggaaccttagtttttcccatttttgtgatgtttagggtttttccatgttattcatcgatagggaaacttttagtttcaagtttaagtccccggaaagtgatttagcgtgtcacttacctatgttgtgattgatgtgatttaggagcttgtaattcaccgagcagttgttccactcaggttggccggcactcctgaattcgaaatcaaggtaagattagtataatgttatgcatatatttatacatgtttagcgtacatgttagttgccgtcagaataggcaaatctataggcctcagattagcatatcagggcatcggggaggtttacatagagattcaccgagatgccaacagatttatgctaggctatcagattgtatgagttaactgctaccacattagtatgattagagtactgagtataggctggatttgcggtttgtcatactttgtcaaggacgttcctgaatcagttagggttatggttaggtgtatgggcgcttgattataacccgggatattagtatgtttttatgttatgcttttcgtactgagtctgttgactcacagtgctattgctatgtttaggtaagggcaaagataaagttgaggagccgtgagagcgagcaggtgaagattgtacatgttggggcggttaggcttggagcgtacgatctttgagacatcagggctttttctgtttagtcactaggggacaaatcttttgtatatgaatagtaaaattttgtaactgtattttgtaaatgggatcctggaattttataaatgttttactttaggttttaataagataagcaaattttaattattcacgattttcaataacctctttgattagcaacgagctgcacagtacgttaa

SEQ ID NO: 345311 - DNA, 505 bp, Cannabis indica
taatttaccctttttttctaaaagaaaataattaaattacattcttaattgttatattacggcaaatcatttcatattcttctcataataaaaacttaatagtcttcagccaagaaaaaatcacagtagctatttttattgaaggaagaaaaaataaagtcattgctttgttaaaacaattgaaggttagtattctttagcttttctgttcttattagaatttattgactacttgtttgtattcataataaaaagattaaaaattcttttaagctttgtttccttttaaagttgtgaatgttgatcacaacaaaatgaatgatcattttttttcctttaatgatcgttttttattatattttttattgattattatattttttttcaaaaaataatatcttttcgaagattttcaaaaattaggattgttttattagcagtaagaaaataattaatttttttatttttttttctttattattttgttagaggttttttttttttt

SEQ ID NO: 345312 - DNA, 1387 bp, Cannabis indica
tgttgtctaacggatgacaatctgttggcgattgtcccattaaaaataactaaccaagttagactaacaatgaagattcaaaatttatactacataaccaataacaaaaaacaatataggttcaatataaattcgtgcacatattcaaaaattagtaaacatttagctagtaaaaacatgtaaaaatacaaaacaaacacatcttaaataatttctaagatttttaactagatgatataagtgtcccatttatgcgagagtcaaatacatcatcagttgaatagagttgttaactcagctaaaatggaaactattttagcaaccttttattcgatcaaaataagaatctgacgttgtcccgtttaggcgagagtcaaggtcattctcattttataagcttctaccattgtttcatactttgtaaaccctactctgagcaatcactattaaggtgatcgttactgagaataaaagatttacaataatacttttctttcgagattctacggtattaaattgctaataaatgaacatctattagggatgaatctcattaaaacaacaaccatgtagacccaacaatggagatcgaacatccttaaactaaagctcattattttaaagaattatattttcatttgatatctattttaatctatttatttaattaaaattaccaatttaaataaaaattttaattaatatttataaaactatatatacttaggtagatctgaaaaataaatataatttattttccatccttagtatcaatttttaataaatataataaaaattacttaatctaagttggtccaaaattaattaaaattatttttttaacacaaatttagttttctataaatatatatatatatatataatcaaatttgaaatctaatgtatttaataaaataaaataaatcttgaaaaattattctaatccatgctcgtctagaattaataaattaattttcaaacataaagataatttttttatttaattaaattacttaaaaaaatatttattatttgagtatcttgaacaaatcagcttaaacgttaattttctatttaattaaatatatctaaaaaatacaaaatagtttcttagaaaataactatctagatatttcataaactatttattatttttctaattaaactatattatattttagtctatttattttaattaatcattaatgaaaattacttaatttaagttgatctaaaattagtaaattaattttcaattttaatctaattttcaaaatttgaaatatctacgtttaaaaaattaaatgcatttcaaaataattattaaataaataatatataatttaaaaattattctaatttaagtttatctgaaattaaaaaattt

SEQ ID NO: 345313 - DNA, 478 bp, Cannabis indica
attacaactttccactgtgttgacaacacaataaacaagaacatcagtgtgataaggatttggatgaatttataaatcaaataaataaataaatgatcacatgaacaaaataacacattaaacaaataatgaaattaaatctgtttctttattaataattgaatagaaaagattactttaaaatatagttttgtttagggcacaaagcccaacataccattcgtcaaacggacaccggaggtagctggaaaatctgttcagagtttgaaccttcaaactttgacttgcgacctcgagctaatggtggcaaaaagagtagtgctacttggggttgaggttatcggcacctaaggatttgaatggtccagcgtgtggggtcgggtggtggctggagagtggtcgctggacttatgccagtacttgtgtttgtgggtttttcttttgtggtctgaacacacacacacacagagagagagag

SEQ ID NO: 345314 - DNA, 962 bp, Cannabis indica
gcgacaagcccaacttcccaaggggttttgtctatccgaatccctaaagtataaaggtacttctaaccctatagattatcttgaaaaattcaatactataatggaggtggatcaggtaccacagcttgcaaaatgccgcattcttgcgcaacactcgaggagaacgcccacgattggtttacccaattgcctgaggcatcaatatcgacatggaaaaccttcgtcgacttattcctcacacatttcaaggctacgatgacctataggccgccttatacgactttggccaacatcaagcaagaacctggtgagtcttgacaagactattttaaacggtttaatgcagaggtaacaaaagtcgagaaggttcccgagtcttcgcttgtttgtttgctgataacaggtattttgtcgaggaccgacttctcgaaagagttacaagctcgaagactagaatccttagtcgaattctttgccatggccgaagcccacaagagaatcgagaattctctggcagagttggagaagggcaaagacaatcgcaaatcacctgtaccgcgttcatgatctcgcagtccccgagggaagaactccaggggccgaagcccaaggagacgcagcccgcggagacagcgaagtctgaagttggccaagtctcctcccaagaaggaatcctcgctgaagaggaagggcagacctcgtttcgtcaattatactgaactcgcagtaccccgagaccatatctatggaatcgaagagagaaatggagtcttcaagaagccggcccccatcaggggaaatcgcgacagaagagaccccaaaaaattctgtaagtaccataaagacattggtcatactaccttagaatgttgggtcttgcaggatgaaatcgaggagctgattcggagaggaaagttcgacaagtataagaagggcgaggaaagtcatccctgagcggatga

SEQ ID NO: 345315 - DNA, 1410 bp, Cannabis indica
gataactaatcagattgtaaagagttttatttagggcataaaatccaacagagtcgtctgtctaccttggacaaacttagtcgatttaatcataccaactcttccttgtgttttttgtgtggaagtggagttgagagtcattctcatctcttttttaattgtatctacagtagtttggtgattcatcaagtgtggctttggattggtattactagtcagaaaaaagagctccatgatgtcctaaagtggattcggaaggaaaaagtttctagaggtaaaagaaaggttcttttgagtgtcattacatcaacaatttatttcatttgccatgctagaaacaaggtgctttgggagcaaaagcttcttactgttaagatcacttttaattgtattgctaatagtgtttgtgctagagtgaaccctttgaaagctaagaacttgagtaaaatagatagagagtgggtggaagctttaacaaaagctttgtaagtaactttatcttgtaagtgttgctggtgagctcaataaatttccaaaaaaaaaacaaaaaaaatgattatgtacttgacttgatatgtgggcatgtactctaccactgatggctcgaaattgatgatgaagaagaagaggagaattcaaaattactatggaaggaggctctcaatttctagttgtctgacaaagaatgaaaactaggttattagagttagatgagaatgagaaccatcttattccttttataatatttcaattagggtttaggatttgaattatatagaataaaaaaaagataaataaatggctaaaattaccttaagtggtcggccatacatagtgggtctcactagttacgaattttaccattttattcaataatttatcttctctttcactaatgtcatattttctaattttgttagtgtcattattttgtgacagtgtatgttctgttcaatgtctagtcgtgtctggaattttagactgttatatctgcactaacgtttgtttacgagagtctttttaagtgttagttagtgccacctggacttatcgttgtggtcatatatataatcagtttctgttagtaaagtggttatccattaatcattcagacagttatttcggttgtttttagagagatagtcgtatcttgtttcttgtgattttgattacaggttagatcttgaagcttgagagggttcgtcaatggcggaatgatctgaatctggaatcgttgagttcaaactgaagggatttcagtgtcatcttcatcatcagatctgaagggatttcagattgaagacatgttgaagaggagctcagttgctgcacaagggattgtgcattgacaatcagtgttcttgattgtcgttggtaattcattactatttgctgaaaaggttgtatttg

SEQ ID NO: 345316 - DNA, 661 bp, Cannabis indica
gaagagcagtttgatttggtggacgtggctaaaacagtgggatttccggggttgaggttccatgacaatgatggccaagatgggtcgccaaacatcctatataggtgtgaaataaacccagtggcgaagacatggttgtacttcgtgagtgctcagttggtgccaaataaacacttctcagatgtctaaatagatcgcctcaaatatgtgtacgccattatgaagagggtgcaacataaatattggacaagtcattagaaacaacattgaccaaattgtacaaggagccactggaggtggtcttggtttggcgagtttaataactgaactctgcagggcatatgacgtgccacaactggtgtatgataacacagtggtgccacttcgaaagatggatatcacgtttgtcagtaggctaaaagagccacatccttatggccagcctccacctgatgcaccgcaaggccgaaggcggcaaagagagcctagtgtcgaagaagaggaggaacagcgcccgcaatttcttgggcctattgatccaacgatgcaatatactcatgcacagctgagttatctaattcagcagaacaaccacatgcaaaattatatggtgcagaggagtatccatgatgagggacaagttcaccaactcaactctctc

SEQ ID NO: 345317 - DNA, 689 bp, Cannabis indica
ttctgatgtttggggtccttctcctattttgtctcaacctggattcaggtattttgttactttgtggatgattattctcgtgtaacttggttatatttaatgaaaaatcgttctgagttgttttctatattctgtgctttttgtgctgagattcaaaatcaatttaatgtatctgttcgtactttgagaagtgataatgccaaagagtacacatctgctcaatttcaatcttacatgacctctaatggcatgcttcatgaaacttcttgtgttgatactgcacctcaaaatggtgtcgcagaacgtaaaaacagacatcttcttgaaactgcacgtgccctcttgtttcaaatgaaagttcctaaacctttttgggccgatgcagtttccacggcatgctttcttattaatcgcatgccatcctctgtccttaatggtgaaatcccatttaaaattctttttcctaataagtcattgtttccagttgctcctcgagtatttggcagtgtttgttttgctcgcgatgtccgcccatctgtcaccaaattagaccctaaggcactaaagtgtgtctttcttggttattctcgtcttcagaaagggtataggtgttattgtcctgatctcaacaaatatcttgtttctattgatgttacctttgtagaaaatacaccttatttttcatcttc

SEQ ID NO: 345318 - DNA, 704 bp, Cannabis indica
acttcatcgctgattatcacatcagtgtaaatccaatgcactgatgaaacaaggacttagtctttcgaattatataatcacaatcacattccactgtgttgacatcactgtaattgtgaatgactatatgctctggacttaacagattttgtatatatattaaaccataaacatgaaaactacatgttaatataaatcacttctaatctcttattgataacaaatcagattagattgtaatgggttttatttagggcataaaatcccaacataaaagtctattgaagtttacttaaaacagattataattgtttatgcgaaacaaaattgataactgctcacaaatcaaaagcacagcagataataactgcccgcgcacatagtaaatcactaactacttaaataatatcaaaggaaaatatgagcaatggaaatccctaaagtattttaaatttgatcaaaatataattgtttaagttgtgaatgaaaacgcaaacaaatagatatattaagttcaaatataaaagtatgaagcattcaataaagataaaatagaagcatagttggccatccaaccttacaaatttgtctttacaaaagtgccacaaggggcaaaccattgtctcggccttaaggccattttcctagataaaataaaaataaataaaaaccaagcctacatagtaggagacttggacagttct

SEQ ID NO: 345319 - DNA, 874 bp, Cannabis indica
aattgtgaagaaaagaggttttacggtttatttgttaattaagagactttgtaaggtctaattaataaataagttcaatagaaattttatttgataataaattataattattaaataaatagttttaacatttataggattataattgaaaaatatgacattagtgaaagaaaagataaattattgaataaatagaaaaattgtaactagtgaggcccactatgtacgggtggccatttaagaattttttagccattattttatctttttcattccatataatttaaatcctaaatcctagttgaaatactataaaaggaataagatggctctcattctcatctaattaaaagaacctagtttttattctttattagacaactagataattaagagcttccttctttgtattttgaaattccttcttattgttcgtcattaattttgagtcattagtgatagagaacatgcccactcatatcaagtcaagtactcaatcatagtgtggaagattacgaagaatccaaccaaactgaaggagagaagatccaggttcaaatttgataatgctttgctacagaaaggaatcaagggctagagatctgaatggaaggagtcattattattccgctaccatgaatgtaaagattgcttaatctcttatgtatttatttcatcgtattaggaaattcatatttagggtgttagattatagaattataatcaacatacataatagtaaatctaaatcctgataaaataacttccaacaattggcctcaaagccatggtaataatttactttcatgaaatatagatttaaaacgatgaatttattgttttggatgtattcatgttagtgttgggttttatg

SEQ ID NO: 345320 - DNA, 911 bp, Cannabis indica
taaaaatccgtaccatgaataactcaagggtcatcccaaatacttgtctttctcctgtcggatattagcttgcacgccccttttcttaaaatctcttttgatcgcaccacattcctccaaaactaagaataagagaacaaaataaaaaataaatatctcaattccccaattcatactcatggtagagaaagaaacaaagaagttttacctcaaaatgacgttacatgtataaaataaaaagcttgctataattattattctcttccagaatcttctgctaaatacagctttattacctgactcataaaaaaagatatgtaatcctcaaacctacatcgatctctatatatagctctatttttatcaaaacaaaaaagagaagctagctagcttaattataattatactatttatacttatcatcattattataaaatcttatgttttgtcaagaaaaaaaaaaatcttatggcaaacaaaaatcacaataaccattaaccaataaagtcgaaccgacacatttattccacaccaaaaatttattttattaacacatgttactgtcaataaatacatattaaacaaatatgaaatatgtcaaatgtataatatggatgataaatcagacaaaaatgactaatcaacaaccggatgctgaataatattactatgattattataattactactacttaatatttaataagaaaaataccccgttagtcgtttttttttttttttttcattttaaaagcatgctacaaaacaataatttctggtcagatttttgtgaaagttattcacgagcaattttcccataatttataggctaattaggatttttgcccctgaacctttaaggtcgttaaaaatgccccctgaactattaagattgttggatttaaggactt

SEQ ID NO: 345321 - DNA, 1266 bp, Cannabis indica
attcaagcgtgccgatcgacttgaatggaaagttctcgagctcaacggaggtcctaagttacattacacaattgggataaataactcgaataaaccgttctgaaaccctatctcataactaaaggtaatcttaaagatacatagagtatacaactaccctaaataccaaggaaaacaaaactaagctcggaaaatagcacaaatttggaaaagttgcaatttcgggggtcctacttgtaaactggttaaccaaatgcaaccaaactcttcagaacacctgtatacacattctaacatagtttccacaccaaaatagcaagagaaacacaataaaatttaacatgccattgttgagtcaagtttgagttttaactcaaacttgctcaacctcaaaattaatcatcaaaagcagtgcaaacaatcttagaatatcaattgagacctaaagaaactaaccctaaatgaaattgacccaacacataactaaactcatcaaaatcaaccctaaacctaacaaaacttaagcatcacatagtatagggtttcctagggcataccttagcttagaacacttcaacccttgctgaaaaaccaagctttacactgaaaatttggctgctcctacccctggtttccatcgtacctcagctatctctccagtcagagctcccatccctctgcacattattgagggtgaaagacttcaaaagaaaacctcttatcctaatccaacacatcaccttgtccaattttggatctttccaattaccagttaaagaccattcctcaagcaccaaaactccaccattgaaaattcacggttgtttgtctaagatagtcttagcattctttctagtggcaaaagaaacccttacaagcgcactattccctcttcaatatcaaaaacattcacttgccaatttaggataatttttcacattcttctaaagacggtttggaagaattttctattattaacttccattcgaattactactctccctactagtgatttttctttgaactcagtcaccgccgattcatactctccccactcctcctcttgttcaacaactagtatactctttgccaaatcatctaaccatcctacagttgccataaaaaatcaccaagaaaaaaaaaataaaataaaaataacaaacaaacaaacaagcaaacatgaataatctcacagtctcatagaccatagaacgtacttagggtccttcagattattttttagaagggattattttacaaatacac

SEQ ID NO: 345322 - DNA, 765 bp, Cannabis indica
gataattaatatggtaatttggacatccataataatatttcgtaataattttattaatttttttgtgttaatatatttatttcttgatttatgttagacgcaaaataacttcttagatagcaagttcttcattatatcttcttttttattcttaaaccaattcaaaaacaatgcatagaaaaaaaaattatccgtaatattattgtttatatattttcgatggaagttgtcatgaagagattcaaaattatcatttgaatatttcagaagaacatagtgatgaaattatttcttcttttaaaaaattaaagttgaagaagaagagaaaaagtaccaaaaatggacaacacttgttgagttgaattaattgttttagaatgtaaaaatacgattaaaagtgttgaattaattgtttttagaaggtaaaaatacgattaaaagtgttgaagaatctttaacaaagttaaagaaactcattgaagaactatagctagcaaaataatttatgcaagtgatatctatactcatattgctaattgtgtaattgtttttttttttggatagtttttttttttaatttcatattttatttcatatcttaattaattactagtatgtactcactttttagtgtgatgaaactattttcataaaataataataaataaatattgtgtttgttatgtatatgttctatcatcgtctcctttatttttaggagaattatcctatatactgtttttttaattttttttcttcaaattt

SEQ ID NO: 345323 - DNA, 827 bp, Cannabis indica
tttaaactaatttcggtaaattaaaacttttaacacaaaattatgcaattagtcacttaatcaaataaaatcaagtagtatggcaagcaatatattaagacaaataataaacttgaaatataaagagtttagggatagaaattgtaaactcttgatttttacaagttttagtagaactaaaccacctacgtccttggtcttcaaaactatggacctaattttgagttcaactatcgagtcaagttaacgggcttgactaacccttacaattggagaatttttcaccaagattttttcttaacctctcacaatagttttcttccatgactatcaacctcaccggagagtcgaagtgtcaatctcacaaactgagttatttttccaccagtgccaacttcatctaaatcaatagtttccaaaagactaacaacctcttcaaattgtagaagtaccaatctcactctcgaattttttgtattgacaatctcacttgagttatttacaaaattgatttcaacctcacctacaaccaagttttttttctaccggtgccaatctcacctctcaatacaattgatatttgattttaaaatacaaagaaaactctctctaataagatgaaatacaatgtgaaatcttagagagaattgtaagcacactggaagataagagaaagtttgactgaagttcgtaagattggtgtgattatgaaagaatgatgcaaagtaagtttagaacacttttagagatgtaatatgatcaacactaactcaaccaaccttagtttttgagagaaaatagagtttatatagagaatgggagaaaac

SEQ ID NO: 345324 - DNA, 694 bp, Cannabis indica
ttcacgtctaactggttcaaaggccaattatagttaactgccaaagatagtagaatccgtatagaattaatttttgcaacaggtgcaaaagtctcttgataatctattccataggtttgagtaaagcctttggccacaagcctcgctttaaacctctcaatacttccatcagctttaaattttactgtgaacacccatttacaccctacaatcttcttgtccctcggtaacattacaatctcccaagtcccattctttatcaaagcatccatctcttcatccactgccaacttccatctcggttcatctagtgcctcctgtatacttctaggcacaacaagttcagaaatattagtaataaatgctctatagttatctgataggtgattgtacgagatgtatttggcaattggatgctttgtacaagcacgagttccttttctaagagcaataggaagatctagagtttcagatgtagggcttgaaacagattgtgaagacaaaatattacttggagacagagaagaactaggaatagaagaagaattacctggggtacttgaagaaccattgttcggggcttccatttggtcttgtgcagggatgattggatggtctctacttctttcccagatgttcttccttgaataaaccacaggctcaagaacattacgatttttaatcaatcgtagca

SEQ ID NO: 345325 - DNA, 836 bp, Cannabis indica
gacccaaaacgacccatcatacgctctagctcatcacacatactcaaatggaaaaaaaaaaaaaacataagcataattaggtaatgcttgcataacaattttaagcgaaaccttatttcccgctccagataagaaacaacccctcaactctgaatatgcttccttatctgttccttcagaagcccaaaattaacaatcttatcggcgtgttaaattttttttgaattttttaaaattttgcaagatgtcttaaataactataatgtacataaaaaaatattggactaaaaaatgtacatttttaggtgcattgtagaattttccaaattattattagaagtaatacaaaataacgtgaaaaaatataaaatattaagagtattttatttatggaatcttaaatccagaggagttgatactgatgagttgttcctctatgcctcgattgtggtagacacgatttggagggcccgcaacgacaaggtacataatcaatcactgggtaacattaaacactatattgactctatttcttcttgttacacagattatggctcatgccttctttttcctccacagtctgttgggacttaggcttggtctccgccgccggaagattggattaaaatcaactgcgatgtcaaagtcggaggtgaaactatgtgtgttgtggcgattgtgagggaccataacgaatcagttttgtgggtggcggcaaaaaggctacacttcactgacccactcactggagaagctgcggcctgtctcttagccatggagacgacggtatcattgcatcatccttttgttttggtggagagtgattcagagattgt

SEQ ID NO: 345326 - DNA, 700 bp, Cannabis indica
tggatggtgaggagttggggatatacctagcagttacagagcatgccgtgagtgtcgtgctgatcagagaagagaacaccgtacagcacccagtctattacatcagtaaaagattcattgaggccgaaggccgatatccgttgatagaaaagctcgcttactgccttattctagcaacaaggaagctgaggccttatttccaagctcaccctgttcgggtatacaccgatcaacaactacgaaaaatactgcaaaagccagatgcctctggccggttactcaagtgggcagtagaattgggtcagtgtgaaatcaacttccaaccccgaacagctatcaaaggccaagccttggccgacttcgtggtagaatgcacaggcaaaaaagaaagcataccataaagcaatcccgagccagtaccacagccaagtaacagtgaagacagaccgatctagaaagtacatgtggatgggtcggcaacagatccactatctggtgcaggaattgccctcgtcacacctgggtggcaacacctgcacgctgcagtcaagttcggattcaaaccctctaacaacgaagcctaatacaaggctctaactgctggacttaagctagcacgggaaatgaaggacgaacacattgagatgtgcagtgattcacagctggtggtaaatcatgtattcggcgaatacgatgctcg

SEQ ID NO: 345327 - DNA, 512 bp, Cannabis indica
gagagtaagcattgagaaattttctctttctctcttcatcatcttcttattttatttatcgattaatattattcataataatttatagcactttatcagcacgagtctctgcccacggtaaatatattttctttgctaattaggatttttaccccctaaactttaacatgtaccaaatcattcttcctgaagtttttggctattaaaaattcccctgaactattgagtttgttatatttaaggacttttatttaatttcattcaattttactatttcagtgattgtttatgtactaaaccatgctccctagactttgatatctaccaaatcatgcctcttgaagtttgacatatactaaatcatgccctttgaattttcatccatgttagactttttttactaaaattagacaaaagtccttaaatgcaacaatctcaataattcaaggagcatttttaacgaccttaaaagttcaaggagcatgattgggtatatgtcaaagttcaacggg

SEQ ID NO: 345328 - DNA, 761 bp, Cannabis indica
ggtatatgtcaaagttcaacgggtaaatatcctaattagcctattttttttttttttttaaagttcttgagttattttaaaatcattataaactaaatatatatttatgtgctcatctaactgaaataatttcaagaactcttttacttttcttttctttttcttgttatctatgtattataatatgtgtatatattcttattcttatatatctatttttaaattcatatatttatatatgttcttattatttacaatatttataatatattttatataatttgtgcttatgatatgatagagaaaatatatataaattaggcatatatttagaaaattgtgtatcctcgataaaatcattatgtaatcctcaataaaatcctacatatatcttgaagattatacaaacgtgtataattgactaaatataataaaagaaataaatgcatattcatacatatgttattttattctttgatgacaatgaaaagcaatctaatatccatataaatttaagcaaatatttcttgaagtaaattatctttatcaaaaatattgtatttttgtgaatataactaaagaattattgaaataattattactgatgaaattatatagtggattttgaatgcccaaaagaatttcaagaaaattgcattaaacatcaaagtataggaataacaataaacatgactaatcttatttaaagacataagacaggtatttcttgttctattattttctatagagaatgatagaaa

SEQ ID NO: 345329 - DNA, 612 bp, Cannabis indica
gaggcgccctcaagttgaggcgtttaaagagtgcagcaaggcgtgcgccttgcagaggagaagagaggcgtacgccttaatgggtgaggcgttgaggcgtaagaggcgtgcgcctcaaattttgaatgtgaaataggttatttgagccccaaaaaaaggcccaaattgttattttaaatttgtttttctgctgcccaacttaataatccttaaaaaaaagtccaataaacattaataaaaaagtccaatgaaaaaatgatggatggaaatgctccttcttgtctaggggagggaggcttactcttattcagtcggtcctatcttccctccctatctactacctctctctctcttcaaagctctaaaaatggtcatcaaggcaatagaaaaaatgatgagagatttcttttggaaaggtggagacttagcagggggtgaccatttagtggcttgggatgaggtatgcaaaccaagaagtgagggtggtttagcaattggaaggatagagttgaggaacaaagggttgctaatgaaatggttatagagatttcctttagagccaaactccctgtggcacaaagtaatcaaaagtcgctatggcatagcagataa

SEQ ID NO: 345330 - DNA, 683 bp, Cannabis indica
cacttccacgtcccaccacctaaacctaacctcaccactcctcctaatgccaaagccaatcctgtccctactcaagagcattataagatattgcgatcctgtaatcaattggccgaacatggttttctctctgctccggaggccttacctacctatattacaaatttgattgcagagcaccagtggcaaaagttatgtgcaattcccaagcctaatgtggcctctgttgcccctatattttatgctgcacttgatccaaaatatcctgatgtcgtttgagtgaggggtcagagtgtccccttttctcctgatgtgattaatgacatctatgggttgacaactcccctagaggatgagtttgatattttgaggagtaacccagcctctatctaattgtaggaatttattttaccaggtccttccactcagatctctaatccttgtatcctttctgtcgcagagtatatcaagatctgagcccgaatgtcctctctgtgtgtgatccttcacagtctaccaatcaatgattgaggtaccacttgctctgtgtgggcacttactctatcactgagggtcgaaatttagaagaggaaaagagagagaggttggttcggctatagagagagagggaaggctcagttttctgaaaaagtaattttttgacagaatgcttgaaaaacttg

SEQ ID NO: 345331 - DNA, 138 bp, Cannabis indica
atttatttaataattaaaataactatcaaataaaattgtcatttataatacttattaattagactccataaagtctcttaattaacaaataaaccccaaacaactatttcttcacaatcaagccataacatagtgaaa

SEQ ID NO: 345332 - DNA, 354 bp, Cannabis indica
aataaaaaaaattatacaaaaaaaaatatgtgtaaataaattgtcagtagaagacaataataaaaataaatattttaaatttgaaaattaatacaaagttatcatgataattattattaattattgatttttagacagagacagtcatatagtgcaccctattatttataaatttatttacggataaatatcattttggattttcttttgtaaaagttactaattggactatctattttgttaaatgacataatagaccctatatttttcaaaatggtaaaaataagactttgaactcaatttttgacaattttttttaaatataaccaacttgaagacaattcttaacatgaa

SEQ ID NO: 345333 - DNA, 760 bp, Cannabis indica
aggatacattcaattaagacactaaagaccagaattgagaaaatgagttgttcggggaatctctcaaaaccggttaaccggttttacaggacttggcaaaccggttaactggtttgcaccaggtttctccaacaactctaaaacttgctcaaaacttgtccaattaccaccaaacttttcagagtacctaaacagggtatatacaacatattccaacccataaatctcaaaaacacacactaatttaaaacattccattaaagatcaaagtttgggtttcaaagctcaaacttgctcgaactcaacacaatacactaaaaccagctggaagaacctaaaactaactcaaattaaccttataattcaaattatgcaagaaccaaaccctaacaacccctaaaactaaaaattaaaagttttaaccaattacaaccttgagaaacacataattaaagtgtgtctatggcttaccttaattaaaatctcctcaaatccttgctgaaaacccaaagaatagcaacaaattcccaggcttttggttggttcgaagagagagaagggaaagggagaggttcttcctattttcttatttttctttaattttctcaaatgaaaataaaggttaatataaccttcgctgaagtaatcttttgctaggtgtaaaaacctagggcagccacccaactacccatagaccaaattactaaaatgccttcattctcataacttaagtattttcaagactaggggtaaaatggtc

SEQ ID NO: 345334 - DNA, 620 bp, Cannabis indica
ccattttgattgagtcccatagatccaaatttgttatacatccgggaagtacaaagatgtaccaagatttaaagagacaatatttgtgggaatgtttgaaaagagatgtggccagctttgtagctaagtgtatagtttgtcagcaagtaagggttgagcatcaaatatcctcaggtttacttcaacctttgcctataccagaatggaagtgggaaaagattacaatagactttgttactgggttgccattgacacctttgaagcatgatgttgtttgggtgattgttgatcgtttgactaagtctgctcattttattccaatcaggaagaattacaagcttaccaagctagctcaacttatgtagacaatatagttcaactacatggagtgccttcaagtattatttctgatagagatcctcgatttacatcaaggttttggaaggccttacaacaagccctagggactgaacttcacttgagtattgcccatcatccacaggcagatggacattctaagaggactatacagactttggaatacatacttcgctcttgtgttttagattttggaggtagttggggtgaagacttgtcactggtggaattcacatacaaca

SEQ ID NO: 345335 - DNA, 832 bp, Cannabis indica
ttcttctcggtggtggagtcaccaccatccctaccataaacaggagtaggaacagtgggggttccaccaacacttggagttacctaaggctcctgaagaaatttcaccgcaccctcggctctcaaagccttttcaaccatctgtgcatatgtggttgcctcagtagtagtaataaccagatcatgtctaatctttgcactcaaacccgccaaatatttctctttcttactgaaattagttggcacaattcccgctgcaagcttggccaaatggtcaaactttgtcgtatactcagtaaccgacatgccctcagtttgaaccaattcagtgaactctttccgctttgcactttggtctacttcgttgtaatatttggagttaaacaactccttgaattcttcccaggtcatcactgtgacgtcccgaatgagggttatcaactcccaccacacgatagcatcttcccaaaactggaaagtggcacatgtcacacgatcattaccaaccactcccataaagttgagaatacgctcgatcaccgaaagccactgctcagccttcatcacatcaggacctcccagaaacactggaggtgcctgcttccggaaccttttgtacaacggctccatacggttgccaataataggttgttctgctggaaccgctagaactgccacggcctgaaccacttgagcaggcacggcaggaggaccctgctgcctcaatctctgaatctcttcatcttgttggcagattctgtcttgcatttccgcaaatctttgctcccagccaggaggagcttgtggtggatttacagggcgaccaccctgag

SEQ ID NO: 345336 - DNA, 704 bp, Cannabis indica
taattattttttaataatatttgttgagggtatttttgtaatttacaataattgagaaggagcattccaatccttccattattagagggaatacaaattagagatttgagtggatttgttatcctctcacctctcctttctctccttcaatccctcttgccaaacaaagggatttgttatctcctcccacctctctccctcctctcctctccatccctccacttctccctcctaccaaacattgtgttagtgtggatcggaagcactataagtaaaatatatagtgtggattggattagatgaacacccctaataatattggtacggaaactgtgaagatttacctgagagttaactaaaaaaaatagtaataattcaaattaaaaataattaaaaaatttaattattaatttaattttattttttaaaataaatatataattaaatattattataatatgtataaagttttaattatatacaagcagtcttatcgtaagagtatacaccttatatcataataaccacataatctaaaattaatggtaaaaaaaaagtttcctatatttatatatacataaacgtaattatgtagttacatgctttttgagccctttattataggggtaagttgaaaataccccttttattaatcgattaatcaaatttacctctaattttatatttatttgaaacatacctct

SEQ ID NO: 345337 - DNA, 567 bp, Cannabis indica
aatttttaacgacaaaaaaaatttaggggtatgatttggtgtatgtcaaaattcggggaaaaaatcctaaattaaccctttaataatgtccacgtatataaaatattgatttatatatttaattattttcttttgaaaagaaaaaacataaataattcactaacacataaaacctaaaaagtctaaaagtataagtaaagcataaaagattaaataacaaaattataggaagtactggttacaaaatgcattctttacaagagaatgggtaattcttaaacctattataatgagataaagaaatactttaaaaagatttccatacattaaaaatattattaaaaacaatgccaaacttgttatagctaatatatttagaatggcatgtaagatgtaaggaaggattatttagaatgattttggtttttggctaatcaattctcaaattataattacttgaaagattcaatacaaattgaaaatatattttcatcatttttatataacttcagaaaactaataatattaataacgatctcccatatactcttcagctgctctttcgcc

SEQ ID NO: 345338 - DNA, 508 bp, Cannabis indica
ttttttatgactttaatgtgctgctttgattgagcaattttaccgttaacaaagaggaggaacttggaggagcctgagtattgaaaggccattacctgccgctacaaaggaacaaaaaagagattgaaaaatacaaaaccctataggctcgctgggcctagtcttttcattagaacaatgggccaaattctttttgctattaaaataggggtctttacattaatatacataattggaaaatcatttacaataataactttacacaaataatgagcaaaaactaacgttccatataaaaatataatacagtgtattcaatacaagtgcacttctattattttaagacaattactcttgcaggtgtattcaatataagtacacgttttttcatttttatgttttgagttgtcttcttctaaactaaaaatgaagtggcttcttctttctttctttctttttaattttttttttaaaagaaaaacaaatattaatttctctttagattttt

SEQ ID NO: 345339 - DNA, 738 bp, Cannabis indica
agaaaaagaggtaaagaaattagggaattgaaaaaaaaaaatagagaaatacaaataaaaaaattagggattttacatttttatgtacagacggaaagaaagaagggtaaaaaaatttgagattttgaaatcaataaacatacctagtggaggtctgcatgtcgagaatattgagcgccgttatgaactcattggtggtggtggtggtggtggtggtggccgccgccgtaagccttctcttgtcattgatctaataggtgttcctatttgttatgttcgtcatttcccaactgtacataatagttgcagagaaacagagagagaagaacaggaagagataaactttccaaaggaaagttgcagaaatatcaagagagaattaaattaataaaaaagtggaaatgaaaaagtagcagagatatgaagagagagaattaaatagaggtttaaaaggtaataaatacactttaatataatattggaaaatacaaacacatgagctgtgaattttgattattagactttttcaccttgaaaatcttactatttaatatattaaaaatatacattaacaatataagaaaaagtggaaatggaaaagttgtagagatatcaagagagagaattaaataggattgcagccagtttgataatgatcgagttcttcggcccgaaccaaggaatccttttgatatgatgcaaaatggatcttatattctatcgttgatcagagatttc

SEQ ID NO: 345340 - DNA, 577 bp, Cannabis indica
agttgacaaactcagtaagaaaagcataaataataacatagtaataacccggattataatcaagcgcccatacacccaaccataaccctaacccatgtgcaatatggtgtcgagtctagaacgttcgtacgacaatactactgatcataatatcagcctatactcggtacgctaatcgtaccgatgtgatattgtcaagaagtactatactatcgaccataatatcagcctatacttagtacgctggtcgtactctagtcgtaccgatgtgatattatcgaatagcactcaagccaacatacacttattaatatccaatataatacaaaacatactgatatcgctattataatgtaatctaacagacttaactaacatgcacgctaaacatataaacacatatgcatatcattatactaatcttacctcattttcgaattcaggtgtgtcggccaaccagagtggaacagatgtaaacacatatcgctattataatgtaatctaacaggcttaactaacatgcacgctaaacatgtaaacacatatgcatatcattatactaattttacctcatttc

SEQ ID NO: 345341 - DNA, 1133 bp, Cannabis indica
tagtttcttgagttttaagaaagaaaatttatgcatgcttatggttttgttgctacagctactgtatgtgtttattgttgttttcttaggcttaattatgttcagatgaatggattagaacaggttttagtggttgttagttgattttattcaagtttggagttttaaactcaaactttggttttaatggtgaaatgttgttagcttgctgttcttgctgctgtggttagattatgttttctgtagtttaattatggttttataaggtgatttgaactagttttgatagctatttagtaggatgagcaagctttgagtttttgaactcaagcttggctcatcaatggtggtttttgtatttgtgcatgaagctttgttttgttgctttagaaatgttcattggggtctaattagcaggtttggaaagtttgaattggtttggggttgatttggtcgagatatggaattttgaaccattcctgcactgaaccggaattccggttcagggaggcctgtaggaaccggaattccggttggcttccaggaattgttcccagaactgaaattccagttggggaaccggtctatcggttggggcaaatttgggaaccctagtttttcccatttttgtgttatttagggtattgtcatgttgttcatcgatagggaaacttttagtttcaagtttaagtccccgggaagtgatttagcgtatcgcttatctgtgttgtgattgatgtgatttaggagcctgtaattcgcctagcagatttttccactcagcttgaccggcacacctgaattcagaatcgaggtaagatcagtataatagtatgcatatgtatttacatgtttagcgtgcatgttagtaagcctgttaggttacattagatatgtatgttggctttcgtatgactagtgtaccgagtataggctgatattatggtcgatagcaccgtactatttgacagtatcatatcggtacggctagagtatgactagcgtaccgagtataggctgatacagtatcacatcggtacggctagagtatgactagcatctcgagtataggctgttactgttggaatttattttaccaggatcttagatctactcacaagtatgttgtttaa

SEQ ID NO: 345342 - DNA, 500 bp, Cannabis indica
agtccacgagtcaattttatttagtaatacatttacttgtaaatattctcaaaggtatagaggatacatattcatatgtttgcctgagcaaaagtacataatcgataagattagttgggtatttattgtagttggagaattacattagggtttccccttttccctctacaagggagtttacaactaaacaatggcgttgggcttactcatgaattccatcccataaaaaatataatctgctgactaggaaaattaggcttgagttaattaggtcaaaatcgtatccaattataatgggagaatattctaaaataactgccctgcgcttgttatgggaagtttcctcttcaatctcaatatgatattatggcacaatctgaaaattggaatttctttatttataggagggaacaaatagggaaattggaagagtcttccgagaacgcaaaacttttccctccaggctcatgataccgaagctatcttctgagttcgatcta

SEQ ID NO: 345343 - DNA, 557 bp, Cannabis indica
aaccggaagactggtttcccaaccaaaattccagttctacatggtttcctggagaccaaccagtcgactggttcgtataggtccccctgaatcggtcgacgggttcagtgcaggaaacttacaaaaattcagtacaacctcaaatcaaccccaattctcaccaaactatctagacctactatttataccctaatgaacatattcaaggcaacaaaacatcacaacatactcagaatcaaaaattaccattaaagagcaaagcttgagttcttaaactcaaagcttgctcaaacatcagaacaaccctcaattccacttcaaatcaacataattaacctaaaattaacttgacaaaacataaacaaacaccaacaacaaatacaacacctaactcaaagaaaaaccatgaacacctaacttcaaccataagatactcaacaagaaaaagctagaacattaccttgagtttaaatccaccaaaaacttgctaagattccttgattaatgtagaaaagtcccaaaccctaactggtttcgatggagagagagagagagag

SEQ ID NO: 345344 - DNA, 886 bp, Cannabis indica
aattaattatgttgctattcaattttaaataggttaaactagtataattcgcctaatacaattatttacataatgacaattacgaagctctctgaggggatttggatgaggttaaggaggctattgtagtcataattgctaaagagaccttaaaggtagtaaaggtcgatgagcaatggctcgcggattggaggagacaattcccaaaaagactgagcgacgttgaggaagtcactatcagattcaaggaggtagtgcagaatgaaggtgctttgggagggagcacttcgggtagtggtgagacaccctttcatattattagggatccatacttcttaaacttagatcatcgtagatatccttgtagtaagtatatagataaagtagattgcattgtaagaaatcccaatcacttcgttccactagttcaccatcattttagagtggatgcatttagtaaaatttacttcccaggcttcttttagcacgagactaacttaagttgggaagacattattatttttttagggggaaagtcaattatgctaaaattaataatttggatgctcccgatgtctaacatgataatttgctatgaaaatcatatcttttaccatggccttgttttatggaaattttgtttattttgcgcagatcaactagaaaccttgaagatggggctactaaacagattcttgggcaacatccagtccaagtttgacaaattttgggagatcgccaagaaaggcagtgacaagggcaagaaaagctaagagtttgtttggctgtattttcagttttcaatttttaaaattgtgtttttataagtgagaatagaaaacaggtttttggcaatttttaaaaatttaatggtgtttggcaaaaa

SEQ ID NO: 345345 - DNA, 628 bp, Cannabis indica
cctcactgtgtgggtagggttactaatttggttttccattatcttatccaaagtgtttcctcccgtatgaatatatggaatgataaacttttttctagagctggtaaggaaactcttattaaggcagttgtccatgccattccctcttttgcaatgtcttgttttaagatccctacaaatatctgcctttgaattcagagtgtaatatccaaattttggtggggttcttcaagggctaaaaagattcattggaaaagttggtcagcaatctcggtctctaaattttttggtggtttgggctttcgaactctcactcaccacaaccaagctcttcttgccaagcaagcttggagactttggactgatcctggctctctcctccattctattcttaaagctcgttactttaaaaactctaattttttgcaagcccctactgggtataactcttctttcacctagaaaagtcttctttaggggcgtcaactgctcaaaaaaggtcttgtgtggaagataggcgctggtaataatattcctttgtttgcaccaaactggatccctggtatctctctgttcgaaatattttaccaggatctagatttactaccaagtatgtttcattaacatc

SEQ ID NO: 345346 - DNA, 863 bp, Cannabis indica
ataaaaataaatttaatcttgaatgtatcatcaaacattaaaatataattgactaatttctattattataagtcgtccacatagtttgagcaatacgatctcgaacacgtgccattgccgcagcagattcatcagacaaattaacttcatatcttgacacactggtttcacatccttctatgttgtcttcactctcaagttctttttcttcccattctctaaacatatgatcatattgggtgcgttgtcgaataaaattatgaagtgtacaacaagcaattactattaaagtttgtcgactcaatttgtaaggtggcatcatctttaatataggaaaacgagctttcagcacaccaaagcaccgttcaatgacatttctaagtgaagaatgtctataattgaatagttctttcatgccacgcggtccattacgtccactattgtattcttgcaaatggtatctttcaccacgatatggtgggagaaaaccttttgtacatggaaattcagaaaccaaaacgtaatattcacctacaaaagaattagttgtctataagcaccatcactaaataataaaataataattcaatttttgttacaaataccttctttaggcagtggaaacttatattcaggtgttgtaattacatctataaataccctggaatcatttgtagtgccctcccaaccagcagatacaaaagtaaagaacatgtcgaagttacaagcacataaaatattttgtgttactacattttttcgacctttgtaactgacttgcttatctacagggacacatgcactgacatgtgttctatcaattgcacctatacaattctgattaaaaaaagtaaataaaagtt

SEQ ID NO: 345347 - DNA, 647 bp, Cannabis indica
tggagcgtgttgagagggaacaacttgctttgaagcaagggcagacagatattctgaaagggcaaacaaagataatgggttatttgaagaccctattggcactcatgggagatccgaaaaggcctagtgcagaggcaaagccacagccagaccccatctctccaggagatgcgttcattcttcccaatgattacagacttgatgatgtggaagatgtactccatacaactcggaacatgtcgatcacgtccattggagatatgcaagattcagaggtacaggttttagagaccgttccaacaccggtggagaagagatcaaagaaaaggcgaaggtggtttgacgagtacaccgaaatgaagaagaagatgaagccatctatagccaatgtgaatgttgacccacttcggcccgttgatgagaagctactacatagttttcgaaattagttagagggaaccatcagaaataagtacccgagggacgtcttcaccggtgtacatggcgtggcttgatttctataagctacttacgaacaaagaatgactttctgatgatgtaagtttattaactaagtattatttgttgttatttattattatttaccgttgttatttgttttatttattttttaatgttctaatgtg

SEQ ID NO: 345348 - DNA, 534 bp, Cannabis indica
agattgaacaatgatttttgggaactagtttaatatgtctttactatcgtttttcatttcttcttttatttgtatacaggggactttggactagctaagactttgaaggcagatgacttgccttcctatcctcggtatgcactgtatttacatttttcatgaaatttgttttaaaacttttcaagagctgctagacatcttctatctaaaaaaacagagctgctagagctcatgcttgtgttttttatttttattttatgtgtagagtttagtgtcaagtttttagatatgtaatatatgtttaagtttcaaagttaagatccaggttgggaactcttttagaatatatacagaactgtaggtgttttcattttcttccttgccatagtgaatttctcactttgttagtttctgaattctagtatgtcttgcaatttatttattatactcataactgtgtgccaaatacaacataatatttttattatatatatataataaaacttagctctatttattaataattataaacct

SEQ ID NO: 345349 - DNA, 1120 bp, Cannabis indica
ccaccatcagtgtacaatccagacactattgcaaactcttggagagaaaatctcacaagttttccattgatcaaaaactataactcatgcctcttttggaaatctactcttctcaaaactatctggtttactaaggtgccaagaaaaagccctttagtgtcgaggtccaagagacgacccaattgggagtaatgtttaaaaacatcctagtcagactttgtgagccaattctttatttagcctattacacttagcggggatttgatggtaactttagattttgtagatgtattaggagtaatggcacgaggtatacatggaagctctgctgttaatatagttttgggcatccacaataatgtgtgaaatgaataaaaatatataaacgataagaacataaatataaaaagtataaaaagaattataaatttaactaaatgaacaaggtcgcacatggtatgaaaatatatagtgcaaccctatacgactgtgtgcgaccttagtggtcgtttatggttgttcagagaaaattgaagttacatagtgtaaattcaaggtcgttcatagtcattcagagcaaattaaagttctttaaaattggttgaagaacataaaagactattatgatcgcatagtgtaaattcaagatcgtttatgattgtttagatcaaattcaagttctttaaaattggttaaagaccataaaaagccatgatggtcgcataatataaattcaaggtcgtttatggtcgttcagagcaaattcaagttctttaaaattagttgaaggacataaaagactattatggtcgcatagtgtaaattcaaggtcgtttatggtcgttcaaatcaaattcaagttctttaaaattggttgaagaccataaaagaccatgatggtcgcttaatgtaaattcaaggtcgtttatggtcgttcagattaaatttaagttctttaaaattggttgaagaccataaaagaccatgatggtcgcataatgtaagttcaaggtcgtttatggtcgttctatgcaaattcaagttctttaaatggttgaaaaacataaaagaccatgatggtcgcataatgtaaatttaaggttgtttatggtcgttcaga

SEQ ID NO: 345350 - DNA, 366 bp, Cannabis indica
ccatgacatgaagtcatccgggtccgggttcgggtttagttccgggtctaggattcgagtacgtgagcaaaaatgtaaaatataataggttaggctaattttttttttttagaaaattaaaaataatattttgatgttttctgttttctagttttgtaaagctcaactttttaaaaaaactagttttaaaaaaaaaattccaaacaacgcttattaatttttaaaaacaatttttcagttttaaaaaaataaaaaacaatttttaaattatgaagtcaagcaacctcttggtgaatagatggctattctagaaattacagttactacaagaaaattattctagcgattgatcatataaaatcatgt

SEQ ID NO: 345351 - DNA, 717 bp, Cannabis indica
tttaccaaatagaatcataagtatagtttagtagtacttaatccaattccctgtggttcgacctcacatgcgtgagatactacttgattgcgtatacttgcgtaataaacataaaattcgtaacactcctgcactcatggctgatcaacaatagtcttactctttcctgcacaatagagcacctgtgagccaagcccaacaagacattataaaacatttcaataatatgctcatcatataatataaacaacaatgccattcaaatctgtctgtgtgacacagacctgcatgttgcgctcacatgcctatttatgtttacgtggtgtaaacctacgtgttgctctcacacgtctatttacaataaggccttagaatggttcttctcagttctgattaccgagtccaacctgattacgccttgttcgcataatccttaaatctcaatataatcatacacttaccatggcatagcatttatttaacttatatcactagggtaataaccctaggctattaaccgctcatattagggtaataaccctaatcccggttacaattacttatattaatctcaatataagcgccaccgcgcatactctacgtgctaactactgtcttacctattttcccgcaaaggccagaggttccaaatccccgtgtgctactgaccaggtgcttgtaatcctagtcacacaatccgggattttcacaaatagg

SEQ ID NO: 345352 - DNA, 584 bp, Cannabis indica
tctatcttttactgttgccaatcttgccaaggcatcacggtagcattctcttctcgtggtatttgttgaatggtgtacccttctagttgggcaagcatgtcttgtattttgctgaggcaggccatcatcttttcccctctagccatgtactctcccaaaacttggtttacaaccagctgggagtcgctgtaactgtctaagtgtctggccttcacctctttcgctagtttcagaccgacaattaatgcttcatactctgcttcattgtttgaggcagggaaaccgaagcaaatggctgtgtgaattcgttgtccctttggtgttattaaggtgatccctgctcctgatgactgtttgttagaagaaccatcaacttgtagcttccaagtttcacttgcgtgatcttggttttcatttttcttggagttagggacgtgtggttcaggtgaatcgcttgggtcaggcctttggcgtcattgtttattgttggttggtcgcccttttgcgcccttatctcaacattgacatttggaaccccggtacactcggctacaaagtcaaccaggacctgccctttaatagcc

SEQ ID NO: 345353 - DNA, 598 bp, Cannabis indica
ctcaaactttatatgtgtttattcattattttagagaattcatattaggatgttaaataacatacatggtagtaaatctagatcctggtaaaataattccaacaagtacctagccaagggttggccggtcgaggacagcaattcagctaaggcttgaccaaccatggtctggccgaccaagggctccaactcaactaagaaaggccactcagacaagtgtccaccacatcagatccatctatgcaaacacaattggatcaaattagagacataataaaaggcctagctggcccaaagctgtcagacctagaactagacaagtcaaggggatctccattacctttgcctaagttcaagataataatatggaagatgtatattgggagagaagatcccctagcacacataaagtactttgagatgcaaacatatctccaaaaagttactggggatgtatgatgccgtatcttctcggtaactttatctgaaatagcccagcaatggtattttaagctggttttgattatatagaagtaaaatttatatatgagtttttaagttttttatggtattcgttcttatctatgatgatttatca

SEQ ID NO: 345354 - DNA, 821 bp, Cannabis indica
caactcaaatttaattttctataaatatacaactgaatttcgaaatccaatgtattaagaaatatattttcgaaattacattaaaataaaactagaaaaattattctaattcatgttggtctaaaattaaataaattaattttcaacataaatataattttcttatttaattaaatatcttaagaaaaatatcaaatatttaagtgtctagaaaaaatcaacttaaatattaattttctatttaattaaatatatctagaaaaatactaaaaagtctacctagaaaatatctatctagataattcataaactaattacttattttctaatataatatatcttagtctatttattttaataaaatcattaatgaaaattacttgatttaagttaatttaaaattaattaataaattaattttcaaaattgaaaaattttaaaatatctgcatttaaaataagtaaatgcaattcaaaattaggtgggaaaatgattattaaaataaaataaaatatattctgaaaattattctaatttaagttgatataaaattgaaaactttccaacttaaataaaattttctatttaattaaattcattaaaatagaaataattaagtatcttgaataaattcaacttaattattaattctaatttaatatttaagaaaatatcctaatttaagttgatctaaaattaattaacaaattaattttcaacttaaatatattttctatataattaaatttcttaaaatagaaacaaataattaagtatcttgaataaaataaacttaattattaattctatttaagttctaa

SEQ ID NO: 345355 - DNA, 558 bp, Cannabis indica
ggagccggagtatcgacccttctcggcttcttggtagactaaacctccaccatctttcccttgcgcttccgatctagaggggccagaatctcgccctcttcttcctcttcagcctccccgtcctcatcgatcaagacaatttggcctaagggaacgctcgacgaacacctcctcggggttaccgtcaggtcaggtgcctgagggaaggcgggttcaggactgtaagtctaggcaagggtcgccaaaagctcgtccattggcttagctgtttcaagaaacaaacaaacaagtgtcagaatgatcatgagaaattatgcgcacaaggacaaagtagtaaaactaatactacctaggaaatctaattcagccctagcaaaatcctgcactacaatactagcttcgtcatccccaagaaagttgtctgaggggagaaaccagctggaagacagataggctgaatgatccagaaggataggtgtgggaggcccagaccccatccgggaccggcctaaaaaatgacctaggtttgaaaaaacaaagcccttggcatgatcaccc

SEQ ID NO: 345356 - DNA, 690 bp, Cannabis indica
ttactaaccacttaaagtttcatcatcttcatatcttttttatttcgttgcacggaaaagagaagatgggtcctcaatggaggttggacaatatccattccaaacaccaagtactacaatagaatctgatgtcgaccttttgtgacgttccatattcttcattacttcatttaatattggatctcttacaataactattgtaaacaatagtgtttttctatgtttacagtaatattgaagataataatatgtataggaataaaattggtaatatgagagtttttttaattgattataaaaaaagataatattttaactatatctatgtaccttcctaatatattgtttaacaagtagtttattaataatacacattttattctcttgtatataatattttaattagcaccaattttgacgatatgctaatataatatacatttatttttctaaggttccaactcaccataacaaattgccttccaaagataatattttaactctttcaaataaaaaagtaatattttaactatataaatatttgtctatataccttctcattatagtttttaataatttttttaatttacaatatacatttattgaggagaaaattttaattagcaccaattttgggatttttttaatatataatatatatttttttattatttatcttcccaatatagt

SEQ ID NO: 345357 - DNA, 925 bp, Cannabis indica
acgcgatacccggtgatcgaaaagcgtgtttttttgcctcccgatggcctcgagaaaactgagaccttacttccaagctcacccaatcaaggtattaaccaaccacccgctccggcaagtcttacaaaagccagaggcatccggaaggctcctcaaatgggcgatggagttaagccaatttgatctacactacattccacgaatttccataaaagggcaggcgttagcagacttcatcacggagtgcaatgaagctgaagctaccgcaaacatacccacaacacccgtcctggcgtggaaggtattcgtggatggtgcctccaacgagaacggatccaaagcagtggtcgcaatgatatccccgaatggacttcgactccaagcagccctacggttcgaattctcagcttccaacaatgaggccgaatacgaagccctgatagcagggctgagattagcaaaaaccgtaggggctaaaagagtagaagtctacagcgattcgcaactggtagtaaaccaggtatcaggagaataccagacgcgcggccgcatatgtggcgatagtccaggaactgctccatgagttcacggactataaagtacaaagaatccctaggcaaaagaatgctcacgcggactgtctggctaaattagcttcagacagcgaaattgagaaactgggggtggtacctgtggaacgcttggcagagccaagcatcaaagtaaaaaatgccataacaacagttgagcaagagcccagctggatggttcccattatcgaatacataacaaaaggtgaattgccccaagagaaggcactatccagaaggatacagtatcaagcacaccgttatgtgatgatggacaaattctctatcaaataggactcagcatgccttatttaaggtgtgtatcggaccctgaa

SEQ ID NO: 345358 - DNA, 566 bp, Cannabis indica
attaatttagaactgcaaagaagacatgataaagtgactttctctaagaaagaagaattacatggcagagggtggaatgaagtacagatgtgtcgagtgcggcaaaaaaataatttttaattttataattgctattagatttttttttttaaaaaaaaaaataaatcacttgaaccaatcttggactagcacacttatttagcacttaaagtattgataataagaatgagtgtagaattacatttaattagaggttaagttttactatttttttattaattaaggttatgggtgtaatatttttaaattataagaggctttattataaatattttaataatttaagtccaaaaaattaatttttaaaggattcttatttagtaacaaattgtaaaaaattaattaataattagaagtaatttaattttaaatataattaaatttaattaagattttatagggaaataaattttcaagttactatcaggttacaagttatttatttatttatttatttattttaatttttaaatttaaatcacaaccatccaatagtgatctaatga

SEQ ID NO: 345359 - DNA, 884 bp, Cannabis indica
ctctgatgtaagttactacggtaacagacacatttttgatcaataaatgaataaagatgtttatttcaaaattaaaattgagtcaaaattactaacatgttattaatttaccatctagtgcatacaaaaaggttggtcgaacccaaaactctgaacagataaaaagtatacttgcaaaaaacaagtgaccaagagtcataagtctgctcggtcacttggggcacctatacctgtacaaatcatttggtaaagataaaacaaacacaattgcacgatgattataaacaaagaatgaaattcattaaagataacaaaagcatgtaatatcgggattaaaagctgcccggtcagcctgttgtatgtaaaataaaaaataattccaagtttaaagaccgcttggccagtcatgatgtcttaaaaaaagaccttatggccggatatatatataaaaaagaaagataaaaagagaagtatttagacaactggagtcccaagctctttgttcaggtcttcttggctggaaggagctagaggatctgttgtctgagcggaaggcacatcaacgttctggccagaagtagaagtggtcaattcgggttcaccataagcaacttgggaagcatagtactcgagatacatgtctttggcctcacccaggtaatcaaaattcgcctgagggttagccttccaaaagtcaaaaaaatctcgagaccggctatctctaaggcatgaaccttctcttccagcctcgtcacctccgctctctgctgttcagcctctgatttgtacttctcaacctaagttgtaagctcctcctccttgggcttcttctcttcttccaaccgatgaaagacagtctcaagcgctcccctttcctcttgaag

SEQ ID NO: 345360 - DNA, 560 bp, Cannabis indica
cccccaaactaaatataacattgtccccaatgtgacattaaagaaaaagtaaaggaaacttacctgagcgccacatcaacaatcagttgacgaccataataagcatcatgctagacaacttgaaagttgtttttaaaaatgccctcaagcttggcatgtaatgagtttgaaccaaaagccacaccaacaacacaagacttttgatgatgagcttggggagaagcctttcgtagctcatagaggatataatatggtgttaatgaaatatatggatccattggtggtttgtttgtcaatatcattgatgcatttgaataaatgatgtcatgttcttcctcatcctccagtgtcacagtttcaacactttcatctaacaacccttcttcttgttgcttactcttcacttggctatccataccctcacttatgatttcatattcaatgatttcctcttcacaaggatcttgatcttcaactgtaggctcattatcttccttgtattgaaataatgacccttcttcattgtaccaacaactttcataattttcatcattggagtt

SEQ ID NO: 345361 - DNA, 524 bp, Cannabis indica
ctaggaccggaaccaggataaatattgctgtctccttctagttcaattctgttttgttactttgtgttgttaactggtttatttgtgtgtgttatttctgttcaagttgttgattaattaatgcgagttttagaatgaattcttagtgttattgttgcttaatttacaacaaaattagagcttcgggttcaagatccaataaagggaagtaaggaatcaatattcaatcaagactcatctacaaccaatcatgacgggagcagcaagatttgaacttgagaagttcaatgggacaggagattttggcctatggagagaaagcttaaagggaatactttttcatcaaaaggttgccaaatctttgaaacccaaggaagaactgactggcaagttgaagaaggaagagcttgaagacatggaagaattggcatactacactatcataatgtacttgtcacactgtaagaaggaaggttcagaacatgaagatagctcgagaattgtggagcaaacttgaagaaatc

SEQ ID NO: 345362 - DNA, 655 bp, Cannabis indica
catgaacgctaaacatgtaaatgcatatgcatactgttatactaatcttaccttgattttgaatttaggtgtgccggtcaacctgagtggaacaatctgctcggcgaattacaggctcctatatcacatcaatcacaacacagataagtgatacgctaaatcacttcccggggacttaaacttgaaactaaaagtttccctatcgatgaacaacatgacaataccctaaataacacaaaaatatgaaaaactagggttcccaaatttgccccaaccggtagaccggttccccaaccagaatttcgattatgggaaaaattcctagaagccaaccggaattccggttcctacaggcctctctgaaccggaattccgatttagtgcaggaaacaccaaaaaattcatatctcgaccaaatcaactccaaaccaatttaaactttccagacctgctaattagaccataatgaacatattccaagcaataaaacccaactacatgctcagaaataaaatttgccatgtgagagcaaagcttgagcctataagctcaaaccttgaacaactctcactacaagcccccaaataaactaaaaacaacctaaatcagcataaaacatcaccagaaaacaaacccaaacacaaacaataaccac

SEQ ID NO: 345363 - DNA, 832 bp, Cannabis indica
agggcacaaaacccaacaaatacgtccaccaatcggttacgatgcattagaccaccgtcaaacctatatcgaaccactatcagaccttctccatcaacctcaaaaacttaaattttggaacatcttaccgaacctatattggacttatatcgaacactatcagaccgactcaaaaaatgaaaaagaaactaaaaaattatggagaacgtcttcgtccgtgctctctccattcatggtctgcgtttgtggtctccgtttgtggcagtggtctctctgctcgcgattgaggatggagattagcgtgggcttaaattgattgaaatggagtcgagagggtaggtctaattggttttttagtcggtcgagtagtcttggatggtggaggtggtgttgaatggtcgaggtggtgttggatggcgacaatggtcttggatggtggcgacaatggtcttggatagtggtggtggtcttggtggttcggctctattgaagagagtgagcaagaatagagagagagagagagacgggagtaagtagaaaataagaggagcaactttggatttaatgaaaaattgacataatctaacaatattggtacactaatgattaggggataaattttagcttaataaatgtatataaagtcaaatttcttatttttttttaagaatttagaaatcaaatatataaataaggtaataataaaacacctatttaataaaattgacataaacatgatgtggttgttcaagattggataaaaaagggaaacttacaaaaatactggaatttgagttaacttttacaaaaatactgtcacacggaaatcttt

SEQ ID NO: 345364 - DNA, 630 bp, Cannabis indica
taatgtacattatacaaactaaggataacagctgaatgaacttgaacaacgaataacgaggcatccatctcgctatagggaggcatactcatggtaccttcactaatcaaattcaaacatctttcaatgagattcattgctccgtcgagtcagctctctcagattgaagctgacattcaaaatgatgttgactgctgaagttcaccttgtcaccaagaactgcgattgtcagatggagcgatatgtcttcaatagcaaaaacaatagtatttacattatcaaccttggaaagacatgggaaaagcttcagctcgctatcaggggctattgtagctatcccaacaagataactctacgacatacactttggagcgtgttaaatccacgtcaacattaacccggtaaaagcagataaatcacagctctgtgattttcgaataataactgcaattaatttacgtgggacgtaatcaaatcgcacaatttcaggggataattattgtggaaaattaatctgattgtaattattaactgcccttctatgtaactataaataggagcagggtacactgaaaaaggcggaaaaatcctttagaaagaaagcccaagttttgtatcagaaatctaata

SEQ ID NO: 345365 - DNA, 564 bp, Cannabis indica
atatagagcgttctatgtaactcagagtgcaattcaaagttctatggtggatgcaatgaggaattaataagttagtggatttacttagtaaattctagatctgcttattggaagctcggttatataggcccatggtccccatactagttgagacaaactacttgtaagactgagttaattgattttaattaatcaattgtcattctaaaattagactatgtctagtttatgaatttttcactaagatatggtttgcttgtgaagaaataatgttttggggtttatttgttaattaagatactttatggagtctaattaataaatattataaatgaaaattttatttgataattattttaattattaaataaataagtttgtcatttgtagggttgaaattgtaaaaaatagtatttgcgaaaaatagacaaatagttaagaaaaatggcaaaaatctaactagtgttgggccctttcatggtcggccacgagatggtaattttggtccatttttttttatcattttttttattccaaataaatcaaccctaaccctattgaaga

SEQ ID NO: 345366 - DNA, 999 bp, Cannabis indica
aggtgaaaatgccctatttgtgtagactgaagaggctcatgagcagccaggtgagaatgcgaccaaggcagttaaagaaaagtttgagcgttggcagaatgttaacaacaaagctaggtactttatgctgtctagcatggtcgacaccttaaaaacaagatttgccaatactctcacagctatagatatcatgaaccagttgatagaattgttccagatggcgtcagattaagctcagtttgaggcgaccaagaattttatcaatgcacagatgaaacctcatcagaacttgcgtgatcacctactccagatggcaagctacttctaggaagctgagaatcatggatctattatagatcaggaaactcaagtaaatttaatcttaaatagtttgactccaacttttctgcccttcacctcaaactatgtcatgaacaagttgacttttgacttccacgagttaatcaacaacctttagacatttgaaaattttattggaggtccacagatggaggaaacaaagctcctagttctgacactgctaatggtacgactaaggctgaggcaaacattgcctctacttcgaaactcagcaaaaagaagaagtggaagaatagtaagaagcctcttaaagctgttaacacaactaataagaatataaaggctgctgattcaaaggcaaagcaaaaaggaaagtgcttctattgcaacaaaaagggccactggaaaccccaatgtttaagtttttggcaatgaaataaggtatttctatctttgttataattccatgtgttttagagaattattatccccttgggttattaattctggatctactaaccatgtttattttcttttattttcagctccaactgcttaaacttagattgttatcctaacgagttgagtcgaacagttggacagattggtggagattgtacaagtgaagatgaagctcggatcttctttatttttgaattaattgttttagtttataaa

SEQ ID NO: 345367 - DNA, 510 bp, Cannabis indica
atgatgaacttactctgtatcatctacggaattggagatcacccaaataacctcatcgcttcatttctcttgactcgtcaagaaaatttccagtcatggaagcgtgcaacctctattaacatcgctgccaaaaacaaaactcttttcattgaaggcaccatacctcgttcgcctccaaatgatccttctcgctctgcgtgggacatttgcaacaacaaggttatgtcatggattcttcagtctgtatctcgcgagatcgctgctagtatcatgttcaaaaccactgctcgtgagatgtggacaaacttccatgatccctttaatcaaagcaatggcccctgtatcttacaactcaaaacctctgttggcaatgttaaacggagtgataactcggtcaccacctatttcacccaattgcaagctctttgggatgagctcaacgagtaccaaccaaatatcccctgcacctatggttgtacttgcggtgcgatgcaaaaagttcaagattat

SEQ ID NO: 345368 - DNA, 858 bp, Cannabis indica
aaagtgatttaggcaagttttctttggatcgattgagcctttcaagcctacctaaaacgttttatcctagtatacccaaagttgagccttagcctatttccaaaaaatttcaccacttaactaagcttaattcgttatctttaactactttcattctcaacgtaccttattatgccataagcttttaatcaagtttggggggaatgaagtgtgtaagtggggaacaattttgaaagtaagggattgaaaaaaaaatagttgttatgtgatgtgcctctagtgtagaaaaagaaagaaagagaaagaaaaaaaaaaaaaagaaaaatgacatgtgataatttcttcttgagaatcaaatgtgaacaatgaggtaggcacataggaaaaaatatgcaatctcttactatcttctttgggatgaaaaatggataagtgtgggtgcttgtttggtataattgtgcttatggtataatgtaacctaaatgacttctcatctacccgttttgcctaagccatgctattataaccgaaaaagaccttttgattccgagcaaaaattgtcaacattagtggagagaggtatgtcatccaaacttattgaacatgggttagcggaatgtcggaaagtgtagaatggttgtgatatgaatgtcaaaagcgatgttttgtgcctgtatgaattgcttacttctgaattatgcatccaagttagttcgtagagttattgagttgaaattctggttattgatttgcttgaagttgtgcaggtggtagtggtagttcaatcattggaaggtttagttatctattgcattgttttttttttttagtttagttgagttttagctttactcgggg

SEQ ID NO: 345369 - DNA, 685 bp, Cannabis indica
catgttagaaagtacgttcttcttcgctctaaatctccatccacaatctgtatccttacatgtaacataccaaacagcaatacctgacttccaaacaaagtagtcaaaccctttcttcattgcatacaagctaacaaccatctttagatgctctttctctctaaaaaaactttcctacatgtaactccttgcttggtgtgccacccatagctatataatgactatgatcctcgatgtcttctcttgtaaatattttctccttgaatttactataacttgttgaagaagaaaatggattgctaaatctagtctcaatggtcactctagcatcactaagaccactagcatcattggtctctctagcattactaggacgtgtaccatcagtggtccctctagctttgctggttcttctagcatcactaggacctttagcattattagttttgtatggacgactactactagtaacaggtgttaggcgattatctctacgggacattcttttccgtgtcgatggcctaggtggtatttggtacgatactggagtcaagtttaaagctacagcaatagggacctctgtatcttggtcgtctcttctatcatcactgccctccacatagcattcaaggtctggaccataaaaaaaaaccattaatgaagagcatttgtgctacaatgtcag

SEQ ID NO: 345370 - DNA, 504 bp, Cannabis indica
agataaaaagagaagtatctaaatagctggagtcccaggttatcggttcatgtcttttgggtcggtaggagctgtaggatctgttgtatgagcggaaggaacataaaaattctggctagaggtagaagcagtcgcctcgggttcactataagccacttgggaagcgcagtactcgatatacatatctttggcttcgcccaaggaatcaaaattttcctaagggttagccttccaaaaatcataaaagatctcgagaccagctgtctctaaggcatgaagtttctcttccaacctccccaccttagttgtaagtgcctcctccttagtcttcttctcttcttccagccaacggaagacagtccgaagaactcccatttcctcttgaaggctattcacttctgccgacagagtgccaatggtagcttcaagctggtcggaggcctcgaggtccttagtcaactcgactagtttcctctcagcattaaaagcttcttgttgacttca

SEQ ID NO: 345371 - DNA, 738 bp, Cannabis indica
ttattattattgctttattacgtattcttattacgacatatcatttatcgcttatcaaaaagactcattgtcgttggctaaaagcgaagtcaacaccttacatcattcttgataaagggtgttcaaatatatctttaacatacactatgatgtatgtttttagaaaattcttaattaccctaatcatcaaatccataaaaattactagagcgttggtcagttcaaatggtatatctagaagtctgtgataatcgtgcctagtacggaaaacactaccagaaatgctcttctctccaattctcaatcaataataacccgagcaagggtcattcttaaagataactactttttcccaaaacgattgaatcactcataactccctatcagaggatatttatcatgattagcaacttgcataatccttgatagttacatccatataatcgatttatcttccttcataataaccaacctcgggacttcccaaggcaatatcctagattacataaatcttaggttcatcgtcccctgaatgcgccattttacttcttgaattctgtttgggccattctatacaatgcctcaaaaccacttctgctctaactaccaaaacaccaacaatatcttgttgggttttatgccctaaataaaactctatttcaatgcaatccagattattcaatatcaataaagtaacagaagtatttttcattcatttgtgtatgttttggttcacct

SEQ ID NO: 345372 - DNA, 934 bp, Cannabis indica
caggcatattatttagaaattaaggtattttttaatgacgtggcaagacattattgtaattgagatatattaagttatttttgtaattattttatattttatgtatatttttgaaaaaatcccaaataaatattagatgaaaatacactttaaataatgagctttactataaagatattcgatctccattgttggttctacatagttcttgttttaatgagtaatcatccttaatggatgaacattcattagcaatttaacgccatagaatctcgaaagataagtattattataagtattttattcttagtaacgtccaccccaatagtggctgctaagagtaagacttacaaagtatgaaacaatggtggaagctcataagatagaatggccttaactctcgcctaaacgggacaacgccggattctcatcttgatcaaataaaaggttgttagaatgttttcattttagatgagctgactgctctattcagtgaatgatatctttgattctcgcctaaatgagatactgtatcagtttgtttgaaaccttagaaattatttaggttgcttgtttttgtattgtcacttgtcattcctacttactaagtgctaataatttttgaatgtgcatgattttgtattaaaccttgtttgatttctatttattgatatttgtagtacccaatatgactatgaacaatcccatggtgtcactgttgattgacaacaagctctctggagctaactttgtcaaatggaaagagaacattaatatttctcacataggtgaaaatgccatgtttgtgttgactgaagaggctccgagcagccaggtgaggatgcgaccaaggcagttaaggaaaagttcgagcgttggcagaatgctaacaacaaagctcgatactttatgctgtctagcatggttgacatct

SEQ ID NO: 345373 - DNA, 602 bp, Cannabis indica
taactataacgtacacgattatagaaaaaatttagagattaatttttttttctaaatgccaaaacaattaggtgttgcaccaatacacacatttttgtggatacattataaaagaaccttataatatatgtgtttaattaatacataataagaagttattaaataaataatcaattatatagaacactttatatgttccaatatatagagacactattagttatctatcgttctaatccaaataatcaaagatcgatcctctatagatgatctatatcgagtagggacaaatttattgttctatctttcaatgtattttatccttaaaacacttagtttcctataaatgataagagctcttccatttatctctattaagccaaactcgaagaaaatcatcatttcacttctatgtctagatagaagctatagattctgtatctatgattagcgctcccacttaattaaactaacatattcccaagatgtatgtcttggcccgaattatttggtaagctttaacgaattcaactctaagaacacaaataacactcttgagatcgaacccaatcatatcaagattaagatttttgatctaagat

SEQ ID NO: 345374 - DNA, 1189 bp, Cannabis indica
ccaatactctcacggctgcagatctcatgaaccaataaactgaactgtttgggatggcgtcatattaagctcgttttgaggcgaccaagaattttatcaatgcacggacgaaacctcatcagaacgtgcatgatcacttgcttcaaatgactagttacttccaagaggctgagaatcatggagctattatagatcagaaaactcaagtgagtttgatgttgaatagtttaactcctgcttttttgccctttacatcaaattatgtcatgaacaacttgacttttgacttccacgagttaatcaacaaccttcagacatttgagaattttattggaggaccactgaaaggaggaaacaaagctcctagttctggcactgctaatggtatggccaaagctgaggtaaacattgcctctatttcaaaacccaaaaataagaagtggaagaatagcaacaagcctcttaaagttgttaacacagctaataagaaaaaggctgctaatcccaatgaaaagcaaaaaggaaagtgcttctattgcaacgaaaagggccactggaaaccccagtgttctacgtttttggcaaagaaataaggtatttctatctttgctataaactcatgtgttttagagaattatgatccccttgggctattaattctggatctaataccatgattataattttcttcttattttagctccagctgcttaaacatggattgctatcctagcgagttgagtcggatggtaggacaggagggtgaagattatccaagattgaagatgaagctcaatatcttctttaattttttgatttaattgttttaattcatgaaaaatttagtttcaattattaaattggggttctttttatcctatttcatattattgcagacaattcattataacattttttttagattactaatgaatttttctctttaagaaattttcattatgaattacatttataaattgagctttatgtttactttatcttgtgtataccaatacaaattatttatatgtttatcatgttttgtatgtgtttgtgttttattattgatgcgaaatctatggtatattgttctttgcaaagagataataccatataaacactttagaatttaaattcaatgtttatgaataattgttaattcttaagaaattattaagattttgtttaa

SEQ ID NO: 345375 - DNA, 1041 bp, Cannabis indica
attggatcatcttccatcattccaatttcatcctcatgttcttgaagaaatacaaaatagtcatctgaaatagcatttcttctctctcttgtggacctccttaatggctcttgttcttgagggtgttgaatttgttcttctggaacaatagcctcattttgatttgggagttgttcaacattgtcttgttgaggttccggattcatttcttgatcaatgacaggtgtggaagcctgaacattgtctaaaatgatagtaggaactgagtttgaattcaattcctcctcaaaaacaatgtctctaaccttatttctccccccaaattcaacatcctcaaaaaatgttgcagttcccgtctcaaaaatatttctgacagtgggatcataaaacttatagcccctagatcgctcagaataaccaataaagtagctgctaactgttttggagtccaatttattttcatgtggcctataaggccttgcctcagctggacatccccaaatgtggaaatgctttagactaggctttcgacctgtccaaagctcataaggtgtttttgcaactgctttacttggtactctattcaaaatgtaagctgctgtctttaatgcttctccccagagggacctaatctctattggcacctaatctcttagttttggtctgttttcccttgatacaatctacacagacattgaaatctgtgaaagtcaagagactctaaaatgtcatcagacacaagacgctcaattctacctcttgagatatgacctaagcgtttatgccataatgacgctgaattttctttatttaatttgcgtttagtacctcgtgattccacatgcaaggtttcattataggatgcaattgtttctagcaaataaagattgtcataagtattcaaataaccagttccaataatatttgaatttaaagacaaagtaaactgattgtttccaaatgaacaagaatatccaaatttgtccaacaaagaaacagaaactaaattccgtctaaaagacggcacaacaaaagtgtctt

SEQ ID NO: 345376 - DNA, 1208 bp, Cannabis indica
aatacaatcaggtctacaaataatttcctaccatctatcctaacaagtatacccctaagccagtttctagagattacaatctccctagatggtaacatggtcccaaccccacagtaaataattcactcggtgcatttatatgatttacaattgtgctagcaataaaggaatgagttgcaccagaatcaaacaaaactttacaagtggtgttggccataggaatctgacctgatacaaccgaaggactggcctcagcttctgcttgagtgatggcaaaaactctggctggaacatacttgtcatctttcttgggttctgctctgttcccagtctgtccccacagtgggcaattgcgtttgatgtgtccttcttttccacatttgtagcatgcttttgcgcgacactcgccgagatgacgtttggtacatttagggcattctggaatgtttcgcccactgctgccattaaatcgttggtcgttatcacttttgtacctcttgtcttgacttggctgcccggactggtcctgtccccgtttcttgtggtcattagaattggctccacctttcttagattctctcctggcagcattttccttccaaattttgttttcactccgctcagccgtaagagccatttcgacaacttgagcataactgaattgaccccttgacacaatttccacatctcgagcaaccattggtttcaggccttccacaaatcgatgtgctcgcactctatcagtaggtaccagatctggagcgaatttcgccaatctatcaaatttttgtgcatactcagtcacagtaagactcccttggactaatccagtaaattcatcgacctttgctgctagaactgctgagttataatatttctcaataaaaacccttttgaaatcatcctatttcatcgtatccacatcctttgtttgctccaccaccgctcaccagatacgagcatctttcctcagcatgtatgatacacacttcactcggtcattcccatcgaccctcatcatctgcaaaatgctttctatgcgactcatctactcttcagccaccactgggtgtatgcgtccctcaaactcaggtgggtgttgttttcgaaatctctctgctaacatctcatgtctagcttctgtagcaggatataccaccacaactggtgggtctctattttctggctctggcggccttatttgaact

SEQ ID NO: 345377 - DNA, 735 bp, Cannabis indica
atatatatatatataattacatgagagaatttttttttttcaacaagattccaacaactttatatattttttttttcttagattttgacactagttgtcagatttttttttttccattctctcaattttcacacttttttaccacacacacaacaaatttctcatctaaattttcccaaactaaagatctacttatggtacaaatagggttaaatttttggatattcagggtttatcttttctaggctcaaaatgtgtagaacaggttaaggctcaaaaaagtatctaggataaaattacagggatgacttgaaatgcacaatcaatccaaaacaaatacctaaatcactttcctagtcatgcataatgggtcaaggtcctaagagagtccgacggtggagtagagttcttcgtccgctaagcttggactcatgccgtcgtcgatgggaagctgttgcacgaattgctagcagagagcttgagtcttcagacggcaaagaaagaaaaaagataaaaagtttgagtgtttagggttttctaaatgttaaccttttttatttttttttattttatttattttatatttaattatttaatttttttttatgtttattttctttgctaatagaatagtgatgatggtaattgattaagaaagattatttatgaaaaaaataaaaaattaaattagagaaagagagataagcgtgacttttattattattatattaaata

SEQ ID NO: 345378 - DNA, 851 bp, Cannabis indica
ttaaaataaagatatttacttattgttaaaattagatctcactgtaatatttattattacagttttacaagatgaagtgaaaatacaaataaatacaacagaatacaaagacagatcctatgtggctttgcctctagtggatcaagatctggttgttagttacaaccgaaattgtaactaacttccagatctgtgatcaaccctaaactacaagtataaaagggcactagatccataccagatctctcagttgagagataccagaaactcgaacccagatttccagatctggaagcttcagctccaaatctcagtgttccaagttcatgcaaagaaagaaaaagtgttagtgagtgagaaacaagaaaatacagagagataaacacatagaaagaaaaagagagacaatctgaaataccagtcaaagttttgtgacttggatttctcaccttttgtatcaatcttcatcaaaatagtgcagatctgtagatcgtcttcaaggcgagctcaaagaggacgtacccctgatttagggcgaacctctataatctctggtgttcattttctaaccctaacctaatgatctatgtttgatatttgtatgtgtgtgttgtgtggtgtttttgggaaggtttctgggtaagatcgatcaatagatcgagaagaatctctggttctagggtttgagaaccagagagaaggcagagagaaagagagagagtttgagaaactctcgaatgttcgaaggtgcaaatgagctagggttagctctgattgaacttagttttgttcaatccagaacgacaaatcgtttggtttaaacgatttgtcgtgtgagtgaaaacgacaag

SEQ ID NO: 345379 - DNA, 666 bp, Cannabis indica
tatatagtatgcctgtgttgtcttttcaggtgtgttctaacaggttggcgcggtatagtcacaaccgggaatttcgggccgaaccgggttcgggcccgaaatgtaaattgaattgattatttggcattttatttgacatgtgataatctgaaatttatttggatataattgagtgtgaaatggcatttatgcccttgaaaatgcttatgtttgttttatagccctaagggcaaaatggtcatttgaccataagtgatttactttgaattaaatgatttttgaaaggaaaaaggatttatttttctggttctatctctcacccgaaccctctctttccctaaaacccttttgatttccaaagttaattgttgagaaattgcttgaagttgagtgtggattgaagctttggacttgtggattcttgagcttggagttaggtaatttcttgctgagtttatgtagaaattgttggtgattctcttgctgaattttatgttggaaaagcttggaaaaaaaagatttggtcttataattgcatgttgtgttcttgagattaatttgagcatgttattgaataaacatttgtatgtttgatgattagtattgtaattgagctttggctgagattatatggtgattatgttggaatttattttaccaggatct

SEQ ID NO: 345380 - DNA, 726 bp, Cannabis indica
tattaaacttaataaattacaaaactatttacatgtaccgggatcccgtttaaaagctttcatacacaaaataccaaaatacattactggtcgcgctgctttgacatgtacaacctcatctcagctcaggctcactcctgttcagctttcgcctttcctttacctacagatggaagcagaactgtgagtcgacaaactcagtaagaaaagcatataacatatcacataatttcccacttgtacttaggcgcccatacacctatttacaaggattaacaaatgagtaagatggttccatactacagtacaaccactataccacatacactacgtaccttgttgtacgaatattggtagggtttgtttcgtactctgagtaccactgagtgatataccacaaacaccctgtacttacttgtactcgtgttggtatcactgtaatgtactctcaaacaatattcactataacaatgcactctctacctaaattgtacaagtgttggtagtgcaactaaaccataagcatgcatatacacttaacacatatatacactcagatattcatattacacgttatacacagttcttaccttctttccagattcaagtgtgctggccgacctaaacagaaagtctcgcgctagatgggtgccctaatcacatagtgaaaccaggtaaatcacacgatcaaaaaccctaataagagaaacctgaacccacaaccct

SEQ ID NO: 345381 - DNA, 747 bp, Cannabis indica
gatccacgtgtcgttgtcatacaagtccacgtattttggccaaaatagggggcaacaaccaccattgtatataataaaatagaaactaattaaatattatttaaaataaatatatatcatacaattaacatatataaaaataatcattaaatatatgtaacatgtcaataaaattatatacacgcattaaaatgtttgtatttatgctaacaaaattatatatcactattagacatagtaaaataaataataaatatcatctaagaataataatatactatagaacaaaacaaaaaaatattgtacaataaattttatatcccaacaacctacaacaactcataaaacattaaaaaattcgacataacttttaaataaaaaaaaattaacaaaactaatatatatacaccttatttcatacgtaatttgcttctaattctaaaaaaaatatattagttttttttatggggcaaaagataatataaaatttataaataataaataatctaaaaaattattttactacaagttttgaaatgaaaacatttactaatatagggatatgattttgtcccgttattgtactttcacggattgtaatctgtgatgtacggcagccgtcagataagggagttatttgatctgacggctgagattgatctaggggtaattagggtcaaaaagtagaaacgtaccctgacactcatttaatgtactctgagacccatctaatataccacgaaatac

SEQ ID NO: 345382 - DNA, 1327 bp, Cannabis indica
tgaagaacggtacacacttatcagttgacttcgaaatgaatatattaagtgctgccattcttcctgtcagggctgtacttccttaggctttgtcggtgataacatgtctattaatgccttaatttttttaggatttgcctcaatacccctcgcgttaactatgaatcccaaaaactttcccgaggagactccgaaggaacatttctttaggtttagtttcatgttacactttttcaatattttaaagcattccgcaaggtttgaggtatgatccttactctttaccgacttcaccaacatatttttgacgtaaacctccatgtttcaccctatctgatttgcgaacatttcatttactagtcgctgatacattgccccagcgttcttaagtccgaacgacatgaatttatagcaatagagtcccatgttggttacaaagcttgtatgttcttaatttgggacatacatttttatttggttatatccagaatatgcgtccataaaagacataagctcgtgcccagcagttccatccactaactggccgatcctgggaagtgggaaatagtcttttgggcatgccttattcagttcagagaaatcaatacaagttctccaggttctattaggtttcgagacgagaacaggattagctatccacgagggataaaatacctccggtataaaatcgttgaacaacaagttgtcaagttcctattttagtgccccttgcctccggaatccaagggcctccttttttgtctcttcgctgggtagtttggatcaacatttaagtgatgctagataatcttagggtcgatccctattatatccccatgactctaggcgacttgatcctgcttcgccttcaaaaagcttgttaattgctatttaagctgctcatcaaggttcttcctaatgtacacacatttggtgggatttcctgggtcaagaataacctcctccaattcttcaattggttttagcaggtttcgttcatcttgaactcagggatcgagatcttcatctttcttctcattttcatctgccaagatcaccatcagttcatgaccgatctttctatgctgcaactctatgcgatagcaatcgcgagccagcatatggtcgcaacgcaccactcccatgtcgtctggtgtttggtactttaaagataggttcttgatggaactgactgcccctagtccgatcagtgctggacaacccaaaagtatgttgtaagccgaaggcaggtcgacaactaagaagtcttgcataagagtagcagctaaaggtgcctcgcctacagttaatgcgagctcgattatgc

SEQ ID NO: 345383 - DNA, 601 bp, Cannabis indica
tgtttctaggaaactgaaattaaaaatttctttttggaatttaaaatttgaagtcaaagactttaatttatagcaaatatacatgagtaattattctagcttggagcaccactactaatctaactctaagtctaattagcctaaagtaaaaaattacaagtaggagattctataagatcgaggaatatcatttcaggatgaaatgtcgggaatatagtcatctgcatcattcaatttcataagagaaattagagtgacatcataagcagatgatttataaaccattcattcaatgatatactattatagcaaattcaaaatgaaaaagctaagaggaaagttaaaggataattttgatttaaaataagaatccaacgatgtcttggtaggcgagagtcaaagttattcttattttataaatctcttcattgtttcgtattgtaaacactaatctaaattgtcatcttaatttggatgtccaactagatgttgcgtttacagatacttatctgtcaagatctaacgctattatgtttgtctaatggatgacaatcctttgggatttgtcccattaaaaacaacaagttaagttagaccaaca

SEQ ID NO: 345384 - DNA, 561 bp, Cannabis indica
aatgtgtctggttgcaccatattcctgaaggtacattgattttgttatctttcatttatgtgaatgtgtttattaacttgataatataatattttgatttaatagttgaatctattactaatacattgtttgtttgtcacggttgatgtacttgactcacgtcgagtggaactttggctatgttgaccaaatagtgctcctcattgatttttggggtagtaaacaatgtaagtccccttacaaatttgtgaaagacaataggggtcccaacagtgacaaggtacatcgaattttggttatattgtggtaatgttattttatttgatattaattattttgagattgaaaaattaattttgtttaacttgttctgtataacagataaagcttacttcaaatcctgtaatactgcccaactactactccaactcggaaggaagaaagagcactgaacagtttttcagtgctatcaatgagttgaaggagtacttttccaaggagttaaagtctcagttcaaatcattttctttgaaagttatggacaaaggagaaggtgaaggt

SEQ ID NO: 345385 - DNA, 952 bp, Cannabis indica
ctttggtatttttcattgagaatctctctagcaccttatcaatgtaagttgtttgagagcgagagcaagggatctgttctatgatttggataccaagaacataagcaacttaagccaaatgtttcattttaaattgagtgtcaagtcattccctaatgtcagtcattttcttgatattgttgctaataatcaaaatgtcatcaacatatattcccagactttattctttttcatggaatctatttctaaatccatgtcggttgaccattattttcgttctggacttgccactacatgtttacaggttaatggatcgtcattaatacagtcaccaacgaccatattgatttcactatccaagccataatgagctggtttcgcagaaaccctcccattacgacgaggagtcgtgaccttctgaacaagaacacttatggtagatttctcagttgtaacaacttccattggttcaaccaagggagtggaattatcctctacttgagtagaagatggtggaacattagatggagttatttctgaaagcattttctctaatattactttactttgcggccttaagttctttatatagtcatcttcaaggaaagtggtgtttgtagaaacgaacactttatcatccatgcaactataaaatagtccacccctagtctccttagaatttttgacaaacatgcaaacttcaggtcgcgcttctagtttgccttctttctttcttaagacatgagcatcgcaccctcaaattctataatagcgtaaactaggcatacgaccattctagttctacaagtgtcttaaggactaatttagatggaacaacatttaaaatttcattagccatctgaatagcatatccccagaaggacgttgacagggtggaatagctcagcatagacctaaccatttctaaaagtgtgcgatttcttctttctac

SEQ ID NO: 345386 - DNA, 1029 bp, Cannabis indica
atagaaaagatcaaggccaaaatgcttgcctcctagagtaggcaaaagagttaagcatagaatcgtaggatttcatataggaaatcatgtattcctacgagtgtctccaatgaatgggatcaaatgtttcaagaaaaggggcaaagtaaggtttacagggcctttcaaaattctcaagaaggttagactggtaccatatcgtttacccttgcctccaacacttcagcggtccataacatatttcatgtctctatgttacagaaatacgtatcgaatcctactcatgtgcttagttatgaaaacctagagcttcagccagatttatcatacgtagagcaaccagttcagagtatagacaaaaaagataaagtctttcgaaacaagaccatagctttggtcaagatactctggagaaacaataaggtggaggaagccacctaggaattgaagtccgccatgagggctcaatatccagagttgtttaggttagattttgagcacgaaatccttttaacggggggataattgtaaacaccgcttaaccttagtatgagaattagcagataattagggcttaattctgaaataagatttcgaattatgatttatgaatttatgaagatatactttaattctaggtgtgttatttatgttgtatatgaaatttcatgtttttgatattttatgcccagcaacattagaacgcaacgtttggccaatagaataacattttcttatgagttagtatttttaaaatagcgggacaacgaaatatttgaggtattatttttgactaaattactcataggtgataaggatccctttttggcttaggaaaggggaaaatggtctattgccatttgggtttttatcttgtattgacttttaaatatgttaaataaataacaattttagttagcttatatcttagataatcacttagtattgtcctttaactaaaattagaaaaaaatttaaagaaaaacaacattttctcgctcttcaacctctctctcttgaacccttggg

SEQ ID NO: 345387 - DNA, 518 bp, Cannabis indica
gggcaaaccattgtctcggctctagggccatttccttacaaaaaaaaaaagaaagaagaaagagataaataaaaaccaagcctacattgtaggaaacttggatggatcctcttctcccactacctcggcctcttcttcctccttcctggtcttctcgcagtaagtaagaacttcctcctcatcttcctcgagaaagctcgtgtccatgcttggattggccatccacgctcgatacatggtacgaaggccgacccgatttcatcgctctttagtttcgacctctatctcctcgagcaccctcttaagttcattacattcatccgttttggtctttaatgccttctcgacttcttcaagactattctttgactttttggcttccttagtgagacaattgattacctattgagcattgttccattgcttgaccacgacctcgtgttgggctagtgatttttgaacctcgctctccatgtatttatgtaacaccctaactagcataggcgtattacgtgatt

SEQ ID NO: 345388 - DNA, 808 bp, Cannabis indica
ctatggacagtgcgagtgtcttggctaaagagcctcgatgcatggatgcattcatggatgcttgcgagcatgactcgacgggagttgttcgagagacggaagtgtgtacgaggcaaacagtggcgcgaaaaatgagcccattatttctctgatggttggaaagttgaccttggcttagagaagtcaaggtgttgtacgagtgttctgctgcctgaaaaagtgagcccgtgacacaccgtaccatactacatttttgcagtgtaattttcgcgattttaaagttcgggtgcaatttgagaaattgaaaattttacatatacaatttagtttgaaaaaatggccaaaactcacatcgccgtcacagcgaacaccgctacagattgaatgttatttactagaagtcactaaaaatgaatagagttattctaaccacggttaggatcttgactatatgtactcccaaacatactaggttcgggtagataaactaaaccctaggctctaccgagtgaaaacctcaaaaaccccgaacttgagtgaggctcatttcctgtgattttgaacaatatactgcaaatttagatcaccaatggccgcctcaaccgctgccagatccattttccggtcgatatcttcccgtgggggaaccgctgcatcgtttatcgcttccgaagccaaagcggctcgcccttccccatttcgtattggagccaagacacctctttctcaacgctctctcaggtatctgtcatcataattgtatcaatatcttcgatattgtaatatttaagtgtcatttctaatttct

SEQ ID NO: 345389 - DNA, 1136 bp, Cannabis indica
taaacatgcttaaaaaattaagcgaataaaatattatcgtcattaagcaaataaacttaaaagataataattacaacaagatataaattacatgctttcaatttaatcatttttgagaatataaaagataacataattgaaagcataaacatccgataataaaaattattggcctacaacacaaatcaactaattcataacatcaacaaaaaaattatttataaattttatctcaaacaatagaacaagaaactcccactaacctaaaggagcaaaagattattataaaatgtccatatcaacaacatatttattaaacaacacaacacctaatcctttgattagaggatctactaacatcgaattggtcttgcaatattctatcacaatatctctttttttgaccgagtctttagcagtgtaatattttatttctatatgtttgaaaccactgctaatctcattattttttttttaaaaaaaaagtactattattatcattgtcatgactcgagccttaagttgtgacagatatataatattcataacttgagtggctaaagatcacactttgacacttgaaggaagataatgcttctaaatgatcatttaatactgtcacgacctgagccctaggtcgtgacatatatgtaatatctataacttgagtggtctaagatcacactttgacccttgtaggaagataatacttttaaatgatcatttaatttatattacaaaatacttattcaaaaataatagaataactcctatatctataaagaaaatattaaaaataaaatcaagaccactcaacaatataaaagaacaataatatccccacaattatgtagtcactgaatagatagatttaataagttaataaaataccaaaataatatttagcatccatcattcctcctttttaactagtacatatctaatttaagtcaggaccatccattcaacattaaatatgttaggctatttttagcctataattcggatcgattttatgttcgcttttcactgttttaggacggaattacgcttgttttctatgttttcaggttcttaggaataatagaggtctcgggatgcaaaagtccagtcaaagacgagctgagctaagaaaa

SEQ ID NO: 345390 - DNA, 974 bp, Cannabis indica
aatccttgtggagcgatagatttatcactttattacttgttgacaattgtgtgcacttgcgtgtacaattttcacaacatatgccaagatggtaccttttcctcatcacaaccccttggtaattgaaactcccatcgccaacaagattgtcgaccagatcttggtagacaatgggagttcagtgaacctcctgtttaaagatgcttttattgccatcagactcactgatcacgacctctccccgagtggttcataactcatgggattcaacgagactactctagtacccatgggaaatgtaatatcctaataagcccaatggtaaataattagggtttatatttatattatggattaatcaggtagtaagtaggattatgatcctactaatttatttaagcataaaatttaaattttgctataagtgagtaaataagcgtaatttataaattacagagatttatataatatgtgtgaatgcaatatgagctatatatggaataaaaatattttcaggttcgacgaccctgaaaacctgataagtggataaataagcgtaatttgttaattacggagatttatttgaaatacgtcgatataatatgagttatttgtgaaataaaaatattttcaagttcgacgaccctggaaatccgattggaggccaaaaatgtcacaatggttttagttaaaaatattgatgagattattgagataagttaattttagaagtactgggatatttaagggtactcgaagttggccaaataccttaaaagtaaaagtttcttagtggttaaaaaataatgagataactattaataataaagtttttattaatattattattaatattatattattatattattataatattatttttatatctataacaaggatgaatatgacttgttcttttgtgatttttttttaatttaaagtttgttttttatattttaatatttttttat

SEQ ID NO: 345391 - DNA, 791 bp, Cannabis indica
agatccaggttcagatattgataattctctgctacagaaaggaatcaagggctagattggtaaaataattatccaacagaatgttcagggtatgaataaaagggataagcaaggtgatatccttactcttatgaagctaaataaagcaggggtaggtgctcttgttgagaataaattgaagaataataaagtggatgatatgatggtaaagatgtttcatgggtgggattaccatcgcggtgatcaatgtgaaagaagaattttagttgtttggctcaagtcgtttgttcaggtgaaagtgatgaaggatcacaaccaactagttcactgtcaagttaagtttgttggttctcaacttgaagtgtttattacttttgtgtatggtctcaacaccatagacgagagagttgatttatcgaaggagctctctacaatcaattgttagggggttccttggctgataattagagatttcaacgcagttttttgttatggtgatagaactggctgtagagtagttactcctagtgatttagtggatgctacggcttggattgctcagtccaagttagaagctcttaaatgttctggatcgaagttcacttggtcaaataaggaagatgggaaggatagagtttattcgaagattgaccatgctttcactaatgaggattggatagattttatgcccaactctttggctgattttcattgggaaacttactctaatcactgttattgtgtggttaaaacccaacaacaggggaatttagggatcaagccatttcgat

SEQ ID NO: 345392 - DNA, 837 bp, Cannabis indica
gtaggtaaaggaaaggcgaaggctgaacaggagtgagctccaggcttgggtggtgattgtgcatgtcgtggtgacgcgacctagtgtgttcaatctcgggacatctggaattttattttatagtcgttgtgcaaccagattataaatatattttgataatattgtaaaagtttaaatacgcgatctcggcttttgtaaataaaggtatgagaatttataaagtttagcaattaaattaaaagttttaatttgtcaaaattttcaagaaaaatcctttgattagcaaaggtggtacggtaattggaaaattactgtagcgcgcctaagtatcagggcgttacaagaagaataatactaatgccacttaagttgaaacatgttagtgttatgtatgtaattcctaaagccatattattattataatttttgatggtgatgaacgtattatatatgaatactagtgaaatatgacgtgcttcgcatgtattagtatatggattatatattatgttaaattatatgtatatttaggtggcgtgcatgtattagtatatggattatatattgtgttaaattatatatatatttaggtggcatttaattataggtaatgaaatttaaagaaaacaaaataattttcattgtattctttttttgagttgcatcttaaagaattgaaatgtcaattctattctcattcctattcatactaaatactatcataatatttagtgattttatgagaagagtttttacaaaagttaagacctaaataaataatttttggtatgtattttaaaaagtataatgtatgtattatatttttatggagaataa

SEQ ID NO: 345393 - DNA, 804 bp, Cannabis indica
acacaggtgcaatccaacgctcacagttcccccccatcattcaaaggagacaacgaaaggcctttcctttttctgagcaaatttgtattgatcaagcaagattctagctaatgttacaatatttgaagcaagccaactcttcttctgccaaacaaaatcattccgcgcatgccaaatagcccaactcaccatcactgcttcctccatttcaacttcgtgtccctggtgaaaactcccaacaaccagctgttgaacgttgcagtcccagccccgacgtccactatgctgcgatgccaagcagcctttgcaaccgagcattccaccaacgcatgttgaatagtttcagtactagagttgcacaaagggcagtcagcattgacaggaacatgacgcttttgaagttaaaaataagttagaagcacactcgaagcagctcgccataaaaaattactaatcttaggaggaatttttaatgactaaagccgcttccaaaaatcaatattggcatcccggcacctagcacccttagattcttacaagaacttatatgcacttttaaccggataattcccacaagtctcaagttgccaacgccaaccatcattagcggccgaatcactgagctgaatggacaaaataaggtcctgatcacgggcaacaaataggtccctcacaacatcctcatcctacgcgcgagtaccaacttgaaagaggcagcagaccgactgttcacaagagcagggtgccgtgagacaacatagttgtttgaattatgtggaagccaaggatcattaagaattgaca

SEQ ID NO: 345394 - DNA, 1236 bp, Cannabis indica
gatcattgttttgggcagcagcagcacatgtacaaggtatgcaagacctcaaccggttaatctcatcccacatagcagtgagcttagtgaaatcggtgttggatttattttaccaggacctagatttactaacaagtatgttttaacgtcctaaatatgagaaaccttacattggttccagcggaattaaatgactcctttcgctcagatctctaacccttgtatcctttctgtagcaaagtatcaccaagatctgagcccgacactccttcagttgtttggattcttcacaggcttacacactatgattgaggactaacttgctttgggtcggcatgcactcaatcactaaagcttgaatttgttttgtgaagaagactatagaatttgaattagaagagagaaaagaagaagaagaagtctaaaactctatagttctttgacaagaagaaaactagctcaagagtgatttgttggattatgagaccattcttttcttattatagtaattcacttagggttaggattgaattatttggaataaaaaatgataaaataatagcaaaaatcggtggtagtggccaactctatgtgggtccatcactagttaaatttttgccatttttcttgttatacccaaaattcggtgagcacatcaaaggaagacacgtgtcgagttgggaagaacaaagaactaatacacgcaatcgtaagtatacttggcgtagaataactcgttagaaacacaatttgtagagtatgtttataactcggttggctgaacagtcttctgcgagacagaaacgtacgaactactagcttatgtatcgacgagaaaccatgtgagtgcaagtgtgcatgacgagtcttcaacctcatcgcatggaagaggaacgataacgataaaaacacttagcgtatattacatggtatacaaactaagtataaacagtttggtgaatcaagatgacagacagcgaggcgtctatttcgctagaagatggcatgcatgcgagaaagatcatctcaacaacagaaaatgtagttatcagaattaaagcaatattaatctcggaagtcatgtgacgagccacagctcgccattaaagttaactcgggtccattcctagcgaggcatccccatgagataaggcttaccatatatctttaaatatgcgttcatctcgggccaataaaagatggatactcacaattgtgtggattctaaataaaaac

SEQ ID NO: 345395 - DNA, 609 bp, Cannabis indica
ggtttggaaccctaatgcctagcggagagttggttatctccaacaagtgcattaggtttatgctagttaggtttgaaaattggaagttgagtgttgacttggtatagctaaaattagtagtgtatgacatcatacttaggatggattttctgtccaagtatttggccagtatagaccgtaagtaagaaatggtgacttttcagccagaaggtgaagatctatttgtttatgttggaacggttcaggggtctcggatcccggttatttcagtattaagggctagggatctattacacagtggatgtgtaggatttttagcagtggtgttagactccagcagacccgaaacatttgggcctgaggtagtcagagtggttaaagattttctcgatgtatttcccgaggagtagccgggattgccgccacaacgagaaattgactttttgattgatttggcacctggagccgaacctatttttaaagctttgtataggacggctccagcacaatttaaggagcttaagctacagcttcaggggatgcttgatattgggtttactcgacccagtgtatcgccctggggagctccggttctatttgtgaaaaaga

SEQ ID NO: 345396 - DNA, 898 bp, Cannabis indica
tacagaaaccagatcagatacaacagagagaacaaatacacagattcaaattcttctccaggaaaaacacagaacaagaacagggtgagtttgtggaagaggcttacaatggagtaagctttggaacccatggtgtggttcggagatccagaactcaggagtgattgttcatgcacagggaaaaagaacacaacatcagtactaatttagagagaaaacagagaagaaaaatagaggagtaaacactgtatatacacaaatatatattcggattacctctcaaatgttgtgagttggaatccaagctttgtaatctcttgatcattgaagatctatagtggaagaggcgagctcaagaggatgtacccagatttcattggggaacctctataaaaccggtgtcttcttctccttttatttttctgcacttttctatattttgtgtttataaattctgggttaaaatcagtttggggaagctatttttctgggtattaactgtggtgttcttcgtgttcttcagtgaagaacaacgaagaaggtgctcgggtttaagggattaatttctggggttgattttctgggtttattatttttgttggtgtttctgtgttcttcagagaagaacaaaggagactcacgtctctgctagggttttctaaaggaggctgtgtttttgaatgattatatgataaaagatgaatatatatgactaggttaagtttagggcttctggtgtaaaaacgacttgtagtaattgggaataggtggctgtcgttgggatttaattgctgaagtcaacaaagactgtttgactggttttaaaggtcagatttgaccattatttttgattaatattgtgctgtgtgtagggacagttagggaataaagtcctaca

SEQ ID NO: 345397 - DNA, 554 bp, Cannabis indica
gtgcttggaagtacggtcgtagcttacaaaacgcatggtctaggcacaaagtgagttttttcttaaaggggggatatcaagattctgcccctagaaacttttgacttacgtagtaaataggttgttggtgcttaccctcttctcgcactatagctgtactaattgcatctttcaggatagccaaatagagaagtagcgtctctctagttattagttttgccaaaactggaggcgtcgctagatgccattttatgttctaaaaggcctcttcacactcttttgtccactcaaacttcttgttgtcccacaatactgttgggttttgtgccctaaataaaatccatttcaatataatcagatttacttattaataaagatcaaaaatacattttctgttgcatggttcacatgatttatttcatgattatatatataatgtatgaattctatttaagtccagaacatatgaatttgttaattgttgaccgaggttttcggcaactaataaatatgattataatgatgagctatagaaagcgagatgaagacttttt

SEQ ID NO: 345398 - DNA, 657 bp, Cannabis indica
cttgatttttttataataaattagaggttattcttgaatagagtattcttaaatacaggttctactgtatatgtttctatctagaccctaatgatctagaatttaggccttatatgtgccatgtttaagacaataacagagtctgtactgacaaaattagagaaaaattacagttttacaaatattaggtacttatgccgctaaaaataaacagtgggtttatgccgccccttacaaacttaaaactttaattgtacttatgccgctatttactttattttaaattatataagatccgatacttaattgcactaataataatatgacaccgaaccgaacgtgtgttaatccatattatcatgaaataattagtcagctaattataattattatgaaacttctaactcaaattaaaataaaaactcattaaaattaattccacattatcattgttgtatcatatgttaattatttttaggtagtttttgttcatattgaccgtttagattggatgtctcctttgagtgatttcaagttgttttatttaaatttttgagatagtttagcttaattataaaagttaggctaattagtaagtttttcccccgaactttgacatgtactaaatcgtgctcactgaacttttttggccgttaa

SEQ ID NO: 345399 - DNA, 1014 bp, Cannabis indica
aaaaaaaaaaaaaataaaatcaatcacggtagtttgacagcaaatacggtgatagctgctgcaatttgctccaatgtataagcaacggtcaaagtgcgtatcccctcaccaatgaccaatgaccattccctgctagacaccttttcttagccattggagctggctaaggaagcatgcgtagttgcgtacgtttcctatttctaaaagtcaaaaatagaaaattgtaatgaaataaaggctttactatcaactactcaactatctgtttccatcatttggactactgaaatctaaatttgaatagtttcttgctctggttttcaacagagtgtttgtcacaattaatattattcaacaaccatatgcattttaagtggatgacttgtcgtcggacaaggcaattatttacttgttagattgaggtactcaagcaccattaattggctgtagcggatgcggattcaagatttaacatttaagttgagtggagggtatttttattcctaagttaagagagcgatactttattatctactaggctaattaaaatttttatatcccgaattttgatatgtaataaatcatgtttttttgtatttttttgtcgttaaatttttttcctaaactattgagatttttactatttgagtgattatttatgtacaaaaccatgctctctaaactttgatatctaccaaatcatgctcctcgaactttgacatgtactaaattatgccccctaaattttcatccatgttagattttttttactaaaattggataaaagtccttaaattcaacaatctcaacagttcatggggcatttttaatgaccataaaagttcaggggacatgatttagtacatgtcaaagttcaggggtaaaaatcctaattagcctataatatattaaaaattattaacgcagattttccttaactaaatttgagcctcacaatattgatttcacacagaaaaaataaaagctgtagaaataaagatatgaacacagggt

SEQ ID NO: 345400 - DNA, 662 bp, Cannabis indica
tacacagatggagacatagctagtgattgtgattccaagaaatccatttcaggattcttggtgatatttgcagggggagctgtttcatggcaatcgaggttacaaaagtgtgttgctttgtctactacagaagttgaatacattgctataactgaagcttgtgaagaagctttttggatgaaaaagttcctacaagagttgtgcttgcaacaagaaatatacattgtctactgtgacagtcagagtgtcattcacctctccaagaattcaacattccattgaagatccaagcatattgatgttagatattattggaattgtgatgtgcttgagatgaaagatttgcacttagaaaagttacatactagtgagaatggttccgatatgtttggaaagactttgcctaaagagaagcttaaagtttgtaggcgaagagtgggcttagtagagccaaccaattgaggcggagggggagatttgttgattcagccccttaatttcttgggcttggaccaataagggctaaaaggccatttacaatttaaaggaaacaaaaagaaaaaatgaaaagaaaaaactgaataggtggtgtcgtgtgaaaccaagagccaagagagaagaataagaagagggaaagaagagaaagaaagctagagagagaa

SEQ ID NO: 345401 - DNA, 657 bp, Cannabis indica
attataactggttttgagttattctgtcttatttttttttattattgtcgacctcgcttctagccaacgacagtgagtctaattttgtaagcgacgagtagtttaatacgaatgaaatataataaagcaaataaagacacaagaattttatagaggttgagccccgagcagttcggtaatagcctaatcctcgttatttgtattgactgaagaacaagaaaaatagtttcttttcttagagctcttacaatagtatctctgaatatgaattcttagacaaaatctttcgaccatttgcccaatgaatatgagtcactatatatagggctataagcttggaggggaagtatttcctttctggttacaattgatataagcagaaagattgcatactaaatacaaaatacactaatcgtgggatttggacagcttgccatatctctataatccgatcctaaagttatagggatttccttgatgactcacgatggaaaagctgaatttgctaagtgttggcatgctgcgcggattgcttactgctcggtctagaagactttgtccgagcgaatgtacgaggtgccttgttcagcctgtgtcttgggagcaggtacccagagtcgattccacgtgtcaccatcgtgtgatgccacgtctgag

SEQ ID NO: 345402 - DNA, 308 bp, Cannabis indica
aatgcctggattgagctcattaaacatgggggctgcatactctcgtatatcccttgctcgatcatctaccaatatgatggaattaacaatttgttgagcaatcccatcatcatcaagattctcagccatgatgtctcggcccttagcctttttaaccctccttcttctttggaatgtgcgttcaatctcggggtgaataggagcaagttcaaagtcctcttgttggttcatacactatagatacctaagatttcaaagaacaaccagcaagattaaaagcacaaaaaattattagaatgtcaattagt

SEQ ID NO: 345403 - DNA, 456 bp, Cannabis indica
gacctcacttgcgtgagatactacttgattgcgtacacttgcgtaataaacataaaattcgtaacaatagtatcaacaaagtgttcatataccttaggaagtgaactgagtagaattattgcttgatcttcttcttcaattcttaccacaatattattcaggtccagaattaacttattgaaattttctagatgcctttgaagctctttaatttcatccatcttcatcgtgtaaaatcttttcttcaactagagcttattggccaatgattttttcatgtaaatcaatccaatattgttccataatcccagggtagattcttcatcgaaaacttctctatggacttcatctcccaaactcaaaagaatagcactatgtgaaattatgaagcacataggaggtaggaatgacaagtgaaaatactaccatccattgaatagagttatgagctcatct

SEQ ID NO: 345404 - DNA, 608 bp, Cannabis indica
atacaacggtaagattataatatctttaccaatatcaatatcgtcttagtccaatgtatactccatacattcgaaactagtaaactttgcaatattctggaaataacataacacttattcaaagtgtaagtacacttcatcgctaattatcacataagtgtaaatccaatgcactgatgaaacaggaactatatctttttatatattaaaccacaaacatgaaaactacatgtaaacataaataacttctaatctttctttgatatcaaatgagattagattgaaatgggttttatttagggaataaatcccaacaaactcccacttgcactaacataaaacaagtagtgtttttcaatctatctattgtcttgatcttgagatcaagtgtagtatatttgactaaacccaaatttttgaaactgtaagtctgtggcaagctacagcttttcccaccattacttcctttatgttcataagacttatgcaacattattttctatatgcattactcatcaagggatactgaattccttattgcttataaagtgcatctgaataaaaagaagacatatctctcattcttttcaagaatgaaatagagataa

SEQ ID NO: 345405 - DNA, 1683 bp, Cannabis indica
attgcgtatacttgcgtagcgttcataaaatacagcaacacctttgcttcacttcaaccaggtcctctagatggaatgggagttggcaagaagaagagaattgtgcatggaattctgaggagaaagccttccacgagttaaaccttcccgatcttaacttgaaataccattgttgggcggcttctgagagtgtggcaggaaaaactctgcaacacacatctcctcgtactccttgtaagttcatttgcatgtcaaaatatttgagatgtgataaggaatcttctttcccggtatacatcttccaggttggcatcttgaatttgtggggtagcttcagaacattgatctctggagtaaaaggggatccacgcacgtcctcgatccaactcgagatcattgtgcttttgaacagccagaccttgaaacatgtttttcagctcatccaattgtgcctgcacggatgcatgaacttgttcagcctcttggccgacaactgctatgtcatgatctctttgagctagatcttgagcgtgggtcccggactgagtggctgctggaacatattgttcatcaaaccctctccttctgttcagatcatctcttagatcatgagctgttccctgtctattaaatacagatgcaccaggttgtctcagtgactggttggtttggtcgagcacttggccagaaccactagtctaggcggagttattggggataacccatcctgacaaattactagacaaggtctggcagcctaccgcttggcccacaggcaaaacctgtgactggggattggacggctgaccgttcagagtttaggaagcgttcccagctggatcttcgtctgatccgcccaacgggatgctggacgtgggtttctgattagtaacttagtaggctcttcgtatcagtacagtggcctatcttgttcggtcgtcgatggtagcttgttgagctctcaacgtttcgatctctttatccctcaattcggtgaactgatccctttgctcttcaaacgcaaggttcactccagcacggagctctttttgatcatgatgcagtgtgttagtatggccttgcatgagcccaagagcgttacggagattctggatctcagtgtcatctacaatagttttccaaacattttttgctgaaggaaccctagtactgggagtacttagatcagctgacgaactggtatttccagtctcttgcacaccaggtgcggttccagtcaaaggagacgtcactccatgactcacggttggtggttgcgtgattggttgttaaggatttgtggctggtgggacccttgcataccctaaagtctgcagtgcgggatccattgtcggtggatctacctgatcgaccacgcctctacgagtttgtaccaccatcgtgtttatgattaaatttgaagtaaagagcaaatttatgatccttgctctcaatgaaagcaccaaaatgttgttaaaaatttagggttgttaaaaacaaccttaaatatcttttcaaaattcaaaattaaactaattttaaagtatctacttttatttaaattattttatcaaattaaattaaatatctaataagataaatgatttgaaaataaccaaatagatattttcaatatcactttccaattttataatttaatataattaaaataataacataaac

SEQ ID NO: 345406 - DNA, 646 bp, Cannabis indica
aaatacccaacttaaaataattttttatttaattaaatatcatgaaaataacaatatctaagtatcattatgaaaatcaacttagatatttaattttcaatttaattaaatgtattaaattcaggaaataaataattaagtatagagaaggcttaatcattaatttccaatttaatacaaggaaaaatatccttaattgaattgtaccaaaattaattattaaataattaatttcacaatcaatgatattttcctatattagaaataataattagtatagaaattaactatctagaaaatatctcaattcaactaagtatcttttcaagatttggaaaatatctaatttaagttattttagaaagaatctataatttacaacttaaaattttccaaataaaatttaattaaatatcaaaattaagtagtaactacctaatttaaggatattccattttaagcttaaaaccaacttaaaaaaaatatcttaagaatcttcaataaccaattcctagaattcctcaacttaatattatattcaaaagatattcaaatttaagttaataaggaaaattagtaataactaattcataacttaaataggaatatttaatgaaataataaaagtaagtttcagaaagaatct

SEQ ID NO: 345407 - DNA, 596 bp, Cannabis indica
ggcctaaacctcccagtttatcatctattcctttggctaggcctttctttttaccctgagtcttgattgctttttcactaggtgacttggattttgatatcatgacttccaagcctcgtaaatcaaatactccccaagaccctaatgttacctttgaggctaaacttattgagccgagggtacgacccatcggcgattatgtaggtggcatcctaaggacttgtggcattgactaaaagcgaaaatgtcgggttagatcagtagcccctggcgagtttagttgttacccaccaaaacaactcactcggaaaaaatctgaggagactagtggcgaggtgagttcgagagggataggcacttggagcctcgaacacattagggctggagcaattatcctcctgtgaaattactataaggatttccttaactgtcttggaattgttcaatcccagttggttcctatttcctacagaatccttgcatgttaaaaggttttgtacaaaatgttaggatgggagtgccccactcccctagaaatagtgtatctctactccgtcaaggccgttcctgcgaggaagatgttaggttttatgccc

SEQ ID NO: 345408 - DNA, 530 bp, Cannabis indica
cttttaatttaaaatatgttaaatatcaaaatatctaatcttataattaaacaatatataaatattaaagaagttaacaaatttttaaatctaaccatagtagtaaatatttaaaattggaaatattccaaatttgaaatatttaaatttagaaaaattgaattttggaaaacaatcccataaaaattggatttttggggaaaaatcccacaaaatcgatttttgggttggctccccaggaagggctgcatgtgcagccccaggaggctgcacgcagcctgtgcgcgcgcagaataagggaaggggcgccaagaaaactcggcgcttgcagggtctctggcgggcgatgtgggcggacagcaggggtgacacgggcgtgtcacgcgcgcggatggggcttccagaccgaatggctggtgctcacgagcacccactcgacagccttgaatcccgatgttccaaaattcataacttcaacaatttttatcggaatcgtgtttcgtaaaaaacaaaattgcttaatttttcac

SEQ ID NO: 345409 - DNA, 778 bp, Cannabis indica
ggagcttactgaatggtagtcagtcgctttgttgcaagatccttgaggccaaatacctaaggggaaaagaccttctccattgcaagtataaagagtcggactcttggttctggaagaacgttgttaaagctaatgtaatcctccggaaaggggcctgtaagagggtggctgatggaagaggcactagcatctggagggacccttggatccctcacttaaaaggtttcgtcccgagaccaaacagaagtgttgctatggataatatgtgtgtggctgacctccttacccccatgggtgggtgggacactcttaagctatctagtttgttcgatcaggaaactgtgtcagctatcctgaaaatgggcccacctcggggttcgggaaatgacggttggatgtggactttggaaagtaatgggaatttctccaccaaatcagcctacgtggccctggccatggagagaactcctcagagtagtgtcgcccctgctctttggaataagctttggaatagtaacataatggagcgacataaggttctttggtggtgtattctttcccaagctctcccggttcgtgcagtgattagaagaagatttcagattgaagacacaagatgtccgttgtgtggtttgggcgatgaaactatggaacatctgtttcttacctgtgatgtagcgatgcatttatggcggtcctccccctgggggattttccctgtgggtgacactggtattagagtctgggattgggtgaagtttatttggagccttaataa

SEQ ID NO: 345410 - DNA, 729 bp, Cannabis indica
aagtttatttggagccttaataatagggggctccgcgtagaggaagtgttcctttatgcctcgatagttgtggacaatatatggagaatgcgcaatgacgtggtacataacaactgttcccctaatattcataattgtattgaccttatttgctcttcttatgcagaggcacattcttctctcttgcctggtccttcgcctcccgggaaggacatctggacgcctccacctctggattggataaagttaaattgtgatgttcgtgtgggcttggagagtatgtgcacagctgttgttgcgaggaatcacctggggagggtgatcgctattcacacatcccgattggacttctcggaagctctggtcggagaagcggcggcctgttgtctggcggtatcagtagctctagatttgaagcttaattatgttattgtggagagtgactcgaggctagtaatcaacgctctcaatgggaaggcgtcccactgggctctagagaactatgtctccttttgttctaagtcttctccttctttcatgtgttgtaccttttctaatattagtagaaactgtaattttgcggctcacaatgtcgctaagtgggcttttacccaccaggtttatggatcgatcccgatcaattctgttccggaaaacattttatgtaacgaccatgaggtctagattttatctattttaatataacctacgcttgtttctcaaaaaaaa

SEQ ID NO: 345411 - DNA, 487 bp, Cannabis indica
ttaaacggactagctagtgtgacgtctcgagaaatcggggcgttacacaagtgattatcgaatttggaggaagaagatcagggctctatgtgctcagaataaattactaagggttttaagtgaccctgtggaatggccagctgacagaaccaaggctcaataggaagaattgcttgaaacaacaactggattgataattttcaacctatatgattctataatcagatttgttgataaagaagacacacctgctaaaatttggacaaagttagaagaacaattttataagaaatcattgatcaacaagatttacttgaaggaaaggatctttggatttaaaatgagtcaatctaaatctctggaacagaactcgaatgagttcttgagattgcatattgagttagcaaactcagggaagaatgaggccttaagtgatgagaatcaagcaattataattctcaattcactgctagaatcctacagggaa

SEQ ID NO: 345412 - DNA, 533 bp, Cannabis indica
tctttgaaaaaccaaagcttttgaaccaaacattctcaaactaaaacaagggtaactagcatgcatttcaacctatcaaatccaaccaattcaagcattttaaacacaaaaacaacaacaacaactaacagcagcaacaacatcaaaaactagcatgcaacctatccacttttctttaaaaacttcaagaacaaaagcaagagacttaccaagagttgagaccacaagaacttgataaatccagcaagaaaacacacaaagaaatcccccaatctgctcaaaaccgaaaaagagaagaagcagagaaaaagagattttcgcttttcttttctaatttttctaacttttgaaataagagacaaaatgaaaattaaactcttttattcagccaacacttatcatttaaaatcatataatttcatcacaaaatgtccactagaggacaaaataacaatggggcaaaattaccattttgccccttcacactaaaataacataaagaacactaaaggggtattttgggacattctaaa

SEQ ID NO: 345413 - DNA, 593 bp, Cannabis indica
attactcattgtttgattttggctagtggtgttaatcccataacttattatagccaacagatttttgttctgctggctgtgccaaagtcatacagttcgtgctattactgtgctagtgttagtgtatcgtagcatcttcactggttgagttgaggcaactttttataaggggtgttcatcaaaacgcctacacatcaacatgtcaattaggggtgtttgcaaaatatccaattcaattcgcacaatccaatttaattcgtaaagtgtggatattcacacttgtacggattgaattgaattggaaaatcttgtgttaattgatatctaaaagtaattgatgtaatccaatctatacatatttatatatatatttttaaaaaattatatatatatatacaattaatattttaatataaaaatataatatatcaaatatatattctattcttatttacaagaaaaatataatttatgtggtaaataatccactcaaatctaaaccagtttttacctctactattattttgaaagttagttactttcagttataacctcttcatcttgtatctagttagttgttagttattgtgtta

SEQ ID NO: 345414 - DNA, 773 bp, Cannabis indica
acgagaggttggagaaagaagttgtgaagattgctaaagttccataaccaagggagtgccaagtagtaagcttgagcattggctaaagcttattagagtcagttgagctcggaagggctaaggggacagtagcatttaaacaatgattatccagcaacttcaacttgaaaccaaggtggagatttgttggctatggttacaagttttttcgtctgggattggaagctgtgaatccagagagcagataccagaaggttagtgtggattcaaaagccttgtgtagaaggtcttgtagaatttgaaaggatctttcaggatagcttgtaccgtgtatggaatgtctctcccggatagtttatctctaatctggaggtgcactcccgaacaactttgtcagtcttgaaggttcatccaggaatgaagtcatgtacgtatctagaaagcttgtgtgttacaatgcttctggattgtccgtactgaaagcgtgtatttcaagatgatgtagattattgttgctggtgatgagctggatcatttatggcggtgtaaatgtgccacgatgatttaagagacatatttgacaacaatgcaaatctatatatagttgtagatctttgtaacctggtgtgaaaatttaggaaattacactctatatcctttttatgttgtccttttttattcttaccctctgttttaaggtctatcatttttacctctttttttaaacattgtacaaattttacccctgtcacttcaagatactctccatgtga

SEQ ID NO: 345415 - DNA, 518 bp, Cannabis indica
attttaaaacttaaataaccaattaaaccgggctaattaattactttagaattagacctttcttggtagacactacttgctttcagggatttttgaacttaaatatttaattaacctgaattagttattacatttaagtagcttaaatattttagttttgttaacttgagtttttagtaaggcccgagcttttattttaagttaacctggattaattgttaatatgttaaaattgattccaagtataataaggtagtggcttacttctggttctgtgaggttctagttttgggcgatactccattctcttgtacataattaaacactagattaattttaaatataataaggtagtggcttacttccaatttcctgaggttctagtttcaggcaataccccgtactcttatacttgaggatttaaattagttatttcttgtgaaagaggctgtaacaccctaactaacataggcgtattacgtgctttttaaacatgttgtgcagctcgttgctaatca

SEQ ID NO: 345416 - DNA, 884 bp, Cannabis indica
tagagcataaaacccaacagttcaagacatcagcaacgccatggtcgcggtaagtacttgattcatttctttcctcaatattttgtctaaggcatttgatctcactcttttctcctttttcagattactgcggagaccagccgcctctccaggatcatcgttaatcatggcttcgtcccgtccgaattcgggggcatagacgaggtagtgaggatcctgcaggacctgtccgttgagaggcgggcaatccaagaggaggccgagcgaagggaggcccttgttaaggcgaggctcgatgaggaggccaaacagagggaagcccaggcggaggcgatgctctgagaggaggtcctgcggagggataagctggaggcgaggcaccgggaggcgttgagggcagagggcgaggccactgccagggccaagtgtgagcttcaggagcctagggaggccatggatgaaatggctgccaaggtgaggtccccagaggacttgtaccaggcggacttgcagtccagggctaacttggccgtggagatgaaggagctaaaagacttcagagatcaagccttaaagaaggctaaaagagatgacctcctgtcccctgtctcctgcaagggttgtgtcaagcgcttcgatgatggcatctatatggcctggtcgacaaatggccagagtatcaagcttgacttctaccccaaacatgaggaggttattgctaaatttcaggagaagaagaagaaacttgatgccatgcttgaggcgcgtactggtcctctcgttcctccctgcattgacttggctgattgagtccagcccactttaccaagctttttctcactttttttttacagctatttttcttttatctaagacaatcttta

SEQ ID NO: 345417 - DNA, 548 bp, Cannabis indica
aagatggtgaattagatttagggtttcaccatatcctttttatacccctatttattttttatctttttttatttcctttaataaataattaattaagagagataaaggaggcttttttttttttgagataaaggaggctttattttttgtatcagccgcctctttcaattttttgttttttttttaatttttttattgagtctttggtgacacgcatcatatgactctgaacacttttagagttagccagtgcgtgtcactatatattttatattttttaaataaataaataaataaataagtttttagtgacacttcaaatgtatagtgacccgcattatgaaacatatatgtgaaatttttactgtcaagcaatgtgtgtcactaaaatttgatttaaacatttagtgacccgcactttttgtgcgtgtcactaaattgtgtcactaaatgtataaattgtagtagtgcacaaatggtcaaggtaccacagcaaaaataatatgtatataactacgacttctaacattgctgaatctctaaactca

SEQ ID NO: 345418 - DNA, 532 bp, Cannabis indica
aatatcaccgtatattatctatggtcatatattttctataactctttcggagcatgtgtggacttctaaattatgaatgaggagttcgcagaacatcattatttatccaacttattaatcattaatgcatgtgtatatacaatattatttatacaaaagtttaaaatgttatgtagatatgaacataacacattaatgataatataaattttatttttgataacgatggtattccaagaccatatatttgttccattcttgtgtatgatcttaattttcatatcagatgattatatctataattcttgatgcatatgaagtacttcaggatgtctctactaatgaacaaactacatacatttaatatttcttaatatatatagaaataaaagtttgttctttaatcatttataatataatcaaaaactctttaaacgtctatcacaacgtataatttacgaatttatattgcgtagacaaccatacgtgtttttcaaataataatttacttacatgtctttattttatacaa

SEQ ID NO: 345419 - DNA, 1007 bp, Cannabis indica
gcaaatagatctaagatcctggataaataataccaacatcatccagtttgggcaagtatcaattgtttcgatctcttctgtgccggtgatgctaggttcttcgaggaaatggataggaactaaatttgctctatcagtcacattactacttgcaagctgggctaacgcattagtagtcgtgttttcttcccttggaatttgtttgagagtgtagcttttgaaccatgcgagcagtgtattttgctgagatatgctatctcattttttctccccgagctatgtattctccagatacgtgatttaccatcagttgtgaatcgctgcagatttcaatatgctcagccttcatctctcgggctagttttagactagcgattaaagctttatattcggccttattattggatgctttacatccaaacttgactgcagtgtgcaagtgttgccccccaggtgtgacaagggcgattcctgcaccggatagttgatgtgtgccgacccattcatatgtagtttccaagtcggcttgtcttcactgttactttgctgaggtatttgtactggctcggggttgtttttgaaatgccttcttcctttcctgtgcattctaccacaaagtttgctaaggcctggcctttgattactgttcggggttggaaagttatttcatactgacccagttctactgcccacttgagtaaccatctagaggcacctgacttttgcaatatttagcgtaacggttggtcagtgtacacctgaagaggatgagcttgaaaatagggcgttgactttcttgttgctagaatcacacagtaagtgaatttctctatcaatgggtatcgaccttcgacctcaatgagtcttttactaatgtaatagatcgagtgttgtctgttgttttcctctctgatcagcacggcacgtacaacatgctctgtgacagccaagtatatcccaagttcttctccgtctagaggttttgagagtatgggaggctttgcgag

SEQ ID NO: 345420 - DNA, 583 bp, Cannabis indica
gtaaaacaagttagttttccacctatagagatgaggttttcattatttattatttattattattatttcgtaataacagagaacttcactcagctatagccaataaaataaaaacaattaatttatgcctattattccgaatattttatttgaccaaattaatcactcccatgaccaagggagagcttcaaaaagaaattatataataataagagcattcttattattggacaaggtgttgtccaccatttttttataagtggtatttcacgattagttatcgatattttttaaaaattattttcttaagttatatggagccaaccaaatacttaattacatcactggttgacaccaaagagagtgttgggcactaataatacttttaaggcccgtttggtacgcaagattggactggattggattgaaaagaattgaactggactggacaagattggattatgctgaaagtaattaagaatggactggactattttatttatttctttttagaaaaaaaaaaccttaattaaataaaaatatataataataaattaaaattaaaatatataataataaataa

SEQ ID NO: 345421 - DNA, 748 bp, Cannabis indica
tacatgtcaaagttcatgggaaaattactaattagacctttacaaaaaataaaaaataaaaataaaataaaaaaaacacaaaaataaattaaaaaaattacaaaaatatagtttgtatagatttttcaatatttttcagattttatttaataaaatacggtattttaatatatttttatattttaatcttgttgttttgttgttaattattttagtatttgtatattatttttgatgttgttttgatatttttttttgttattattttcttttatttttatataataccgtaaaaatatatatagaaatataaaattttacaaaaattagtattttaaataattattcctttattaatttttctttgtattgcatagcaattttttcaaatatcactttaaatacaaactaatttacaaaataccttaataaatatcagttacaataatacttatcacgtcatcaaaaaatacgtaaagttctaaacctatatagactaaggttgcaagtttatcattgtgaatagcgactttaaagtaaagcaatgattaatattctaatgacatgtttacttaaaggaaataagaattaatggaatagtatttattcccttataattgtttactaaattttaaaaaagaagaaaataatgggcccacacaaattagggagaaaacaaagagaaaaattctccccctttttcataggaaatacatttccctttcctaacttagtttattttaatttt

SEQ ID NO: 345422 - DNA, 585 bp, Cannabis indica
ttttcacaagattggaccggcctagcaaagatatcagcccaagagaactttctctctccaatcaaaggtcaattccttttcattttattataaatttcggcccagtaagtctccacttcttagcatttttgctcttcatagcttctccacaactttctggtttgttcttctgtccttgcaaagcacttaacagtgcataggcaatgtcttcattccaaatgttgaagctatacttaggattctgtctaggtgctcttttaactttgtctctagtcaactggtagtcttccaactcctctgcttgactttcccttaggtttccttgttccacatgaacgatgttctctccctgttccacctgaacagtattttctccatgttccacttgaatagtgttttctccctgttccacctgaacagtgtcttctccctgttccacctgaacagtgttttctccctgttccacctgaacagtgtcttctccctgttccacctgaacagtgttctctccttgttcatcacttggagtagtaggtcttagatcaacgttgattgagttacctgcatggttagtactagggcaag

SEQ ID NO: 345423 - DNA, 766 bp, Cannabis indica
aaattgaggtgacttaagttgaattatgtgaagcttgttgattttggtggtgtttgagcaaggtttgagtttaagaactcaaactttgatctttaatggtgatttgggcttctgtgataattgttgaggtttattgcttgttttgagtttattgtggtatatacaggtgttttggaagtttttgagaagtttgggcttgaattgaggtgttgggagtgtttttggtgtttcctacactgaaccggtcgactagtttagaaggatctgtaggaaccaaaattcagttggtccccacgaaaccccacagaaccggtcttctagttgaggaaccggtctgccgattggggcaattttgtgaaccctagttttttctacttttgtgatatttagggtatgccatgttatctatcgatagggaaatctctaattttgattttaagtccccgaaaagtgtgttagtgtgtctctcatcaaatttacgaatattgtgatatagggccctgtaaagcatcgagatgctattccactcaggtttacaggcataccttaactcggaaacaaggtaagaatagcataaagtatgtatgtgtgtgaatgaatgcatgttattattgtttacactactaacactggaatatttgtagaactaagtgtgttagtacaatgtatggtgtttaagggtaatttacagtgttaacaacacgagtacaagtgggtacgaaatgcatgtggtacaacacccagtagcacctgaaagtacaatttt

SEQ ID NO: 345424 - DNA, 612 bp, Cannabis indica
aaatcagattgataaaatttcttagagcaaacatagatgtttttgcctagtcacatgcggatgtggtcggaattgatccttttatcatttcgcacgttttcaatattgatcccaatttccgaccagctcaacaaaagcgaaggctattggacaaagaccgagcactacccctaaacgaagaaataggaaagctacgcaacaacaatttcataatagaagctttctacccagcttgggttgccgatcccgtattgggtcccaagccgaacaagaaatggcgagtgtgtattgatttcacagacctcaacaaagcatgccccaaggactgttttccacttccaagaatcgatcagctcgtggatgcaacaacaaggaatgaaatactaagcttcatggatgcttattcgggatataatcaaattaaaatgcaagaacatacaagttttcggatagatattggactatattgttacaaagtaatgccgtttggtctaaaaaatgctggagcaacataccaaagattggtaaacaaaatgtttaaagaccagattgggcgaaatatggaagtatacgtggatgatgttgggttttatgccctaaataaaactcttt

SEQ ID NO: 345425 - DNA, 935 bp, Cannabis indica
tggtacagatacaactgaggtggaatccctggaaaccagtcaagatgatcaaacagatttgaccaactatcaattggctagagacaggacaaggagagaaattagacctcccagtaggtatgctgaagctgatttgatagcctatgccctggctgtgatacaatctgatagtgaacccgaaccaactacctatgaagaagcaattgtatgcaaatcaaagaagaaatggcttgctgcaatgggagaagagatgcattccttgatgaagaatagaacttggattctggtgccaagaaataaagacaagaaagttgtctctagtagatggttgttcaaagaaaaagagggaatgtcagagggtgaaccacctagatataaagctagattggtagctaagggattcacacaggttgagggagttgattacacatatatcttctcacttgttgtgaagtacaaaaccattagaatgatgttagcccttcctacacacaatgacttggaagttgagcagttggatgtcaaaactgtcttcttaaatggttttctggatgaagagatatacatggaacaaccacctagttttcaggtggaaaatggcaaaactgatctggtttgtctgcttaaaaggttattgtacgggttgaaacagtcacctagataatggaatcaaaggtttaaccagtttgttcagagtattggtttttcaaggtcaaaatttgactgttgtctgtactacaaggaatagggacacctaaggttgtgcacctattactatatgttgatgatatgatgataatcaggaaagataaagctgaaatacatgtcattaagaacaaactcaactctgaattcgaaatgaaggacttgggagcagtcaataaaattttagggattgaagtcatgaggaacaagcaagaaggaaagatgatgct

SEQ ID NO: 345426 - DNA, 689 bp, Cannabis indica
aaacagaatcgagaattctctggcagagttagagaagggcaaagacaagcgcaaatcaccaataccgcgttcacgatctcgcagtccccaagggaagaactccaggggccgaagcccaaggagacgcagcccgcgaagacagcgaagtccgaagttggccaagtctcctcccaagaaggaatccttgccgaagaggaacggcgaacctcgtttcgtcaattatactgaactcgcagtaccccaagaccatatctatgcaatcgaagagacaaatggagtctttaagaagccacccccatcaagggaaatcgcgacagaagagaccccaaaaaattctgtaagtaccacaaagacattggtcatactaccttagaatgttgggtcttgcaggatgaaatcgaggagctgattcggagaggaaagttcgacaagtataagaagggcgaggaaagtcatccccgagtggatgacaaaggagaaaaccaaaatgcgagtggttccagaacgcctcgcaacatcttaactatcattggaggaccccatatcgcaggagactctcgcaagtcacaagagcggtatgccagagaagccaaagaaaagccgttcaccaatgtcaacaatcttagtgagcggcccgagaaactatttaagaaggaatgcgacgacatcacctttatggagagtgatgc

SEQ ID NO: 345427 - DNA, 797 bp, Cannabis indica
agagtgagtgatttttaattattcatggttgtaattattttatatccttatttgtaaattaatataatttttaaattattttattacatagaatttattttgatattgatgggaatccccaccgagacctacttatggtgactttatattcgaagatgggggagaggtatagtgagtgaaagacaatcagacacaagcattttaaacaacattacactaaaccagaagattgggagaaagtttttggattgtctcctaaccacttgaatacggagagttggaagccgatttgcaaattatttaccagcgaaatttttttgaattgctaagtaaaaacaaagcgaatcggcaacaaatgaaataaccaacaacgcaaggcacaaaatcgttggcttcgatacggcacggaatggtaactattaattctttaattgttacatatgatttttctttataataaattaatttaattgtttatgcatatagggggtcctcccagagagcatgcagttgatgcatggaaggaggttcatttgaaaaagccgtctgacacttttgttaatgaagctactgcaaaagattatgtaattaagtgaataaaatgatttattattaaaatttattaattatttattctaataatttttatttaaataggaggaactagtgaaggagcttgataggaaaagacttgaacgacaatcccagagcgatacatttggtactgaatctgatgctggttatcagtatgacattctggaaatagttctaggcgaaagatctgactatcaaagagg

SEQ ID NO: 345428 - DNA, 1684 bp, Cannabis indica
tgtcgcgacaaattatcttcgaaaactgacttgtagcttactccaacagtccactgatcctggttccaacttcttgaaccattcttcagcagaaccactcagcgtcagtggaaagcataaatattttgcgtcatttctgaccctcatgacagtcatcacttggttaaatagggacaaatgatcggtggggtccgaatctctggtgtaagttgacatttcgggcatcttaaacttcttggggatttctacatccaatatgtgtcgggcgcacggttcccggtcctcgcagacagagtccgagtcatcccttttttatctctgggagaccctagcaatgactttgcgtagtattgccaactcagctaggattccctcgttcaatgtgtctccagagattggtaatgcgtgtttcttcttttcaagatggtctcttaagtcaccatgcttttcattaattttttatcttaggtcagctagagggtaccttcggtttttcctccctctctccctgggctcttagtgcacggatacgctctttcagtcctctcgatcctgagggccaagactcgcttgagggagcttacacctctgtgactcttttcctttttggaaatttgagcggaccttttgcggatcctacgccttcttctttctccctgggatcgaagttggattttttgcaaggttttcctcagaagggtaccttatagggcttggttccctggtcttgggcttctgagtacttggtgaggattcatctggtgtttcctcgggtcgcgctaggatggccttggggtgtatatgtatccccgctgtttccatggctttttgcatggcgaccattacctcttgcatcgtcttattctactctttttgggtggcaagttcggcttcatcatcagccgccttttgcctcaggaccagcaattcaatatagctaccttcgtcgtatgtgtcgtacccttcgaagttttcttcatattcctcatcattcgcctcatctcgttcctcagagcccacatttacttgtgaggccactttcttcgccttctgggttttaagcatcctagggaggacggggctaacatgtattgtttcgaccctccaccattgttcctctgactctttaactattgtctttttaacgatgcttccttcagctctcaataaaagtaccaaaatattgaccaaggtttttggcaaccaatgaaatgatataatgaggagagctacggaataattaatgtaggtgatttttacgtggttcaggcattaatgagccgtagtgcacgagtctttattatttatgagagttcttatacagagaatattcttggtgaatctctctctctcttctttactccttttgattcctcaatcgatcgatcgaccctttcccatctatttttggggtatttatagagttttgtaaggatcactagaaagggatcacttgtctttaagtgtcagccccttagggacacaaattcctattacatatacaataagacatacatgacctatgttgtaggtatattagcgattaggtgaaagtaatctttatccttccttgattgatgtgattcttcataatggagccgtcactagactcgttgattatcatgtaatcaccgtaaaagaggcttacgccatctgtcaaatccttttatgggggttctgatac

SEQ ID NO: 345429 - DNA, 805 bp, Cannabis indica
gtttctttattgatgttgaataaaatggattacattgaaatgaagttttatttagggcataaaacccaacacaagcagcatacatttttatgaagccgctcaagagagaaacattcatcaaactacgaagtattattgaagtcacaaatcaagtttaaggggggggtgttgaaatattaaacttgatttaatattgttactttctagaattttcttgttgctactaaagtttctagactattcttaaagtgtctagtttccttgtttgtttatgtactcttgaattttctagaattatctttcactagtgttagtcgagggaactatgtagaacaatatagaagctaggcatttaataatgtttctaaattagtccatagagtcctatagatagagatgtaattctatcgtaccacaaatcacacaagttgagatataatatatagcttcttccattcaaatattctctccaaagttcttcttattttccaataggtaatatgaacttttgtgtttttcctttcttgctattaattataaaaaattcttcaattttttttcttttcttttcttatatgacagatccaacagaaattgcgtgaagtcctcattgaacacaaaatattaaagactacttaccaaagatcattgccagtaaatcttaactatgaacaaagattaatggaccgtgaaaaaataaagaaaagtggagagaaatgagtggaatgaaagaaaaaaagttgatcatgttagacatttatatgtataatataaaatatatgtatgtgtatatacaatgcggaat

SEQ ID NO: 345430 - DNA, 697 bp, Cannabis indica
taattaattaataaagtttaaatgactaaattatcccctaaaaataggaaagttgttgatattttctctatattttcgtgggttgtcaaggcccaatttgctgcttgacttactgtccacaaatgaaggttgcacaccaaaaacttgccaggcaaaagctggtcggccatgcacctaccagggtgcatgttggccggccacccaatacttggaagttggctagcctatgctagccatagggccaaccaagggtggctggttcatcatttcattgtccctcctaagtacttggactcctcgttggttgaagtgttgagtagatggcttgaccttcttgttagttagttgtactctcacgtggcattgatattggccacgtggacatgccttgtcaggtgggtaaaaatcgagataatatttatccccaagtccttgtgcaaacgtctatatggatagggactttctaacttagtttggactgatgtagccttgactgggcagatcttgcagtatattttgcctttaaaatattttctcttgcttgtctgatcacattcatgttggaatttattttaccacgatctagatttactaacatgtatgtttcattaataccctaaatatgaattttctaatacgatgaaattaaacacataagagtttcaaaaaccttacattgatgcagcagaataataat

SEQ ID NO: 345431 - DNA, 617 bp, Cannabis indica
acttggaagttggctagcctatgttagtcatagggccaaccaagggtggctggttcatcatttcattgtccctcctaagtacttgtacccctcgttggttgaagtgttgagtagatggcttgaccttcttgttggtgagttgtactctcacgtgacatttatattggccacgtggacatgccttatcaggtgggtaaaaatcgagataatatttatccccaagtccttgtgcagacgtctatacgaatagggactttctaacttagtttggactaatgtagccttgactgggcagatcttgctgtatatttagcctttaaaatattttctcttgcttgtctgatcacattcatgttggaatttattttaccacgatctagatttactaacatgtatgtttcattaataccctaaatatgaattttctaatacgatgaaattaaacacataagagtttagaaaaccttacattgatgcagcagaataataatgactccttccactcagatctctaacccttattcctttctgtcacagagtaataacaagatctgagtctggatctctttctctccttcgggttagttaccaccgtttttcacactatgattgagtac

SEQ ID NO: 345432 - DNA, 575 bp, Cannabis indica
aaatccaaaaatatgctaatgctactgtagctgaagaagaaaagttttaaagaaccagagtcatatgaagaggcataccaaaactctaagtggctacgagctatgaaagaagaaataagtgcgctagcaaagaatcagatttgggagttggtgccaaagccgaaggaagtgaaacccatttcgtgcaaatgggtctataaggtaaaaactcgttctgatggttcaattgagagatacaaggctcggttagttgctcgaggattctctcaaccgtatgggctagattatgacgagacatttagcccagtcactaagattacaacagtacgggttctattagcacttgcagctagtaaagactgaaggctatgacatatggatgtgaagaatgcctttgtacatggagaactggttgagagatatacatggtgcaaccaagataatttaaggatagagcacatcccaactatattcgcaaactgaaaaaggcactctatggattaaagcaagctccacaagcatggtatgaaaagattgctgagttttaagtagaaagcggatattccatggcacat

SEQ ID NO: 345433 - DNA, 628 bp, Cannabis indica
aggtattacccccattcctcgttccttgaggctgaattaggtgttattctcgctacgtgtggcgaagtgttctagaggaaaaatttgtgcttaagatgggtgcgagatggcgtgttggagctggtttttctattccggttcttaatcaaccatggcttccatgcaaggaaaattcgtatgtaatctttactcatgtggctctccatgactgtaaggtcaataatttattaaaagtgggctcccttgagtgggatgaggatgttcttcacaaattacttgttcaaagggatattgatttgatctgtcgtattccgttgtctccgtcttcagttgaggatgcttggttttggatgttggagacttatgaggattattctgttgtcaaaagtgcttatcgcgccttacaggtaagcaatggtaggtggaatactcaagataattcgagtttttggaggatgttttggaacttgaaattgccacctaaggtgaagaattttctttggcgaggtcttactaattgtctccctactcttgtgtctctgcggtctaaaagggtgcatgtgagcggattgtgtctgatgtgtaaccgagaggatgagaaaaaatttcatataatggttagttgcgc

SEQ ID NO: 345434 - DNA, 756 bp, Cannabis indica
ggacctgggccccaaacctgaacttagaccaagacctggaccaagtattcagaactagataggagacttggacccaaaactgggccttggaacagggattaagacccaaaactcgaccctagactcaagacacaggacccgactccggactcggaacccaggacctgactacggggacacaaccccaaacatggacccaaacccaaacttaggacccggtgctagacctagggccgaactggaacaagactaagatccaagattgagatccaaatctgaacctgaggcttcgacctaacccgtagtcaatgtttgaatccatgacccatacccggatccatacccagacctagacccagacccaaattgggattcagacccgatcccggacttgaaattggaatcgaaccaagcctaggactagaacccagacctgggacattaacaggacccaaacctaaacccaaactcagaccagaacccataccgagacttggacctagaccgggacctgtgacttaggacgtaaaccaagatcgagaccttgacccagaccgggtcccgaacctagacctagacccaaacccaaacattggggcctgacccaggacctaagaaccagacttagaccagggacctgaacctcagactcgcactaggactgggacccatacttggaccataacccaaactgggacttggactcaaatcgggactcgagacccgaacctgaaccggaacacgaacatggacccg

SEQ ID NO: 345435 - DNA, 497 bp, Cannabis indica
ttctgatcagtggtcgagccactactttccttactaaagtctgatgtaggaggagtaggagccccaccaacaacggagtcccacgagactctaaggtgcactccactgcgccctcagctcgcaatgccttacccaccatatcagcataggtggtattgtcgtcggtagtgatcattaaatcatttctgatcttcacattcaacccatccaggtatttctctttcttactaaaattggcaggcacaattcccgaggccaacctcgccaagcgatcaaattgagtcgtgtatttagtaacacgcatgttctccttcagagtcagctgagtgaattcttttcttttagcactactaactgtctcattataatatttggcattgaacaattcatggaaattttcccaagtcattgtcgtaacatcatgaatcatggacaccatgacccaccaaaccagagcgtcttcttaaaattggaaagtggcacaagccaccctatca

SEQ ID NO: 345436 - DNA, 521 bp, Cannabis indica
aattatttaatgtttattaaaaagaatattttaatatcacattaataacaataagataaagaaaattattgttgttttatgtatcatacaaaaaattaaaataaataaaataaaaaataacaaagtcaaagcaacaaaaattgttgtataaaaaataatttaattttgttttaaattatgttttcttataaataagaatgaaatatacatttgacttactatatttttaaatatatttgtatcatatatgcaggggcggagccaggatcaaatatcaggggtggccaaaactatattaaaatttaagtaacaatttttttgaaaagtaccgttaattaatacttaaaattaaaatataagcgtctctttttcatatcaagaacgtcatctataaataaatcttttacaatttctttcaagaacttattttttaatatagactatagcaaaaatttacttaaaaatttatatttcatcttgttgtaaaatgtagtcttcactatattcatgactgaaaaaaa

SEQ ID NO: 345437 - DNA, 634 bp, Cannabis indica
atcctcctgagaagcaaggcttgacttgactccattttttccaaatgcaagttgaattcagccattctgtaggagcagaaatggaggcatatgcagcagcaggttcatcagtagcatcaggggaagcagaacgagcctttttcttagcaaattttccttgaggagtttttttgggactttaaaagtggtaccaacaacaggcatttcaatggattcattctcaagaaccaactccttttggttagacaaaatctcataaatcaagtgataaaaaataagattaagcctaagtttcttgcccttttgaaaagagacaatttgctcccaaatcgtgtcagccaaatcaatttttgtactagtagaaattttgtacaaaaagaaagcaagttcatagtgatttttccggtaacaatgccaatttcgacgaattttttggctccggcagcaactccgacgactttttcggcatcgaccgctactccagcgactttttcagcaccgacagcaaactccggtgacttttttggcatcaatgacaaacaaaacttcctaaacaaatgaaaacattaaatatgggatttgaaaacctaattacatatatatgacatatcaaataccataaaaagacctaaaa

SEQ ID NO: 345438 - DNA, 592 bp, Cannabis indica
gggacctcccaggaaaactggagctgcctccttacgaaacctttcatataagggttctatccgttcacttcaactacaggttcggcctgcacggcaggagcaggagctattggtcttttaggggcaggaattgcaggagcaccttgctgtctcatccgccgaatctcttcatcttgctcattgatcctggcttgcattgctgcaaacctattttcccaatcttgggcagctcgcgtagcttgggcaacctgtggcagtttaacatcacccctgccacgtgccctacccttgggacgtctacctcggccacagatattaaggggaatctgagccccctgaccaccactggatccaaccgaattaccctagctcctggtgtatgcctggcgtccatactaattagaacaacttgcgtaaccaagagctagtttggtcagaccatgatcagagaaaagcttactaatgccgcttttttggaaattaaaaatatgtgcttattcaactatcaagctactaacatacttcctaatggacttttcttaaacaaactattaaaataaactactaaagcaataaaagcttactgaaccgt

SEQ ID NO: 345439 - DNA, 521 bp, Cannabis indica
gggattggccgagactgaaaacaattacaggagttagaagtttcctgggtctggctggttattatcgtcggtttgtttagggattttctaagatctcaacacccttaaccgaactcactaataagaatcagtagtttttgtggacagacaagtgtgacgcaacccatttcaatataatcctatatgttattaatagaagactagaagtcatttatatttacatgtattattcatgtttatggtttaatatataatttttattaaatccaggacatatagttattcacaattacagtgatgtcaacacaatagaatgtaattgtgattatatgcttcaaaagtttacgtcccatgattcatcagtgcattggattacactgatgtgatagtcagtgataaattttacttacaccttggataagtgttatgtacttcccagagcattggcaaagtatgctagtatcggatgtatggagtatatattggacttggaccggtattgatcttggtaaagatattat

SEQ ID NO: 345440 - DNA, 597 bp, Cannabis indica
cttttattaattagtaaatctgattatatttaaatgggttttatttagggcacaaaatctaacatagtttacaatttgtaggttaaataaatcataggttacacaatttatttaacaaacacttaatatatattcttcacataataatatatattgtcacattttaatctacatattatattattaaatgatataaaaatcccccactagattaaaatgtgtcacacacttgtgacattttcttaatcatactactacaaatatgggctttagaggcgatttttaaggcattttagagtcagttttggaaaaatttgctaccgacgctaatctaagcaaagttgtaggactccaaacaaccaacggtaaatgtttctctatggcatcggttattatcaaagaacctacaccatatgtacaatatggcatcgggtatatacatataattgacgtcatatgcacatataaccctcgttaaaggcctaaaaactgacgccaaatcattaataattttttttccagttaaaaatctattgtaaatcaagaaatttaatttatttaaattatttatttattaattgatattaaatataattt

SEQ ID NO: 345441 - DNA, 1064 bp, Cannabis indica
ttttaatcaaaaattatagttgtttgatccctttctcaccggaaaggtttgattaggaagttataacgattcaacccatctctcgtcaaaaagatttggtaaggaatttataacagttcgacccctttttcgtcaaaagggtttggtcgagaacctttaaaaaatttcaaaaatttttatttttgaagtggtggatttgcattatatcatgtattttcaaataaatttcggttaatcatacatatatgcccctcaagtaattttaaagggtcatgctttataattacttatcgaaaaaatttattactttatccataactgaagttcaaaatattacatcagtgatgcggtttacaatcattaatttaccatcgatttaatctcataagaactcttccagtttaattgcttattttatcaatcttctagaagcatctagttttgatagaatgggttttgatgctcagggtcaatccctagcatattcccacaattattttgatatccagggtaaatccctgccatatccccaggttccaggtgaatttatcctggtttcagttgtttgtcctaactgccactagttgacgaccagcttttctgcgttggaactccatacggcagccattgtgagccggtatttaattacttcgcaatacttttacgtaatttcttgaccgaactcactgccccctgtccaatttttcttataacatgttctcctcccgagatagctgaggtatcctttcctcctacaaaggaaggttatggtctttggtcgcttgggttactgggtagatcgggctagtcatggacattgtcctgcccttttacatattgctggaagtgtcctcgcgctatgaggccttctatctcatctttaaattgatgacactcttctgttgtatgcccaatatctccatggtattcacatcatcttgttgggtcccttttacgtctcgtgaatttcatgggctttggtttattgaaagcgatcttctgttcatgcgtgaggtagatacttttctgagtttcattaagctcggtatagacagtataaatgg

SEQ ID NO: 345442 - DNA, 1067 bp, Cannabis indica
agggcataaaatcccaacatgcacaacttttcaaattaacacttaaagggaaccaacattcgatccattagggaagtcaagattctataattatagatcacgttcccagctatctatattattagattctcaaaataaaagttgtaacaatcatcttctctgagaaacattaatgagttaatcaaagaaactaataatatgaacacgagttcacaattactcaagattcagaccgatctactattaatcatctgtatgatatgaattagatctttattgtaaacgacatgtttgataaagataacttaaatttcatatcggtctatgtcatatataatctttattatatacagcatcttcacttaatgagatgccatattacattagtaatttgaatcgagattacttgcaccgaataatagacattagtgaatcgcactaataaccgttgattacatatgccataactttaatatgttgctaactgttttattcatggctaagtgatctcaattctcagtatgagacaagtcacaacgtcatgtatgaataaggaattttttgatgtttagaaataaattatgcaatgttaaataatagttttaacattcaagtatgtataaaaatgttcaactcttatttataaatagaaatatcattacatgctttttagggccttgacacagtttctttcttttatctttttaattgtttttatatgtttctaaatttaacattacaaaattcttgttgtgatgaaaaagcttcgaagacacaacaaaacacaaaaatggattagggctagacacaatcaaataagctcaagaacttgagctgaatcaataagaaaacacgaaaacgagtcaaaacatagaaatgagagaaacaaaagaacaagtacataaatttttacaaggttcactagcgtaaattagagctacgtcctgagtgagctgcctaaaagcttagattaaatccactatcaagatcaagttttacactgtgtaaggattccaagttacatcggtcgactcggtaatccccctcttcacacttaaataagaatc

SEQ ID NO: 345443 - DNA, 874 bp, Cannabis indica
attcttttatcatattttttttgtagaattagaagccgatcacttaaagattatgatatatttatattaattttgttaatatcttttttattttaaagttatgtcaattttttttaattttttatgagttattgtgggttgttggtatataaattttgttgtacattatatttctattttgttgtacagtatattattattcttagatgatatttattttttattttactatatataatagtggtatataattttgttagtataatacaaacattttaatgtatgtatataattatattggcatgctacatatatttaattattatttttatatattttaactatatgatatattatttattttaaataatatttaattagtttctatattattatatacaatggtagtatataattttgttatcatgatatatatattttaattatagtatataattgattagtatagtatatatattagtaatatatattgttaacgcagattttcgttaaccaaatatgagcctaatagtgataaatttcacacagaaaaataaaaacaataaaggaaaaagcataaacacaaagaattttttacgtggttttgcagttaaaattctgcatagtccacgagtcaatcttattaaatttttgatagtttttcagggcctcttttcttatattttttccgtctccctttcttaatctaacttgcctctatttataatcacatagtaggcagttaattactgagttgactgtgctctttacaacgtttatcccttcaaattgtgggatttaattacatatcacgtagtataaatgcggttattatttgaatatcacacagttgtgacttatccgcttttactgg

SEQ ID NO: 345444 - DNA, 872 bp, Cannabis indica
gccactatttgggcttcttctaagttgatctacttttggaccctcttctggaaatcttggagatacgcagctcctgcttgttgtaactcgttccagaacggggttcctgtacgaatcccaacttggaaaagtgcaagctgttgtccgtcatcaactttcttagtcttcgaggcttcttccttgaaccttttgatgaaatttttcaaatgtctctgtgggtagttgcttgatgttagtcagggtgctaacttcgagattaatctttctcgcggcaacaaactgtctgcggaagctaacttgtaatttgttcctgcagtcgacagatcctggctctaactttttgaacgatccctccggggaaccgcttaacgttagtggaaagcacaagcacttagcatcattactaactctcatggccgtcattactcggttaaactaggacaaatgatcgctggggtctgagtccccagtgtaggctgctatttcgggcatcttaaaatttttggggagctccgcctccaggatgcgtctagcgcacggctcccagtcctcagagtcagagtctgagtcatccccctttgtctccgggagactcgagcaatgtccttgcgcaatatggcttgctcagccataattccttcgttcagcgttcctatggagatcgccggtgcatgtttcttttttgtccaagtgatctcgcaaatcaccgtgcttctcgttgatttgatgtcttagatcaattggagggtatcttcggttccgtcttcctttttccccaggttcctggtgcacagaaatgctctttcggtcctctcgatcctaagggccaagactccctttttggagttcgcccctctacggacctttccctt

SEQ ID NO: 345445 - DNA, 625 bp, Cannabis indica
ctcttgatgatggggtttcaaaagaacaaaaagatacgataatacaaattagggactattacctgttatattaccaactaccaaaatacttagtaatatttattgactatttctatttgacccctcatcaaattagaaattatccttatgatatccatatattaaaatcataacaatcacgctcttaatcataaattttattcagaaatagaccacataaattaaactcatttacatgatgacccaacatatattaatatacacatttgtggtcccaaataaataaatttctaacaatctccaactgggccacatatgtatacatataaaatgtattaatcttattgagctcataactttatcatcataattgtaggcatgtggtaatctcttccattaactatatcaacataggatcaaatcagttttcattgtatcaatcacaagtaaacccattaatggtcacagatattgacatagtcaaacgacataaatcaatctgttgggatttattccctaaaaagcttctaaagacatttttgattattaataaagagttgaacattttaatatatgcttgaatgttaaattattaatatttattattgaataatttatattaaat

SEQ ID NO: 345446 - DNA, 615 bp, Cannabis indica
agtgacatcctttggcctttcccccgtagaatagagtctatcattccaggatcaatagtgataccatcttgagaaattacatggcccaagaatttgacttcagttatccaaaagtctcacttctctttcttagcatgtattcaatgatctctcaacgtctgtaataatattgtcaagtgttcagcatgatcctcacgtgtcttagaatacaccaagatatcatctatggataccaccacaaacttatccaagaaaggtctaaagactctattcatgaaatccataaatgcagcatgtgcattcgttaacccaaatggcatcaccaaaaactcaaagtgtccataacatctattgaaagcagtcttaggggtatcttcttccctaatcctcaattgatagtaacctgacctcaagtcaatctttaaaaaaaaaattgaaccaccaagttgatcaaataattcataaatccttggtagagaatatttgtttttaatttcatcagattcaactttctatagtcaacacaaagtcacaaagttccatcagctttcttggcaaacaagactggagctccccatggaaaagtattatgtctgatgtaacccttatccatta

SEQ ID NO: 345447 - DNA, 758 bp, Cannabis indica
atatatacacgtatatttttttaaaaaaaatatatatatacacgtatattagaaataaataataattcaactgatgaattccaacaagaaaagaaatttcctctccccatttaattcagggatatgaaaaattattctcatattcccgtggcgcttcattcctacctttgcatttttttttttattttaattttacatcaaatttttttttaattttttaatttttttctattataagacagaatttttttctaaaatattattgtgtattgtgttaagtttttatgattgttttacaatttttttaattattctattattattttgttttattgttacggttattttataaaatataatatttttgtaaaaaaattcgtacgataataaaattataaatttgtagtgaaaatataatatttgtgtaaaaatcttcttttttccttaaaaataactcattttcgcctattaattattattaattaattaacgtgagaatttcatgttaggaacaatcatatgtgacaactatttaacatagactaactcttctaagttactagttactactacatgaggtggtgaaagtaatctgactactgactatatattttaatgacatgtggcttaccttccacttcagtcatgactttcattattgtattaaagttacacgaccatcatttatgtgttacatctatttgaaactaatagatttattttttttattattaaattattatgaaagaagggggtgt

SEQ ID NO: 345448 - DNA, 1723 bp, Cannabis indica
atatgcagtgagtgtcgtgatgaccagagaagaaaaaaacacctagcatccagtctattatatcagcaaaagactcgttgatgctgaaggatggtacccattgatagaaaaccttacttactgcctaattttaacaacaaggaagttaaggccctacttctaggctcatcctatttgtgtatacattgaccaactattacgccaagtattacaaaaacccgacgcttttggacggttactcaaatgggtagtagagttgggtcagtacgaaataatctttcaaccccgaacaacagtcaaaggatatgccttagtatactttgttgttgagtgcacatgaaaaaaagaaagcagttcaaaggactactcggagccagtacaagagtcccaaccaaacaacaatgaagacaaacctacctagaaattacatgtggacgggtcagctacagatcaactgtctggtgcagggattgcccttgtcacaccttgggggcaacacctgcacggggcagtcaaaattggattcaaagcttccaacaatgaagtagagtacgaagccctcattactggcttgaaacttgctcaagagctgcacattgaaaacatcgagatctgtagtgactcataattggtagtgaatcatgtgtcaggagaatacaaggcctgggggagaaaatgatagcctatttaagcgaaatataggatcttctcgcacaattcaagagttacgctctcaggcaaattccaagagaagaaaacacaactgctaatgccttagcccgacttgcgagcaacaacatagctgataaggctaatttagtcccaattcaattccttgaagaacctagcatcacctgtgcagaagaaattaaaatgattgacacagctccaaattggatgacaccaatatcaacctacctcaatactgaagaacttccaaatgatagaaatgaagctcgaaagatgagaaggaaagatgtacggtatatcatcgtagaaggagtcatgtatagaagcggattcttcatgccactacttagatgtgttacacaagaagaagctgcacgacttttatctgaagtacatgatggattctgtggcaaccacgcagacgggcaatgcttatcaaagaaaatactaaggcaagaatattttttgtcgatcatgatgaaagattcaaaggcctatgtaaagaaatgtgataaatgccaaagattttcatagataccccgtgcaccgcccaatgagctaactcagatgcaaagtccttggccttttactatttgggatattgacctaatcggacaactgcctaaaggtaaaggggagtacaatatgcagtggtcgcagtagattattttacacagtggacagaagtcgagccattgacaaaaactacatccaagaaagtattggacttcgtggtgaaaaacataatatgtcggttcaggctcccgtacaaaattgtctcggacaatggcacgtgttcgatagtcaattattcactgatttttgcacgaaccatggaatcgtaaaaagtttctccgcagtggcacacccttaagcaaatggtcaagtcgaagcagtcaataagacacttaaagatactttgaagaaatgatttgaagaagctaaggggaactggccggaggaactgccaaaagtactatggtcataccgcacaactgaaaaaacaacaactagacagactccatttgctatg

SEQ ID NO: 345449 - DNA, 762 bp, Cannabis indica
aaaaactggtaggcacaacaaattttattttatattttatagactttttatataatagaagaaatatatattgcattttttaaatgatttatacagcaagatttttataaatattagtgaaaaaaaatgcatttaatttagaattgatttattgaaaaaaaaaacaaaaaatcatccacttaaattataaattgtatttaaatttatttttaaaattttttagttttatatttccataccgaaattatattattatgtatatatagatattcatctatgttaaaataccaagaaatatattggattctgacttgaagttactagtaggattttctttaattttattataaaaggtttaagcctaattttgtgaatttgggtttaagtctaattttgttgattttactcataaatcatttcatatatatttctagttcattacagtaccctttgacttatctctttccctatattttacatatattttagtttggttattctcaatattttacagcaaaaagacaattttttcagcataaatattatttttagataaaaataaaaaaattgataaagtgcattttcataaaatcatttaagaattttacatatataaccaagactttatatctattcaaaaaggtgaaagattaaaaacaaaaaattgttgtagataattttagaaaagtatttttcctatctttactaattcttgttgagaatcatagggttccatctcaaaaccaattgacaatgagtgga

SEQ ID NO: 345450 - DNA, 529 bp, Cannabis indica
gaacggaaagtctgtgctagatgaatgccctaatcatattaattataacatagatgagtaactcgctaaatcactttcaggggacttaaacttgaaactaaaagtttccctatcgataaataacatggcaataccctaaatatctcaaaaatgggaaaaactagggttccaaaaactgccccaaccggcagaccggttcccaaccggaagtccggttctgggacaccaaccggtcgaccggttgctacaggtcccccagaaccggaattccggttctgtgctgggaacccgaaaaatgcccccatgacctcaaaatcaagccaaactctaccaaactttccagtatacctgtacaatgcatatacaatatactccaaccagaaattcccagaaaaagtcattaaatcaaaggatgccattaaagccctaaacttgagcttcaaagctcaagcatactcaattccatcaccatacaccaaaactaatatccaaagcttaaaatcaacttaaaattaacctaaaatcagaa

SEQ ID NO: 345451 - DNA, 687 bp, Cannabis indica
agagagagagattcttaacattaccaattagtgaaaacattatactatagccagcaagacactgaacttgtccattattcagtgaaagccataaattaaagctaagaggatccaatcaagtctatccaacccacagcttatctatttatctatcctgatcaaagacccccactaccattaattatttatcatttatgcatcaaaattgaccccaaaacttctatttttttaattagaaaaaacaaatttgaccccaaaactattggtttcaaaacattataatggggaacatatcatttgcctattactttccctattaattatatctaccaattttttttgttccaaatctttctctcccccctttttctaagattaataacattttaaaaggaaagataaatccaataattaaagtaaaagtaaaactgcacaaaaacaaatcttacaaggagatcaccacacccccatactgacacaaaaggaaacctcaacaataacggtacaggtaaaaaactaaaatagtaaacaccattattgcaataaaaataaaaagactaattagtaatttttaatttttctcccgaactttgacatgtactaaatcgtatctcctaaacttttttggtcgttaaaaattcccctgaattattgagattgttaaatttaaggtcttttgtctaattt

SEQ ID NO: 345452 - DNA, 696 bp, Cannabis indica
acttaagatatcaacctatattttgattagggtttcaactaaagcagctgtaaaaataccttatgagttttggacagggcaaaagcctagtcttaatcactttcatgtttggggatgtccaactgaggctagaccttataggccaaatgaaaagaagctagaacccaaaaatgtgagcagctactttatttgatattctgagcgatccaggggtttcaagttttatgatcccaaagtaaggaatatatttaaaatagaatctgcaaagttctttaaggatattgaatttggggggagaagtattgttaaagactttattttttaggaggatttagaatgaactgctcttcttgaagatgaattgatttctattccaatagttacttttgacaatgttcaagatttcgatccttatattcatcaagttttagatcaagagcaaccaaatatagttaattaaaccccagaggtgcaaactcaacaacctcaagaacaagtgcctttgcgacaatccactagagaaataagaaatactattaatccaaatgaatacatagtgtatcttcaagaatattaggatggaattagaatgatggaagatgatccaatcaactttcatcaggccatgaaaagttttaactctcaaaagtggaataatgccatgaatgaagagaataattctatgcaagacaataa

SEQ ID NO: 345453 - DNA, 589 bp, Cannabis indica
tatacccaaccagaaattcccaaaaaaagtcattaaatcaaaggatgccattaaagacctaaacttgagtttcaaagctcaagcttgctcaaaaccatcaccctacaccaaaactaatatccaaagcttaaaatcaacttaaaattaacctaaaatcagaaccctaagcatcccaaaccataacagccacaacttctcaaaaatcacatactcaactaaagaaaaagcttcaaaacacatattcaagagttctagggttaccttgggttcaagaacctttgaatccctactgaaattccagaaaaatgattgaggtaagatgattcacctctgattttgccccagccgaaaaagagaaagagagaaagagtttatcttttttggttttcttgattttccttattttccaaaaatgagaaaatgagagtgaatcactttggctgaataatttgagtggccagctgccaacaccaaactcagccacctaatcccccatttaaaaagactaaaatgccctttaagtcaaaacttaggtattttccaagactaggggtaaaatggtcaaattccataaccccgctcaaacccg

SEQ ID NO: 345454 - DNA, 746 bp, Cannabis indica
caaggtataggattagaattagagggtttacctgcaaggttggatgctacagcaggcatggtattgagatcagccgagggatgattgtttaactgttgactgaggagggaaatcaactgctgacattgagaagaaagatcagcagtggtagagggtccatccaagtcagatttggggttgctggaagaggcattattggccttagctttgcccttttcttgtttctttttatctccataaccgggtgaaaagtcgtggagaaagtaacacttatcaactaagtgtccaggtttgccacaattcgaacatgatggccttggtttcttggccctcgatggattcgaaggaccagcagcagccgcaagaggaattggttcagttgaaccaagagatctttggcgttcttcttgaatgatcattgcaaaaacactagacagattaggtattggttcaatgagaagaatttgtgctcgaaccgaggtaaaagattcgttcaaaccagtcaagaactgaagtacttgattctagttgtaacaatccaagaacactttcattgcaccacatgtgcaagtagtaatcggctggaactcttttagttcatcccacagggatttcagcttggtaaaataagcagaaacagagttagcaccctgttgaagtcgggtgagttgggtctgcaattgaaaaatctgagggtcgttccttcattgaaacgctcagcaagatcgttccacatttcagtagct

SEQ ID NO: 345455 - DNA, 720 bp, Cannabis indica
cttatttagtaagcaataagtaatttatagcaattcatatagtaaagcaatgtaaagacacaagaattttatagaggttcatcccgagcagttcggtaatagcctaatcctcgttatttgtattgacttaagaacaaagagaaaagttccttttcttatggctcttacaaccttatctttgaatatgaattcttagataatatctcctaggtaaaatcttttgacccttttcccagggagcatgcatcaatatttatagggctatgaacttggagaggaagtatttcccttctcgttacaatggatatgagcagaaagattgcatgataaatatagaatacactgatcgtgggatttggacagctttccatatctttgtaatctgatccccaagttatcgggatttctttgatgactcaagatgcgaaaactgaattcactaagtgttggtcgctctgtgcggattactgatcgctttgcttcaggcatgcctatgaggcatcctgttcggactgtactctccgagcagatgctcaaagttgactcaacatgtcaccatcatgtgatgccacgtcagagtacaaaaattgggataacacaaatcataaatcgcatttacactacgtgatctgtaatcagatcccacgattttagggatgattgcggtaaaaatatttcggtcaactttgtaattcaatgtgcactatgtaattataaata

SEQ ID NO: 345456 - DNA, 576 bp, Cannabis indica
catggttcttgctttttcactttcgcagccaattgaagtgctttactttcttgagttttgaaagcctcaaattgttttttcaaggcttcaaattgagctttcacactgtcctcctccttcaattggtagactccggctgttcgtggcttgtctgtaggacttggcgcactccatgtgtaggattttttcagaaatttcttcaagatattccaaaggttcttcgggatctttctgaatgaagtcgccattgcacatcatttgtacgaattgtcttttgtcgattgtgagaccgtcgtagaaatagctgacaagacacaaactttcgtatccatgaggtgggcactggcccatcaaatctctaaacctctcccaaacctgatgaaacgtttcgtggtccatttggattaaggtagatatttgcctcttaaggttgctcgtcttatggggtggaaaaattttaaagaaaaatactttcgtcatttaatcccatgtcctaatagacctaggccttaaggaatacaacaagcttttagccttttccttgagtgagaaaggaaagaacttcaatctcaccaa

SEQ ID NO: 345457 - DNA, 1000 bp, Cannabis indica
cccacgattttagggatgattgcggtaaaatatttcggtcaactttgtaattcaatgtgcactatgtaattataaatacttacaaagaagataaaaaaagggacgaaaaaacccatatgaaagaggccctgaaaaatactcagaaatctgattatgattgactcgtggactatgcacaattttaactacaaaaccatgtaaaaaatcttgtgttcttattctttattttgatagcttttattttttctgtgtgaaatcaatatcgtgatgctcaaatttggttaataaaaatctgcgtaacagtttggtgctatcattaggagcctctgtgaaaaagctcagaaaaaaccctcggttcttttgaagaaaaacaaccttctacatggctgaaaatctagaaaatgtgaacaccccacatgaggaagccaaccattattctggaaaagagcccatgggctccataagatctaccaatccgcaatccagaaggaccacccatttcaggagggctcaacctgagggtggccctagtgcgcggacgacacgttcccggagaactcaactggacgttggtcctagtacgcggacaacacactcgatgaaaactcagcgtgggaatggtgagaatcccgcgaccagggatgaaaagctcaatcgtggaggtgcccaatctgtgggagaaagaacttatgagacataaatctgtcgcctgagacgccgtttggaagaggcacagtgtaggaacacttagttaaaacgtgaggcagcctaggctagggcagcactggggatgaatgctcggaatcaacctgaactttgagtgagaagacctcgaggcagaccttgtggctcacgaactaagagacaggaaaaggcccaggaagaacgacccgaggaaaatgagacaccccttgaaaatcaggatgaacaaccagatgggagacaacaggaaactaatgaacaagaaatccctcatgaaaatgaggaggatcttgggact

SEQ ID NO: 345458 - DNA, 1245 bp, Cannabis indica
cttttgaatataagtttaaaattgagtgggagtttataaaatcatgtaaggtaaaactataaggtaaagtgttttttttttacccttgcacacatttagaggacctaatctaatatattgcttcaatttttcctttttcttttttaaaataattatttaatatcattaaaaagagggatattgctaactcaaacttttaagtaatcttattttgataattaataaatatttgattattattcgttactaatgatttgttgattttgtagcacaattaaaggtaaaataaaattttctaagccaaattaactccaaggaaaaaatggtaattttacaaaaattcttaaaaagtaacccgaagtggattccaagactcaaggaactcaagacaagactatataaatgtttatttatatttcctagtcttgtatagtaattttcaagtccatgcaaagaaaggtttaagtacaaattttcgcccactaacttgtgtgacaacttttcttaccaaatgatataaaaaaattcaaatacatttaactaagagaacaaaattagaatttgtaaaatcaaataatcaagtagcgagttatggttgttttagtacaaaaaaaatgagctttttgccaattctaggaatatggttcacaagttcctaaacatttaaccagttctcccagaaattggtttaccatttgggaaacagtgaaccggattgcccagtggcaatctcgtttttatgtctaacggctataaatggctacatttaccgcaacactagctatgtaaactcaacttttactcaaaaattcaagttggctgagcatttatttcatacacctaacatattcaagtgagtttaatgagctcacaagtctaaaatctaacaaacacttttcacacactttgagccaaaatttgtgtttaattctttaaagtgtacttgttattcactctaggttttccaatgtttgatcatacttctaaagtgaatttgcttgtaatttcaaacacatttctatattgtgattgaggtgaggttggcaccgatattataaacaattcggttagagtgagattgtcactacaacaatccaagaaagaggttgatagtcctttgatgtgcaaaactattgttagaggttggaaaataccttggtgaaagattcacagttgtaagggttagtcaaaccagttaacttggctcgataatggaactcgaagctaggtccatagctttgaaga

SEQ ID NO: 345459 - DNA, 523 bp, Cannabis indica
caatctcatttttatgtctaacagctataaatggctacatttacccgaacactagctatgtaaactcaacttttactcaaaaattcaagttggctgagcatttatttcatacacctaacatattcaagtgagtttaattaatgagctcacaagtctaaaatctaacaaacacttttcacacactttgagccaaaatttgtgtttacttctttaaagtgtgcttgttattcactctaggttttccaatgtttgatcatacttctagagtgaatttgcttgcaattttaaacacatttctatattgtgattgagatgaggttggcaccgatattataaaaaactctgttagagtgagattgtcactacaacaatccaagaaagaggttgatagtcctttgatgtgcaaaactatagttagaggttaggaaataccttggtgaaagattcatagttgtaagggttagtcaaaccagttaacttggctcggtaatggaactcgaagctaggtccatagctttgaaga

SEQ ID NO: 345460 - DNA, 643 bp, Cannabis indica
tgtgtgcacacttgttgatgcgagctaatggattagtcacggtgctatagtcgagtggatccagatcaatagttatcgtcttgttatatgaatctcaaatgtctcgctatgtattatatatgtatcctgtcgatataatatgatgcataattagtcttacagacaatagtgttttttgagatttctacgtattgacagtattgcttagtgagcacatattggtataattatgtagtcaaagtgggagaatgttagaatattttatatggacttacataaataagtgttgctcatagagtgtcaatatatatgtggataactatttgcatggtataatcccgattatgcaattaggaccataatgggatggtcggttctattatctgcatttgaggcacatggaagcaccctaatgactataaattggcccattaaattatagtccaccaccactagaattttaaagcccaaaagctatgtccactctacccctagggtaaattagtatatatatgtgtgtgtgattttagtggaataagtatgatatatgggtgatatggtggtaaaagttttacaaggggatgctttccataagctctcttaatgcttagaagatgttgtggtgaatcaaggagactcacaa

SEQ ID NO: 345461 - DNA, 650 bp, Cannabis indica
ggttaccaccgtcttactcactatgattgagtatttgacttgttatgtgtgggcatgacactctatcacttagggtttaaatatgaagaacaatgaaggaggcttgaaaatcattatagaaggtgtctattatctgctagttgtttaacatggaaaactaggtttgatttggttaaaggcaatagtttatttggatgagatgagagcatcatgatctttatatagtgttttaactagggcttagggctgaattatatggattaaaaaagaataaaatattggggaaaaattcactctaaggccgaccacatattggaccattctctagttactattttgccactttatttcaaccacttattcttctttcaatagtaccatattttccaatttaatcctataaatgccaaaactatttatttcataattataattaattatcaaataaaattaccatttatattatttattaattataccatacaaagtctgttaattaatatattgaccccaaaatctctttttttcacaattaagccattgcttagtgaaaatttataaataagacatagtctaattttagtattaaaattgataaatcaaaatcaattaactgagtgtgcaagcagtattatctcaactagtgaggg

SEQ ID NO: 345462 - DNA, 856 bp, Cannabis indica
aaaaactaaaaacaaaaaaaaattgattgggttgcctcccataaagtgtgttgttattgtcttaaactagacgttgttgttgcttcaagtttcttcattacggagctgtttagtcagtgctctacttgttgtgttttataccataaataaaacctatttcagtataatcagatttactaagtaataaaagatcagaaatcatgttatgttgcatgattcacatgatttattttatgattatatgtttaatgtataaattctactaaatctagaatatatagttattcatgattatagtgttgtcaacacagtgaaaaataatcatgattatatgtttcaaaattttatgtcctatgatttgtcagtacactggatttagactgacatgataattaacgataaagtatacttacacctaggataagtgctatgtcctttccaggacatttgcaaagtatgctaggatcggatgtatggagtatacatcggactagacggatattgaacttggatatgatatcataaacttactgttatatctatctaagtctgtatcaattagttgatcttaggtcaatagatcttaatcatgatatagttaggttctgcttaattgtattatttatgctcttagagttgttcgctaaagattggtcggtcgaatacttacattttaggaacatgatagtgcgattgagtgggagcactaatcatagatatggaatctatagcttctataagtatttagaagttgttaacgtaaattttcgttaaccaataataagccttttgttggaatatatttttaccaggtatctagatttactaccatatatgtatttacatcctaatatga

SEQ ID NO: 345463 - DNA, 647 bp, Cannabis indica
tttttttttaaaaagttttttttaaaaaaaaaaaaaaaaaaattagaaaaataataaaaaaaaaaggaagaagagaaaaagataagtgaatgatgtaaggtgtgattgatataagtcatcaattaatgacgtggttgcatgtatggaattgatgtgtaagtggtataattgtaataaaagaaagagaaaaggtaaaaatgatgatgtaagcgtgtaggggttttttttgtaataaattgagtaaattggatttttgatgtaaaaatttcttatatattttaagtaggaactcttaatagtttacttataataaaactagttaacaagccgcgcttcgccacggaaacttaaaaaattttaacattactaattttcgtataatttttatatgaataatatgagaaggtaggtgtacaaacgggtcagcttgacatgtaagtacaaaatctcttttttataatgaaagcccgacatggttcatataacactcttcttaaaattgttctcaacattgtatatcacctgttgtaattaatgtatctcactaactcgctatcattttggctttcaaaaaaataaatcaagcaataatttaagataagttaggtgtaaaagaaataatttaagatatatatatatatagggac

SEQ ID NO: 345464 - DNA, 804 bp, Cannabis indica
catgcatgttctcagacccctcaaagtacttttgtactttttttttttttttttatggtgagtcatattttggagttctcgagatcccgaaacctcatttcgatgtctaaaatcctaaggggagaccattgccactaattggggctacaaagtggcagtggtcagccatggattatgggaagccatagatggtgtttcttgcttatttcagtcctatagatgctagaaaactaatttggtcacattagttattggccaattacttaggagagcattgccaccatttttggcaaaaaagtggtagtggtcgcataaggggtttatgaagtcttgggtgaattttctcacttgtatttgatacatggatgttgaaaatacaatttagccaatgaaactcctcctcctatgtggtggccgaccaacgccaccaattgtccctaaagtatgacagtggtcggccaagtgtttttcacaccacttggtggcttctttcacatggttatgacatattattggtgaaaatatatttttggcgagatatctcattccccttcttcatggccgaccacttccactcattgtgccacaaagatggcagcagtcgactaggcttcttccttggtggaaaatagtttctttcacttgttttgcactccttggtgttgatagaacatatttgaacaatatctccttggttctttataagtggcaaccactgccattcccttgtggcagtgctctctaaaaattgaagagcactgccattctcatatggcagtgggcgcataggctttattccatggg

SEQ ID NO: 345465 - DNA, 604 bp, Cannabis indica
cccgggttggaattcttttctgactaggcctcggtcatgccacttcttcgttctctctttatagatcttggcgttttcataagcctcgttgcgaaactcatcgattttggttagttgtaacaaccttttttctcctgctgctgccaagtccatattcaatgttttcatggcccagaaggccttgtgctctaattcgaccgaaagatgacaagcttttccaaataccaacctatagggagacattcctattggtgtcttgaacgctgttctataagcccattgtgcatcatctagcttcttagcccaatcttttcttgaacgctgcactgtcttctccagaagtagtttaatttccctattggaaatttctgcttgcccattactctgagaatgaaagggagtgcagttctatggcgaactccatatcttgcaagtagagcttcaaattgcttgttgcaaaaatgacttccttcatcacttataatagctctaggagttctgaaccgggtgaaaatatttttctaaagaaagtttagcactgttttaccgtcattcagatatgttgctgctgcttctacccatttggagacataatccacagcta

SEQ ID NO: 345466 - DNA, 1040 bp, Cannabis indica
ataaaatagattacattgaaatggagttttatttagggcataaaacctaacatgatctccttagtgtctcgacccctttggttcgtatggatgaggttaagcgtcttgaaactaagcttaatgatctcttgtctcgagaggagtgttactggaagttacggtcgcgggcggattggttggctcttggtgataggaatactaaatattttcacaataaagcgacgggtaggaagaagaaaaatgcaatagtagagattatgactgaggatggccgtagactgagtacggaagaggatattgttggtgagattgaacgatattttggcaccattttttcttcggcttctccatctacacagcaagtggcggctaggatttccaatattgaaacaagaatttcttcggatgagtgcgacatgcttagtgctccttttacgggtgatgatgtgtgggccgcggttaaagctattggttctacgaaggctccggggcctgatgggtttcatgctatcttctttcagaaatattgggatattattggtccaagggtgtcagctgtgtgtcttgcaatattaaatggtcaccaatcagtgagaaagtttaacaagtctaatgttgtgatgattcctaaaatcacaaagccttcttttgttaaggaatattggcctattagtctctgtagtgtcatgtataagattgtggcgaaggcagtggctttgcgattgaaaggtactttatctccgctgatctcttcatttcagagtgcgtttgtgccgggtctagctattcctgataatgttatcgtgggttttgagttgctgcattcccttttaaagaagaataatggagtccggggatttatggccttgaaactggacatgagtaaggcatatgatagagtggagtggagcttcttgcgggtaattatgagtaagttcgggtttctttgtcgttgggtggatctgattatggattgtgttactacgccggagtacagttttttagttaatggcagacctagaggttgtgtaatgccaacg

SEQ ID NO: 345467 - DNA, 735 bp, Cannabis indica
ggaagcaggcacctctgattttttctgggaggtcctgatgtcatgaaagccgagcagtggctaacggtgattataaggatactgaactttatgggtgtcaccgggaatgacagggtggtgtgtgccacctttcagtttcaagaggactcgttagtctggtgggacatggtgccccagattcatgttgtcaccaccatgacctgggaaaggttccaggaactcttcaacgcgaagaactataatgagggcgttagaagtgccaagagaaaagagttcgcacacttgacctagaaggaaaatatgagcgtgatagagtatactacccagtttgatcggttggcgaggttggccttgggaattgtgccaaccgattttagtaagaaggaaaatatcttgatggactcaatgtgaagatcaagcatgaccttatgatcactacggacgacaagaccacctatgctgagatggtggagagagcactgcgagctgagggcgaagttgggtgtatgtcgaagtcggctaggactccagtgagtgtcggctcctacccctcctgcatcaggtttcagcaggggaggtagtggtttggccatggaccagaagcggaaaacatccactacatccggtggctcggggcagaacaagaggttccgagggaaccagagtagaggcagccctcagggtggtgctgagacccgattttcttacccagagtgccccagttgtaaaaggcac

SEQ ID NO: 345468 - DNA, 246 bp, Cannabis indica
atgctctggaaagaacatagcatttctccaaatgcaagtaaactctgttgtagattgtcatatcagtaaaaccccagtgttctaataaatctaggaatctttaatcacatagtcatgtttactttccactgtgctgacaacacaataaacatgatcaagtatgtgaaaagggtttggatgaatttataaatcaaatagacaaataattgataaggtgaaccaaaacatacacaaatgaatgaaaaa

SEQ ID NO: 345469 - DNA, 782 bp, Cannabis indica
cagatgccctgagtagaaagggtgtcgggcaagtaaatagtatgatcaagattttacctcagctagcaaatcatatggtcagattaggcattgagtttgttgtaggaaaacttaataatttaacattacaatctgatttgttatacagaattaaagctgctcagttaactaagcaaaaaatgataaagatccaagaggaggttttagctggtcaagttaaaggattttgtagtgtcaggtagtgggatgttgttgtataaaaccagactttgtgttccaagcagtgtagaacttagaaatgagattctcgaggaaggtcataccactccttattcattgcatcctggcactaccaaaatgtatcaagatttaaaacccttttactagtggtgcaggatgaagaaagatgtggtaacatttgtatctcgatgcttaacttgtcaacaaattaaggctgaacaccagagacctgcagggttgttgcagcctctgactcttcctaaatggaagtgggaagatgtcaccatggatttcgtgcttgggttacctagaactgcggggatgtacgattctatttgggttgtggtggatcgatttactaagtccacacattttcgaacagtgaaaataacctttatagtggatcaatatgcagacctatatgttaaggaaatagtgaggttacatgtggctctgaagtccattatatcgaatagggatccgaagtttaccttgaaatttcgacaaaggctccagtgagccatgggtaccaagctgaagtt

SEQ ID NO: 345470 - DNA, 1157 bp, Cannabis indica
ggattcttcacagtcttacacactatgattgaggactcacttgctatgtgtgggcatgcactcaatcactaaaggcttgaatttagtttgtgaagaaggctataagatttcaaaattagaagaagaaaggaagaagatgattctcataaacctagaaagaaaaactaggtttttagcttttgaagcattagttggataatgagaccatatatttccttttatactaatttcacctagggttagggttgatttatttggagtaaaaaataataaaaatagagcaaaaatagcacctagtggccggccatgaagtgggccctgcactagttagatttttgccatttttctcaaccattttaacaatttttcctaaataccactttttgcacttttaaccctatagatgccaacactatttatttaataattaaaataattatcaaataaaattgtcatatataatatttattaattagactcgataaagtatcttaattaacaaacaaaccctaaaatcctatttcttcacaatcaagccatatcttagcgaaaattcataaactagacatagtctagttttagaattaaaattgattaactaaaattaattaactgagtcttacaagcggtttgtctaacctagtatggggaccatgggccgatataattgagcttccaataagcagatctagaatttactaagtaaattctctaacttattaattcctcattggaccactatagaacttggaattacactctcagttatatagaacgctctatacatttcacgatatagatacgctattagttatccattgttataatcccaataatttaccgtgacacccttcaatgtattttatccttaaaatacttagctacctataaatgatatttcactgaactaatagaatcagaaatgaatactcaaccatttatctctgttaagccaagctcgaaggaaatcatcgtttcacttctatgtccgaataaaagctatagattcggtatttatgattagcgttcctactcaattgaactaccatgttcttaacctatacgacatgggaagaactatttggtcgactttaactaatagattaagaacacaaataatgcaaactgaaaccagaaacctaaacccatctcaggat

SEQ ID NO: 345471 - DNA, 606 bp, Cannabis indica
gttaagttagttaaagacaaactaactaaccgaatggttgttgggagtttatagaataataccgcatcctctttgtgattagaggcgtgaaatcaatagactattcttatgaacaatattatcttgcacttaatttgtctaaattgctagcacaaacaaattgttatagatttgtaatttcactttcctctgcaattcatttttctaattacattaagttttgttacttaacatgtttaacatagtacatttaaatgcaccccaaatatatttgaatttattttaagtacagtgtctttattgcataattaaattgtgtattgcttatatttagaatattttagataaattttaagtacaatgtctttattcgcattatgacatgtgcttttgtgtgtttttcaaagagtaatgctacacatttattaacacatttcgaaaaaaaaattaaccatacatagttttaagttgagtgagtggacaacactttttgtatagttaagaatatatgtcattgagagttaaaaaaatgtttattttgttattcttttttcaaattgttagtaatgtaaatagaggagtgctaccgtcaacctcttattacaa

SEQ ID NO: 345472 - DNA, 706 bp, Cannabis indica
tttcctaagaaaaacttgatctgcagcatcaaaaacggattctgacgcagcaaatcagaccagaaaaggaaacttgccataaacaagtccgatcttgtattgggtcttgatacctgccataaacagtttgtataatctgattgtatcaagacacaatcgaatttaataaggaaaaaggcaatagtcaaagtttcttttaaaaaccaactttccataagagaattgcttctcttagaagtttccatacaagaaaagtccagctgaaaatacatctttcctaacatagaaaagagcaataaaaaccgaataataaaggtgagaaaatcatattggaaacacaaagcaatctcaccataaataaaaaatattttgtcatctaacttgccaaaaaaaaactttacaatctccccctttggcactttaaatgaacaaaatatttttttaacaaagaagtacctgcaaatcaaagttagcaagaacaaacaacaacaacttcccctgagaaacacaatcgaaaaccaaaataacaaaataacaagctaacttttaatccaaaatgaaacacaagtaccaaacacaactctccctggaaaaagggtccagagttgagaaaacaagaaattaaaaacaaacttattactccccttttctttatctaagggccaaagacaagaaacatggaaatatagaaatatgtccaacaaaa

SEQ ID NO: 345473 - DNA, 682 bp, Cannabis indica
ttaaatctacgtgacgtagacccacgtgttgctctcacacgtctaaatacattaaggccttagaagtggttcatctcggttatgtgtaccgagtccaacctgattatgccttgagtgcataatccttaaatttcatttcaattaacatggcatggcatttatacacatactccactagagtaataaccctaggctgacaaaccgttcctattagggtaaggaactcccaaatctgagttcggaatcaaaagttacgaactttcgaaaatcaactcaaaactgcccaaaaacacgagggcgggccgcggcatgcctcagaccatgccgcggcacctgggacaaaacccaagttccaccaagaggggcgggccgcggcatgctcctgagcatgccgcgacatctgggtgcagaacccagaaaccagcagcccttcttcgaattttcagcatccaaattcaatcttacactccaatttctcaaccaagcatacaaattaacaattgggatcactagcaattataaggtgatcaaataacatactttaggcatccaaaaccccataaaaaataccacaatttcagattgagaaacacaacaacatcatgctcaaactaagcaaatctcaagctcaagaacaagagctttctcttcaactattcaaacagtttttccagccattaaa

SEQ ID NO: 345474 - DNA, 934 bp, Cannabis indica
ctgtcttcctagttatgtacaatcttcctcccttgttagtgatgaagaggaaatttaacatgcttcttatgggcagtggttttcctttgtctcttgggaggaaccacttcggcagttgtagggacccaagggttggttgcccacttcttcccctttcagtccatgatatcttaataacacatgcttgcaaaacaagacgaggcgttacaattattaaaaaaggtcgataaaaatggaggaatataattttccacctaagggatttaccaaagtcactagaaggcgagctatcactagatgaaggggtagagagaccataatatcccctaaaattcctacaacctgtaattttgaatacatcaaaaggctcgatcggttctaaatcccagctcacatctatgtgacctaccttatcttccatagtaccggactgctcagctataccataatatgacttgtgacaattaatctggacatggaatctaaaatatcagctgtcaaacttatgagcaatgcggtccacgagaagtgaattccaaatataaaaattcaggcaggagtcttggaaggtgactaatgtattacgtttagccctaagtaagataggagacccactacattgattacctcgggatgctccttcattggattcccgaggggcagtgttttgaaggtaacgtgcttcagccaagcgatcccaggcctggtcctcaagcggaacagtaatctgctaccaagaagaatacttgggaatcttataatcacaagtatatttcttatcagcgagaaggcccactgatcgcaagttgttgaccgataagtaatttatagaaattgatatatagtaaagcaatgtaaagacacaagaattttatagaggttcagccacgagtagttcggtaatagcctaatcctcgttatttgtattgactca

SEQ ID NO: 345475 - DNA, 514 bp, Cannabis indica
ctcaccccgaggggtgcaccatatttagtccttgtcaaaaaggagtaggcagtggacgtttggcgagtgagctactatcagaggatgtgctagcttcagggtcagtgttgcaagggctacttggttcactggagggacgttgggatggactcggaggagttcattttggggaagtattctagtaaggaggcactactccatgggtggttcggaatagcaacagtggcacggggtctttgatcaagtccaagagtgggtgaggtagatcgtcaccaagagggtggttcgatggaggtagagggtcaagtgcacacttaggattctggagaagcttggggtaagcttacgagtccagatcaggaagagttgcctgcggtccgtcgatgagggcatcaacttgttttcaaattcaaattacactaatatctaaaattaattttaaaaaattcaaattaatttatttctgataattagaattgaaaattaaaaagtaaaaaatcaacatacaaaacta

SEQ ID NO: 345476 - DNA, 772 bp, Cannabis indica
agtgttatttgtgttctttaagttgttagtcaaagcctaccatttggttcgagtcacacgtacaacttgagaacatgatagtacaattgagtaggagtgctaaacatagatgttgtcctcaaaagtgagtgttttaatatttatactcgcaagtgcacgaatcgtttcggaatatagtgttcatgtaagtgcaaggtcgaacccatgggagttgactaacatcaaaagaaactatttcaaacaaaataagaatattctaacctagctccaaatatttgatgggattttggttttgcaaaataaaataaaagacaagtaactaaaatacttaagattaaagatgagtgagtatgaaaatgattttcaaataagatgtgtaaaataagattattaagatattagaatccacaaaatgcaagttcaataatatttataagtatattgattcccaagttttagatatagttgaaataaatctcaccatattttccaaaatatatttttatttaagtacaagttattttcaaaaaggtaggatttttcttcacttataaaatgtataattctaagcattaaatgtgttacaatttaatgaaactacacaaaatcaaagaaactatgtttaggcaaaatataatacttatgttctaagaattagatgtaaataatttaatgaaagacatttaatcaaagagtaatatatttttgcataatgaagaactaagtggaaacacgctttaacaataaaaaatacatgatattgaagataaaa

SEQ ID NO: 345477 - DNA, 547 bp, Cannabis indica
tggaaatatttttcagtttgtctagctgtgcctgtacggctgggctaacctgctcggcattctagtcgatttgaaacacatcactatctttctgagcaggaatttgagcacgggctccgagttgtacgatcgtcgtgacaatctgatcatctactcctctccttctgttcagatcactccttaggtcatgagtggtcctcaacctatcgaattttgaagagcctggctgtcttagcgattggttaatttgctgggttgacaggtggaatggcaccgttaacctggttggaactatcaggtacgacctctccggatgaattactagacaaggtctgcccgcctaccgctaggcccacaagtggaactcgtgaccggggatttggcggctgaccatttgtagtctgggaagtattcatggcttgatcttcgttcgtctctcccagggggatgacactcggaggttgctgtcctcgaatttggtaggctttttgtatcagcacagtagcttgccgactacgattgtcaatctctgtatgatgagccctta

SEQ ID NO: 345478 - DNA, 1087 bp, Cannabis indica
cagactgagatgaaggctgacttcaagagaagtgagaaagagatgaagaatcttatcatggataattgcgaccgtgataagtttttacaaaagcagccttcggagccgacataaccatcagggccagcacattaatcatcgccgacacatccatcagacttgacagagccattacagacgatacatccatcaccgccaagagatgattttgatgaggatgatgtgtattcagggacccaacgtaaatgaggttccttgtactcctacaaaggccattgtgattgccctgagtgatacagaatctcaagatgtgcaagagttggacgggccacttgctggggtggacttctctagggttaggagaaaatggaagctggttttcttgaagaactaaacagaggggaagaagaaacaacgacatgggccagttgaagtagacaccgtgaaacttgcagattcgcgattgttaaaatttttccagaagtggatcacttacgcgagggacaacgaccatcctagggatgttcacactggcccagccaatcgatcctgtttcgtcaaactgatggtgcagggagaatggctcgacgatgctgtaagttatttcttaactgtacaaatttattgtgtttttaaatttttgtccgagttaaatgcggtttctatgcgattagtttgagataatatcaacataatgtgattattgtgcgacttctgtgcaatttcatgcgatttatgcacttcttttatttatgtattatttgtgcgacttctgtgcgatttatatgcgacatttgtgcgattaatgaaactattttttgatttctcttgtgcaatttcatgcgagttttgtgcgacatatgtgcgatatctgtctaacttttttcttttggaacacagcaaattgataccatgacgcacttattgagaagaagacagaacgtttatccagaagtgtacactcaaaaaggtgtagttttggatacatctgctccacagatattctccatgtattggaattattatgaaggtgataagagcacgatgaaatgggatgagtgttgggaatttattttaccaggatctt

SEQ ID NO: 345479 - DNA, 586 bp, Cannabis indica
ttggaaatgggggattttgatatcttgttggtaagggtttagtataatacacgattattaatttggcagagattcaatcactttgagtattacgtgatcctttccttcgaatattgttagttataattttatatgattgaaatttgatgatttgggttgcattgcatcaagttatttttttttttttttaaaaaaaaaaacaactatacatcttaaaaaataaaatagaaagtcatacacccacataaattgttgatcaattcgaagagactagggggtcgtttgtaacattgtattaggtagtattgtattgtattatattactgagaaaaaaaattcaaaatataaaaaaataacaatgtaacaacaatgacattaaacaatcattaatattatatcataatagaattattttttaagtaaatataatatttatacatgtattacaatttagaataaaattactaattctacataaataattttataaaatatatgtatatattttattaagatgtaattattcttatatagatttatacttttgttaatacgggacttagaaattgtataactaattacaatt

SEQ ID NO: 345480 - DNA, 928 bp, Cannabis indica
attaagggagtatgttagggattcataaaataagcaattgaaccgcagaagttcttttgagattaatgattgtaaagtcacattactgatgaaatattttgaatttcagttgtgaataaaataatcatttctttcaaacaagtaattataaagtgtaaaccctttaaaattacttgaggggcatatatgtatgattaaccggaattgatctagaaatacatagtactatgcaaacccatagtttcaaaaaaataaaatctttttaaaactttataaaagggcctcgaccaaaccttattgacggaagagaggtcaaactgttataactccctggccaaatctttttgacggaagaggggtcgaatcgttataacgccttgatcaaacctttctgacgagaaagggatcaaacaactgtaattttttatttataacctatctgacgagaaaggaaaatcttaagctacgactagcgcataaaacttaatgctaacggttcacgcgaagggaaagtattaaacgagacatccaaatgtcttgaaaagaatacttaaacccaacacgttggttgaaattttaactactcatgtaagcaataaaaatatatataagatgacaagctcattaaaaatatatttgaatgtgcttaaaatgagatcatttccgatgatcgcgagatagaattgatgatggctcgcagattgaggagcgggtagataagttcctggcacgtaaagtaggaaattaactacttaacgtcagaagaaaggacaatcaatggaaacccttaataaagtttatgcatgtgatagtttatattgtgaataaaacgcaagcaaacatccgcataataaagtttacacttaaaagtacgaggcattaaaaagcaaagttggtcgtccaaccttgcaaatttgtctttacaaaa

SEQ ID NO: 345481 - DNA, 625 bp, Cannabis indica
aatttgtctttacaaaaagtgccactaggggcaaaacaattgtctcaaccaaagggccattttctaagaaaatatataaaaagggagataaataaaccaagtctacatgctgggagacttggacagatcttcttcttcctcctcgaccttgccgtctccttcttccatcttggtcttctcgcaaagagctaaagtttcctcttccttctcctccaagaagtaggtatcaatgttagggttccagagtcaggcccgatatacggcacgaaaacaaactttattgcaccgttctatggtctcgatctctttctcaacaagtttttcagcaagcttctcctcatactcatcggcttggacttggatggtcttctcggcctcctccttcgtcttctcagcttcctcttttgccttcctggcttccttctttgctttctctacttcttcctttgccttctcggcttcttgcttgaggcaggtaatctcctattgggcgttgtgtcattgttcacacacaaccttgcattgggacactaatttttgagtctcgcctccaaatactcgtgccgctaagtgagttgttgatgggaagaaaaagaagcctggagaattgcaaacagatgagtat

SEQ ID NO: 345482 - DNA, 521 bp, Cannabis indica
tagatatttaaataattattatgctgttattattgaattctgaaatgcattttatgtcatttagtgattttcataattttgcatttccggtgcccggcaacatggaactcggtgtttggctcagtaaaatcacaacttagtatgttagtattgtgggacggttatttagacattgggaatgtcgggagtggtcgggaatttagaatttcccaacatacccctttagtgcccttttacgttattttagcattgaggggtaaaatggtcattttaccccatttatgttttgtccttttatggacttagtaattggaaattaaatatttattatgcttctttttggctgaaatagtgtttgaatatatgcttttaccctttattttattttaagttgagaaaagaagaaaaatcaaagaaaaggcaaaaccatttttcctctctagcctctctctctttcggcctccttgagcagcaagtttgtgaatttttcctttgtgattcaagctcattttgttcagatt

SEQ ID NO: 345483 - DNA, 999 bp, Cannabis indica
tgtaaagatagcaaattaacttcaatattttgaaaaatatcatatctaattctactttttctaactttaccacaatctaatgatcaatatgcttgcatgacttacctctctccactaatgtcaacaatccttgctcgaaattaaaggactttcaaggttgtaatgtatttgcttaagtaataggtagataaaaagttatttaggctatgttataccataagcacattataatccatcaatcacccacaataaattgcatatctcaaattgtacccaaaaattttaatgattgagaattttacaactattagttctaacatcactttatttattcaacacttttttcttttcttttttttgtctattttttttaatcatcattttttttcagaacataaataacatcagtgatgttgaaaaatacttttacaattcacaaattgtcttaatcacccactttaaataataattttatccacacacaattcatctcccctaaacttatttctaagcctatggtataattcaagggacaaagataaagaattgcaagtggattcaaagttagtatcataaagtggctaaaaataattgaacaggctaatctcaaacagacaaattagggataataaaaataaaggtaagcttgaaagacccaaacaagtattgtcaaggatttctcttaaaaaaataattcatgcaagttctatcctattcaataaatcttaccataaactaaagtaaaataattatgatacaatccaactattaataatttacatcaatacaaaatttttacaagcatccaaattaatttaaagagtaaaaaaaatcaagcacacgatttaaaatttcaatccattccacaaataacaactgcatcaaaatcgatattggcttaattaacaactaaaaaaaaataaagctaaataacgaaaaataaaattaattccttcccccaaacttaaaatttcatattgtccctaatgtgaaacaaaa

SEQ ID NO: 345484 - DNA, 998 bp, Cannabis indica
gtttattagtataacgtagtatagtatagtttagttttagttttttttttaatcaaagtatttattttagttttatactctttgataataacaaagagtatttcaatttttcagcactaccaccataggaatggaggctacgagaacacttcttcgaccttcctcatcctcccagccctctctgaggaattcatgggcaaggaggtcaggcaaggcagaatggtatttctcagtacatcccacaattaagacgtgagtatttaaaaaagaaaagttccacattgtttaaaaataacatattttactttattctcatctataaattcgttagtcacttataatttcctcacaaaaagaaattaactaatttaattagtttaaagaatattaatttaatttgtttaatgttcattctttaccacctcttgacaagaatataattgggtggatttgtgtattgctaaactttcttatctttaaaaaccatctggcacctattgcagttgataacaagagaagtattagaggagtgactccaccttctatctttaaaaaccatctggcacgtattgcagttgataacaagagaagtattagaggagtgactcattatgtacatgtaaggcattaaagttaccataacctctatcactgtaataattgcatgttaaaatatagattagtaaaggcaattaatattaattaatgataattttataattatttataattttattatgttgtgggtctcatttttagaaatgagcattagagttataatttcttaattttagagattttatcaaactctaaaagtattatttatattaaatatgaattatgtaatttttatgattttttttccgacgatgacaaaaaatgcaatggatggtcattagagtcacatagataaatttacaacatatttcttagcgggataaatatttgagatattatgaatagcgggattaaacaaaatattcatgatttatttatat

SEQ ID NO: 345485 - DNA, 1011 bp, Cannabis indica
aacttaccatatgattcacaagaatacctactagttagagacagagaaagaagacaaatcaaaccaccagagagatttggctttgctgattgcacagcttttgctcttgcatcagcagaagaaattgatactacagtccctagttcatatcaggaagctatcaactcaagaaatagaaggaaatggcttgctgcaattaatgaagaaatgagttctctacacaagaacaagacttggaaaactgtaacaagaccaccagggcagaaattgataggctgcaaatggatttttagggaaaaggaaggactaccaggtgaagaaatcagatttaaagctaggctagttgcaaagggattcaatcaaagagaaggtgttgatttcaatgacattttctctcctgtggttagacaaacatcaataaggataatgatgactaaagtggccaagtttaacctagaaatggaccaaatggatgtgaagacagcattcttacatgggaaacttgaagaacaaatatacatggaggaaccagatggattcaaaagtaacaaaccaaatcaggtttgtcttctacagaaatctctttatggtctcaaacaagctccaagacaatggaacttgagatttcatgaatttatgatgagcattgggtttaacagaagcaactatgatccatgtgtatattacaacaatgaaccaatctggttattgttgtatgtggatgacatactgataattggtgagaagagacaggccattgacaagttgaagcaaaatctaagtgctgaatttgaaatgaaggaccttggtgaagccaagagaatacttgggattgacatcaaaagaaccagacctgaaagactttcattatctcaaaagagttacattcagaaattgatagacaagttctgtatgaatgaggctaaatctgttagcactcctctggctcagcatttcaaattaactcaaaatcagtcacctaaaacagaggaggacaagatgtacatggat

SEQ ID NO: 345486 - DNA, 851 bp, Cannabis indica
aagaaatgtgactaaaaacacatttagtcattacaaattgtgatttttgtaactaatacttttagccacaaactttttagtcacaacgtgaaaataataagttatgattagtcataagttttttataagttttgttgtgactaaaagtaaaaagatttgtagtgttgatatataaatatatgtttatttactaatttttagacaattataattatattaggcatgtataattagaataatttaaaattatattttatcgtgtaatgatttataatttagctttcatgtttcttttttttgttttaatttttattttctttaatttaaaataattgataaaattttaaaattaaataatattaaattaaaaaagggaattacctcatatactatttttttttttaaaattaaaggtttggttttctaaaatggtttctccaatggtttctatatgggttgttatatgatttttggttgcgatttaggttgctctgctagttgcaataagaatttatatgtagaattccgtaaaaatacaaaaaaaaaaaaaactaattttgaagtgtaaaaataaaaaaaactccaataaaaaattacaaaatttaatcggcgcaaaataatgcgcaaggaaaaccttattatgtgacaactataagcgtaaaattgtattggaaaaattcaaatattaatatatcaaaagtaaaaattttccttttcctaatgcgttaatgtactggcaaaaataaaactcttcccaatgcgttagttttgttggtcagtttttcattttggggtcgacaaaagttctagtactgactattagaatatttctaattaaggaaataaaataa

SEQ ID NO: 345487 - DNA, 540 bp, Cannabis indica
agaagaagcacgataagtatgtgctagtgtatactttttatatcgaacttaatgaaacatgagagcatatttacctcgcacatgagcacaaggttgccttcagcaagcccaagcccatgaggcatgcgaggaacaaaagagatcctaacaggtattgtaaataccataaggacattagacacacaaccgacgaatgccgccagttgaaagatgagatagaaagtctcatactggaggccacttcaaacagtacgtgaagagatatggcaatggacacaactagcccggtttgcccaataacccaaataaccaggggttacaacctcttcctgctgaaggagaggacatcttggttatttcaaaagagatatgtgaaagagataaagaacggacgatcgacatttgctctagaaccttccaagaaggtaaaaactgaggaacctccaatcatattttcagaggaggatgagaagaacgtgagatatcctcacgtcgatccattggtgatcactattcaactcgccaataaaaggataaaga

SEQ ID NO: 345488 - DNA, 847 bp, Cannabis indica
agtatttcgatcctaatgttactattgtccatttgcctaatggatctactgctaaagtttcttgtcttggcactatacatcttttgcctaacctgtttcttcaccatgttctgtatgtaccaaactttcattgcaacttaatgtctataagtgctttgactgacacaggtgcttattcttttaatttcaaaactcgtcattgtattattcaggacgatttgaagaaacgggtgattgggatgggtgaaaagattgggagattgtattacttaaagtctactacaccagcctttaaatctaagcagcctgttactttttctgtattttctgattctaaaatttctagtgatactatatggcattatagatttggccattcttcttgtattaaatcacatcctttgaataaaaatttgcattttcatgccaatgattccttgaactttcattgttcgatttgccattatgctaaacaaaagaggcttccatttgtgtctcacaacaacatgtctgcacacttgtttgatttaatacatatagacatatggggaccttttaatacacttaccttagatggttgtaaatatttcatcacgattgttgatgactactctagatttacttgggttaggttcatcaaaaccaaagctgaagctcaaattgtgattcctcagttttttcagcttattaaaactcaatttggcatgcaaattaaaggtgttaggtcggataatgccaaggaacttcaattccctaatctgtttaactctcttggtgttgtgcactatcattcatgtgtgcaaaggcctgagcaaaattctgtagtggagaggaaacaccaacactt

SEQ ID NO: 345489 - DNA, 636 bp, Cannabis indica
aaataatttccaacattaacaaccctgctagtctctgatgtttagccttaatctgctgacaggttaagcatctcgatacgaattttaccatattcttcttcattacgctccaaaggtttaagatcttgatacatcttggtggtaccgagatgtagggaatatggagtggtatgagcttcctcgagaattttgtttctaaattccacactatttggaacacaaaccctgactttaaacaataacatcccactgtctgacacggtaaaatctttggcttgaccagctgaaatctcttctctaatttatactaactctggatcagtcatctgagcgactttaattcgttctaacagatcagattctagcgtcaagttatgaaacttgcctacaacaaactcgatgctagatctgaccatgtcctctgctaactgagatgaaatttcaatcatactagctacctgcccgtgaccctttctgctcaaggcatccaccactacgttggccttcccaggatgataaaggatctcacaatcgtaatccttgactaactccaaccgacgcctctgtctcatattcaaatctttctaagtaaagaaatatttgaaacttttacggtcggtataaatttcacatttt

SEQ ID NO: 345490 - DNA, 798 bp, Cannabis indica
tgttaggaagcatgttagtagcctgatagtagattaggcgcatgtttttaattttcaaataggcggcattagtaagttctcgttgatcatgatctgaccatgctagctcttggttacgcaggttgttcagactagatggaggctaggcgaaataccaggagtcagggcaacttggtcggatcaaatgaaggtcagggagcacagtttcccccaaatgctcgtggctgaggtagaggtcccaggggcagggcacgtggtcggggtgatgttaacccaccacaggctgcccaagcaaatcaggaagctcagaattgggaaaagaggtttgcagaaattcaagccacaatcgaggaacaagataatgaaatccagggattgagatagcagggtgctcctgcaatgcctggtcccagaattccagtggcacctgcccctgctgtcctggccgaactggtggttgtaatgaattggatggaacctctgtatgaaaggttccgtaagcaagcacctctgatttttttgggaggtccagatgctatgaaagccgagcagtggttaactgtgatcactaggatattgaatttcatggccgtcaccggaaatgatagggtggtctgtgccacttttcaatttcaacaagatgctttagtttggtgggacatggtgtcatgagacacgacgttactataatgacctgggaaaagttccaggagcttttgaatgcgaagtataatttgtcaagaagaaagtgttgggttttatggcctaaataaaactctttacaatctgattagttat

SEQ ID NO: 345491 - DNA, 753 bp, Cannabis indica
tttctctgttgataaaacccactgtacctacgatttcgaccttgattaaacccaaagttgttgttcttttgagagtaatttccaatggcttttgcttcatccatttgaaaattattcacatcttccagacattctgaatagggatgatgtcctccacatagctcacagatcacttgagcttgtttcactggaacatacatcagttttgttagggcctctacctgagctgtgaacttggtgatagcatcaacctcaatcatcccaacaaatcataggcctcatttgcactttttctcataaatgctccaccagctgctacatctataagggttcttatgttaccaaccagcccgttgtagaagttgtagaaccagcatccaattctgaatacaatgatgagggcactttctgatgagatccttgaatctctcccaagactcatggagcaactcattctcttgctgacaaaaaattgttaaatttctcctcgtagcttagtagactttgctggaggaaagaacttagacagaaattttgtagccaaatcattccatgttgctatggaatttggtggcaaggagattaaccaactcttggctctttctctaagtgagaatggaaacagtctcaaacgaatggcatcatcactaactccattgactttaaaagtctcacaaagttccatgaagttcgagagatgcagattaggatcttcagaagggaggccaccaaactgaactgaagactgcacca

SEQ ID NO: 345492 - DNA, 377 bp, Cannabis indica
gtagatctaagatcctggtacaataaattctaacagcaagtccattacgccaccggtctcaattgttcctccagggtgaacctacaacatgtaaggtccacatgtgtcaacgttcaaatagtgagatttttcaaaatgcaatgctaagtcctcctccatttctggtgctagggtctttgtccacttgtcagctttttcttttcgcgtagcaaaccactgttggactttggacctcaggaatgctacattagcagtgatcgtaaagcctcttgcatccttagttgtgttgttgaagctctcaacccagttacttgtcattacattgtaacgtacccctggaaagtacgaccgaacccatttttcaaatccaatttcct

SEQ ID NO: 345493 - DNA, 700 bp, Cannabis indica
tttttaaaaaaacaggtcgtgtcgtggcgtgtaaaaaaaaaacatatagattgtaccgtgttatgttaatattttcggaataagttgagtaataccattttttttgtatccattaatcaaaaatattctcatattatatttttgtgagtaggttgccaaatatacactcactctctacttaagtctagcacataatttaagttaacttaggggtataataggaacatcatctataaaagtgtgtatatcttaaagaatatagaaataaacgtaaatattaaaacaaatatggtaaaataggtatacaatgtaatttcctcaatatttttaaagggtaggctcactattttcgtactgtgctcggattcgtgtcgtcctttgctcgtgtcggtccgtattttttaaacaggtcagcctattttcatatccagggtaaaatttgtgctttacattttcattttctttttacaattactaaaggaaaatttcattatttgcccttaataatataacccatatcaaaatttataccctccattaatttgtacaaatttagtccattgattacatgaacttcccatttccccttttttaaaaaaaaaactaaaattgttaaaaactgaaataagatctttctctctctcttccctctatctcgtgcaccactctctctctagaaaaaactgaaaaaaaacttccc

SEQ ID NO: 345494 - DNA, 555 bp, Cannabis indica
ataaagaaaaatgaaaaaagggaaaaacagtgaataaatacattgataggcaattaaaaaatacaagtacgctgaacaatggacattgtttgtatatagttgtataatagtttctatatagttttgcgactagatataaaaacctgtacaattagaaaaacgtaaaacttctgctgatacaaacatacagaagaaacatattataaggattaatgtcaaatatcctaaaagtttaaaaccagatccagagtataaaaccaaatataatacctagaaacataaaatcactaacaattgtttgctaatagattcaaccaataacaccaaattgtcactaaattaaaagaccctactttttcaatttagaagccttagaagaaaagggcagcaagtcaagtacgataaacttcgatgtcaaaatctgcaagaacatcttttccatggatgaagaactcggcaaatgcagccacaaatgctccgcaatcactaaaaaacagaaaaagaaaaaacagttaagcaactaaaaaacaacataaaataaacttaaaagaaaca

SEQ ID NO: 345495 - DNA, 679 bp, Cannabis indica
aattacggataaacgagctggaggacaagttcaggagatatcaagtgggggaactagggagacagtctacatacgactcagatgaggagcttgagccgtatcatccagatatcatgagtaccccttttccttcgggatttaaaaacccccatgtcttgttgtatgatggaactactgatcttgtctcgcatttaaacaactttaatacaataacgagagcgagtaatgtgacaaacaatttatgctgtattttgttccccacctcacttgttggagcagcaagcaactggtttaacaagtttagtcaccattcaataacttcctgggagcagctgtctaaggatttcaagaaacagtaacaggctgctagggatagatgacccaaagcagccttgctaaccaatataaagcagcagcccggtgagacacttaaggcatacttaagtcgttttagcatggttgcggctagggttaggaatttggatgatagtacacaacttacagcccttcaggcggggatctctactgatccatcaaccacagggggtgagttgtgggatgacttacaaggttgtccaggaagaaacataactaagttcaatgaaagggcttaggtattcattcggaaagaagaagcccgaaaggaaatgaatttgttgaaaataagctcgggaagcaa

SEQ ID NO: 345496 - DNA, 575 bp, Cannabis indica
ttaaagtagaataaaaaaaattcaaaaaaataagagaattaaggagaaattgatagaagtatttgaaagaaaaaaaatctagaaacttataatattttcaaatttaaattcaaataaaatttatataatgaattttattgttataaatattttcaatttagttttaatacattttgcaaaacaaattcatgatcacagcaaattaatttgaatatttaagtttgaaattattaatttgttcaaaaaaatttgtgaaggattggtacataatttagttatggatattttgatgtataaagctactctagtgaaatttataataagtttataataaatttattgtttctattatttaaaataataaataagatgtttacataaatcttgttaaatttaatatgaaaaaattcagctaatttaaaaatgtttgtcaggaattaattgtcaacgttgtttatacgctcgtcttagtacattcaagggcattgaggatttgaaattccaatactaaacacatattctatgttatgttatggagtgcttctttatattttacctatttgataaaattgttt

SEQ ID NO: 345497 - DNA, 620 bp, Cannabis indica
ttgaataaaatagattacattgaaattgagttttatttagggcataaaatctaacattctcttccatagagcgtcgagcatctgccaagacatgtctgtacagaacgaaaataacatggttagaaaacagacatcgaaaatataaggcatgaaagtcaagaagctcataaacaagatgaagtaatatgcaaggtgactgcccgaacaagactcagaagtccatcatcacctgacaccggtcttgtttcagacataacagctttcctcttctggacacgagaggggatggccgaacaggtgaaatgggctcccttatgcgaatctcatgttcaacaagcctgggcggggccggtagtttcttcttccttttcaatggagtcacctgctcttcctctgcctcatctttaggattcaagggctcctgagcatactggttggcccttgcaccacccttcaacttagtctcgcactttagttgaatcgactcatcctctcaatgagctcgttcggttcggccagcaccagatttcctcttcttccccatcacagacttaggagtaaagtccttgggatagagcccatacctcacaagattatcctcagaggtcaactggataata

SEQ ID NO: 345498 - DNA, 802 bp, Cannabis indica
ttctttctttttaattcttcctttttcaacaacaaacaagcataattaattggaaaaacacacccaacaatatcaatatttacaatacttaaaagttagcttactaaatagaaaataacactaaaactaactaaaattaagcaaacaaacacattttcactgctcttctcacaatacttttagtttaaaagcataaaaataactctataccatagagttatcactagccttgtacatcctaccaactagagaagcctcattcgttaacaatcgccatccttgttttgcaagaaaggataagttgtagtgacggagatctcggaagccaagaccaccaacatggttgtgtttagtcaacctcttccaactcatccaactcacacctttgctagaagaattagattgggacttccaccaaaacttaggcattagtccttctaaatccgaacaaatttccttagtaagtaagaagacactcatagcataactaggcagtgcttgagcaacagaacgaatcaagttctttgccagctttagataaaaaccgtctctccaaattaaaaatcctcttcttcattttgtctttgagaaagctaagaattccatgttagaattattattgtggactaatataatcataagcttaataccataaacacaatcattaactatgtgcctaatatttgtttataaccataatgggatggttgataaattaattatgtattagaggcacatgagagcaccttttatattataattggcccattaaattatagtataccataaaaggaccacttaa

SEQ ID NO: 345499 - DNA, 509 bp, Cannabis indica
ttctctcatcattttatttttaactcattccaatttccaccatattctatttatactaatctttagtggtaatttgcctccctgtggatacgacatagtctgtttagtaccgtgacctcagtgtaactaattgggcgacatcaaatagcatttgcaaccacatcttccactgtctactttttatttcgccgagtccgctcatttcgcaccgtccaaatcgcctaacacaccacaaacacacaactcaacatatcgccattaaaaaaatttactacctcttccaaccaatccaaaattgaccccacatcccttcctacctctccacacctacccttttgcaacactcctaagcaaaatcacaagagataagacaatgaacgtcagattttgcaaacatctcataaatagaataaactacttgtaaagggacatattttgtactcatactcaccctcaatggaaggcgacccccaccaccttctacacaaactccttaaccttcgatggta

SEQ ID NO: 345500 - DNA, 1082 bp, Cannabis indica
ttttgatattggatgttccatcagcctttaatgtcatgttaggccgagcagccttatatgacctaaaggttgttacgtcgatatttcattcgtgccttaagtttccaacaaagaatggggacgggtgcctaagaggaaatcaacaagttgcacaggaatattataaccctgccctgactaaggctgaaaaggaagtatcatctagtcagagttcgggaaagggaaaagaaattgccaaataaggaactgcccaaggcagggatgaagatgtggatccctgacttggggaaccaaatataaatgttggtccagtggaagaactagaagaaatcaaaatcgacctaaatgttccaaccaggaagctcaaaattgaaaaaggtttgctgctcgaagtaaaatcagcattgataaaatttctaagagcaaacctagatattttcgcatggtcaaacgaggacatggtcggaatcaatccttctataatctctaatttccggcctattaaaaaaaaagaagattgttggatgaggaacgagccctagcactaaaagaagaggtagaaaagttgcgcaacaacaatttcataattgaagctttctatctggcctgggtggctaatctcgtacaagtacccaagccgaacaaaaagtggcgagtatgtatcgacttcaccgacctcaacaaggcgtgcctaaaggactgctttccacttccacgcatagatcaacttgtggatgcaatagcaagacacgagctattaagcttcatggacacctattcggggtacaatcaaatcaaggtgcatccaccagaccaagaacataaaagtttccgaacaaatatgggtctgtactgttataaggtcatgccatttggtgtcaagaatgccagagctacataccaaatattggtaaataaaatgctcagagaccagatcagacaaaatatggaagtgtatgtggatgacatgctcgtcaaatccaggaagactggggccatatagatgacctggacaaatgcttcaaagtcctcagaaaatataacatgaaactcaattgtctaaagtgctccttcagagtcag

SEQ ID NO: 345501 - DNA, 988 bp, Cannabis indica
gtttcatggcatggctggacagccagctaaaatgatcttgagttagaccgtgctcgcggaactcccttctcaccagagatcaatctcctgccactgcctcacaagttcaaaatgccaacatggaagatgtatactgggagagaagatcctctttcccatctcaagtactttgagatgcaaatggatttacaaggagtacgaggggacgtatgctgcagaatcttccccgccactctgtcggaagccgcacagcaatggtatttcaagttggctcctggaaagtttagttcatggaaaaccttttcttcggaattccatgcacaattctcttcctcacgtcagctcccattgcatctgggagatttggtcgaagtaaagcaacgaccaggcgagccactccgggcatacatcagcagattcatgacggaagcgaccaaagtctcgcgggtaaccgaggatggaaagttatccgcgatactggggggcattgaagtccttggtgaactatggaaggatataaggaagaacgggccggttgactcaatgagtgatttccttgaccgagccgaaggcttcatcaagctcgaagaagccattcaacgagcagaaggtgagcaaaagccaggcaaaacgaaggctccttcggctggaacatccgcccaactgtccaactattccaataattcaagtggcaagcgctcaagcaacaaccacaagcaaggaaacgggaagaaaggaaagttcactgacaaatccggacaaactccccgtgatcatgccaaacacactgcattcactattctaactgaagatatagagagtgtgtatatggcaactcagtcgttaattccgtacagaaagcctgggcccatgaagaaagataccaataaaagggacatgacaaaattttgtcggttccacggagactacggccacaataccaacgaatgttacaatctgaagcaggaaatagaatttctgatcaaga

SEQ ID NO: 345502 - DNA, 512 bp, Cannabis indica
gtagcgtgccttagcattagggcgttacataaacaataataacattattgtttaactaaaaattaataatgttagtattgttaatcactacttcaaaatgggtctttagcttcccttttttcaacccactttataaaaagggaagttaaaaggtgtaaaaatacccgcttattgaaaattgacttttagaggcggtttttttataaaaactgtaggtatagaattgcattataccatttggagtcggttggaaattaaaagatattgggttttatgaagtaaccctatggcgtcggttcttatataggaaccgatgacatagagtacacgcttatttgacatgtgtaccatatgccgtcagttcttacataagaactaacgccatagggtcgccaaaaataaccctatctatatagcatcgtcttcttcctcacaacccagcagaacccagcgaacccagaaatcagagaaccccaaaccctcgccaaccaccacctctgccaccccctttc

SEQ ID NO: 345503 - DNA, 500 bp, Cannabis indica
aattattttaaaaatatatttttaaagtgaaatatttttaaaataagtgatagcattgtgataaataaaaattatgtattaaagattttaactaatgattaatggataaagtttagtgttaaataaaatatataaaaaaataatttgcagcataaatattttaaaattaaatttttagattatagataaatacttaaatttaaatttttgacactaataatatataagaacggaacacttcttaatgggtaatacccattgatgggaactaaaaaaaattaataaggtaataatctaataaccttttatggcaagtttctaacaattatttttttaaaaaaaaaattatatttattatttataaaattggaaataataattacaactaataatttgaaaaaaaaatataaattatttttaaaaattaattaaaattactattttattattttatgaaattatgagtttattaataatttattattgtaaaactaaaaatc

SEQ ID NO: 345504 - DNA, 1196 bp, Cannabis indica
aaaaataataaatttaataattatttatttttattataattagtttattttaaatatttttattttttaatatataataaataagtaaatatagttttagtaaaaaaaaaatattttagtcttttaatcaaaaccgttttttctaaaagttgggttggagcagctttagcttttagctgtagcttctccgaaaattcttcaaaatgctattttttaactacttatcaaacacatttttatcacagcgtttttgaaaagcagtttttagatttttcaaaagttgtgccaaacggacccttagtagataattagaatttaattttagaattggacttttaattattattttcataattatggagatttatttaaattttaggtgttaacgcatatttttcgttaaccaataataagcctttttcgtaataaatttaacacaaaaattataagaaattaataaagtataacaagtataataataacaccatatatttttacgtgattttgcagttaaatctgcatactccacgagcctatcttattcaagatatttctgagtatctgatacaattgatagtatttctcccaaagattcttccgtcccatttttctgtgggatctgtccctatttatagaaatataggttaacagttttttacatttaaattctacatacataaccgtttcatgaaacgtgggaattgatcacgtttcatttaaacacacgtggataacaattgataaccgcataactgcttctcattcttatcatcaaagatggtagatgttgatttggacaatatcatctcgcttaacttgtaaaaggtcaatggtgatttggacaatcatatgccttccagcaacgacatgagcaccagtttactgagcaaacttaagaactgctatttgaaggcctcgcagactggacaatcgtgtcctgcatatttctaagttgttacacttagttattgtaatgtggaaaatacggtatgtgtttaacaactgattcatctcgtcaatatttcttatgaatagcaaggtgaatgcttcgctatatattgtcggaggttgccttgagtaatttcacttattctttttaaaataaacgaatcttgtccttggatatgtgtattttaaggtaggttggtgtctcgtcaatataggtattaatagttttgtatccttatctcgcttaa

SEQ ID NO: 345505 - DNA, 997 bp, Cannabis indica
gatcgacctttgagtatttgaagtggatgggattctagttccaggtgtggtgtgctcggctgtcgtactatttccagtctcttgcacacctagagtgaacccagctagaggaaaagtcactctatggcctgttgttggtggttgagtattaacttgtctgagggctgtccctggtggatcccttgcatttccgggtgtctggacgtggatctgtcaccattggatcgactgtattactttgattcccccttcgtgttacaaccatcctgtgtctgtaaaagacttaagacaaaaaatttgggtgtccttgctctccgtgaaagcaccaaaatatttacctcacttttagccaacgacaatgagtcttaattaaagcaataagaataaagaaacaatagaaagcaaagagtaataagtaaagaaaatactagaatttatagaagtttgaccccgtgatactggtaatagcctactcccctttttgttggattgacttgtgagtagagaaacaagaagaccttgatttctctcgaaagcttttacaaagatctctgattaattcactcttagatcgaaatttctctcttgagtattttctttctaaattaattcatgtccttgaatagtgagatgagaccactatttataggagctaattacataggattggtttcccttaaatctataagaaataaactaggaaactagcatgtttccataattacaataaagaaattgggaaatataggcttattgccttcattccctaaatatacgagctaatcccacaaatgtagggattatcttcgtgacatgcaagcttggaaactacgatgtctatttatgaaattaccaactcgcaccccctggtcggtgtatgcgagttaatcacgcgatcgtgctagttagatgtccatcaacgactttactcgggcatcctgctatgtacgtatgactttgagcttcatatcaacctgtgtggcctgctaggcataga

SEQ ID NO: 345506 - DNA, 592 bp, Cannabis indica
agcaagagccagagaagaagcgagagcaagagcagcaacaaaatcccaaagcaccaacatggaaactccatgttgacagaagctgcactgactaattatctggtgcaggcattacccttaaaacacctaggggcagcaactgcacggagcaatcaaattcggcttcaaagcctcgaataatgaggctaaatacaaacccttgatagccagccttaagctggcacatgaagtatgggctaaccacctggacatattcagcaattctcaattagttgtgaatcaattcctagatgaatatacagcttgaggtgaaaaaatgatggcctacttgagcaaaatcaaagacttgctaagttagctcaaaggctacataactaggcagatccctagagagcagaatggtatagcagatgcacttgcctgtttggtaagcaacaccattgctgacaaagcaaagttggtgcccatacagttcctagaggaaccaagcattgttatcccagaagaagtcgacatgttggatgacactccaacatggatgacacctatcatagcttacctccaaactggagccttgccagaagcaaaaaat

SEQ ID NO: 345507 - DNA, 1416 bp, Cannabis indica
ggtaaaatatttccaacattattctcctgtgctgcccttccagcgattgcctcgcgttccaactcagtgttcttccagtttgcctcctccaagcggcgtctgagttggcggtttttctactcgacaatcgcaaagtatcttgttggatcgtaggctccatcctcaccaactggattgggatgggttcttccaatattcatttcaggttttccataccttgttcccaaattctgggttctccttgaatgtgtggtccatgtacttgggtcaccctcaggttgggtcctccttgaacgagtggtcagcgtacttgggctaacgtcaggttgagttctcctggaatgagtggtccgccgtgaatcgggaggcctccgtgagcccattggttcttttccaagacggtgagtagtttcttcatgaggagtgtcgacgttttctctgttgccagccatggagaaagttgttcttttatacgtatataaggagggtttttttgagcttttttcaccaaggctctcaatgaaagcaccaaactgttaacgtagatttgcgttaactatatttaagccttaatcgtgatgaacttgcatagaaaataaaagcaataaagaaaaagtatgaatacaaaggttttttacgtggttttgcaattaaaattctgcgtagtccacgattcaatctaattagatttttgatacaagtcttaggactttttctctaatgaattttttgtcccttttttcagtataacctgctcctatttataattacatacgagggcaattaattacatatttgactaatattttccaacaataatcccctgaatcgtgggattggattacatcccacgtaaaataaatgtggttaatatttgaaaatcacacatctgtaattggtctgcttttaccggctcaaagtaaacgtgtattaaatacgttgtaacacatattgttctgagaggtctcgctgggaacatagcaacaataaccctggtagcgagctagaacttttcccatgtctttccgaggctgataatgtaaacctcatcgtttctgcgcttgaagacataacactccatttgacaatcacagttcttggttacaaggtgaacttcagcagtcaacatcatttgaatgtcagcttctatttgagagagctgactcgacggagctgtggatctcattgaaagatgtctcgagctgattagtgaaggtaccgtgagcgcaccttcctatagcgagatgaatgccttgattagttgtttggatttactcgactgttatacttagtttgtataatgtgtattatacgctaagtttcttaacagtcatcatgtctcgtctatgtctcttcatgcgtagcgaggttgatgcctcgccttgcactactagtgtcgtatggtttctcgttaat

SEQ ID NO: 345508 - DNA, 1003 bp, Cannabis indica
ggggaattagggaaatcatctggatacgactctgatgaggagcttgaaccgtatcacccagatattatgaataccggttttccttcgggattaaaaaacctgcatgtctcgtcctatgatggaaccacagatccggtctcacatttgaatagttttaatacgataatgcgagcgagtaacgtgatgaacaatttacgttatattttgttccccacctcgcttgttggagcagtgagtagctggtttaacaagttcacttgtcattcaataatttcttgggagcagttgtccagggatttcaagaagcaatttcaagccgctagggataggtgacctgaagcgacctcgctaaccaatataaagcagcagccagacgaaacacttaaggcgtacttaagtcgctttagcacggctgccgctagggttagaaacttagatgatagcacgcaacttatatcccttcaagcgaggatctccactgatccactgccgggggcaagttgtgggatgatctacaaggacgtccggtaagaaacatcaccgagttcaatgagagagctcaggtgtttgtccggaaggaagaagcccgaaaggaaatgaacttgttgaaaataagctcgggaggtaaacccaacaatgtttcaacagggactgcttccgcgagaattaataactcgagggtttcttgtccgaaaagaaaggatagaattagggaatcgtcaaagaatagaaagaaacagaagaagcatgaaaaatacgtgccaatgtatactatttataccgagcttaatgaaactcgagaaaatatttatctcacacatgagcagaaggtagccttcggtaaacccgagcctatgaggaatttgaggagcaaaagagatcctaataaatattataaatttcattaagatattgggcataaaaccgacgaatgtcgccaattgaaagatgagatagagagtctcatcactcaaggccattttaagcagtatgtgagaagaca

SEQ ID NO: 345509 - DNA, 543 bp, Cannabis indica
ctcatattttctttctgggtaaggtgggtaaatttttttctttggcacttctgacggcctcattttagtacttggcattgaaaagtggcacagaccatgtcccaccaccctaaagcatcttcttggaactgaaaagtggcacagaccaccctatcattcccggtgacgcccatgaaattcaatatcttagtggtcactgttagccactgctcggctttcaaaacatccgaacctcccaaaaaaatcggaggtgcctgcttacaaaacctttcatacagaggttccatccgattcactacaactataggttcagcctggataacaggggcagtcgccactggaatttctagaacaggcactgcaggagcaccctgctgtcttaatcgctggatttcattatcttgttcctcaattctggcttgcatttctgcaaacctgttttcccaattctgggctttcttagtagcttgagcagcctgtggcaggttagcatcaccccggccacgtgccagcccctgggacctcttgttggaaattatttta

SEQ ID NO: 345510 - DNA, 1280 bp, Cannabis indica
catggaattccgaagagaaggttttcaatgaactaaacttcccaggagccaacttgaaataccattgttgtgcggcctccgacagagtagcggggaagattctgcaacatacgtctcctcgtacaccttgtaaatccttttgcatctcaaaatacttgagatgggagagaggatcttctctcctagtgtacatattccacgttggcatcttgaacttgtgaggtagtggcaggagattgatctctggtgagaagggagttccgtgtgcacggtccaactcaagatcattgttacgctgcccgaccattccatgaaacatattctttagttcgtcgagctaggcctgtacagctcggctgacttgattggcattctggtggggttggactgcgtcagcgtctttctgagcggggatttgagtatgggctccgcactgcacgttggtggtagtattttgctcgtctgttccccttcttctatttaggtcatcccttaggtcatgggtttttccaaacctatcgaacacagaagaacttggctgccttagcgattggttagcttagttcgcaggtggaatggctccattattttgcatggatccgtcgagcatgactcctcctgatgaattctcggacaaggtttgtccgcctacctcttggcccacgagtggaactcatggctagggattggacggctgaccgttggttgtctgggaagcattcacggttgggtcatcctcggtttctcctaggggaatgacgctcggcatttgctggcctacagtctgataggtgcttcgtatcagcacaatggcttgccgactacgatcttcgatttctgaatggtgagacccttaatgcctccatctctttgtccctccattcggcgaacatacgcctctgttcgtcgaatgcgaggtttactgcggcacgtaattcctcctgatcgtgatgcagggtattgttgtgaccctgcatgagtccaagcgcatcgcggaggttttgcaattcggtcgcgtctccgatggtcgtctgggcgttgatgcctggtggaacagtcatgttatgaacgtcctggctgtgtgcggaaccattgtttccggtctcttgcacaccaggcgcagtttcagtaacagttgttgtcccaccattcaccacgtttcccgtctgtccaggattgacagcgggtggaaccctcaaacttcctgggtcctgcaacgtcatatgcagcgtctgtgagtttcctgggtcggacaggcctttacgagtttgcaccatcgt

SEQ ID NO: 345511 - DNA, 720 bp, Cannabis indica
gatcctggtaaaataatttcctttactaattcccacactcgctaagaagtagacaggtacaagagatatatttttcagggatctctcattctctataggagaatttttataagtatgagaattgaagatatagtttacttttttttatgacataaataaataatgcaaaaaatatgagattaaaaaataattaaagtttaaaatatgaaaaataaataataaataaatttaataaaacttgtaataataagttccgccggaaaagtcaccaaaattagaaaagtcaccggaaaagttagtgtcgcccgaaaagtcgcaggagaagtcatcgttgccaaaaaattcaccgcctccagaaaagtcaccgtcgctagaaaagtgactggaaaagtcaccagaagtagatgtctcagatataactaaaaatagaaccggttctaaacaaataactcaaatcggttataattgaaatataactggttctgtaccataataaataaaaacaaataacacaaaataagtcaaaataactcaaaccaattattattaaaatagaaccaggtctataattataatgaataaaaataaataacacgaaataactcaaaccggttataactaaaatagaaccggttgtataacataatgaacacaaacaagtaacacgcaataactcaaaccgatacaattaaaaaacaaagaggaaatcagttcctaaaa

SEQ ID NO: 345512 - DNA, 556 bp, Cannabis indica
tcttgattaatcttcctttgttatttttaattttctgaattgtcttatttaattcataaaaagtattattttaccagatagaatcataagtataatttagtagtaattagtccaattccctgtggttcgacctcacctgtgtgagtttactacttgattgcgtatacttgcgtagtgatcataattttcgtaacaagtttttggcgccgttgccggggaattgtataaagattaatattacccaaaattatactaacttctactttggtttatttttcttgctaattactaatctttttcttgcaatattttctttatctatttcaggaatcctagtgtatgcgccgtcaaggacaagcagtcatattaccagttgatcctgaaatcgagaaaacttgtaggagaaaccgaaagaacaagaggcaagaaggagtttcagcaactgctgaaacttcagaaatcatggctgctaatgtgaatgctaatgctgcaaacaatggaggtaataacggtaataatggtggcgccgtggaagatcaagctaatggccgtagct

SEQ ID NO: 345513 - DNA, 770 bp, Cannabis indica
aattttcaaaattttcagtttatttaaatgatttaaattaattaaatatctaataagataagataatatgatatcttaattttaaatttagatatttctaatcttataatttaataaatcaaatataacaaaaataaatcatttaaaaataagatatttgatgtttaagatattatcaattttatttaattattcaataaaacaaaatatcctaagttttaaaattttatggttaccaaacactaaaatttctattgaaaccaaaattaacaaacttttcaaaatttcatgttatttttccgaaagtgatattataattaaattaaatatctaataagataaaatgtcaaaactaacatttttctaatcttataatttaatttgataaaatatatttcaaaaataacaaattttgaaaatctgatatggttagaaatttgaaactttaactagattatttataaattttattaatattttaatatcaaaataagatcatttaaaatttaataataaaataataagtaatatctgatcttgtaattaaaataaataaaataaacaaaaataatcaaaactttcaaaaataaatcataaggctagtttgtgaaaaatcaaaatttcaaattcaaagggtactaatatctaaaaataatttaaattaattaaaaaattaacaaaaattaattttattctgataattagattttatttgaaaattcagattctacacaaaattctaccaaaatttaaattttgtttcaatgaaa

SEQ ID NO: 345514 - DNA, 452 bp, Cannabis indica
acgaacatcacacacaagaggtagtggcactaaagattttttcctcctatcctctaagtcattaaggacattacaaccacgtttcctctttcttgaagaatcaaaaagctcattttcagcttcagaagcttcagtggcaaattcacactcggtgagaatcctagtaggatctggtgggtcctcactgttaggctaaaattagtctaagtttcgggtcaaatttttggttagttttcactctttgtttctagttttagggctattttacgcttgattcttttgcttcaggtcctcgggtgtttaaagaaagtatttacaagaattgaggagaagtggtgaaagaattgagaagaaaaatacacaagacattttgctgcctaatcctgtcgcgacgggacaatactgttgggttttatgccctaaataaagtctatttcaatgtaatccagatt

SEQ ID NO: 345515 - DNA, 991 bp, Cannabis indica
taaccgagcttccaataagtctgtaaggccctgactctcaggaaagccacgtgtgtgcttttacaatcttattatcaataatctactagcttaggaaaagtgtggtttaaataaagtttgataatttataatttttttttaaaaaaatactattaaagtatggggatcccttgtttataaaatttccttataacaaatttcaaaaccattattaccaaaataaagttacatttccaaacacaaagaaagaaatcgatcctgcttcccggaagccaagacaccacggctgatatgtacattactgggagacctctgactcatggccaaacacagctcctaatctccttacctgcaccatgaagcactcgtgagtcacaatgactcagcaagaaaagctactaattagacattatggaaagtgcaggcagatttcataataatataatatacataccggtaggtcttacatatgtcaatctacatatacaaaaatagcataacgcttatgtaagcacacttaatacataataaagaatatttatagctattcataatcaaccatctcagtggttcataaagtaccctaatcatacatcattataaacactcactttcagtacttcataaatcactctaactcatatattacagtaaccacataatctcagtgcttcataaagcactcaaacacataatcttagtgcttcatatagcactcaattcttacatccctacaacatgtatttttaccccccgtcagttacagagactaatttcataagtaatataacgttcattcaatcataccataacacaatatatttagttacaactcatcacataataacacgcttgatcgttccacaacttcataaccacataatttaggtacttcataaagtacccctaccactcgttaaccacgagctgtatatgtcactatcgttgtccgatacaacaaacgataagtaagaaacctatccgcggtttc

SEQ ID NO: 345516 - DNA, 687 bp, Cannabis indica
taaaatatgaaatgaccattaatacctaatcaattgtttttttttcttattttacattttgtgcattgaagcacaattgtaaatagtgagctaaatatagcacaaatttattttttgtgccaaatttagcacaaattttaaatcttgcattggagatggtcttaggggggcaaaaagaatatttttttcaaataggatatgaataaaaaatattaattttgttggataaaaatttataaattttatagagataaaaaaaaatatgtattagaatataaatgaaaaatatacataataaacatgaaaaaatatgtgataaaataaaaagtgtaactttaacaaaaatacagaaaagttaattttatgaggataaaatttaaaattattataaaagttatatacaattacaatttaaaaaaatttgagtagggtcatctgcaccgacgtatactttcacaaactaaacaataagttccatttatataaatactaaatagatatccattatgaatgaaaacgatatcttttctctagagttttttattcttcttttcaattcatatcacattaattggtctttcaccccaataaaaaagaataaaataaattacataaagtactaattttaagtactaattttagtataaattttttactaacttttactaattatttatttatttattt

SEQ ID NO: 345517 - DNA, 861 bp, Cannabis indica
gatcatcaatggcaattggcttctctttgaaaccgactgtctttttagttgtgcaagctccgcgaggtcacttttttttatgtattttctttattttggacatgtaattaatgattgcaagcgttggcttgctttattgaaaatatttctgtgatttttgtaaacgatcagctaatatggtggctcataattttgctagagctgctatattataccctgattgttattttagtttggagtttattccaactgatttgctaccttacttagtagttgaagttaatggttaataaagatgaattttccattaaaaaagaacaaattctcatatccagccagtgtaaaaaacaaagaaacaaattttcgttcaaagaaatttcatgatcgttcaaatatatatataaatatatatatatatataatatatatatataaatatatctcttatgacagatctagaaactttaagctactataccattaccaatatatatgtacagaatatgtatatatacaagaaaaaattcacatgcatgcatgcatgagttattaacgtaaatctacgtacgtacgtgtattttaaaacacaaatccacgtgtaaggtatatcgtatgcatataagtaatataatacgtattatatatttatatatattagattgatgttacgtgtaatgcgcgtataataagttttttttaattaaataatattaaatgtaatatttaattttttttaattaaataatgtactttctttaattattaaaataaaatttgagattttaatttttaagatttttattaactattacggtaacattagtgtatatatgcttgcaaggcacattttttttttacttg

SEQ ID NO: 345518 - DNA, 613 bp, Cannabis indica
ctcttgattctctacaactttcctttgaaaagtttatctcttcctcttcttctctctctctctgtttctctgcaactattatgtacagttgagaaatgacgaacacaacaaataggaacacacattagatcaatgataagagaaggcttaccacggcggccaccaccaccgagttcataacggcgctcaagctcctccaccgccaccttatctttctctgaatcatattctcgacatgcacacctccaccaggtatgtttattgatttcaaaatctctaatttttttaccattttttctctccatttgtacataaaaatgtaaaaccctaatttttttttatttgtatttctcaatatttttttttttcaaatttctaatttctttacctctttttctttctatctgtatatataaatgtgacatatgatgaaatttatctgcctttacacattttgatttaagttttttatttttcaatttcttggactgatgcatgtttgataagtttgcccttaaaagaaaaagctaaaaaaaaatatagataatttttggattttttttttaaaaaaaacaaaaaatatactaataaaaaaaaaagaattaccacatat

SEQ ID NO: 345519 - DNA, 665 bp, Cannabis indica
tgattcaatgatttaattgttgttttttgaagcttgggatatgctgtattatggttattatactgttctgtgatgtttggaaccaattggttaggtttggagcaagttttgggacatagaagatttgaaattttcgagtttctactgtagtgaaccaaaattctggatggtacagggcagcaccaactggaattctggatggtcaatttttcaggaattgcctattttcgtattttagccataacgtttcactcgggtgtctgttttcgacattctatataccgtttcgaagcttatgaagagctctaaattatgagacatatattagagccaaaatatgtattttaatttaggttgttttcaccatacgtttcggtttaaaagcctaggttattttatgtggggtttagacagtgttttggaatagacacttattgatttacctttgttatgactaggacccgaaatggtcgagcatcattccactcaggttggcccacatacttgactttggacttgagttaagaaaagtattaagcaccatatatggtaatgttatgattgttacagtctcgattatgatcaagatcccggtatgtgtttattgtgacttaatcttaatcgaggttaacgatatgtatatgttgtgactcgatggtaatcga

SEQ ID NO: 345520 - DNA, 745 bp, Cannabis indica
attattttgttgattaatttgaattactttggtgatattaaaagaaagcttttgcttttttttttcttgtttagttttttgaagtttctcaatacaaattttttagtttgtgatttggaattgatttaaaaaatttaagaagaggtcaatcgggaaagaagagcaaagaaaaatagaaaaaaaaaaaaaaacaaggaaaatatatatttatttttcaaaattgaaatttttaattaaatttttttataatttttaatttaaattatgagatggaccaagaatatttcaacatgtggcatgtgatagcaactaacggactagttatactttcaagaatggggactttggagactattactgtcaatttttgagattggtgactaatctgcattaactctaaatttttagaaacttttgctacagttatccctatttttttgattaaaaataggcccatacaaaattaaaattctaatattcactctcattgctccatttgttgtacattaggatgttgctatattggtcaaacaaataatatttaaaaaatagaaatattaagagtaatttgtgacataaatacttaagcttaactcacaattgtaaattaatatttaagtttaattttttacggtaataacacctaagttataattttagaagttaagtaagtacctggttattaagtgtcaaataaattgtcacgtggcagtccctgattagttaggtcattaaattttcattt

SEQ ID NO: 345521 - DNA, 516 bp, Cannabis indica
ctcatctgacggctgtcatacatcacggattacaatccgtgaaagtacaataacgggacaaaatcatatccctataaaagtaattcattattataaggcccatagatggtgtaagcgattaaaataatctaaggtgtaagaaaataatttcactagaagcgtgaactgaagtttacatgcttgtcggaaattctgaggagactaggggtggactattttatagtaacaaggataataaagtgtttgtttctacaaatgccacattccttgaagaagactatattaagaacttcaagccgcaaagtaaagtagtgttagaggaaatgctttcagaaataactccaaccaatgttccatcatcttctactcaagtataggataatctcactcccttgcttacaccaatgcaagtcgatacaaccaagaaatctaccactgatgttcctatatattcagaaggtcatggctcctcattgtagtgggaggatttctacaaaacctgctcgttatggcttg

SEQ ID NO: 345522 - DNA, 877 bp, Cannabis indica
tttatgaattcaaatcagaatttaatatatgatatttgaatacgctaaaattgaataaacatggatttcaatttagaatgagagtattaaattgatctatgtaatttaggactgaatttattgttttcttttgtttaaatttctcatagaaatataagaaatttacattaggtcgagttttatattttttaacctgaatatttaacacttttgcatgtcttcatcttagtgagaagaattatctgtatttgttgcattaatgaataataaagtggatagtagagtagattagaatccctaatttctcatttatatttttgaattaagtttagggcttttttcaattgtaacaaaaaaaagtaacaatgttacaaaaatatttttagctggccaaataaataaatatacagtccaaataaaaaaattatacaaatacgtaccacttacacacacattcaacccaggattcatgcttcttgggcaaccatgcgcaaccatgcaacaacccaacacaaccgaaacgaaaatttaacctgaaagagaactaccattaatgctggcgaattcacctacgaagatgaccagaatcaataaaacagtgactgtttcgaattcataaaaaaaaatgtagaaaaactactacggaactataattcaaccagaaatctaatttaatttgcataaaactaatgtactgactttaattttcagatccatgaaagacagatctcaaaaagttgatctggagttcccaaacaatcaaactcaagtataataatagaaaaaaaatattacatcaatactatagtaaaatatttttcctggtttattttcgttgtaaactaaatttttaatgatgaatttgttcatattaaat

SEQ ID NO: 345523 - DNA, 1080 bp, Cannabis indica
caagtactttttcactcagaaggatctgaatatgagacaaaggaggtggttaaagttagtgaaagactatgactatgaaatcatgtatcatcctggaaaggcgaatgctgtggcagatgccttgagtcggaaaggacatgatcagactttcaatatggtaatgatttctccttagttagcttcggagatgtctagggccaatattaaatttgtgattaagagattgcataatctgacacttcagtcagacttgttagaaagaattaaagtggcacaactagaagatcctgaactgcttaagactcgagaagatgtcttggcaagcaaagctaaggacttttcgatctctgatagtggaatgttgttgtttaaaactcgggtgtgtgtccctgataacaatgagcttaagaaagaaattctggatgaagctcacactaccccttactctttgcatccgggaaccaccatgatgtatcaagatctgaagccatatttctggtggtatgggatgaaaagggatgtagtagattatgtcactaagtgcttaacctgtcaacaaattaaagtagaacatcagcgacctgcaggattacttcagccattatcacttccagaatggaagtgggaagacattgcgatggattttgtggtaggtttgcccaggaccacgggaatgtaagactcagtttgggtcgtggtagatcgctttacaaagtcagcacatttcttgcctgttaaagtaacctatacagtagatcagtatgctgatttgtatgtaaaggagattattcgccttcatggggtaccaaagtcaattgtgtcagacagagaccctaaatttacttcaaaattctgggtgagtttacaaagggccatgggtacgagtttgaagttcagtacgacctttcaccctcaaacaaatgggcaatctgagcgaactatttagatacttgaagacctgttacgagcatatgttatggattttggaggatcgtggagtaaatatttgcctctgattgagttctcctacaataatagctatcaaagtaccatacgaatggctccctatgagctgctcta

SEQ ID NO: 345524 - DNA, 662 bp, Cannabis indica
cttaaatgagacttaatgacttaaggttcattatgtaggagagcttaaaccctaattagcaaataaaataagtagatatttacatattaaatcggtaaaatataaaagattaaaatgccaataaaaaataggtattttccatctaccttattgggcttttaaggccccattcatagtctagcttgcaatccacgtgtaaggttttgcaccaaagtcctgtcaagtttaatcctagccgaccatgcacctgcaggaagcaggccgatcagtcttgtgttgtccagaagctggtctattgctcgtcatcctgagtgtcaggatccccgttggtcaagatgctaacttaacctccttgttggtgagttgtattgccatgtggtgctaatattgtccacgtaagcatgccatgacaagtgtgaaaaaatcgggataatatttttaattaaataattatccaataaaataattaaaccaaattaatcatgggcctttatatgtcaccctacacatgtagaatggacatacacgtgtgggtcatattttaaggtccaaaattgatttctcaattttgtcatgaataagatttattatttattctataaataaataataattaattaattctcattaatctcttattttacaagaattaaaataaatat

SEQ ID NO: 345525 - DNA, 414 bp, Cannabis indica
ttcttaaaaccttataaaatgaatacatacggctaaacacttttttttaactatttattctcaattttctaatattcttactaaaaaatcattgttaaaactttataaaaaagaatacaactaagcatttttaataactcataaataacactcattaaaaaaaatataaaaatagttccctatgataaattttaacgatttgatcaatgtatatataaatcggtgcacttttaatgggtattacccatgaatgggtaatattaagtaaatttgagtttttatgcttaaattttgtatttaattagaaaaatctctcatttttaaattatatggactaagattgttctgtcagctgaaaaaaaaaaaactaataaaactaaattgtttggcgaaaaaaaaaaaaagataaaaaaa

SEQ ID NO: 345526 - DNA, 557 bp, Cannabis indica
caccattgagcagaaaaagaaaactttcctaccaataggaagttcaaggcaaaataaaaggtttcgtggaaaccaaggtaaagggggacgtcagacatattcctatcccgagtgcccacgctgcaagaaacatcatcacgagacttgcaaccgcttgctttcagtgcggatctgtgggacacctaaagaaagattgtcccaaattgaagaaagaggaactcaagctaaaagctaaacccgcgccaacacgtgtttttgctattactcaagcagatgctgccaccagcccttcggtggtcacaggttagcttctcatcaatggcattacttttactattttatttgattcgggtgctacgtgctcatatgttgcagtaagagttcttaatcaactcggtgggcctggtgaggttttttgagatgggatttggaaccctgttgccttatggggaactaattatctcaggaagtaggttaatccgatgttaatcaggattgagggtagagaattgtgtgccaatctagtggagttaccattggccgagtttgacatcata

SEQ ID NO: 345527 - DNA, 725 bp, Cannabis indica
tttttcataatcatgttattgaagctacttgaaaattactcaaattttagttattgacttgtttattctgtatttagtgttttacttaaggacaagtaaaagcttagtttgagggaatttattagtttaattttagtattatttttagggtactttttagtatatttttttatttagttttactcttgtttggaaaattttaggctttttatcttttatttttgcagatttaaaatataggaagattagaaaataccaaaggaataagatggaaaaaagataaaaaaaaaaaccacacaaatagaagatacataaaatagagaaaattgtgtaaagaaataaagttgaaacttcaagcccaaattcaactatgttctgattagattttagaaaaagtacaaaacagaaaaattctagatctcctttttatctttctgaaatatcttgaatcttccaattccgaacaatatcgagagttatcgccaaaatactgtcagtcgacgcagcagaaaactcacctcctcttctaatcctaagcagaataggttttctaatcctaaggagaataggttttttctcttcagtgatttttattttattttatcattttttggctataaaaaaagtggagttcaatagttttgggggagggaatttagaagaaaaaaatgagtacgaatttcagaaaccgaagtcaatactggaggcattcttcagagggtttt

SEQ ID NO: 345528 - DNA, 848 bp, Cannabis indica
atgtagaatggacatacacgtgtgggtcatattttaaggtccaaaattgatttctcaattttgtcatgaataagatttattatttattctataaataaataataattaattaattctcattaatctcttattttacaagaattaaaataaatattattttctctaaattaatatatttttctctttgatattatttaatactaatgttatatttaactaattaatatagttttattcaataaaactaaatagttaaatattattaattatacaattcataattgccataattaatcaaaataataatttcataaattactatttttcccttaaaatttatttcccatagaaattaattctcactcgaaattcattcatcaaataaaatcttcctttgtacaatgttgtatagagctgactcggggaccatggacctatattctaaagttccaataaacccaagattaccatcaatctcatcaacagagtaatttggttgattaattctatcattactccactataaatatgaaattctattctttgacaatatagaattatatttacataattcttacttgtaaattattgatataatcaatataagtagctcactctctaattattagttcataattagagttggtcaaaataccattttatccttctaattatctctctattccttatgtaccattaattcaatgtgaatagttaatctataacttattatagatttggatccaactgttagcactcccagaattaacactataaggaaattaatattcgatctgttagaaaagcttggattcaactaatgtataactgttagaaattattttacc

SEQ ID NO: 345529 - DNA, 677 bp, Cannabis indica
ttaagatttttttttttaattgggtaggttgtatgcagaattttacaaaccgaactttacgttgggttagaaaatatgtagtataaaccgactaaaccgaccgatgtacaaccctaatctcagggatgatctgaatagaaggagaggtttagacaaacaatatgttcaaccagccactcagcccggtatctgcatccaagatctagctcaaagagatcctgacatggcactgatcggccaataggtcgaataagttcacccatccctgcaagcacagttggatgaattgaacaatatgttccaaggcctggacggtcaaaagctcaatgagctcgagttggaccgagcacgcagatccccatttactcctgagattaatgctctaaagctaccctcatgttcaaaatgccgacctggaagatgtacacagggaaagaagatcccttatcgcatctcaagtattttgaaatgcaaatggatttgcaatgggtaggaggagatgtgcactgcagagtattccctgccacactttcagaagcctcacatcagtggtacttcaagttgtcaccaggaaggttcaactcttggaaagccttctcctcggagtttcatgaacagttctcttcttctcgccaactcccactgcatttagaagacttggtcgaagtgaagcaaag

SEQ ID NO: 345530 - DNA, 949 bp, Cannabis indica
cacaaatgctccgcaatcactataacccagaaaggaaaacaaaacagttaaacaactattatacaacataaaataaacttaaaaacaacaactcactttctgttgagatggaagaccagctatctccacaaatcttagaggagctttaaggtcagaacctaaatcatgaacataagacctattcttccaaaatccaagcagatcaaaaaacaaaggaagtaaaacagaataagtcttcattgcattcctacctgcagaattcattttggcagccctcagagaattataaagaaatataatcccctcattcaaatcaagacagccaaaaacccaatgactttccctcctaagatttatgatgaatatgacatgttcgacttcataccaaggcttagaatacggaattcgcaaacctcttatataatacgctattgggtgagcagcatgtatgtgagatatctttgttttcattgccttggctttgcagaacttgcggtataatgcttgaatggaatcatcgaaaagtcagtcagttgttgcgaaattcagtgtaactgcagaagaatgtttacctttttttctaaggtaatagaagatagtgttcagatgctgaaacaaaacaacaacgaaacacaaaataaaaagttaaaaaatatttacgaaacttaattacagtaactaaactaaaaaataatgataaaacaactgtaaaacaactatcaaaagttttaaaagaaaacataaattttaccgagtcattaataaacatgtcacaacaagccaaatgatgaaaccaggttttatcttcaacataatcaacaactaatctaaacccaggggaaaatttcttcacaccatcctcataacaattataagcccttaacaacaaaaaaacaatattgaattcaaataattgcaaaaataaaaatagaattcaaacaataaaaaa

SEQ ID NO: 345531 - DNA, 2310 bp, Cannabis indica
tgtcccgagaccgaacactccaggtcgcgccgccatgacatgtacaacctcatctcagcctaggctcactcctgttcagcttttgcctttcctttacctacacatggaagcagaactgtgagtcgacagactcagtaagaaaagcatataacatatcatataataccgacttgtatctaggcgcccatacacctatttacaaggcttaacagatgagtaagaacgttccatactagggtacaaccactataccacatatactacgtaccttgctgtacgagtgttggtagggtttgtttgtaccctgagtaccacttagtgatataccacccacaccatgtatttttctctacttgtgctggtatcactgtaatgtactctttaacaatacacactataccaatgcacactgtactacaactgtacaagtgttggtagtgtaacaaacatataagcatgcatatacacttaacatatacatacactcagatattgatatcacacattatatatagttcttaccttctttccagattcaagtgtgctagccgacgtgaacagaaagtcttgtgctaaatggatgccctaatcacataatgaaaccgagtaaattacattatcaaaaccctaatccgggaaccctgaacccacaactctagcttctgttatactctctagggattacactaaatcaggaaacagggaaacacccaactaaggcactgaaatggacgagaattgagaaaataggacattcagggtacactacttaccgattttagaggtactggtaaaactggtaaactggcttataccagttttcaccaaaactcccatttcttgctcaaaactccaccaaatgcaaccaaaccttctagagtacctaattagggtatgcacaatatattccaacacataaatctcagaaaaaaacactaaaatcaaatattccattaaagacctaaactttgagttcaaagctcaaacttgagcaatttcatcccaacacaaccaaaccagcatacagcttaaaatcaactcaaattaacctaaaaattccaactctaagatttctaaccctaacagccaccaataccaaaaatcactacgcaaaaccaagtaaattttaaagaattaaataaacaaaagcttgtagggtttaccttggttaataaatcctccaacccttgctgtaaacaccaaaaaccaactataattccacttgttctagattggtttgaagagagagggaagggaagagactgcttctttttttttttttggtcttttcttgattttccctaattgaataaagcttaggaaattaattcctttgctgaaaataaattagccaagtgtcaacctcctaggtagccaccaaacctctttatcaattgactaaaatgccttttaacttaaaactaagatattttaaagactaggggtaaactagtcaaatttcataatcccgcttaatctcggtattttattttctctaaaatatattccactaagaaacaaggttctaacttacccatgtgatcaaactagccatccatcgcattttccgttgtcgccgagcaataattgtaaaaataacatatttcacatataatttaaataatacatttagagtttaataaaatttccagaattgagaaattataactctcatgcccatttctaataatggggcctacaattaattaaattcataaataattataaaaataacataaattagtgctaattgcctttactaatcccaattactaaagcggtcattacatttataatgtttacaagaactatacttagttttttttttccctctagttgggagcttacatgaaaatacacaagagagggatgtcttcgtgaggcctagcccatgaaaggattgacatgctgactaggcagataggacacaatcaggctgtcattatcgtgtcctataattgtgggtaattcattatgaattaattacttgatcttcattttaggtagtttccctctttagcttaataggatcttctggccgagatttaaggagagttaattccttattctgtgtgcttggataaaaaggtaaaccaaactagtcttccaagaacacgctattcggccctccaaaatcacggtactaaaactgatttcggattcggtctgtccttgtcagaagctcccctaagcatggagctaaggttccttcttggaaagtcttgtctgacttggggttagcccaaattatcttctttacgccctgcttaacgcctaaatgtgacttctactagcggtggttgtagtata

SEQ ID NO: 345532 - DNA, 1744 bp, Cannabis indica
aaaaaagagttaaaaaaactaagagacaactacaaaaaaactaaaaaacaatataaaaatagtaagaaaaaataagaagatcaacattaaatgaaaacactataatttataatatggcgatcacaaaaacataaagaatacgagtatgaatattagtggtaaattaatacaaaaaaaagactataaaatataaaaggacataacaacaacatagaagtacaaatccattaactaaatgaacttacaacaaaataaaacatacaaagtaactaaaacacagttacattgtctaattatctaccttcttctcactattagtgcattcattatcacttcccttattatcttttcctttggactcgaaatcttcattatcatcatcatccttctcctctccgtcactaccctcctcctcttcatcacctttaccttcatccacctgcaacatctttttcttcattgtcatctgcttcttcaatgtcatctgaatcaatatcttctttattatcacttccaccatcatcattggaagagtcactccctttgtcctgcaataaaagtataataaaaaaatagatacagacaactaaaaataaactagaaaacaaccataaaaaactaacataccttagcaatagaatgagcaaaaacagtttaaaactgtgtctgcattgaagccatttgagcagcaaagaaaacaaactgtgtagaaacaaactctttcaactcaaccaaatcagaagaaatcttatgttgggaagtatgcaacaaatcaatattcatctccaaaccatcaaactttttagaaaaaccatcaagcttgacagaaatgtcactctcaaccaaagaaggttgttccggaacaagaatactcttgtaagaattgtaatcagtatcaaacttgaaactgctcattttcaaagctttaaactcagcagcagtgggtttcatatttgattgttgcagttgagaaaaacaacaagaaaagaaaaaaaatcaataagagtgtgtatttaaaataaaaaacaacaacaaaacaactaataaaaaaccaaaaaataacaaacaaaaataccttgtctttggagacatcaaaaatagtagtcttcaaaattttgaaaatcggctggctggtacaagtccactgaataattcttggaatacgagaattttccttttggcaatacttaccattcatgtacttacaatactcataatatcagacttgaaatacatgaggacaaccaatcaaagtgtaaaaaacactgagcctctttcctaaactcttcgcctttcaaacactttcaacccaactgtcaagcttacccttcaacgacgaaatagtcaattcaaaagaactccgtccccaagcaaattcatcatacctcccactgtctacaacatctaaaatggaccaatgaacatttttatgcttagtaccactaagcaaaaaccattctacaaaataaagaactgccaacttaacaacatcctcatcagaatcaccccacctctttgtggtaaaacattccctaacagattctttagtaatagagaatgaagttggtcaatatttcaaacaaagactattaacgtcttgcttaaaatccaacacactacaatcaccttcacaatctaaaccagttatcaatgcaaactcctcaatgctaaacctaatcctaacaccacgaatcataacccacaattcagcatcattaggctgctgaacctcccgcaacaacaa

SEQ ID NO: 345533 - DNA, 718 bp, Cannabis indica
agcatgaaatgtctgttaatctgaaggttatgcaaagaagaccattgaggatgacgactttgatatactcgaagttgcgtctttctggaataaaggcaaatccctcgtcaaatcggagaagacacagtctaaaaatgtggctttaattcaggatgacttcaatgataaggcctatgacgaatttattgactcgagcagaactgttatggggccgttcaagacgaaggaagcgatcccccataagctgtttggattttacaagttcgtttttagcaacacattagatctggagtaagtaaatattattttggtatttgtgattatcatatacttataaaaatctttagcagttacattcattataattgaatcagatatgtgcttgtaaaatttggaaagtttgaagtggataggaggtgcatggcatcgttgcgacccttgcgagaagttcagggatctgtaagtgtgaaattggttactaaatatgtttcatttattgtacatgtctaaatcgtatttcatcttgatgcagatcattgactatttttctcaactaatgaacaagtacaaacgtgaaacacggctacctgaccaacctcgtgtttggtacgtgcccacccacatctcgatatttttcatgcaacttaatttaatttttgtactaatttagtttggttggactattacttgtttctgttacttgacaaaataaacaatg

SEQ ID NO: 345534 - DNA, 899 bp, Cannabis indica
aaaatttgaagcagatacgactctgttttcaattatttgtagcaattttactttaaaatatggagatcttaaataagatgacccttcttttcgtactccaagtatatattatttgttgtaatagacatattactagaaatagatttcttgaaagttcttttcataggcaccaattttgtcaactaaatatttttagaatgatacatgctagtgactttgcttgtatagaaaatacacgtatggatagaaaaacatttggtattttgtgtcaccaccttagaacgatcaggggtttgaaggaaacaaagaatattgatgttgaagaaatggttgatgttatcccagtttttgcactctaacgtagcatcacacaatggtgatacgtggaatcaactacgggtatctgctcgcaagacacagtctgaacaagatacatcatatgcatgctcaaaacgaagcaatgagcaacccttgcagaacgacaaacacttagcgaattcagttttcgcatcgtgagtcatcatggaaattcctataacttggggatcaggttacaaagacatggcaaccagtcaaaatcccacaatcagtgtattctgtatttactatgcaatctttctgcttatatcaattgtaacgagaaggaaagtacttcctctccaagctcatagccctataaatagtgatgcatattcactgggcaaagggtcgaaaacattccagttgagagagatattatctaagaattcatattcatagatattatcataagagctataagaagaggaatctttaaacttattctttagtcaatacaaatgtcgaggattaggctattaccgaacgactcggggctgaacctctataaaatcttgtgtctttatattgctttatcatat

SEQ ID NO: 345535 - DNA, 685 bp, Cannabis indica
cattgttttagaattcatatattaggttgttaatccagcatacttgttagtaaatctagatcctggtaaaataatttccaacacttacatgcagttgttgtttgtgttcatcgcgccatttgttgtccttgcatagtgaaactttgcaaaagtatccacagcactggaaagttctcccgtgtgggaatcaacctattttggtacagtaaaaaaatagaaaaataatattaacaaaatattactatgtttaaaatatcataccacgctcacaatgtgaccaactatggtcgtagatctccatccaccttgaaccttcatatgtcctcagtttttgcattttgttcagctcttgcctgtaatttaaagtaaatttattattagcaaattgagaaaaaaagtcataagttaatggatattaaaaattacaacattcaattaatacctattgttttggatctttccagtatccgataacctctacccacacctctagtgtcaccatatttggacgtgatctctgttgggattttatgccctaaatagaacccattacaatctaatctgatttattatcgataaaagattagaagtcatttatgtttacatgctgttttcatgtttgtggtttaatatatatacaaaatttgttaagtactgaacatatagtcatttacaattacagtga

SEQ ID NO: 345536 - DNA, 748 bp, Cannabis indica
ggggacatctttgtagtttgcacggagcccaaaacccaaaagcccaatcataaattattagaaaaaattaatttctatacccaaaaaataataagttattatgaaaacttatcttttttgaaattattttataattatatactctaggaaataattttggaaattaacaagcattatgattttctattaatgtacttttttgatagaaaacttggttcatcttaatatgagcatcttagacctctttatgtagtgtcaatgatattaccatttgaaattcaaactcattatgaactcaaatataactcatgcacacaccataaatcctataacattaagaattttaaattaagatgcgtaacacattttacactcttatgacacatttacttaaagcgtagtcgtttttggaataaattaatgagagaaataataataattgtaatatgctacatattagtttgttacacatatttaatctatacagtatattctttataaataacatcacaattctccactagattaaatttatctctaataacaaacttgtaattttgtaatatatatttaaacaattaaaaatactacatcaaaatataacattcctccccttttattaaataaatatacacttttcataataataaatacagtagaacctctatccaagaatacacttaggactaagtaaattatattctaattgggaggttataactaaatagagttacgctagaaaaaaaaa

SEQ ID NO: 345537 - DNA, 594 bp, Cannabis indica
gccagggagttggctggctagatctgggttcttaagggcaagcgcgagtacggtgagcctaggcagtgtgtgttcatcttttgcacttccttcaggcggtcaagggcgtaggccctcgatcttaataatacctctggccgaaaccctcatggcctttggccaaactttgacaagcagttaagtggccttccttcttctttcttcgcacagcctcttctttgtaccggcttgcgctggtgaccaccatgcatgtttctttcctcagctctcaataaaagcaccaaaatatattacagagtttttcgacaactaaatatttttagcgctttaaaaagtaaagataggataaataacaaggtagcgaacgagagattttttacgtggttcaggcgtcaactatcctttgtctacgagtctattttattaggctcatcggctggtggttgttaatataaatagagatacaatagactagaacttctttccaccgtgttcctcttgaagaagaagaagcttagtaggaatatactggagctaatcgtaggattacagaaatgtgcttatctcagattatcaagaatcgatccgaaagaa

SEQ ID NO: 345538 - DNA, 928 bp, Cannabis indica
tttttttattatttatattggactacttttaaaatgggcttgattagaatgacggtaggctcgtgaatcatgattaagatattgagtgagggcttttgtgaattgggctctaataaattgagtgaagtaaattaatatatgtatatatctacatgtgaaaagtttgatgtatatatatgagtgagggcttaagcctacatatgggctaaagtccatccgtccctgactatccattttactcccattagtgtcaagtcacttatacaaaataagaaaatacttcagtcctttaaataagtcaactccataattttttcaagtgggccataaaaattttatctatcttcaacctctgtgcagttgttcaatatgtactactctgccttacacttgcttatcattggtaaggtgtcaaatgtcctcttacccaatggtcgtccgacatgcttgaatatagaaacttgtcaagctgaaatatattggatgatgtcattgtcccgttcaagacaattaaattgaatttatgttgggattttatgccctaaataaaactcattttaatatacaatttcctatcaatagaatattagaagtcatttaagtttacatatttttttatgattacggtttaatatacaataatcttatttactatcaatagaagattagaagtcatttaagtttatataatatttttatgattatggtttaatatacaatttttgataaattcagaacatatagtaattcacaattacagtgatgtcatcacaatggaaagtaattatgattatatgcttcaaagtatagtcctataatttatcagtccagtgaatttacattgacatgataatcaacgagtttacttacacttggataagtagtatgtcctttccagggcattggtaaagtatactagtatcgaatg

SEQ ID NO: 345539 - DNA, 1030 bp, Cannabis indica
gtgtaagtcggcttctcagagcaaaaaatgagtgaaagagagctgagtatgttattttggctgctattaaccgaaaagagacacagcttttcctcagctgagcttttaaagagttgagaatgagattataagatatacgagaaagagaaatacagacaaaattacgagggaattttagagagagaaagtaaggaaagatggttgaacccgcaagttattattttatttatttcttattgttaattatatattggaagatattattattatatttttagtacacgtttgtcagattggcagatctcttcaagagagggaaaagaaataattatcttagaataatatttattaatttatatcttcttatttaaatatttataatggcggtgtctgcagtggggagattagcaattagcaattttattttaacatatactaaattatgtttcttaaacattatttgctgtcaataattctccctattaaaattgttagatttaagaacttttgtcgcagtaattgtttatgtaataaatcatgctcccaagactttgatatctataaaataatactcttaaattttgatatgtactaaattatgcccctaaacttttatttatgttagaatttttttattaaaattagataaaaaaatccttaaatctaataatattaatagttcaaggagaatttttaacggccaacaaaacttaagggcatgatttaatataagtcaaaagtcagacaaaaataattgctaagagtaatttgcggcaaaacgccctcaactatcaatttacttgcaaaaaaccatccaacctcatattttggtgggaaaaccgtccaaagtactgtttcgtttacatttttaaggtgtcgtctattcagcctcgttaagtcctaattttgcccacgtggcaatgacaggtcaataaaaaattatcctacgtggccatattttacaaaataaaaattaaaataaaaacaaaaaattaagagtaattgcggcaaaactccctcaactatcaat

SEQ ID NO: 345540 - DNA, 548 bp, Cannabis indica
gttctgtttgtattttttcttatgttttttcatttattttcacatgtgttcttttgatctttactttcttctatctagttgaaatggagagattttgatggctgttgacaaggctaagaagaactcctcattctttcttacgctgatttctctcaagtattgaaattagtacattctgagtattttttttttttttgataaatgaattgttcatgcctaatgtcatatgaatatttattgaatcataaattattgtatagtgtttcaatttaaaattttggttcagtaattgtagtatcactattttgctctctatggtttaggtattcagattttgtaatgataatatttttttttgtatttttattttctttttaggttttttagatccttaataaagtccatcagtctatggcaaagaagctcatctgaataagcttccaagttacagtttttagatttggtgtttaaaaatgttatatttcaaatcttgaatgttacccattttgatttacaatttttctgaacactaaaattttatttctatt

SEQ ID NO: 345541 - DNA, 521 bp, Cannabis indica
cccaaccccaccacaccaacacagatcacaaaatttgtataaagatgtctaagacatgccccaatttgaagggtcacacaaataattataattgaaatgaaagcagcttttgtttaaaatctttatctgctcatccaattgatcatatcagtaccagctgtacaacttgtacagccattgtctatcttaatagtgccacataacattatgtatagcttattccttttattttaatttaataagaaaatacacagaaaataatatttatgtgaaaaatacttttagtcctgaaaacaagaagattcaaatcagtaatctacttttgatagttcatttgaatgattaaatcacactaattttgtttcttaattcaggagatccatttgtttgtcatattagagaaataaataataataataataataataaaacttacaagagaatggaatgcttgttctgctcttgaatctaatccttatggtaaataatatgtcaaaaagaatagttcaaaaccacaataa

SEQ ID NO: 345542 - DNA, 868 bp, Cannabis indica
tccccattcccattcccagctcattgatattcctattgccattcccatccccattcctatccccattcccattcccattctcattcccattcccattcccattcccattcccattcccattcccattcccattccctggcccattcccattcccattctcattcacattccaattcccattccttgagccattccaattctcattcccactcccattcccattcccattctcttgcccattcccattgccattctcattccaattcccattcccactccctgagccattcccattcccattctctcacccattcccattcctattcccattcccatacccattcccaggcccattccccggctcattcccattcccattccccggcctattcccattcccaacccattcccatttccattccaaatccccatgcccattcccattcctcgacctatgcccattcgtattctcattctatttcccgttcccattcccattccccaaacccttaaaccccaaacgccaaaatcacaaaaccctaatggcatacaaactaataagtaatgggaattaatggtaaggttatgattcccttaaattttttactttacattactaaaattaggaaatggagaacttgattaaataagggagaaatgaaagggagaactttccccaccaattttgtaaggaatgccattaagggtaatggattttaattatttttattttattcattagtattaaatatataatgacaattttgtccttgaaaatatatcttacaaaataactatcatataatatagtttagctcaaaagcataatttggtcaatttaacccttcccattacgtttcctaataaa

SEQ ID NO: 345543 - DNA, 525 bp, Cannabis indica
tctaatgcatgatgaaaaaaagtaataattttttcattaatttttttctgtttttgaaatttagttccatttcatttctatacttattgccactctcattactatttttatattttcattcctctagccaaatgccaccttaataaaatacttaaaatttatcatatatatttattatttatttatttatttttattttgaattaaagggagagggtgccatgagggtaacatattaatcaataatatctactagtgacttgcgtgtatatatatatcttcatattattttatttttgtataatgtaaaggtgagcatacacgtatatttagaaatgtttaggggggccagggcctcctctactcctacggtgcctccgcccctgcataagaggcatcctgttcggactatattctctgagcagatactcggagtcgatttcatgtgtcaccatcatgcgatgccacgtcagagtgtaaaaattgggataacatttgccccccaagtctgtacgggacttccaaa

SEQ ID NO: 345544 - DNA, 521 bp, Cannabis indica
atgctcgtcaaatccaggtaggctggggggcacatagatgacctggacgaatgctttaaagtcctcaggaaacataacatgaaactaaatcccttaaattgctccttaggagtcagctcgggaaagcttttgggctttattgtcaatgcccaaggaattgaagccaatctagagaagatttaagccctcctggatatgaaatcgccaacaagaaccatggaagtacaaagtttgacttgtccgatcgcctcactcagcagatttgtttcaaaataaaaagacaagtgtgttccatttttcaatatcctgcgaggaaataagcaatttgagtggaaagaggaatgtgaaaaagcttttcaaaacctaaaaacgaaactcgcaaagcctccactactcttgaaacctctggacagagaagagctcgggatatacttggctgtcacagagcatattgttagtgtcgtgctgatcagagaagaaaacaacatacaacacccggtctattacgtcagtaaaagact

SEQ ID NO: 345545 - DNA, 490 bp, Cannabis indica
ttttttgtaaaaaaaaaagtgaaaatcccatatttgtaaaacaacaataaattttgccagaaaaatcaccggtgccgaaaaagtcgccggtaccgaaaaagtaactggaaaaatcaccgtcgtcggaaagtcaccagaaaagtcaccgtcaccagaaaagtcactagaagtaaatgtctcagatataactaaaaatataacaggttctataaataaaaactactaactctaaccagttataattgaaatataaccagttctgtaacataataaataaaaataaataacataaaataactcaaaccagttataattaaaatagaaccaattctataacagtgttataatgaataataacacaaaataactcaaaactggttataactaaaatagaactggttatataacataatgaatacaaacaagtaacacacaatcattcaaaccgattacaattaaaaatacacgggaaatcagttcctaaaacact

SEQ ID NO: 345546 - DNA, 516 bp, Cannabis indica
tcttcatcttcttcttctttcttctcatctactttatattattttatattattttataacaaacatataattcttaataaattatgtagttaataaattttaaaactaagttttcttaaaaaaaacttttaagtatttatttttgcacactattcctacaaatatatatatacatgccataattgaggaaaaaaaaacaaatcaaaacatgttttatatatatatatataataaaatttaattctattaatgaatcaaaccaaatcattctaacatataatagataatttagtaaaaaacacagtaatcaccactataggatcaactcccacataataaattaagggtgagaaatgagaattttttaataatttaatatgtagaagtctaaataagatttctgtagaggttatatattttatatatacactaccaaaaaaagttaatcattttatagtcattataaaaaaatttatacactaaatatgacatttaatcataataaaaaattatttg

SEQ ID NO: 345547 - DNA, 632 bp, Cannabis indica
tttttcaaattcattcacacatgatattaacatacacaattaattagggagcgaaatttgattttctatacttaaaaactttaatattttatcttaaaccaatacatttcaaactaagaaaaatatgacacttttatctaaaacccaaaaatatccctctcataactcaatcacatctctctctctctctctcttcctctgtactgaaaataaaaaaaaaaaaaaaaaataaaaaaaattcccccaggtccgatggtcggaccccatggtccgaccaatcggatccatcggaccccatggttcgaccatcggaccccactctctcttcctctctctaaaatcgcaaaaaaataaataaataaataaataaaaataaataaatactggtccgatggtcggaccatgggtccgattggtcggaccccatcggatcccatggtccgaccatcggacctgtatgtttttttttttttgcgatttctgagagaggaaaagagagtggggctgagggggtgcgaagtttgggtggtccgagagaggggggctgggtcgagggtgttggtgcgggtggtcggaggtggtggtgagggtcggaggtcggaggtggtggtgagggtgggcggttgtgggat

SEQ ID NO: 345548 - DNA, 652 bp, Cannabis indica
atgttcttatatatggctcaattacttttacatttaatccatgtgggacaatgttctccaatatgaacttaatttttttttagtatataaataatgtaaagccgattcctagcatgctgagatgtaaataatgtacccaattgcttagttataataactttaggtcatgttattgttatattttattttgacgaaaatcaaattcagtatattaatttaaaaaaattaaacctaaaaattatcatttaacaaagagagtgtgattgataactttataaatgtattattcaataataaaaattttgcattaatttgatgatactattcattattgatgattatatgaaaaatacattttaaggtgctaattaaaaaccataaaagataatatatattattattgatgcattttgatatcaagtctcacacatatggatttaataattaatatatataagacattaaatctgaaaaattgagaaagagataaggaaccattagttgtcaacactcaccaatcatgttgctatgtcatatttagatatatatatatatggaggaggtttcaatggttacatttttattgtaaccatcatggttacattttttttagtcattggatcactattaaatggttgtgattaatttagaa

SEQ ID NO: 345549 - DNA, 530 bp, Cannabis indica
tgtaagtatacctatcgctgattaccatgccagtctaaatcaagtgaactgacaaatcatgggaattaagcttttgaacatataatcatgattatattccactatgctaacaacactataatcatgaacaaatacatatgttctggacttaatagaatttatatatcaaacataatcatgaaataaatcatgtgaaccatacaacataaaacgatttctgatctttattaattaataaatcagattatattgaaatgggttttatttagggcacaaaacccaacaaacaactacgttccagccagaatttttgccatcactcaagtagaagttgaggccagtccttcggttgtatcgggtcagactccaatggccaacaccacttgtaaagttttgtatcgggtcagatggtagggaattatttatagacctgattgtattagatttatttgattttgatgtaatcttgggcatggattttcttaccaaatatggaccatcaattgactgcaagcaaaagaaaatggttt

SEQ ID NO: 345550 - DNA, 565 bp, Cannabis indica
agaagatggacacaagaagtgtttcattagcagagatgtggtgtttaaggaacatgaaatggcaatgaaacttaccaatacagagagagcaaccatgaacagcaaagtgttgaacttcagacagaccaggagaatgcagaagttacagatcaggtggatacatctgcaacacaaagaaaacacagcactgatgaagaattaaggcaagaacaagcatcttctgagcttcaagagtaccaactggtcagagatagagtcagaagagaagtaaggccaccagaaagatttggatatgctgactgcattgcttttgcacttgcagcagctgaagaaatcgaaaacagtgaacctaccacctatacagaagctgtcactggaaagaatagaaagaaatggcttggtgccattaatgatgaaatgggatcactagaaagaaataaaacatggattagagtacctagacctaaaggacagagggtaataggctgcaaatggatatttagacacaaagaagggttgcctggtgaagaaatcagatacaaagcaaggttagttgcaaaggggt

SEQ ID NO: 345551 - DNA, 560 bp, Cannabis indica
attttaattttttgttggagacataaaataacaataatttgttttattttgttgctagttatatgaaaaaagatatattctttcataaatattaaatagtttaatattgaaaagtaaccaattcaatcctcacttttgcagattagattggattggatttgagttattgtacagattggattgaatacaaaatatgaaatttgcacttaggtggcgtttgattagaggtaatgaaatggaatggaaaggaaaggaaacaatctttattccattcctttgtttagtttccatttttattcctatatttcattcctcccaaccaaacgcgtgcgaatcgaatgtactatgaacaaaatagtacagattgaattgaatgaacacccctaaacattatagtttgtcaaaataatcaatagtcttaataaagtttcaagtattacctaatttaaaatgagactttatgtatttgtttaaataaaaaagacttttatgtataagttaattctaatgtaaaaaaactcctaataaaacaaattatagcattttataatagcatgatc

SEQ ID NO: 345552 - DNA, 798 bp, Cannabis indica
ctactctccctaacgttctgttactcgttacttttgtaacgtcccctcttcaaacttctattgggccttcccccacgaactaatgactcttatacacaggtacgccactctagccacttcctagattgatgactgacccttcaggtcaactcgagtgttcccaacgtgcgttgctctggctcgcacgcttctgagaaaacttcctgaaatgaaatcaccctaggtcaaggacacttaactgtggagtttttttcgtgatgggctaccaaaaattaatatgcaccttgttaatataggtagtcctaatcaatccattcaagttccctacaaccatgtagtctcatacctacatagtctgagaatcactacatacgaccttcccctaggggatgcgggattgtacagctcctggtcttttccttgtggatcacggtctctgactgtcacaatttgactcatgccccctttgatcatttccccctggtagtgaatatatcaacccacatgatcgtcgcctttaattcacttaggattccagacaatattcataaatggtcccacctttactaacattagataacttctaaacaaaaatattttgttctttgaataaattagatggattcctccatgagctactcatgtcctatattacgcttgagaatatctaataaatttaactaatactgtcatttctctaatatgtctgccctgtcaaatgagttaccattaaatgacatacatgcaccgtccattcagtcttttgatgtccccccattgagtgtacaatgtttaata

SEQ ID NO: 345553 - DNA, 658 bp, Cannabis indica
taccgggcaccggaattacaaaataggcaagctactgaataacataattattagtataataaattatttaaatagctataaattcataaataatcacaattaactgataatttccaaattaactaagcgggctttacaacacgacaccttattcaaataatttttagaatatttacatatcaataaaatgccaatacaaaatcctgaaaatgaatttcggccgagaatccggtttgacccaaaattcccaattgtgactatatcgcgccgacctgtcagacaacacctaaaaaaagacaagacaagtatactatagaataatatagtccataagcatatcataatataaatttcacagttttacgcgtctcgggccaaaattactaaaatacctatggctcaccaacggggtcttaacatgccatatatcatattaattcacatataataaattatataataatataattctataataatacacatatagctagttagtataatatttattatacgctaagtgttttaacagtctattcaccctgtcaacacttttgtacacatagcgaggatgttgttttgctatgcattatcgatgtcatccttacggttatgttctctgacgcaaaatagtttctcgtcaatacgcgaatcaata

SEQ ID NO: 345554 - DNA, 976 bp, Cannabis indica
ctgctacctagtcatgcctttcggactgaaaaatgctggtgcaacttatcaaagaatggtgaaccggatgttcaaaggcctcctggggcgaaatatggaggtatacgtggacgacatgctagtcaagtcaaaagcatgcactagccacgcggacgacttagaagaatgctttgaagtggtccggagatacggaatgaaactcaacccgaagaagtgcactttcggggttaagtcagggaagtttctgggcttcatcgtcagtcagaggggaattgaggcaaatccagaaaaaattcaagctctcctgagcatgccttccccaaagaaacacaaagatgtgcaaagcctaaccggaaaggttgctgccctgagccgttttatctcccggtccacagacaaatgcattcccttcttcaacatcttgaagaagtgtcagaaatttgaatggtccgacgagtgcgaggaggcattcaaaaaactaaaagaacacatggccaagccaccaatcctatcaaagcccgttctcggagaagacttgttcctatacttggccgtttccgagaatgcagtcagcgcgaccttagttcgggaagaggagaaaactcagcatcctgtgtactatgtcagcaagcgcattataggggtggagacgcgatacccagtaattgaaaaactagttttttgtctcctgatggcctcgagaaagttaagaccctacttccaagctcacccaattaaggtattgaccaaccacccactctggcaagtcctacaaaagccagaggcatccggaaggctcctcaaatgggcaatggagttaagccaaattgacctgcattacattccacgcatttccataaaaggacaagcgccagcagacttcatcacagagtgcaatgaagccgaagctaccgcaaacatacccacaccatcagtcccagcgtggaaggtattgtagacggagcctccaacgaga

SEQ ID NO: 345555 - DNA, 494 bp, Cannabis indica
actactccccctttttgtctatcaaggagccaaggataacaaaaatatgaactaagtcataatagtttaagcatacataaagcaaaaataagagaaaaagaaattggacaatttattcatcatcattggatttgaagtatttcatgatgctgtccatcttcctaagaacttgtctccattcttcccaaacgcaagttgaattcagccatttctataggagcagaagtagaagcagatgcagcaccaaagccacgaaagggcctcttggatggttgagcattttttgtttttgtcatttttctttgaaaccctagaaaaacaaacacactctcacacttgaaaaagattagacttttgagaaaaaagagagaggaatgaatggtggtgatcatgggtaattgggaagtttaacatatatagcatttcaaatttaattacccaataatcagaaaaaataaaaaaggaaagtagcttccttaccttagacaccacgt

SEQ ID NO: 345556 - DNA, 1420 bp, Cannabis indica
ctggatgtttgaaatgcattgaccacggttttgtaatctttatcgcacgaacttcatgatactctcttacctagcccttcaccatctttgaggggggttctgggaagccgccgcctcaagagtggagttaaattgaattgtgatgtaagggtaggttcagacagtatgtgcttagcggtggtagctagaaaccatctaggtgaggtggttcgaatatacacggatcggttggacttctcagatgctttgtgtggagaagcaacggcttgttgtgcagcggtttcgttggctctggaggaaggctttaactttgttttgattgagagtgactcgagattagttatcaatgctctcaatgggatggagtctcattgggcaattgacaattatatctcattttgtgctaagtcatctcctgcttttatttgctgtaattttcaatttgttagtagaacttgtaattttgcagcccataatgtggcgaattgggcttttattaacaagttgtatgggattattccggtttcttcagttccggagaaccttttatgtaatgaccgcgagatctaacgttaattattaatgttacgattacgcttattttcaaaaaaactaaataggatactcattattgctcaccaatgtgtctgtaactactgacataaaggacacatatataattttatcaaaaatattccaatattccatattaatttaaacaatattcttactcaagttacattttatattaattaaataagaataaagtacaataatttagggaaatttgataatatatgctaaattaatttatccactaaaatatgctagcatattttgcatcatgcaaatattcttacaccattttctcatccaatttaccctaacaataaaaccaaacatccatctctctctctctaggatactcacaccacacacacgcacacactctaccagccagacgacccatcaccggagctagtgttgttcggccgccttacatttcaaaaaaacttttctcgttttttgcgtttttttcttatggtttaccagttttttgcgatattttgcgatatttaacgatgtatttacaatgatagaacaaatatgaggtcagggatgaagcttagtgatgatttgcgatatttagcgatatttagcgatgtttagcgatgttttgcgatgatgttcgtgatgtgtttcgcgatgttgtgaattggagacatttaaagatgttttcgtgatttcgcgatgtttcgcgatgatgttcgcgatgttgtgaattggagacatttatgttttcgtgattttgcgatgttttgcgacatctagcgatgatgtttcgcgacatcgtcaaaaattagaaaaaaaaaatgcaaaaaacaagcattgttgtgaattggagacatttagagatgtt

SEQ ID NO: 345557 - DNA, 688 bp, Cannabis indica
aaaaaaaaaaagagagaataaaaatcgaaaatgaattcgagaaatggttcaacaacaacgcttttgaaggaggagtgttaacgaaaactatattggatactgcaaatacagaagagaagactcgacaacaagagccatcaaagacatcttaggaatcaaagtaatggatgcaaatcctgaaaggccataaacatgtctagctcgaatactcgcaccccaagacacgaaattttcattcacaaagccaccaacaccaacgaacagagtgttctttcacagaacaaaggagtatgatcaggtgagtgtaaatacacaaacaaaagcttaaactcgttcttcaatctctgtaaagcatccataaacccttcactaacgaaattgggtcttctcaacccataatccctctcaaaaccaacaacaaattccatagcttcagatgcagcagccgaaaccgaaaccaacggcgttgtagacgttgaagaatccccattccttccatgacctaatccgacaacacccaacgaatacaacaaaacaccaccggcagcccacaatccgagcccaatcgcaccagagattaaccttagactactagaagtaacagaaatcggtaagggatttttttaaaaatatacataaaatacaaaataattacaaaaataacctaacaaatcttaattacaataat

SEQ ID NO: 345558 - DNA, 564 bp, Cannabis indica
gcacaaaacccaacaggtggttcatttggttttcgcttcttgatatactagtaagttggcttcatatattccaccacatctagtagtacaacaaaaagtgtcgataatacaagaacagaaaaaagatgagcctattattcttttagatctcggatcagttttccctcattatttaatcatatcatgcatagcagaatttacatgatccagacattatggcaataaagaattctctttcttaccattttccccgagcctagatagctcactaatcagactattcaatttcccttactgcataatttatcacacatttagtccacatcttctaaccatttaaaactcagacggatatcaatataaatatgcatataccatacacatattcttattaaaattatcattatgctactttccccaatataatttataatagcctatgcaggtaatctaatagcaaataatataaatacttactataccatgagtcgacctttcttagcagcaaatgtacatattcgaccactcttcaggatctttaaaaccatggctgctctgatacca

SEQ ID NO: 345559 - DNA, 792 bp, Cannabis indica
cttcatattctgctacattattggtgcacatagctagaatatggaaagagtaaggtatcaagcctcccgacggtgtcacaacgacaattccaacacctgccccactacttcttgttgccccatcaaaatataattgccatgatgaagtattgactgtgaagacttcttcgtcaggaagatcttctcgcaactccatatcacctggaattgggtgtgctgccagaaaatcagccaaagcttgtccttttattgctttttgcgagacaaagttgatttcaaattctgatagcatctaagagggtcagctttgacactaaagtcacaggatgtgagagcaaatagtgtcgtagttttgtgacagcaaaaattaaagtcaaacacactttctcgattggagggtatttttgttctgcccctactaaagttctacttagatagtaaagagcaatttcttttccctcctcattattttgcacgaacatggctcccaaggagcggtcgagtgaagtgatatataatatcaatggtttcctaagattggagctctcaacacaagtgggtgcaacaggtacttcttaatgctttcaaaagcgttttggcatgccccatcccaaataaatggggactatttttttgcatcaaccgcgaaaagggttgacatctaccggacaggttttaaatgaatctttggatatacgcaagtcttccctgtagtccatgtagttgatgtaaattatgcaggggaggcatttccaaaatttcttttatttttgcagggtcaatttcaattcc

SEQ ID NO: 345560 - DNA, 639 bp, Cannabis indica
acatagctattttcttgggtagtggtgccttgggggcatcctttgttttttcccacgatatgttggcctctgatgagcacgatctttgcgaggagtggtgtgtcgcctatgccccctaggcagttgagcatgtggcgcattaccatgggaggtggatcaccttggttcttgcggactagtactaattgacggattagggtaccttataggtgatagtggtgctcgaataggagaaggttgctctctcctttcttctccacccatgttattattctcacggttaggccttggaggaacaacttgggtctcatggacttcatgaccacttcaatctaatggtacataggtttcttgtgcatgtcttgcatggattccaacatttggtaaaggttggtagtcccccctccttgttggattattcatggaggcatgttctctccttgggtgcccacttcttctcccaggtggagaaggatctcttggtacaggaggttggtctccatgcctttgggcttgctcttggagctctctattgtggcacaagatttttgccaattggacgtgcagagttttattttcttggaacacttcatgcataggtatggacctgactagtgggcgctccctagatggagatga

SEQ ID NO: 345561 - DNA, 1524 bp, Cannabis indica
cttttgacaattttattcctctcacagaattcaattaaccagtcaccatcaaattgggttatgttatcggatactatcttcatgggaatttcaaacctacagacaatgttcttgacgacaaagtcaagaactttcttataggttatggagaggaggggcttggcctctgtccatttagtgaagaaatcgacagctactaccgcatacttagctcctactcgcccagttggtaatgccccaatcaggtcgatcccccatatagcaaatgggtagggcgaggtcatcattctaagttctgttggcggtacgcgaggtttatgtgaaagcctctgacacttatcacatttcttgacaagctcgtgtgtgtccttattgatcgttggccagtgatatccttgtctaatgattttctagaaaaactttgccaacccgcatgatccccatagaaggcttcatgaatttctctgatgatttcatttgcttctgtaggaagaacacattgaagtagaggcattgagtataatagttttcgtgcctcatttttatcatttggagttgtccgtcgagtaaatagttaataataggtgtcatccatgttggacagctatctatcatctcgacgtcttcaatttcacatatacttggctcgctcagcatctctaccagaaccagattcagttatccaggtcgttctacgaggctagttttgcgaaggcgtcggcgttggagttttgttctcacgaaatttgttcgattttagagtaatttaacctttccaagttcttccaaacattctctaaatacttcatcattttcaaacctttggcctggtattccccaaggacctagtttacgataagctgtgaatcactatgacaaatgagacttttgactttcaatgcctctgctatctttaagccgcgatcaaggcttcatactcagcctcgttattggatgtgtcaaattggaatctcagagcatagtgaaacttaaagccttttggcgatattaatattacccctgcacctgaaccttgctcgatggatgcccgatccacgtataacctccaggtttccccgcctcgctgatcaggtggaatttcttctagagttataccttctatcaagaagtcagccaaagcttggcccttgatagatgttcaaggatggtatgttatgtcaagctgccccagttcaatcgaccattttatcaatcttccagaagcatctggttatgataaaagttgtctcaagggctgatgggttaacacttttatggggtgagcctgaaagtatggttgtagtttatgagacgcatggactaggcacaatgcgagtttttctagagagggatatctggattctgtccctagtaaccttttacttatgtagtaaataggttgttggtacttgccctcttctcgcactatagttgcactaatcgcatctttcgagagactaaaatagagaaacaacgtctctcccgttatttgttttgccaaaattggaggcgttgcgagatgcc

SEQ ID NO: 345562 - DNA, 832 bp, Cannabis indica
cgtcaaatagtacagaaccaccaaccctagtatcagcctatactcggtacactggtcatactccagctgctagtcatactctagcctgtaccgatgtgatacagtgtcagcctatactcggtacactggtcatactccagctgctagtcatactctagcctgtaccgatgtgacacagtcggatggttcgaagccaacatacatatctaatgtaatctaacaggcttcctacatgcacgctaaacatgtaatacatatgcatactgttatactaatcttacctcaattccgaattcaggtgtgccggtcaacctgactggaacgaactgcgcggcggtttacaggctcctaaaccataacaatcacaacactataagtgatacgctaaatcacttcccggggacttaaactaggaactaaagtttccctatcgataaaaagcatggcaataccccaaataacataaaaacgagaaaatctagggttcctgaaaatcacccaaccggcagaccggttgcccaaccagaattccggttgtgggaatttcagaaccccacccggaattctcgatgcacaacaagaattccggttcctcgcaggaaacattcaacaattcacactttgctcaaatcaattccaaaccataccaaaaattccagacctattccaaataccctaaagaacaaatccaaagcactaaaacagcccagaacacacagatattaaaaatgccatgtgaactccaagttttgagtttcaaactcaaacttggctaaagctcacctacaagcatcaaaccttgattaaaattacatattcatgcataacaaag

SEQ ID NO: 345563 - DNA, 929 bp, Cannabis indica
cacctttgctagtgcttccagaggccaaaaaaggggcaaggagatgctggcccactatatgaaccggctggtcctgaggtcaatgagcaactagctggtgctgataatgactcatctctggatgtgttggtggcggagtcttgaacgagttcaccaaggtaagtcttctttgatacttccctttaactttcaacacttagctccatatgctaaagtttttcctctgtgccaaccggtctgaagttggcctacacttactcccgggctaagtctgttgcttccaagagtgcggctttgtctgacaccttgaaggcagaggcgacttggccaagaaggaagctgaggaagccagggcgaacgctggagctgttcgtttggagttgggcgaggccaacaagaaggtgttcactgccgagaagaagatcttcgtgctgacaaaggatcttgaggctgctgaccgttttgaggagaccatcgagatcttatctgctgaggtaaatagcctcacggatgagaggacttctctgggagaagttcttcttcggatgaaggacgagaaggatgccaaggagggggagctttcggccgaggtggataggttgaaggagaaggtcaattccttggagactgccggtctcgagctcttctttgatttttggaaggctaatccccgagccaactttgactacttgggtgatgccaaggacatttaccttgagtattgcgcggcccaagtggcttatggtgggatcgaggcgactgcttcaacctccgaccaagctgcttcaacctccggtcaggctggtgatgcttctcctgttcaaacaatagatcctcctgctccagttggcccagaagaaccgaaccaagagcctgggactccagctgtttaaacacttccttttatctctctttttttttatatagat

SEQ ID NO: 345564 - DNA, 640 bp, Cannabis indica
atattttactttatttcattttacccactttattttttcttatttacttattgagttcgatctttatatgttactttatttcattttagccactttatttgttcgtatttatatttatttagctagagccaagatcttcatattttactttatttccttttagccactttattttctcttatttatacgtattcatctggattttcatattttactcttatttctacttagccacaatattttattatttaattttattcttttgagcatattgttatattttaacatatgctacatctctaatagagtattttaaaaataatataaacgaatttttttagttcatgtctataaaattgaactctaatggtagtgtatataatatgatctaaatttgagctaaaaattattctaaatttgttacaaaatatagcatgaattaaattttacaccacaataaatttcattttttttatttacttgtttacccttcattaatgtaattaataattttttatatttttatttagagtaattgacggtcaaaccggcttatgttttaatttttatacatttaatctcttactttttttgtggcaaaattcttttaagtttattttttttttgtaaatttgaagtg

SEQ ID NO: 345565 - DNA, 936 bp, Cannabis indica
aatattattaaaaactctttttttaatgtttcattcatgtacggaaaacaacagttaaaatactagcagattataacctgagtttactcccttgtaagtgtatgggactgtgtaaatgtttgtgtagttgtataattttattacaatttgcaagatttacaaatttaaaaacaatattatgtaatgaacattttaaaagaaaagaacgtaatattagatttataaatatttgaaaacaaattaatgacacaagttgaaaaaaaaatattataaataaaaataaaaaacaaaagagcttaaaaatgtctaacctgaaaggatcgcacatcaactttacaagttgtaatcataaataatatagtaaataccttgcagtcaaacaaatttggttgtttggggacgtaatcagcacgcacaatgataaagctagcgaagttgaaattagctggcttgtttttaatttgactctcgagacccaaatcaagatttcgaagttataattccacacattacataaagacaaacgaatataaatgcaatgcaattgagacattttcaacaaagagtatcatgcaaccatgcacggcaagagtatgataatcctgcaaaaaagaagcagggtgtgttcttgtaaaaaaatttattctaaggacaaaattttaatttatataaaataagtttaatttttgtaaaaaaaatgtaaatattataattaaatggattaattgttaaaataattaagccaaaggatttatatataaataaaaaaaattatttataaattttaattgctaaaaaaggtcttgtttaatatttatttaattacttaaaaaatagttaattataattaattaattctaaaaatagaatttttacttatttgtaacctgctattacaggtaaaaaaaaatgtaaccatatagttacaataaaaat

SEQ ID NO: 345566 - DNA, 458 bp, Cannabis indica
ttttttttgttaaatacttcatagtggaagatgcctaccaaccgaaattggatgaaggcgcaccggcgctctgcagagtttcgaagtggcgttgacgagttcattacggtagcaacgaaccatgtgaattctgacggattagctcgatgcccatgcatgcggtgtttgaatgtgaatttctacacacctgcaactataagggttcatttatttctcagcgggatccaaccttcgtacaatccctggtatttccacggggagactttttctcagcccgcagttgaacttcctgaaaatgacgaagaggaaatggcagatgtgttagcagacatgttaagaggggaccctgtgtttgacgaatctgccagcactactgattctttcagaaaaccccccatcaatgacaacaacaagtttgatgacttgtttaaggagatggagtctgagttatatccagg

SEQ ID NO: 345567 - DNA, 516 bp, Cannabis indica
aatcagagctaacagccggaccaccctcctaggttttttggaagactcagcctccaccatcttgcccttgcgcttccggtccagcggggctatgatctcaccttcgtccgcctcctcgacctccccttcttcatcaatcaagacgattgggcctaaagggacgctggaagaagacctccccgggtcactgtctgggtaggtgccggaggaagaggagagtccgggctgtaggtttgggaaagagtcgccaagaggtcttccattggcttggctgcttcaaagagaaataaacaaagtgtcagaatggccataagaaagtatgcacatgaaaacgaagaaataaaactagtcctaccctgaatatctaactcagccctatcaaagtcttgcactacaatactggcttcatcatccccaagaaagctgtctagcggagaaactagctagaagacagataagctgagtgatccaggggaatgggtgcaggaggtccagaacccatccaggaccggccta

SEQ ID NO: 345568 - DNA, 1044 bp, Cannabis indica
agaggccaaaacatgtcactgcaatggcaactatcctgctgaagtggttgaagctttagggatcaaggaagctctcagttagataaagaacaaggcatggaataatgctgagcttgagtctggcaatcttttatctgtgcaagcaataaaaaacaaccaaaatatgtcttctacttttggtattattatagacgattgtcgtttgttattatctcttttaaaggatgttaagttacgttttgtaaaacgatcagcaaatcgagttacccatgctattgcaaggcactcttaatttattcctggtggttgcatcttagagcaagatatctagcccgatttgagggatatcttgttttctgaatgctcttaactaaatgaagttgatatttcattcaaaaaaaaaaattcgtgatcaggcaattaaaagtaattaagtacgaatgaaatagaatacatagaagttgagggaaaataaatcatattaaaaccataattaaatatcaagcaatctccatctaaaccctaatgaactgtttagctactcatgttcatggtagcaaattcacacattaattttagaaaagagaagaaaatagagaggaaaagaatgttgaaaaccctctgaagaacgcctccagtattgaatttgatctcccaaattcgtactcctttgaatgcttctgatttccacctgaattgcttctgaaatccactgaagttcacttcttatatagccaatgggagatagaaaagatagcataagatagcacatgcagaaaacctattcaacttcgaattagataggacagatgagcccacgttgaaaagtcctatttctctttgaattgggggtgggctgcggcatgccctttctacgccacgacccgtgttggcttttccacacaacttcagactcttcaggacacgggtcgtggcatgctcttttccatgttgcgacatggtcctcatcttgtgcacacttatctttttatgtgatctttaatcttttttttttctcatatttttcctttgatattttctaat

SEQ ID NO: 345569 - DNA, 869 bp, Cannabis indica
aacactgatgaaatagggactaagtcttttgaatcatataatcacaatcacattcaactgtgttgacaatactgtaattgtgaataaatatatgttctagacttaactgattttgtgcatatattaaacatattaaaccataagcatgacaaattcatgcaaacataaatcacttcaaatttcttcgattgacatgggtgttattagggcacaaaacccaacactcaattaattgtgaattaagtcgtagaataccaggtaaagggtttaaaaatggaaaaatacttggagaagattcggaagaacttggaaaagtttgattattttaaaattaaacaaattcgaagagaacaaaactataatatcgatgccttggcaaaactggcctcgcaaaacgaacatgatgaattgaatttggtaccggtggaagtattggatgaaccgagtatatgtgaaaaggaagaagttgagatgattgatagctcgcctacttgggtgacacccatagttaactatctcctcaacgaccaacttctcgcagacaaaaatgaggcatgaaaacttttgtattcagtgcctctctacacgatagtagaaggaaaattataccagagaggttattcaatgtctctcctatggtgtgttctccccacagaagcaagcgagataatcaaagaaatccatgaaggattttgtggagaccatggaggttggcaaagcttgttaaagaaaataattcgacaaggatattactggccaactataaataaagacacacacgaatttgtcaaaaaatgcaataagtgtcaaagattttcacatatacctcgcataccaccaacgtaactaagaatgatgatctcgccata

SEQ ID NO: 345570 - DNA, 1226 bp, Cannabis indica
tctctctctctctctctcgatttatctagaaaacaccaaggaattaaggattttcagtttcagttcagagtattttagcaagtatttggtgtatccaattcaaggtaaaccccttagccctcatctctttgatttcttaagttcaaggttaggttcttacatgattttctatggttagtgttctgtatgtttaatttggttttgattatgtttttcagaggttgtttgtagttgttagagttgaattatgttaggtttgaggcttgtggtgaaatttgatcaaggtttgagcttaagagctcaaactttactctctaatggtgtttttggattcaaggtatattacttgatgttattgcttgatttatacttgttgtggcctaattaggaggtctggaaagtttgagatcatttggggtcaaattggcttgtttagaaggtttttggggttctccacactgaactggtcgatcggttcagtgggacccgtaggaattgaaattctagttggtccccaggtaaccccacataaccggtcttccggttggggaaccggtctgccggttggggtattttagggaaccctagtttttcccatttttgcaatatttgggatattgacatgttatccatcgatagggaaacttctagtttcgattttaagtcactgaaaggtgacttagtgtgtcactcatcatttttacgaatattgtgatttagggccctgtaaatcgtcgagtagctgttcaactcgggttgatcgccacacctaaatttgaaaacgaggtaagattagtataatgatatgcatatgtgtttacatgtttagcgtgcatgtttgttaagcctgttagaatacattgatattggtatcaatatacatagagttgtattggacactaataaatgtatgtttggcttaagtactatttgacagtatcacaccgatacgactagagtattgagtatagggtgatattatggttaggggtatgtgcgcataatcgtaatcctgtttagatctatgttatgattatgcttttcttactgagtcagttgactcacagttattgtatgtatgtatgtgtaggtaagggcaaggctaaggctgagtagctgtgagttcgagcggatgaagattgtaaatgtcgaggcagttagacctagagcgtacaatctttgggacaactagttgtattttctgtagtcgctagacgacaactttt

SEQ ID NO: 345571 - DNA, 847 bp, Cannabis indica
gcttcttcgcaagcatagacaaaataaccttaaatgcttatcatttccaataacttcagggcgatacagtaatcctttattgtacttttaatttcaacatactgcactttttcaacatcgagttattcatacaaaagatcaaccaaacgtgagtaggttatgttcgtatcaatctcgaatgttaaatttttagctcgattataaacccaatctctatccttaagttccaaaacactattatacataacaaacgcaaatagttgaacctgtcatccacaaacattaaaaaaatcacaattaaaaattttgaacaaaaaactaccagaaaagtgataaaaaagttctcaaaaaactataactttgtaaaatatcggacaccatcgggcccatatcggacaaacatcgaatcacttctgaacaatttcaacaaataaaaattggaccacactatcggacaaactatcggacttgacccataaaaccacattctgattttccattggacatacaattggacctaaattggacaccctaaaccatcagacatatatcaggcacaccatcagacctatttagacatcatcccttgttgaggattattttaccagaatttagatttactgacatgtatgttgattaatacctaaatatgaattctctaatacaatgaaattaaacacataaaggtttagaaaaccttacattaatggcagcggaataatatgactccttccgctcagatctctaacccttggtccttcttgtcacggagtaataacaagatctgagcctggatctccttctcaccttcgggttttggttaaccactgtcttccacactatgatt

SEQ ID NO: 345572 - DNA, 784 bp, Cannabis indica
cttgattcctttctgtagcagcagaatatatgattaggctaggtttttgagtatgttgagaatggttttgagaggtttctttggctgcttggattgaaatgtgttggatgaagctaaaagttgaatttcttcacttgagcatgtgattttgagttagagattgaatttttgtgctacgaagcttgagatatgttgtactgttctggaaggtttgaacaggtttggagaagatttggtttgattttggagccaaaaacctgagtttccattttctgcagcaggcgaaaccggttaaccggtttcacaggcataagtgaaaccaatggaccggttttggcagcagtgggggaaaaacctagtttgggcttcgaagccggtttcgctcggggtgtttttaagaacttagaataggttattttagtgatgtttaagctattttaaactagtggggagttagaaacttgtctaattatggagctagggtttgttaggaatatggataagttatttatcgaatttctttgtcgtgacataggactcaggatcgcttagcttgtttcccactcaggtcggcccgcatgcttgagttttgaactaaggtaagaaaagtggtaagcaccatgtgtggttaattgttgacggttgaataattatatcttgattattatcaagattctgattaaaagtatgttgagcctaggttatgacctagggatttgggaacggttactaccgttatgagtaattactctttaaaccgcggttagatttcttacttatcgtt

SEQ ID NO: 345573 - DNA, 540 bp, Cannabis indica
ttatgaccaaaacaaaaacccgaaaaaaatacaataagctgccaaaaatggtcacggctacttggtttaaaaacccaggaaaccctgtttccagccacgaaaattcatccaaaaataccaatttttatgctatatcaacccacaattataccaaactttcacctagcgtaaaccaattagagaggaagtacacctaattcacttccaacaacaccaaaaaccagcaactaaaatcatcaatttaagcaagctttaactagagcaaaaatctcaaatcaagagcttgcataaccataaaaaaaatatcagcatctttacacaaatttattctcaatataacccaagcaaatgccttaaatcctcatccatatgcataaaaattcagattataacaacaatcacataaacacaattatcaacaattcaacatcaagagtttagagcttaaatttaacaaaattacttacaatattcagcaagaaaatatcaacataaatttcaaagtctcacattcaaatctccatctaagcttccaaacat

SEQ ID NO: 345574 - DNA, 781 bp, Cannabis indica
tagttgctgtgcgacctggattacgtattttgtatattttacaaaagtttagaagcaggatcttggaacttgtaaatgattatgtaaagtttataaagtttaatatttagtataaaagttttaatttgacacgatttttgagaatgttctttgattagcaaagatagctctacaattaaaaaatcactgtagcgtgccttaacattagggcgttacaatttttgtatcaaagccactaggtttgtctaccgaagctctccaagacacgtacaatcttcatcagagaaagctcggctcacaattcagtaagcccgtacttgtttagtattatatgtgattagcaaagcatattagtttatagttgtttattttgatgcattgccttagaatccataagaacggtattaagcttttatgatcgctgtcaaacttgcctggcttatgggtttgcaggctaagtcctattaaatggacgcccaacaaaatacaagaagtcagggtaatagggttgagaccggaggcggtcagggaaatcaaattccctagaatccccgtggtcgcggctgaggccgtggaaaaattccaggtggttatcctgtgaatccaccataagctcctccagattgggagcagaggtttgcggagatgcaagatcatatccgtcagcaagatgaagaaattttgagactaaggcagtatggtcctcttgcagtgcctcaacctcaagctcaggccgtactaattcctgcggtgccaacaaaacaacctgttgctggcaacc

SEQ ID NO: 345575 - DNA, 476 bp, Cannabis indica
agggtggtcatcttgtgaatccaccataagctcctccagattgggagcataggtttgcagaaatgcaagatcgtatccgccagtaagatgaagaaattctgagactcaggcagtaggatcttcctgttgtgcctccaccacaagctcaggccgttgtagttcctgcggtgccagcaaaccaacctgttactagaaaccgtatggagtcgttataagagaggtttcgtaagcaagcacctctagtgtttatgggaggtcctgatgtgatgaaggctaagtagtggctcacaataatagagagaattttgaaatttatgggggtggatggaaatgattgggtgacctacaccacttttcagttctaagaagacgctctcgtgtggtgggaattggtgtccctcacccgagacgtcactgttatgacctgggaggaatttcaagaattgtttaatgccaaatattacaatgaagcagtc

SEQ ID NO: 345576 - DNA, 999 bp, Cannabis indica
tgaaaaaaagtgcctctaaaagcttggtttgtagtagtgaagggaaatcaggtgttgtccattgctctacgggcagcgcagtcggccagtttaaacttgcatctgtgacattatgttgttgagcattaaaccattcaacataatttaactttgccattgtcactacctcactcgcatcagggtgtttggatgagttctaaaccaaatcattacgatgagtccacactgaccaacaaatcataccaacctcaagagcctcggccgtgttccacgatgccaaaccagcttcaaaccaactcgagaacaacatcgcatcaggcgccacaacagtaattggaaccttgctccagcaactttgagcaaaagagcacctcaccagaacatgcagagtcgtctcaagagcagcaagacaaaatggacatgttgcagcaattagaacatgttttgtggaaagatgaaactgagttgggagactgttcgtagaagctctccacaaaaaaatgagaaccttcggagggagctgtaactgccataagagccgccagaaaccagagttatctggaatatccctgctggttttcattgattgaagcagggaatatgcactcttaacagagaaaacacctgaagtatcatgtaaccaataccacaaatcagtactcacatgactactgagtggaattttccacaccaaagcttgatctctatcattaagcacatcagctataacttccccatcccattcaaccagaccaactttcattaaagagtcaacagccttccccaccaatcatggatagacagattcaatgaaagggttcatctcatcaggaagctaaggctcagacagaatattgatggtagaaccatcacccacaaatctctgaaccccagcccaaactaactccttagcctcaaacacacatctccaaatataacttgggttactcccaacgtcgatgtagaaagaccctgaagaaaagtatctagctttgaaaa

SEQ ID NO: 345577 - DNA, 710 bp, Cannabis indica
aatttctcagttgtttattctgtaagtttcattattttgacagtttatattaaaagtgagtctagtcgtatctagtgtttctaatctgttataactgcataccagctttctgttaaagtctgtgtgagtctgttatgatttaacggttggttttagttattgttaggtcgtctgaactattgcctataaatagttaatttcgttctgtaaattgattagctagctaattgatatttttggttagttcggttatatcgtgtgagttagtgtagtatcctgtattgcttgttcttattttacaggtctgattgcatagcttgaagatagtgatctatagcagaaagatcagagcctgatgttgctgagttcagactgaagggagctcagtgtcatcttcgtcatcagatctgaagggatttcagattgaagagaagtgtcgaagacgaactctgctattgcacaagggattgtgttcatacaatcaagattcttgattaatgttggtaattcattactaattgctgtaaagattgtattaaattcctaggagtgaactggatattgtaatacgaatctttaagatttcgtagatgttattaccctggttcggggaacccaagcactagttggctgagatgtgttctcagtgcagatgaagcttgtaaatcattgtgtgctttcctgctttattctcaatccaattcttgaat

SEQ ID NO: 345578 - DNA, 654 bp, Cannabis indica
ataaaaaatattaaaattccttttatatttattttttttaaaaaataaaacaaataaaactacagtgatcgccggagttgtcactcgtgccgaaaaagtcaccggagtttgctgtcggcactagaaaagttgtcggagtagctgccggtgccggaaaagtcaccggagttcctgtcggcgcggaaaagtcgtcagaattagcattgtcgttggaaaaatcaccaagaaactggtttctaagaaaagctattctaaagtgattaggggtggaccatcctatggtcatcaagataagtaagtgtttgtttcaataaataccgcttttctaagaatgtgactaaatctgaaaacaaagtagcaaagtagaggagaatttgtaattccaaagtgttttatcatcttattctatataagatggtcccactgcctctgttgtcttaacacaattgatgaggacaataccattaatgttcctagacagaaaatcatgatatcttgtcgtagtggagggtttcaaggaactcgccttgttatggattaaaagacacttgtgataaaactattattagtttaaacaagtaattgataatcaaaataaggaactaagaagcaaagtcaagagaactatttataaaaccattcatatggagtaac

SEQ ID NO: 345579 - DNA, 892 bp, Cannabis indica
gaactcgggcccggacacggtcgtgtacccagaccggaactttgatcctgacctggacctaaatctgggaacctatccaaaacacagacttggaactagataaggatccggatacgaacctggacattgaccaagacccagactgggatcgaaatgctggacctagatttggacagagatcttgactcagacccgaacttggacccgcactcgggacccgaacttggacctagaccatactcagatgggggtccagacctggacaaaaccccggacacagactaggacccgaacacaaacacccacacctagaatcatacccaaagatagacccagacccggacccaaactcgaacccagaccaagatcagaacacaggacttagacctagaactgaatccagactcagattgggattggaactgtggactcgtagccaacatagaccaagacccatgacacgtacccacacccgaagcctgatctggaactagactgaaatcttaacccgaacccaaactcagaccatgactcaaactgcgacccgaactcaaacccaaactcgaactcaaaatcgcaaatggaactagaaccgaactaggacacggactaggacaaagacaaggacctaaacccaaacccgaacccagatcaaaaccaagacagagacctaaacaaaaagcgagagtaggattcgaacccgaacctaaaccggcacacaaacccacacaataaccgggacctggacccagaatcaggatagggacatgggaaacaaaactaggaacgagacctagtacccaaccaagacccgaacttgaacctaagacccagctcgtgacccggcaccagatctggaacctaactgggacccgagattgggatccggatc

SEQ ID NO: 345580 - DNA, 641 bp, Cannabis indica
atggattttctatccaagtattcggctagcattgattgtaagcggaaaatgttaacttttcaggcggagggtgaagatccatttgtctatgttggatctgttcaggggtctcggatctcaattatttatgtgttaagggctagagatttactacatagtggatgtgtaggatttttagcggttgtgattgactccagcagacccaaaacatttaggccttaggtagtcagggttgttaaagaatttctcgacgtatttcccaaagaatttccgggattatcaccacaataggaaatagattttgtgactgacttggcacctggaattgaacctgtttcaaaagcaccatttagaatggctccagcggaactcaagaagctaaaaatacaacttcaaaggatgcttgatttagggtttatccgacccagtgtatcaccctggggagctccagttctgtttgtgaaaaagaaggatggatccctcaaaatgtctattgattattgggaactgaacaagttgacaattaagaacaagtactagttacccagaattgatgatttgttcgatcagcttcatggacagactatattttcgaagattgacctgcgatccggttatcatcagctcagaattcgggaaga

SEQ ID NO: 345581 - DNA, 1138 bp, Cannabis indica
aagaattgaaaagttattggcttatctcaagaagcttacattaatcgtgtgctcaaaaggttcaacatgaattaatgtaaggctggttttatgcatattctaaaagaggacaaattttactaagcaacattgtcctaagaatgaattggaaaaagatgcaatgaaaaacatcccatatgaaactatagtagggatttttatgtatgcccaggtttacgacctgaaattgcttttgtagtcaatattcttgagagatatttatctaatcctggatatgatcattgggttgcagtcaagaattaaagtcatggaatatttgcaaatagtgaatagttttatgcttgtgtataagcatgtcgacaatcttcgaattattagttattcatattcatattttggtggttgtgtagatgatataaagtcaatttctcactatattttcactttggctggtgcaactatttgttgaaaaagtgttaaatagactttaatcacatcatctactatgtatgttgagtttgttgcatattatagggtatctttgcaaactttgtggttaaaattttttattttagagatacaactagttaattctattttctctcgtatactaatctattgtgataataatactactgtattcttttcaaagaataatgagattagtagcgctttcaaatatacatgaaaataaagtatctcactgtgagagacttggtcaagaaaggagacattgtgatagaatactgcaacaccaagtcgatgttagtagatcctccgaccaaaagattaagtgccatgttgcttattaaatgtgttgttgatatggatattttataatcttttattcttttgggttagtgggagtttcttgttctatcatttgagattatatttatatgtaattttcttattgatgttatgaactacttgatttgttttgtgggtcaataatttttttattggatatttatgctttcaattatgttttgttatattatcgagaatgattgaattaaaagcatgtagttcatattttgttgtgattattgtcttttaagttcaattgtttaatgacaatgatattttgttggcgtaattttttaagcatgtttagtgacactgacttatttattaa

SEQ ID NO: 345582 - DNA, 1017 bp, Cannabis indica
tttcattgacagcagaatcaagagtcgctcttcattttaaatttaaccacaagtacgatggtggtacagactcataggggcctggttgatccaacaaatccacaggcggtggatcctgcattgcaaaacccaggaaacaaaagggttccgccagttgttaatcccgagcagccgtcaaacgcgggtcatggtgtaacaactcctgtggatgaaatcgcgcctggtgtgcaagagactgggaaactagttcagtagccagccagggcattcataacacagtcgttcctcctgctaccaacgttcgaacaaccattggagatgattctgagatcgaaaactttcgtgccgctcttggacacgtgtaaggtcataccaacaccctacccctacatcatgatcaggaggaactccgcgctgcggtaaatcttgcgtttgaggaacagagacacatgtttgtcgaatggagggacaaagagatggaagcgttaaaggctcatcatgcagagattgacaatcgtagtccacaagctactgtgctgatacgaaaagcctatcaaaatgttgggcagcaacccccgaatgtcatccccttaggtgacacagacgaagatccaccaatgaatacatctcacactataaattgtcagccgccaaatctccggtcacaggttccacttgtgggccaagcagtaggtgggcagaccttgtctagttattaatcgagagaagtcatacctgataattccaaccaggttaaaggtgctggtcagcacgttaaccaaaccaatcaatcactaagatagccaggcgtatctgtatttgaaaggttaggaacgactcatgatctcagaaatgatctcaatagaaggagaggagtagacgatcagcttggcacgccgatcgtatagccaggaactctactcaaattcccgctcagaaagattctgacgtgactcaaatctgccaaaatgccgaacaggttagtccagctgtgcaggcacaactggacgaactaaa

SEQ ID NO: 345583 - DNA, 586 bp, Cannabis indica
gttaatatgcggtttaaaccaatcgcaacgcacattataaaaaaggaattttttttttctataataaactaataagggcagtattttacatttatatcctagaaagtaaaaataaacataaatagaaaacaaaagtttctatttacaaaaataccggcctaaccacaaaaaacagaggaaactcctccttcttcgtgacccagccgaaacactctaatccaccaaatttctactattttctttaaaaaaccaagaaaattagttcaaatcaagatgtagatctcaaagaaaaagcaatcaaatcccgaaaaatctaaatacagaaggaaatgcagaaaaagaaaacagagagattttgacctccattgttataaaaaaaaaaaacgcaaaaacaacctacaaacaaaacttgaaatcgtacagggcagagaatttgaagagaaggagatcgggcaaacttcgaatcttacccataatcgaattcgagaagaaatttaaggtacaaaatttataataatcctcttcgtaattttttttcttcataatggaaaatattttttaggacatggaactgttgggttttatg

SEQ ID NO: 345584 - DNA, 669 bp, Cannabis indica
ttaggtgagattattattatgtgtatctaaatattatagtttataatgttgtcaattaaaagtgaataccgaatgcatatattagtgtttaagaaagcttgatgatttaaatatgttcttaagttaatccaaaaataaattaaaaattgatgttccaatacttaaagaaacattacttaaatgggtgtaagataaaaagaaaattaaaaatcaatctctaaattattgataattgaagatagcatttgtctaaaaattgtagataagaaaactaatgatagtcattggtggatttcaatcttcatttgcttcgatagagacaatagtgtaatttttgtattttgcacttttcattctagccgggtccgcatatatctggattgtccattttttcgttgataaattgaatatggtagtgtcgacaaagcggcggtgttcctgcaaaccgtgatgtattttcatttaagatgattagacatggtgtgcatagcttatttaattaaaaaaatcaacttatgaaaggcatgtaaaacttttttttttaaattacacctctgcagtatattttttccacaatatctgcgaacatgcatgacagcagataggctctttgtattgtcatcaagttcaacatatgatatagcactgtaaaatgcataataagattgt

SEQ ID NO: 345585 - DNA, 548 bp, Cannabis indica
aagcagaccaagaatttaccaagtaaattcactaacttattaattccatgttgcatccacgcatagaactcagatattgcgctctcagttatatagaacgctctatatattccaccatatagatacggtattaattatccattgttataatcctaatttgaccaatgaccctctatagatgatttacattgaataggaatccaaattaccattacaactttcaatgtattttatctttaaaacacttagctccgtataaatgatattttagcgaagtgaaatgagtactcaacaatttatctatgtttagccaagctcgaaggaaatcatcatttcacttactatttgcgagatagaagctatagattccatatctatgtttagcgctcccactcaattgcactaccatgttcctcaaatgtatgtatcgccctggcctaaaagtaggcttaactaacaaatcaaagaacatgtgtaatactcttgagattgaacctaaacatattaggattaagatcatttaatctaggatcaactatgtgatattg

SEQ ID NO: 345586 - DNA, 665 bp, Cannabis indica
ccaaattcatcttcaaaatagatagctttatctgattctatcaccctggtggtgtgagaaggaccatagaatctagaacctctcgaaccaatagtgtagcctacaaaatagccactaatagtcttcggatcaagcttcttagattgtgggttatagggccttacttcagctttacatccccaaacatgaaattgactcaaactcgatttcttgcctgaccacaactcgtatggtgtctttgggacagacttgctaggcacttgattcaatacataagttgcagtccttaatgcctcaccccataaaaattctggcaagctagaatgaatcaacatacaacgtaccatgtcaagaagtgtacgattcttctttttcagcaattccattttgttggggtgtcactgacattgtatatcttgcatcaataccacattccaacaagtatttggcaaaaggcccggggttccttctagtttcatcataacgcccataatactctccacctctatcggaattgacagttttaatgttctttcccttttgaagctcaacatttgttttaaaaatcttgaaggcatctaaaaattcagatttttcacgaatgagctcagcatggccatattgaaaaaaatcatcaatgaagtgatgaagtatttataaccacc

SEQ ID NO: 345587 - DNA, 904 bp, Cannabis indica
ttgatgatagtgacgatattgatgatagtgacgatattgatgatagtgacgatatcgaccgtgactttgatacggagctggagcttctaactatgatgaatgcgctaactatggatatgatgccggaaatagaccggttttatatcacccttcaattcgaattagcaaaagcaatgtctccttgcataatatggattccaaacattcatgatctggatgtgaatgagtcgaattacttatccctcggtctattattgaactatctctccagggattgtgaaagatgttccactagaaatattcttgttattgcttcgactcatattccccaaaaagtggatcccgctctaatagctccgaataaattaaatacatgcattaagatacgaaggcttcttattccacaacaacgaaagcactttttcactctttcatatactaggggattccacttggaaaagaaaatgttccatactaatggattcgggtccataaccatgggttccaatgtacgagatcttgtagcacttaccaatgaggccctatcaattagtattacacagaagaaatcaattatagacactaatataattagatctgctcttcatagacaaacttgggatttgcgatcccaggtaagatcggttcaggatcatgggatccttttctatcagataggaagggctgttgcacaaaatgtacttctaagtaattgctccctagatcctatatctatctatatgaagaagaaatcatgtaacgaaggggattcttatttgtacaaatggtacttagaacttggaacgagcatgaagaaattaacgatacttctttatcttttgagttgttctgccggatcggtcgctcaagacctttggtctctacccgaactcgatgaaaaaaa

SEQ ID NO: 345588 - DNA, 869 bp, Cannabis indica
tttcctttacctacacatgaaagcaaaactgtgagtcgacagacttaataagaaaagcatacaacatatcatataaattccgacttgtatttaggcgcccatacacctatttacgaggctcaacagatgagtaagaacgttccataccagggtatagccactataccacatacactacgtacctcactgtacgagtgttggtagggtttgtttcacaccctgagtaccactgagtgatatatcacacacactcagtaccttatcgtacctgtgttgtatcactgtaatgtactctcaattaacattcactataccaatgcactctataacttactgtacaagcattggtagtgccattaacaatttaagcatgcatatatacatagcatatacatacactcagatattgatatcacacattatattcagttcttaccttcttttcgaattcaagtgtgctggccgacctgaatggaaagtctcgtgctagatggatgccctaatcacattatgaaaccaggtaagttacatgatcaaaaccctaatcttggaaaacccaaaaccataaccgtaggttatgttatactttctaggggttaatctaacagggaaacacccaaccacgccacagaatagacaaattgagaaaatattaatacggaccgtttatcgcataatggttcggttgcggttcgtaataaatagttaacgattaaaccagatcggaccgtttataataaataattcatttatatatatatattttatatatgactatatgtataattttgatttttttttttgtatgtcaaggtttttattgcatgaattttagatttttatgtttgacttttgagaatatttttata

SEQ ID NO: 345589 - DNA, 623 bp, Cannabis indica
atgatagagagtactttataatttatttgatattcaatatcgtatttaaggagaccattgacattattggaaaatatcactttattatgcaattatggaaatgcatactcacacagaatgaggaaaagcttatgaattgagatgcaatttattagaccacaaagtaggctgtttattaaacaaaaggctatttaatttagtgtaaaataagttttaaagttgttaaccaagtatgaagatagtgatgattgcaaggaagcattggtagcgtatgaactagggagtgaaaccttagtggtaatgatggaaaataacacgagaatcttagatgttgatgaatcaacattatcaacgggggactcactataagtttgcatagtagttcatgccaagggattatcaataaaacagagattctacttgaggtatgtatatttcaaaatgtgtttgaaaagatattaagatttctaccaaacacataaaagaaacttcaggatcaaggaatgatctttaattaattgttattagatgagatttcgagaaatgcttagctagtatgagaaatgttgcctctattgtctaggttacatcaattcactttataatggtagttaactgtaagt

SEQ ID NO: 345590 - DNA, 450 bp, Cannabis indica
tttttttaggaatggtaagggaatcaaaggattttgctggtgaactgtttgatgctttggctagaagaagaaacatatcagtaaaagatggtatcactagagatgaactgagaatgttttgggaggatatgactaatgaagacattgaagctagattacagatcttttttgacatgtatgaattttagtcctaatttcttctttcttgtgttccaagtaaaatgtttatccaagagtactaatttttcaaatttgttatttatttaggtgtgacaagaatggagatgggaaactttcagaggaagaggtcaaggaggtaagacaaagattctgaagttgttgataattttctctatataatttattaagattttgagtgttttgtgttaaataaaatgaaaaaggttatagttttgagtgcctcggtgaacaaattggcaaatttcaaac

SEQ ID NO: 345591 - DNA, 982 bp, Cannabis indica
agtttctttgattcacttgttaaagaatctcaaagaagatgatttttacaacttagtataatgtggatggcttggaacatgatctacaattatagaatcctaactttcttaacgaatcaaatgttgattctatttaagtgttaattctggaattaaaaagttatacacaaatttaaattggatctaaattagttcactagtgaattgacgatactaaaggataaagaattaattagaaaagtaaaacagtaatttaaaataaactaattacgaactgacacaaggagggctaatcactggaattagttatatcaatggacaatgtagtaaaactcagtaaatataattctataattactatgagttcaattctatatttatagtggagtaatcatggaattaataaacaggaatgttttgttgatgagatccaataaataatctagtttattagagtttataattataggtccatggtccttgaatcgctaccttgaaacactatcaagggagaaacaaaagttgtatatggaattcaaaaaatctattttgatttgtcaaaatagtaattatttattttgtaataaatgatttatttttcaaatataaaattagataaattgggaaagacaaaaattatcaagacaaaagacacaacccttgtcttaactaagacagagggaagtgccacctacactgtttccagacagggccggccctaagcataagcgggctaggcccgcgcctagggcccaaataaaaaaattaccttttaaaaaatatacatattttatttgataacttttaaaaataccatttatccttatagtaagggtccaaaaaaagtttcgcctatggcccatttcaactcagggtcgaccctgtttccagacacaggcgaccctaatgtgaggtgtcagtgtgattttttttttgtttaattaattaattaattaattcaaaagataaatatttatttaaa

SEQ ID NO: 345592 - DNA, 519 bp, Cannabis indica
tgctggacctagatctggaccgagatgctgacccaaacccaaacttggacccgcactcgggacccgaacttggacctagacccgaacctagacacagatcggggtccagaccaggacacaaacccggacacagactcggacccgaactcaaacccacacctagaatcagagccaaagctagacccggacacggacccaaactcgaacccagacaaaaatcagaacaaaggacttagaccgagaacagaatccagactcagatcggtattggaacttgggactcggacccaccctagaccaagacccaggaggcgaacccacacccggagcctaatctggacctagactgaaatccggacccgaacccaaacttagaccaggacttgaactccgacccgaactcaaacccaaactcgaactcagaatagcaaatataactagaaccgaactaggacgaggaccaaaaccaaaacccgaacccaaataaaaacccaaacagagacctaaacacgaaccgag

SEQ ID NO: 345593 - DNA, 529 bp, Cannabis indica
ttgattcaaggaatttttttcttggcttttctcttttctggaatagttgaaacttttccttagataaataacaatctatatctagaagccgagaagcttctatagattgccattagaaacatgctccagcatcttaccagagtaagttgcttgcactagagtaagtaaattaccaggtagaccacaagccataggtttagatcaactctaacctataatactaggacaggaagttttgttaagtccatcgaatagacttactaacgaaatttcctttcttgtccttgtaatagaaaacttttggttactccatatgaatggttttaaccatagctctcttggatttgcttcttagttccttattctgataatccattacttgtttaaactaacatggatttcatcacaagtgtctaccaaatcataacaggatgagttccttgaaaccctcccacgacgacaaggtaccgtgaatttttgtctaagaacactaaatggtattatcctcttcggttgtgtcaagacaaca

SEQ ID NO: 345594 - DNA, 710 bp, Cannabis indica
ttattagatttctgatggtatttcagggcctttttctgatcattttttgtcccccttttttcagtctatcttgcatttatttataatcacatagtaggcaattaactacaggattgactgatatttttacaacgattttcccctaaaatcatggggtttgattacatatcacgtaaaataaatgcgattattatttgaatatcacacatctgtgattaatccgcttttactgtgtcaaaataaacgtgtattaaatacgttgcaaaccgtatcgttttgggatgtctcgctgggaatggagcagcgataaccttgatagctagctggagcttttcctatttctttccaaggttgataatgtaaatctcgccgcttttactctggaaacataacaccgtatcagacaatcgcagtttttggtgatgaggtgattttttttcgtgtgcatgtcttcctatggcgaggtggacgcctcgctatcgcttgctttggttcacctgtctgttatactcaacttgtctactgcatattatacgctaagtgtcttcacagtcagtatatctcatctacgtaatcaaggttagtgcctcgtcttatacaccttaagttacatggtttcttgttgatgcgcaaggcaacagtttgtatatctttatctcgcataagactattgtaacaccctaactaacgtaggcgtattacgtgatttt

SEQ ID NO: 345595 - DNA, 1300 bp, Cannabis indica
gatgtcgtcgataaacacaaccagaaattcataaccagaaattcataatgaccatacctagtacggaacgccgtccttggaatgtcctcctcttagattctcaactgatgatagcctgattagagatcaatctttgaaaagaccgtctttccctgaagttgatcaaaaagatcatcaatcctacgtaatggatatttattctaaactgttagcttatttaactctcgatattcgatgaacattctcaaaggcccatctttcttcttgacaaacaataccggagctccccagggtgacacactaggccgaaaaaaccctatgtcaagtaacccctgaagctgaattttcaattctttaagttctgctggagccattctgtaaggagccttggaaaccgcttcagtaccaggtgccaagtcaataacgaaatcaatttcccgctgaggtggtaaacccggaagttcttcagcaaaaacatctagaaatttccgaaccaccttgatgtcttctggccgaacagtatctggccgaatggtatctactaccacggccagaaaccctagacatccatcacacaacaattctttagctgataaggccgaaatcaccgggatccgagatccctgaaccgaaccaacaaaaacaaacggttcttcgccttcaggttggaagattaccatcttcctcttacagtcaatactggctgaatatttggataagaaatccattcccagtatgatatcaaaatccactaaattcatctctatcaaatcagcgctcaactctctatcctctattctgattggcatagacctaatccaccttttggagataactaactctccgccaggcagtagggttccaaaccctgattcataactatcatgcggtctatccaatttactaaaaactctagccgccacataagaatgagtggctccagagtcaaacaacacagagaaataagagttgttgaccgagagctgacctgttaccacagaggggctggcttctgcatcagcctgagttatcgcaaacacccttgctggagtgggttttgctgcagcctttggtgcttcagttctgagctgagggcaatccctcttgtaatgccctggcatgccacactgaaagcacccttgtcctctacactcccctagatggtgccttttacaactggggcactctgggtaagtgtatcgggtctcagaactaccctgacgatttcctcgaccctcgttcccccggaacctcttgttctgacccgagccactggttgcagtggatgcctttcttttct

SEQ ID NO: 345596 - DNA, 826 bp, Cannabis indica
agaaattcattttctcatttttggaaagtaaaggaaaagtcaaaaaaatcaaaattaagagaactatctctcttttctctttcggctgtggcaaaaaccagggggaacctcaccattcaagctgatatttcttgagatttaagcaagggtgttgtgaattttaagcaaggtaaaaccctagatcattggttttatatttttgaagctttttctttagttatgtatgtgaaattttaaatcaggggctgttagggttcgaattttagggttcatttgagttaatttaagttcatagcaactggttttgaggtttgttgtaggttttgtgtaactttgagctttgagttcaaagctttgagcttgaatggcaacttaagttttattggtttgttctatgaaatactggctggaagttattgtgtatgcccttattaggtactctcgaaggtttcattgcatttggtggagaattgagcaacaaatgaaagactttgggaaagctggtgcaaaccggctagccggtttgcagtgccacaaaaactggctagccggttttggcagggttccatgggccttccattttctcaattttcgtctttgcggtgcctcagttgggtgtttccccatttctagagttagaataacccattgagagtataacagaacctagggttatggtgttgggtttcccatgattagggtttcaatcatgtaacttacccgattttaaaatgttaatagggcatccatctagcacaagatttctgttcaggtcggccagcacacttgaattcggaaatcaggtaagagctgaatataatgtgtg

SEQ ID NO: 345597 - DNA, 559 bp, Cannabis indica
atttaataatttttatatatatatatattaaaaataatttcccaaaatattaaggggggccctggccaccccataccataacatagttccgccattgattgaagttaaattaagtagcccacaaaagaaggattaatggtcttgtgattaaatgtgaaaccaatagctgtcaagagtgatttacgggtggtcatggtataagtttgacgcaccaaaataatagaatagttggctggtggagaaagcaaacttaatggagaatgcaattgggcctttctcagtaaaactatcactttttatgttgggtttttctcttgcaaaaatgccaattttttatctctttctttcacaataacttcttctttttatttgtactagagtgtaaaataattcctgcaaaataaactaaattaaagttaaactaaatatttttaattgtaaatatatatttcattatttacttgaaaatattaattaaaatttaatttgatttaacatttgagaccaataaatatgcatttttaccaccaattatgagcctatatgtttgcttttgggc

SEQ ID NO: 345598 - DNA, 692 bp, Cannabis indica
cagctaaggcccctaaatgaccagatcaacaaatatacgagtttggacttctattactgacataaaaatatctcttttcatgttttcgaaaataacccataaagaagaataaagttttataagattaaaaaggtctcttaagcaccccgcgactatgtcataatagattcgaacacttgaccaagtaacagaggcgtgcaaaggtttcctcaggctagacaaagattggccctcgagtgcaaatgcagaagggagttctttcgagatggactaccagaaacaagatgcaccttattgacataggtagtaccagaaacaagatgcacatgtttatgaccagatcaacaagtatatgagtttagacaaggaaaatttaaagtttacttggactgatcaatgtgagaaaaagtttctaggagttaaagcagcgtctgatcactgctctagtgttgacttttacttctactaaggaaaagtttgttgtatattgtgatgcctcaagactgagtctaggctgtgtattaatgcaagctggaaaagtaatagcatatgcttctcgatagttgaaagagtatgaacagaggtatcctactcacgatatggaacttatgttaggctttgtgctctaaataaaactctatttcaatgtaatctttgcaattcaattatcaataaagaaacataattatttt

SEQ ID NO: 345599 - DNA, 2213 bp, Cannabis indica
atgagggtttttgaatccttagggaaaaagattattcaagatatctagatggtacgactcgagctcttcgtctgagtcgtatctagatttccttcctaactcccccacttgatatctcatgaacttatcctccaactcatctattcgcaattggatagcatcttcttgctttggaccgagttgttggagaagatcaggttttttctgattcaagtgctctcacaaatccagttgggagtaattactaatagattgtgtcctacttacggacctcgtcttactcatggacttcgtccttgagtgacttacagatttactggttcccgtgctttctcgatcattagaacgacgaccactctctcctcctcgagttgatggactgtgggtccttgagtgccccgaggtcacactggcttcttcacgccctattctcccccctgagcatggtttgtcatatttcccccactagggtttgtacgagtcctctctctataggttcgagaagaacgatggtgatccctcgctggtgaccaacgttccctaggttgcgtcccagggtcttcctcatttcctcgatgaatttcctgttcattagtttctggttgcctcccattctcattcctatgagagggttctggctgatcattcagatttttagggggaaactcattttccccaggttgttcttcctgagcatttttctatctcctggttcgtgagccacgaggttcgcctcgtggtcttctcactttaggttcaagttgattttgagtgttattcccctgtgctgccctagctacagcttcatcacgctctattcaacgttttccaagtttgcctcctccaggcggcgcctaagatgacggttttccatttcataagtaccctcacccgtgggctgagcaccccccacgatggggcctttcatctctcactccagaattttggccattcccatgttgagtcctcctagaacgtgtcattcgtgtactagggccaacctcaggttgggtcctcctggaacgagtggtccgtttaaactgtgagttggaaggccttctggagcccatgggctcctttccataacgatgatgagtttctttatgtggcgtgttaacgttctctgtgttgtcagccatgaaggaaattgttttttatatgcaaggagggtttttctaagcttttacatgaaggctctcaatgaaagcacgaaattgtcaacgcagattttcgttaaccaaatttgagcctaaacagtgataaacttgcgcagaaaaataaaaacagtagagaaataaaaagaaaagaatgaacacgaaggttttttacgtggttttgcggttaaaattttgcatagtccatgagtcaatcttatgagatttttgatacagttctaaggctttttctcttatgaatttttcttccttttttagtctaacttgtctctatttataatcacatagtcgagcagttaattacagagttgactgtaatctttacaacaattatctcctgaaattgtggggtttgattacatatcacgtaatataaatactgttaatatttgaatatcacacagctgtgattagtccgcttttactgggtcaaggtaatcgtgtattaaacactgttgaccttgcttttagccaacgacaatgagtctgatttgtaagcgacaagtagtttaatacgaatgaaatataataaagcaaataaagacacaataattttatagaggttcagccccgagcagttcggtaatagcctaatcctcgttatttgtattgacttaagaacaaggagaatggttccttttcttagaactcttacaattatatctctgaatatgaattcttagacagaagtttcgaccactttgcccagtgagtatagatcactatttatagggctataagcttgggagggaagtctttcccttctagttacaattgatatatataagtagaaagattgcatagtaaatacaaaatacactaatcgtgggatttggaaagcttgccatatctctgtaatatgatcccaaagttatagggatttctttgattactcacaatgtgaaagctgaatttgctaagtgttggtgtggtgcgcggattgctcactacccggctaagatgacttcgtctgagcaaatgtgtgtggtttcctattcgacatatttcttacgagcaggtacccagagttgaatccac

SEQ ID NO: 345600 - DNA, 636 bp, Cannabis indica
tcaagcaaactcagggagaaaaccacaaacccaagcccttggaaacagggcccagcacctagattgacctggtgctgggcccagcgccctggttgataatcaacctggtgcgctgctttcgattgctcaaatgcaaatctgattcgaccaatgattctgaaattgtcaaaaatagggtaggagacatcgtcctcaagttcaagaaccttgaaagtatcaatacaagatctcgagagctcaggaatagggtacccaacgcccaagttgacaaatggcctgatgcaatgggttctgcttatccatgtgacaatgctttttatcgatcacaattatgtttctcttacccttcaaaaaaacctaacaattatgtttcttttactagcggtccgtgtaattttatcttaaaaaatttacattatagactaaaaaattacaaaaatacgttaatgcagaaatatttttatttttactctttgaacttttcaatttacaaaaatacatcttcaattaaaataataaactatttttatatctattctacataaaatgtggctatataacagaattcttggtttatgagaaattattgggtgactttttttttaaataaaaaaaaacaaattattagatgttgcc

SEQ ID NO: 345601 - DNA, 600 bp, Cannabis indica
gaaaaatggaaaaaatctaactagtgttgggcccacatcatggctggccacttaagggaattttcgctccatttttatcatttttttattctaaataaatcaaccctaaccctaggtgaaattagtataaaaggaaagctatggtcccattatccaactaatgcctttaaagctaaaaacctagttttctctctaggtttatgagacttcttcctttcttctctaaattttgaattctatagcattcttcacaaaaataaaattcagccattagtgattgagtgcattcccatacataacaagtgagtcctcaatcatagtatgtaagactgtgaagaatccaaacaactaaaggagtttcgggctcagatcttggtgatactctacgacagaaaggatacaaatgttagagatctgaacggaaggagtcatttaattacgctgcaaccaatgtaaggtttctcataccttttatgtgtttattttcatcattttagaaattcatattaggatattaaaaacatacttgttagtaaatctagatcctggtaaaagatattccaacaactggcctcaaagtcatggtaattgatttacttt

SEQ ID NO: 345602 - DNA, 697 bp, Cannabis indica
tttgtaaaactgtaatttttcttaaattttatcagtacagactctgctattgtctggacataaacatgtaatatcagttacttacaaatgttcttatgataaattaaaaacgaaagtctgtactaatgaaattggaggaaaattacagttttacaaacattgggtaattatgctgctaatattaaacattagatttatgcctgttcttcgtcaattaaccaattcgcggagaagtttcactgatccgggagtcgatcaagatcggaagatatacagaggtctacctcgccttactttagcttagtggcccaaactcaaagtttgcccaaatgatactcggatggatactcgaagggcctatcatggatgctaagtgccccaaagagtcgtggtcgtctaccttggatacaaacccagatcgcccagcgacgttatgcattttctaacacaagatcagatcttgtcccctatgctaggacatggtactgtgtgcacctcacacacttttttgcaaaatagttattttaggcatttacttttcaaggttaaaccttttggtgacacgtgttcattacgtacaatggtctcttattgtccaattgcttcaatgcacgagcacaaatccttccaaggggcccaacagtcagctcttttttgcaactttactattgggttttgtgctctaaataaaacccat

SEQ ID NO: 345603 - DNA, 648 bp, Cannabis indica
aatattcaaaggagtatttgaactctataaaaagtggtcactttttttttagagtgtactcatagtgttcatagtgttattgagggaatagtttgttgctgggaaaagtcctttgagacttgtctaggccttgagttgtccggcaaaatactttgagaattgaagcctttacgcatatattctgtttgaaaaaagtcaaccacagcttctcaaaaattttactctagaatatgtcaggaagtagtatataaaaaaataactaacaaactttatggcaaggtgcaaatcttgaatcaaaccaagtacactatattgagaaaatatctttataataagattatgtatttgaattaatcttaaagttagcataaagcatgaagaaaataatgtgagagtgagtgatggttcaactacattgtgcgtagaagagattttgtctagacatatgatgtaagaaagaaaaatactcaataattctttaaataaataaattcaaagtaatatcattttaagcttttgtaaattttgctcaagtgaaaacttgacaaatctttcaaattgtaaaagatttagtaagaataacatctagctagggagataagactaaattaccaaatagattaaccattaatgataaactaggtaatg

SEQ ID NO: 345604 - DNA, 1219 bp, Cannabis indica
atacaaactcacaacactacacgccacatggctaaccttcataaaaaattaataattaaccaaaaaaaaaatcaactttaaatttcatataattgctttttaagaatattcatggaatatggatgtgtcatgtgcttaactatgtggtggtaattattataaatataacagaaaaagatcgatcaatgagtcaaaaatagcaactataatattatatatcactaattataaattataattataatattgtgactaaaaagtataaaaaatattaattacaaaaaattataatttgttatgattaaatgtgttttagttgtgattaaaactaaattagtaataaattgtatttaaatattatattttaatcatataaaaataatttttttattgcaacttaaaagtcacatttaattagaaaaatatattgcaattaaaatattatccctaaaaataattactttttatagtatatatataagaaaataaatagaatatatatgcatggttaaatattaatcatatgcttatttatttcacaaaaattaagcatatgataatatttcataaaacacacgagcaaggacgaaggacaagacaacatttattttttataaattaaattaaaataataataatataataaaaaaaagctatatagggtacacatatgtaatgtacgtgggaactttgtggtcttttttctcttgtcaattattctacgtaacctcattattaattatatataaatattattcaaacgcagggaatattgaaaaacttgaaaaaacaataagtcctcatatcatagtcattgagaaagaatatacaggaatattgatagaatttataacactaattagtcttcagttaaataattataataatggtgtgactatactctatatatatgtattagagattaattaatatttatatatatatcacatatccagtactgcacatatctataagcttatactagatcagtgtcccacacacacacacatatatatattgctatattattctactatattaactattattatagtatagaattaattagtagaaactagaaacccaattcgctaccttacgaaaaaaaaccaattcgcgaaattataatggctttaacacgaattatcgttcatgcatgaaagtttcagctgacctaattttcaaaaaaaaaatataataataataataaaaagaacaa

SEQ ID NO: 345605 - DNA, 477 bp, Cannabis indica
tgtgtgggcactactctatcacatagggatttcgaaacaaagaagaagaagaaagagagagaggtggcggctcaggaatttttctcgtagaaaggaatgagatgcaattgtgttgtttcctgaagccaataactttcaatttatagaataccacatagggttagggttgaattacttggcatcaaagtaatgaaaatattaaaatgataaatcctatgcatgtggcaggccttggcaagtggatataggcctcacttttgcaactttgctgttttatcatttctgtttcccattttctcaaaaaatgcaaattttcaaatttcaaccatttaaatgtcaattaattactaaataatattgtcatttattatatttatttaatagactaaccaaagtctcttaattaacaaatataccctataaactctttctctatagtttcacccttaataagtataaattcacaaatagacatag

SEQ ID NO: 345606 - DNA, 505 bp, Cannabis indica
atttttacggttttatagattttattttatggtcttttgatgtatttttatggtgtacttttattattatattattgattttttattatttatatattttttttatattgttttgatgttttattgttgttttcttattattttcttgtgtttttataaaataccataaaaatataaaaaggaactttaaacataaaaatataaaaagtttataaaaattagagtttttatgtaattatccatttttttttttcaggcgacaattatatggtttttttttccttttaatttagaaaataataatttcttcactggaaatgaatttcttctagggaaattaccccatatactattttttttttcaaatttacggtttgggtttctaaagtggttgcagcgctagttgcaatagggatttctgtacgattttttgttgcaatttaggttacagcgctagtatatagatttttataaaaaatcaaaaaaaaaaaaaaaaactaatttt

SEQ ID NO: 345607 - DNA, 641 bp, Cannabis indica
caagtctctttttttgggggggataatttcaaaaaaaacacaaaaaaataaaaaaaattacaaaaatacggtttatacggaatttttaatatttttacggctttatagattttattttatggtcttttgatgtatttttatgttgtacttttattattatattcttgattttttgttatttatatatttttttatattattttgatgttttattgttgttttgatgttgttttcttgtttttcttagtattttcttgtgtttttataaaataccataaaaatataaaaaaaaactttaaacataaaaatataaaaagtttataaaaattagtgtttttatgtaattacctattttttttttcttcaggcgacaattatatagttttttttcccttttaatttagaaaataataatttcttcactgaaaatgaattctttttattaccgaatatactattttttttaatttttttttttctaaatttacggtttggatttctaaagtggttgcagcgctagttgcaataggggtttttgtacgattttttgttgccattcaaattacagcgctagttgcaatatgcgtttctatgtagaattccgtaaaaatgcaaaaaaaaaaatgttttaaagtgtaaaa

SEQ ID NO: 345608 - DNA, 624 bp, Cannabis indica
tatattatatatattgtgtttttattttttattacattttatatatatatatatattaaattaaaaaataatttgtatctgaatcctaagcatagcctcatagttcatacatagggaaataatttgcagtataatttttccttacaatttgtatttgaatcctaaactagttgtcaagcagtatcaattctggcgcctcatcatgaatttcttgtactttcacaaaatgggtatttgtttattctttaacattttactatggaaaaggtttattgtcaattctcttgtacaaactccttgctgttagatatttttccacccaagcaaaatggaaatttatgtaactctagtgaaagttagtggattgtgtttcgtgaaaaaacagtttgtgttgatcaatgttatttttaacatagttatattgtggcattgcaagacttgaattttatgttccacgtgttctttcttgctcgatactgcaagcttcttgaagagtactccttcaagggaagagctgttgatttatatatctttatatattaaaagtgcctatctaacggcatttcttggtttaacattcttggtttaacagaatatacttaaaaataaaagaatattctgtta

SEQ ID NO: 345609 - DNA, 605 bp, Cannabis indica
catttcttctggtttaacacacctttaggtttagccattgcaacaataacatcaccattggagtttcgaaggagggcaccaagtccaaacacaccagaagaaacgttgacagcaccatttgtattcaatttgagtctacctgatggtggagctagccatttaggcttatttggaggcaccaaacgatgctgcaaagtagctgaaacttgagaaattgcattatttgctccagcaaaagtctgagaatgcgaactgctagcagcagcagtatcctgagagtttgaacatccagagacatgttggtgggttttagaatcgctggtaagagcttgtttgtaatctgataagtagttgctagcaaattgcaggatacacgaagcagactttggagttttagcatgtgtttctgcattcctttcagtccaaatgcaccaacgaattgtaatgaagagttcaacctttttcagtctgaagttttgaggagacatagattaaaaaatcagagaaagagcaggacttatataatttccaattatcactaaatcccaatttttctagacttgtttagcacgacgagtacaccaaaaaagtgttgggttttatgc

SEQ ID NO: 345610 - DNA, 612 bp, Cannabis indica
cagagactgttggaaggccaagttgatttcggggatccagtcggtggatgacttcaatctctccaaagtcatctccccaaacgtgagggctccggccgcagaaaaggtgttccgggacgatattattgccatggcagaggacaagtagtagaagtacctcttcaagagggaacaggagctggcctatatcaagcctcaggcggccgctgggaggactctgcgcctggaagctccgctggagcagatgacgcttaggcccaagcctgtggtcccggtcccaaacaccagagctcccgatgccagcacttcgggttctggtaagtcccctttgtcaatacattatgttcctcccgtccgcgaatattcacgttttaggcccataaggttcgatgagcgtctccttaggtttagcatgccttctacccggtggggagatcatgcaaaggaatattacttttcccactttagacattatttatgtcggtccctgatgtgttctggacctccggcgcccattcctttggatcattcagcctacgtatctgttgggttttatgccctaaataaaactctatttcaatgtaatccagattattctatatcaataaagta

SEQ ID NO: 345611 - DNA, 620 bp, Cannabis indica
acttacactaaaaatagaaataagtaaaaaaaaaaacaaaataagtaatatttaagcacattatatgtgaaaatagaaacaatttaatatcaaaatagaaacaactattatttaacgtcatatatatatgtaaaatggaaacagatatcataaaaaatggaaacaacttaacctcaaaaactataaataacataaccttgaaatagaaacaactaacatttaacctcaattattatataaccacttgagggtatctcaagtggccataggagggagcgtgtgtgttggaggtcctgggttcgagtcccaagttatgcaatgttatatataaacacttaaataaaaaaaaaacctcaattatcatataaaatagaaacacttcccattaaaaatggaaacaactcacattaaaaatgaaaataactcaatgaaattccgtattttaatattctcagtttgattatttgattaagtgattaattaaatgcagaataataaaactggtactgaaaacagtttttccgtagttacagaatacaactctgtaactccagaaaaacccagaaaaacaaacagtgcataaaagtaaaaacacacaagatttttgtacgtggtttcaa

SEQ ID NO: 345612 - DNA, 627 bp, Cannabis indica
gggcataaaacccaacaaatgtatcagattttcttgcatttgtattatatatgttagtattgttcttgatattgtacagacatgtattttgtgtatatagatctggattttttttttcattataataattttataatttttttaaaatattagggtgcaaataataagtttttgtgtaaaattttcattttgtttccattttaattttgagcaccaaacagctaaattatttgataaattaaaaaaaaaaattattaattattctgcccaaaaacaaattgaatttttaaaaagaaataattaaaataattatttatataaaaatttgaattaaaacaattaaatattttttttagaaaaatatttaatgtagtggcactttttgtatgtgactatatctccaaaaatattaataaaaataaataaaaaaaagaatatagtgatactttatttgtgttgctgttactttttagaaaatttgtctctatacgcttatagtgtcacgtaaaaagtgaatgtaaacgtgttgaagtgttactatacacttttagagttactcaatgtatgtcactaaaaaacccaattttctaataagagctcgtttggaacgccgtattaggtcgtatt

SEQ ID NO: 345613 - DNA, 684 bp, Cannabis indica
aaactggacaatggtttagagattttgaaaagtccttaataaatcatcgataaaaaccagcatgacccaagaaactccttactccttttatagaaactggaggcggcaaattctctattattgacacgttagccttgtccacctcaatccctgcttttgaaatcttatgtcccagaactatcccttctttcaccataaagtgaaacttctcccagtttagaaccaagtttgacttttcgcatctgattagcaccttctccaaattctctaggcaatgatcgaatgaagaaccaaagactgagaagtcatccataaagatctcaatggaagattcaattaagttcgaaaagatatccatcatacacctttgaaatatagcaggagcgttgcataacccaaatggcattcttctaaaagcaaaagtaccataaggacatgtgaaagtagtcttttcctgatcttcaggtgatatggctatttggtggtatctagagtagccatcaagaaaacagtaatattcttgtcccgccaatctatctaacatcagatcaatgaagggcaaggggaagtgatctttccaggttgctttgttgacttttctataatcaatacaaatcctccaaccagtgactgttcttgtgggaatcaactcatttttttcattcttgattactttcatccccc

SEQ ID NO: 345614 - DNA, 608 bp, Cannabis indica
tcgcaggctaagtcctattaaatggatgcccagcgaaatacaaagagtcagggtaatagggtctagaacagaggcggtcagggaaatccaatttcctagaatccccatggtcgcgacagaggccatggtaggttttagggtggtcaacatgtgaatccatctcaagcttctccagattgggagcagagattggcagaaatgcaagattgtatccaccagtaacatgaagaaattatgagattaaggcagtagggtcctcctacagtgcctccactacaagcttaggctgtagtagttcctgtgatgccagtagaacaacctgttgctggcaatcgtatggagccattatatgagaggtttcacaagcaagcacctcccgtgttcttggaaggtccaaatgtgatgaaggttgagcagtggctcacagtgatagaaataattttgaatttcatgggggtagttggaaatgatcaggtgacatgtgctactttttagttctaggaagacgcccttgtgtggtgggaattggtgtccctcacccgagacgtcactgtaatgacctgggaagagttctgagatttatttaactccaagtattacaatgaggc

SEQ ID NO: 345615 - DNA, 601 bp, Cannabis indica
aactttaatttatactaaaatattatatatttaggtgcccgtaaaagttaatactacatatagttttacataaaaatattgtataaaatacaattcaatataatattatacaatacaatacgatgtaatacagcataccaaacgaacccatattgacttagataaatttagaaaattgattcaaaaaagtatggtttggttattaaattcaaaactataaatcacactacaccttattgtttggtaaaaataaaaaccacaattgtattgtaactagttttaaaccgtattttttatgggatgtggtgtggtgcagacagtttgtgtagtgtgagcagtttggtgaacactcctaattttcagtattgtttgttatattattttataatataataataaagtagattaaaatgtgataaatatatgtgaataatatatattaagtgtatggtaaataaatgtgtaacctatgattttataacctacacttttgtaacctacatgttgtaacttggagaggagttacaatttgttgtcacttgtaactcatgtgttgatcacacattattagtgtaataaaagggttgttacacaatttgat

SEQ ID NO: 345616 - DNA, 1230 bp, Cannabis indica
attcactataccaatacactctatactttaaatgtacaagtgttggtagtgcaactaacactttaagcatgcatatacacataacgtatacatacactcagatattgatatcatacattatatgcagttctgaccttctttccagattcaagtgtgctggccgacctgaacggaaagtctcaagctagatggatgccctaataacattatgaaactgggtaagttacacgattaaaaccctaatcccgggaaacccgaatccataaccctaggttttgttatactccgtagaggttactcaattttggaattagggaaatacccaaccaccgcattgaaatggacaaaaaattgagaaaataaagtgtatggggatcctgccaggggtctggtaaaacggactagcaagtttgcaccagcccaccccaaatatttcattcttttctcaattttgcaccaaatgccaccaaactttgcagagtacctaatcaatgcataaacatcatattccagccagtaattcacagaaaaactcaatgaaacaaataatgccattcgagatcaaagctttgaactcaaagctcaaacttgcacaaaacctaatccaaccatcaaaacaagctacaaaaagctaataccaactcaaatgaaccctataattcgaattacacaaaagttaaaccataacagcccctaatccctgaaatcataaactcaacctaaacataaattcaagaactaagggaaagagatgctagggcttaccttggcttgattttcccttgaattccttgctgaaaacactaagaatcagcaactaattccccttgctttggctggttcgaagagagagaggaagggaagagaggtttccttcaatcttttgatttttagattttctctttttctttctaaatgaaataaaggattattcaattaaacctttgctaaaatttattttgctaggtgtcacaagactaggcagccacctcaacccccactttacaaaatgactaaatttccctttgagttaaaattagggtaattctaaagctaggggtaaaatgctcaaattccataacccctcttaatcccgatattttattttctctaaaatatttcccactaagaaataaggttctaaacttacccatgtgatcaaactagccatccatcgcattttccgttgtcgccgagcaaaaattacaaaaataacgtatttcacatata

SEQ ID NO: 345617 - DNA, 682 bp, Cannabis indica
gaaaaataattccaagtttaaagaccgcttggccggtcatgtcttaaaggccttgaggccatatataatatatatatatataaacaggagagataaaaagatcagtgttcaaacagctggagtcccaggctctgggttcggttcttctgagccaactggagcaggaggatctgttgttcgagcaggagaagcatcagcagcctggttagaagcttggccggaagttgaagcagccacctctttcccaccataggcaacttgggctgcgcagtactcgaggtacatgtccttggcatcgcccaagtagtcgaagttggcctggggattagccttccaaaaatcaaagaagagctcgaggccggcagcctccaaagcattgaccttctccttcaaacggtctgcctcggccacctgagcgtccttatcttctttcacccgaagaaggacctgctgcagagaactcctctcatcctaaagacgatcaacttcagcagataaggtctcgatggtttcctcaaagcggtcagcagcctcgatgtcctttgtaagcacggtgatcttcttctcggtggcgaacaacttctagttggcctcacccaactcatgacgaacagctaaagtctccaccctggcctccttagcttccttcttggccaagtccgcctccgccctcaaggtttcg

SEQ ID NO: 345618 - DNA, 748 bp, Cannabis indica
tatataatatatattaatataaaattaatgtatataatgtgattatgagttatataaatatatatgtaatatttacataaattataacataagagtatcgtgaagttacttacattttgtaatctaaacaattatcatcaatattaagtatgtaaaaaggtattacacatcttaatttaaaatccttgttatgtgtgcatgagttacatttgagttcataatattcataagggctatgagtttaaattttaaagtgtgtgatcttaaacactataaataaaggtctttgattcacttgtgaagacactttatttgtgaatttctatcaaagagagaaccttactataaactataagcttgataaatccagaaagctatgtccgttattttcttcccaaagtgtttgtggtaaggggaaataagtttttggacaaagatataaaacctagttcaagttctgtgattctctacttaacacttggtgttagtggtgttgagattgttctctcatctatagatatatatatactatttatattgtgattttatttattgtgtttgtaatcttctcttcatcttcattttttatatttatgtgtatattttgttaagagatgtaatattattttattaatattattattctttgtatttcttgtctttgagtttatatttttggccagggccagtcttaggctaagacgcttagggcccactcctattagagaccgaataaaaaaaaattaat

SEQ ID NO: 345619 - DNA, 574 bp, Cannabis indica
taaattttatttttatataattaaaattaatttcatgatgaagaaactagtttattgatgaaaaaataagttttttttatgaaaatactagtttcttgatgaaaaaattaattttttaatgaaggatctttggtgaatttcgtgctcaccgatcgtcactagatgggtggatcgtcgatcgctgtttgccggatgtgaaccttgtgaatgaatgtggatagtggagttgctaggggtggtggaggtaggtttgacagagaagaagaaatgaaattttttatttttctaaaattgatttatctaaagattaaatgtgtttgaaaattaaatttatgtagcaaatattataaaatagttcaaaaaaaatgtcataaaaaaataattaaacttaaagctgtcatatttgaagtaaaaaatttaaagcgtttggttggaggtaataaaatgaaatggaatagaaaggaaataatttttattccattcctttgtttggttgcattttaaagtattggaatgacattccaatggaatgctctttccaccattttagtggaatggctattccattttaaaa

SEQ ID NO: 345620 - DNA, 927 bp, Cannabis indica
cctttcgttatgtattctatgatgggggccatccagttgggttcttgcccaaccgttgctatggcctcttttattttgatgcttggctctgccaagcgttccacgggtactacccccagtccttcaatctcactgtctgaagctaacttagccaggcagtccgcgtgagcgttcttttccctggggattctttctactttataatccgtgaactcgtggagcagttcccggactatcatcacatatgcggccattctttcaccgcgcgtctgatactctcctgatatctggttcacgaccagttgggagtcgctgtagacctctactctttgggcccccacagcctttgctaatctcagccctgctatcaaggcttcatactcggcttcgttgtttgaagctgagaagtcgaatcgtagggatgcctggagtctaagtcccctcggggatatcattgcaacccccgctccggatccattttcattggaggctccgtccacaaatactttccatgttgggaccgacggtgtcggtgcgttcgcggttgcctcggcttcattacattcggtgatgaaatctgccaacgcttgtccctttatggagatacggggtatgtagtgtaagtcgaattgactcaactccattgcccatttgaggagccttccggacgcttctggcttttgcaggacttgccggagtgggtgattggtcaacaccttgattgggtgagcttggaaataaggcctcaactttcttgaggccattaggaggcaaaaaaccagttttttgatgacggggtaccgcatctccgcccctatcatgcgcttgctgacgtagtacacgagatgttgagttttctcttcttcccggactaaggccgtgctgaccgcgtgctcggagatggccaagtacaggaacaggtcctct

SEQ ID NO: 345621 - DNA, 673 bp, Cannabis indica
gtttttgatttggaaaccaaaatccacgggccaggattggaaagaattttattgtttcttccatggagaaaaaatgttcacacctggagccgatagcttccctactagttggagggtgttaggtgggtgccacacattaggccactatattttctggcatcttgcattttgtatgtgatttttgcaatgtctcagatggataggtggtgaaaaaaattgttgaacgagaaagatttggcttcaagttttctttggaggaaagttgtggggcgtacagaaggtaatttccttattcgaccgagtggtcgaatgtctgttttcttattcaagcgagcttttgggttgactggtgccaaattttctattcttactcatttaacagaggaagaacggattcttgcagactagtacattaaaaggaggtctttcataatgtcgtcctcttccgatattttggcaagagccaagaaggctacaactcaaaaaatttgttccaatgggaaatcatcaattacgggaccttcagatacttttgcatctgccttctctttggatataacccttggctacaagtctagctatcaaagtttcgacttcgcctccagctcctcttttcttcttgtaaacccacttgcatcctatcggatgatagtcgtcaggtgcgtctacatat

SEQ ID NO: 345622 - DNA, 578 bp, Cannabis indica
tttattattaaatggcttttgtataaagacttttattcgtatcgacccttgctatatataatcatattatataaaatgtctttactgagatatctaactacatcaataatctaaatctagatatttataccaacatgatgttggaatatattttactaggatctagatttactaactagtatgtttattaacatcctaaatatgaattctctaaaataatataaataaacacatacaaagtttaagtaatattacattgattgcagtggaataatatatgtcctcccactcagatctctaacccttgttcatttttgtcgcagagtattatcaagatattagccaaattctccttcaggtgttagattcttcatagtcttacacactatgattgagtgtgtaaagcccgcttagttaatttagaaattagcacttgtttatgattaattatgaaattatttatagttatttaaataatttattactgttatttatggaattcagaaatgcatgattatgttattagtagtttttatatttttgcatttccggtgtccggtattttggaactcggcgtt

SEQ ID NO: 345623 - DNA, 799 bp, Cannabis indica
gcgtaaccccctctctgcagctagtacctatgattaatgagcctagtgacagctactttattagaaatcacatcagtcaagaaaggataatggattacatccattaaacccctaaaaagcctagggattagaccatgcatgtcctacgatgtattcgttgggaatgtatgcctttactgaatattacagaaagacatgtacctcaattctggggatcaccccacaaaaacactataaataccccccaaactcattaaggctggggtcgggaattcagggttctatcagaactagagagaaaaactaccaagattattctctgtaataaatactctcataaatacacaaactcgtggactaaggctcattaatgccccaaccacgtaaaaatctcgtgcattaactacttacaactttcttaaagattattattatattggttgccaaaaacctcgctgaacattttggtgctttcattgagagctgaaggaagcgtctgcaagtaggcagtaatattacaaaactacaatggtggagactcgcaacacacgtcaaccccgtcctcctcaagacgctcaagacctagacgatgaggatgtggcctcaagagtgaacgtgggctctgaggaaggagaaggaaccccgacgacgaatacgaaggaaacttcgatgagtacgacgcctacgacgaaggcagctatacagagctaggactcttgagacaaaaggcttctaatcacgaagctgaaatcgcggcccaaaaagaacaaaacagaacgatgcaagaggtgatgctggc

SEQ ID NO: 345624 - DNA, 831 bp, Cannabis indica
tttttactattttagaaaatacaggatctattttatcatttaacaaaacacagagttcaatctataacttttgcaaaacacagattccaaaatgatatttaccctatttacaaccacaacattctctccctaactcactaaaattcaccttgaccgtatgccacattagttttctccattaattactcactaacaatgttaatatcattaactaacaatgcacccatttttttgtaattgagcattattccattaatcaagaacaactctaactcaccgaaccacctccatatagcaaaactacaggttctattctttcacaaaacataatttctgaccgaccatagcttccagcttaccgtggctgcttccatcatttcctgattagttttaaatcacagtagtaataaattatttagggatacaatgcttatgatgaaaaaaagtgggctggccacgtaaaggtttttctagtgaaaaatcttctatttctagcattgtctcaaatatttaagctcattatttccataatgttcctagatattatttcccttgtttctatcagattttttttaagtcacttttttcacatgtaatcagtcttattttacttttacaaagtttataggtattaaataatacttgtttacccatttcaaaattaatttattctctaaatttcactttcgagatagattgtaaacttatttggaatcgtcttacttttgtgtgtggtgttaagcctgtcaaaaagatgggctatttaccaaaatataggaaagtgaaaatatgttttgatatatatggcataaaaacttaattgtcctaaat

SEQ ID NO: 345625 - DNA, 1600 bp, Cannabis indica
tgatgacgatccattaacctataaacaagcaatggcaagtccagaacggaaacaagggtcagccgacatgaattcaaaaatagattccatgaaaaagaacaaagtttgggaatacgtagacgcacttgatgattatcatccaattggatgtaagtgggtctacaggaagaaaagaggtgttggtggcgaagtcaaaacttttaaagctaaatttgtcgctaagggttatacccaaagggaaggtgtggactatgaagatacttttaagccagatgccatgctcaaatccatcaaaaaatttctctccatagctactgcttttgattatgaaatttggcaaatggatgtcaagacaactttccttaacgaaattcttgaagaaactatctatatggagcatcaagaaggttataagctttcagagcaggaagagaaagtttacaaactaaataggtctatttatggactcaaccaagcttctcgctcctagaacaaaagctttgataaaataatcaaaacctacggctttcaccaaaacgatgatgaaccttgtgtttaccaactcaaggataatcaagtggtagtattcctagtcctttatgttgatgatattttgattatcgaaagcaatatcaagaaaatgactgacatcaaggaacagcttgacactcaatttgaaatgaaagatttgggtgaagctgcttatgttcttggtattcaaatcatcagaaactggaagaacagatcccttgctctctctcaaacaacttatattgataaggtgctagagagattctcaatgacaaacaccaaaggggcagtgaagccttctagacctggcattcgtctatctaaggaacagtgtcccactaatcctcaaaagatagaagacatgagaagggttccttatgcttcaccagttggaagtctaatgtatacaatgttatgcactagacccaacatttgctaagtagtaggaattgtgagcaggtatcagacaaatccaggagaggaacattgaactgtagttaagcatattctgaaatatttgaaaagcgctaggcattatgtgttagtctacaagagtggtgctttaaatcctgtaggctatactgacttagatttcaaagcttgtcttgatgacagaaagtctacatctcggatggtatttactcttgggggtggagcagttttttggagaagtgctaagaaaactgcaacattagactctaccatggaggccaaatacatagttgtcgctgaggctgctaaagaactagtctggctaagaaagttcttctcaggacttggtgttgttcctggaatggaaaaactgctggttttacattatgacaacactggtgcaatagccaacagtaaagagcctcgaagccacaagagaagcaaacacatagagagaaaatacatcatcagagaatatgtggcaagaggggacgtactggtggagaaagttgatactaaagacaacttagctgatccattcaccaaagttttgactgtaaatacatagcccgaaacatgaattcttagtttcattattgaatgctaatttctagtttccattatatcaaattgcttc

SEQ ID NO: 345626 - DNA, 517 bp, Cannabis indica
ttggctatgttatcataaataaatatgtatctttattctttaccatatatggtaatggttggttacttttgttagaaaataagttgaagatttcaaataagggaaagtttaatttaattggtcaaagaaagaaagggactactttgttcatataaaaatgttaaaattttcaaaagatcctcaaacttactttcttaaacaaatctttataaattagtggataccccaaaagagttttgtagtcaattttttttttttacattatagttatttagaactatttataaatttttcaaaaaaacttaaatattttataatgctgaaaataagatttacatattttattacacatgtaattattatttttttacattttgtaagtaattgtttaaagctaatttttggcactataaactatttagaattttttaaaaatttataaataatcgactataacgtacacgatcatgaaaaaaaaataagaataatttttttttataatcctgaaacaaatagg

SEQ ID NO: 345627 - DNA, 726 bp, Cannabis indica
ggaaggaggccccctccggacggatgtcaacaagaaagccttagaaggttttcctggacaaacgtcgggtgcaaaaaatcttacagaaaatgacattacacataagtgaaaaaaggaaaagaaagggaaaaggcagaaatcgagaaagacaaagtcttctctgtacccttgaaggccatcatgtaaggagcaaatgggcctttacaagaaataatgtgtaaaataagagtaacccaaacacccgagaagagaaatctaaacatgttacgcaaatactcaaggcaaaaaatgccagaaacttcaaatagtaaacccagaaaaatagatgaatagtaaagcatgccatgaacataaacaataaagtgagggatgcgaagaacttatataaagtgttagaactgggagttgttgttgatcgacgaagaaatgttgactgatagtaacgaatgagggttagtaagaaacctatagtgtttgaaggtcctctggtttgagggttctctttctctctagaaaactcgaagaaatttggtgaaaggatgaaagtaaccaaatgaaggaaaggtggggcttttataggccacgctgcatgtggaacaggcgcaatcacctaccaatcgaacggctggggaggcgcacgatttgaattcccaagatccaacggccagattgatttgtaattaaggcggtggaaacgtttaagtatccgtctgacacccattaatg

SEQ ID NO: 345628 - DNA, 637 bp, Cannabis indica
aaatttgaaagtatttatttatttttattagttttgacttaatatttattcaagccctcactcaactaaatttctagcttcgtcactgtatacttatattgtagttttacttgtactaaaaaatttaagggtaactctatgatacactctttaaaagggtattttggtaaattttttatctatttcagtatttatagagttttttattctattttttcatgatcctatatattatagttatttaggatcacgcataaatttttaaacaatttgaaatagtttatagtacaaaaataagattcaaatattttattttatttatgactatttttcttatacgtgtagtaatatttgaactttatttttagcattataaattatttaatctggtcttaaatcattacaaggtacacgatcatagaaaaaaattagactaaaaacctcacctaaatgccaagtattacatattctttttaaaaaattacaagtatatataagtggtattaagtctcacattctatttttgatttaataacttgattcatatattatattgtataaaatatttaaaaaattttaaagagtaatttgcggcaaaaccccctcaactatcaatttacttgcaaaaaaccatcca

SEQ ID NO: 345629 - DNA, 537 bp, Cannabis indica
gatgaatctcaaacaagataatcaaactgttggtatgtacttcactagacttaaaactatatgggaagaattgaccaatttcaggccatcttgcacttgcaatgggtgcacttgtggaggagtgaaaagactccaagatcactatcacatggaacatattatgtccttcttaatgggactttctgattcttattcacaagttcgtggaagcatacttctcatggatcctttgcctgaaataagtcgagtctttcaccttgttactcaagaagagcaccaaagaggcactcaatctcataccagtaacccgaaccctgctatggcatttgcctttcaaggaaataataatgcaggccagaaatctgacaatcagacctcaaagactcaacatcctaagaagaaccgccccttttgtactcattgtaatatccttggacacactatcgaaaggtgttataaaattcatgggtaccctccgggttttaacaagaacaagcctaaagaagccaatgcaaatcaggtgcaaactaatgatga

SEQ ID NO: 345630 - DNA, 558 bp, Cannabis indica
ttcataatcaggaggttctcaaacatctacacctgccaaggaaatgttagatatgaagaccaaagataaagaacaataaaattcataagagaatacatcaaatccatgtttctgaatataaagataaaagcaacaccactagatataaaagaagaattgaagcacatgtacaaaattaagatgaattacatgaaagcttgtagaagtaaagagcacactataaatgacataataagaaacgctaaggaatcatacagcttgataccatgttttgtgcacatggtgcaaaataataaccctggatctgttgtgatttgaacacaacaaaagaaattagtatgttgtttgtttttatggctttggatgcttcgataaaatgttttaaaacatgtaggccaataatagtgatcgaggatacattctcaaaagctacttacgaaggaacgttactatcaccatgcacagaagatgcaacaggtcacatattgcctcttgcattctctattgttgattcaaaaaaatgagcaatcttagaaatagtttttcaaaaaattaaaa

SEQ ID NO: 345631 - DNA, 853 bp, Cannabis indica
tgtaagaggtgtgttcaagttatctgaactcttccctaattatagccaaagtgagtgaattcaaataatgaataaattaattagtttaatattttttagaaatttctggcataaatgagataggtgagggtaaaatggtaaaatatacaagctgcaatttattggctgagagaaatagtaaaaagagccaaataaatgcaaaggaatataaaattatagtgtattttgaaatggcatttcttgatggctgctggagagagaactgctacgtgggggacaaattgcagtaggagggccacgtgtcgtcgtgtgaagggttggtggagagaaactgcaggcggtgggtcccatgcgtggctgaagttggcggcttggcaggagagggacaggtgccccacgcgcccttgtctggagtgaggagcacccgggtgactgggcaatcagatgcgtgatcggacggctcggatgtgcttcgggctgtgcgcgggagtgggcttctacagtttgtattttcttttttttttttattatatatatatatttaatttttccaactttaaactaccacaataatttcaattcctacaataaagaaaagacaataaattaaatctaaattaaatattttcaacataaaaatatatttaattaattccaagaaaacattaatttatttttaatttatcttatactttaagcttactaaatgtatatttttcacaattaatcactatccttttatactatcttcaatagggttggggttgaattattatggattaaaaatgaataaaatattgggcaaaaataacttgttggccgtacaattcaaagggccaatctctagttacaa

SEQ ID NO: 345632 - DNA, 557 bp, Cannabis indica
attagccatgtgaatgaatccttacaatgccaaacaaaggagatgagcctcgataatctcatgatgatagaatccatggatgtgctcagtaagactgtaacaccctactagtttaggcgtgtcatcgtgattttgtattaattgtttagctcgttgctaatcatcgagtttattgaaaattatgagtaattaaaacttttgcttaaatatatactggtaaatatcaaaataataacatatatataactgaaatccctagtataaaatatttgcaactgttacaaaatatgtaatacaaaagttgtcgctcagcaactaaacaaaatacaaacagctatcccaaaggtcatacgctccaagtctaactgccccgacacgtacaatcttcatccgctctctctcacaggtgctcaactttagccttgcccttacctacacatgcaaacaatatctgtgagtcaacagaatcaataagaaaaacataatgaatattataaatataacccatattataatcaggtgctgttaggttatttttagtattaattttagattaa

SEQ ID NO: 345633 - DNA, 536 bp, Cannabis indica
aaaaaaaaattaaactaaaaaaattttttctagatgccgaaacaagttaagggtgcatcagtacatccattttaagggggtgcattgtaaaattaccctttcttttattaggacaacataacacaacatttttttattacacataaacaaataataaaactacaacttaataccaaaaatattaaaagtacatataaatagcaaaaaaaattactaatttttcatagagtaatttgcggcataaatacctaagtttaactctcaattgcaaataaatagctaagtttaatttttggcagtaataatacctaaattatattgggatattggcggctaaaccacctgaactttacggtttgtaacacttaaccacaaaaactgtatttttggcggctaaacaacctaaaccctgattccgttttgctctgcacacctccgtccaaaaatcacagttaagtgtcactgtagacttccacgtgtacgcacttgtacacgtggcaaatttttagtggtccacataattttaattttaaaaa

SEQ ID NO: 345634 - DNA, 1372 bp, Cannabis indica
gactcagacccacatcgggatcaaaactcgggacctagatctggaccgagaccgtgacccagacccagacttggacccacactcggcatccgaactcaaaccttgacctaaacgcagacccagaccaagatccgaacctggacccaaacccggacccagactcagaccaggacttccaccaaaacacagacctggaccataacccgaacccagacactgaatcgaaatacaaattggcactaggagctaaacctgaacatggacccaaatcgggacctaggacccggacctggattggggacttagacatgggccttagaacccagaccctgatcggaaatcaaaactcgagacttggacccgaacctggacatagactcaaacccagatctagacccagaccaagatcggatcccgaacccgaactcggaccaagacttgaaccccgactaggtcctggactcagatcgagacctaagacccagacttggactcgggacacgggcatgagagctaggattgagacccacgacacggaccctaacctaagacccagaccgagacctgggacctgaagtggaactagatagggacccgagaccgtgacccaaatctggacacggggcttggaccaaacccgtagtcagtgtttggatttgggacccatacccaaactcaaacccagacccggactcggaccaagaccctgacctagacccaaacccgtaccccagacctgggtctgagtccaagtctaggtttgagttcaggaaccagaatctgactaggacctagacccagatctggaccgggacgcggacccgaatcaagataacgactcgggacacaaacacgaactcagacatggacttggacccagtcccaaacccaagacccggaccaagattggtgactaagacctggacccaggagcccgacaaagattgggggcccaaactcaaaattagaaccagaatcgggacccaactggtacttgaatccaagacccgatcccagtctcagtcctagacccagacccggacacgaacacagaccaggacctaggatccgaatacaaatgagaccgggacccaagattgggatatagatcatgactcacgaccggggcctggacaaaacccgtagtcggtgtctagattttggaatcgtaccaagacccaaacctggagcaatttctagactaggacccaatcccagactcagactcgcaacccgaaattggaacaagaactagaatgaagaccttggaacaagaattggacgttgacccgaaaacggatctagacgcagaaccgaacacagacccgaacacagacccgaaccccaactgggatcgatagctagacccata

SEQ ID NO: 345635 - DNA, 719 bp, Cannabis indica
tgctaactgaggtgatatctgaaccacactagctatctgcccgggaccctccctgcttagggcattggccactacattggccttcccaaggtggtaaaggatctcacagtcgtaatccttaactaactccaaccaatgcctctgtctcatattcaaatctttctgggtaaagaaatatttgagacttttatggtcagtataaatttcacatctctctccgtagagataatgccgccaaattttcaaagcaaataccatcgcggcaagttccaggtcatgagttgggtatcgctgctcataatctttcaactgagaagaggcacaggcaataacctgatcagcgtgcgtcagcacacaccccaggccctatttggatgcatcacaataaaccacgaacttttctttgtcagaaggcagagctaacactggagctgtaattaacatctgcttcagttcctgagaacttgattcacacttatccgtccatacaaaacgctaattctttttagtgagcttggttaagggtgttgaaattttagaaaacccttctacgaactgacgataattactagccagacccaagaaacttctaacttctgtcactatttttggtcttggcaaatccctgatagattctatcttccctggatccaccttgatcccatctttgttaacaatgtgcccaaggaggacacttgagatagccaaaattcacgctt

SEQ ID NO: 345636 - DNA, 684 bp, Cannabis indica
tgacaaatatattatctttcttttttgcaatggccatacatatttgcccatagcagccaaattctactctttaaattcctaaatctcaagtcacttgctgctttggataaacaaacattttcccaagcaattaggagcatgagatctcgagactcctttccacaaaaaatccttgcaaatcgcttcaacatctttaagtaatttcttcacaaaatcataatttgagcccaatatgaatgtatgaaatttaacactgagttaatcaatgttactctctccatataggatatgttcctatagagctccatacccgaattctgcttgtcattttttctaagatgcttttacattcagtagataaaaattcttagaacaaactgggattctgaggtacctgaaagggagatggctgcgagcaaacttagacacttcaagaattcgattcactttagtatccaacaataaacagtcatttttgcagcattggaaacaaccccaaggtcgatgaaaaattttcaagcctctcaataagagccaaattgagatgaaatccccattgcaaaaaaaataacaaatcatccgcaaaacacaaatagttcagcttcaaaaacgaacatctatcatgatatttaaagcctagccaagttcccaccctcatcacaatttgagataattattccatat

SEQ ID NO: 345637 - DNA, 1041 bp, Cannabis indica
aatgcaatagttatgtggatgtgaaggatatatattcatggagaaaggtttcctcctacacagtatcatttttataaatttttggatacagattttctgtaatattgatcctgttcattggcaaatgttgtctatttcttttttctttttactacaaaataaagaatttttaaaaccattgatcaagaatgatggcagagatgttttatgtggactaacactctttattttggatttgcaggaaagagttgctttcaccataaaatgtgatatgactatgcagatgtgtcaatactgtttcttcatttatagacttggtgttctttcgtgtttcgatcattcgttaataaaccttatgtacgccttgccctctttatctatactagtttaatttatactcggtgaaatgtacgtattgatttaaaataatttatttgaataattatcatacaaattgtgaattatgtgagtttatcatatgtgatatttagacaaaaataaataaatacatagatactttataattaaaagcaaactattacaacaaggaagataaaactaataataaattcatatttggagggtttagaaaaaatcatatttgaaaaataataatattgaaatgttttagattttaaattttggcaggtaatgtaaaaagtaactaaaatgtaggaatcaaataataaaaaaataatttcgtatatgcaaacttgatttaattaaattttatatagcgaacataaaaaaaattattttatgtttctttcacaaattttccatctttcttttactttttttcctcacaaaaattcaactttcgtttaaagaacctctaaacaatacaaacaataagttttcaacaaagatcataataagctaaaattatgaggaatttaatgctattttttttttaaattttagaatcaaatatgtatttgaaaataacgatactaataggggtaagttgaaaaataccccttttattaattaattaatcaaatttgcttctaattttatatttatttaaaacatacctct

SEQ ID NO: 345638 - DNA, 569 bp, Cannabis indica
gttgctcaaactttgttgtatttttgatagtttaattattagtgataatccaaactgcagaaactgcaaaaaccacaccattttttgcggtgcagtttctgcggttttttagtttcgcagtgcgggtatggtttagaaaattggaaaaaccgcatttgtgggttggagatactataaataattacaatatacaaaattgttatatgtatatgtataatttatgtaaatgtaaaaatagaaatatttacccgtccatatatagggtagaatcctctctatacatatattgacaaaaatatcatatatattatgtttagatcagaagtctgttgtagagggatcacttgtaattaatggtgaaattgtaagcaaattagaaatcaacaggaacgtaatttatatgtataattaactcaaaccaaatgtttaaaataaataaacacatcgtgtatttttatttttatttttgacaaaagccacatcacaactgacagaaaaacaaggacagtaatcatgtacacttttacaacacttaaatgtaataataatgatagtaattaagagaaaat

SEQ ID NO: 345639 - DNA, 491 bp, Cannabis indica
gccagtagtaacccaagaactagaagtgagactagtactagtggttcaactagtatgggcgttcggagccttgagcatatttgtgcaggggcctccctccctcttcgggactacttcaaggattatataaatcacattggggttgccccattccagctaaatcccatctcttacaggattctcgctagtttgaaagtcttgtacaaaattatgaattggggttggctcgcgcccgtagaaattgaatatctttactcagttagagtcgttccatcgaggaagaacattgcgggggctttttctatcttggtactcatgctagtgagccaaaaattatcgttgactttccaaataagatttccttcaaggatgacttcttctggtcgtctggtctctcccccattggcacaaccatgtttcgcaaactctgtaagtgattgttttcttctttcttattcacaacagtcttcctttttcaagtacttgactaa

SEQ ID NO: 345640 - DNA, 677 bp, Cannabis indica
tgcacctagctgtgcttgcttcgtcaaggtttggggttcgcaagtagctattcttgcattgtcgggttcacaggtggctagttctgtcatagaggttgggcgtttggatgggattaggagctccccaaagtgaaaattttatcagatttattttggatttcataaatttggttctgatttagtaatggttctaataatcttcatttttttcttcattttgagatttgtttatctctgattatatagcaatattgtaactttttctagtgttaatgtatatgatgttgtatatgttactatactaataatttatctcgaatttgattatagtgtttgtatggtgttatggaagaatttttctatctctgttatagttaacttgtaaattaatttaggtttttattttaataaaatacattttgtctatctttatggtgtaatttataaattttacattattaaattaaaattattattgttatatttaattatatttgtataaaattaatataaattattatttataatatataaaatttgaattaaatcaaattaaatattattttttttagaaaaatatttaatatagtgacactttttgtgtgtcactatatctttaacaatattaataaaaaataaaaaaaaaaagaatatagtgacactttatgtgtgtggct

SEQ ID NO: 345641 - DNA, 1050 bp, Cannabis indica
gtaaaaaaaacatgaccaaaagaaagattactatacataacaacgtactgtaaagctgattgctttgtcaagtcctttgatattcaagtatgcaaggcacctagaagcccaaggacaagcatatgatatgtacagatgatacctcccagattcaactgggaattcagagtttggatctctggaaatgatgttacgaaatgtggaagcagttcttgcaaatgcaccagattcagacaactcatccagtgcagatcgagccattctaacagaaagctaaataacaaatatgcaaacattaataccactacaaggaaacctgtatattgatttttcacatgccataagaccttaaaatttcaagtaataatagatcaactatacctaccaaagaaatcaaattgataaaaacaaacttccatttcaaatatataaaattgatcaatgaactgttcatccttataaatctcataaacgattttcatttgttatcccccatttaaaaccaaaaaaagaacccataacttgaataacatgatccaactattctttctacctcgagttatagaaattgaaattctcaataattatacaaattaatatcatgtaatttagacaacacgtattactaaaagaataggcaagtaaagcttcacttgtgtgtgtgtgtaatatgtatgtatacgattatacgaaataacaaaatagagaattaagaaattggagttagttagttaccttgaaggagtttgggagagggagagtagaagaagaggagatgttggtattgagcaaaggtctaaattgtagaaacgatgggagagacaacattataattattagtatttagcagaagaagaagacatcatttttatttccaattggtttgagttaattattagtataaacacgcattatttttattttatattattattattacttttatttgatgagcatcgctcataatgtaaagttaaaatataatttatttatataaaaaatatattttaataatgtatcaaaaccttacaaatttgttatataataaat

SEQ ID NO: 345642 - DNA, 786 bp, Cannabis indica
taagtttttacttggtttgagtttatgattttgacaattagtggctgttaggtttaagtatgcttagggtttgaattctaagcttaatttgagttgattaagggtcctaccagctggtttggttggttgatttaggttttgtgcaagtttgagcatagaaaccttaactttgatctctaattgcaagttttgattctatgagtttttctatggtttattggctggaatatgttgtgtataccctaattaggtactctagaaagtttggttgcatttggtggaggattgagcaagaaatgaaatttcttgggtgaactggtgcaaaccgggtaaccagttttggcagggttccccgggcctttcattttcttaattttcatcctttctgtgccgtggttgggtgtttccctatttccagagctagattaactctagaaagtataacaaaacctagggttatggttttgggtttaccgggattaggattttgtgcatgtaacttacccggtttcgtaatgtaaatagggcatccatctagcacgagattttccgtttaggtcagccagcacacttgaattcggaaagaaggtaagaactgaatataacgtgtgatatcaatatctaagtgtatgtatatgttatgtgtatatgcatgctttaaatgttatttgcagtaccaacacttgtacagtattgtacagttatggtacaaagtgcattggtatagtgaatattgattaggagtatagtacagtgatgccagcacaagtacaagaaagtactggg

SEQ ID NO: 345643 - DNA, 615 bp, Cannabis indica
ctctctctctctctctctctctctctctctctctctctcgtgaaccctaggaaccagctaggaattcatttcttcttcagttttttcaagcaaagtaaagcaatttattgtgaatccaagcactaggtaagatctcaagcaactctcttctagtttcttaattttaaagaaagtgaattatgcatgtttttgatgttttgcttgttgttctcgttgatgttgttgggttatgttttcaattgctttattatgatgatttagggtgattttgagcaggttttgatagctaatttgttggatgagcacgctttaagtttttgtactgaagcgtagatcatcaatggtgaaaatcatttttgtttatgggtagttgttttatcacttgaaaaatgtttattggggtataatatgcaagtctggaaagtttggttgagtttggaaacgatttggttaggggtttgatttttgtaggttttcaaggtaaaaccggctaaccgattttacactggttgtaaaaccggttacccggattttgcagcaggggggaaaaattagtttttcagcttgtcgtattgtgtcagtttcaagtttctaattagttgatttccctgctag

SEQ ID NO: 345644 - DNA, 537 bp, Cannabis indica
tatattttaaaaaattataattaattaaataaatatgatattaaatatatatattgaaatcatgctttaaaaccgcgcgaagcgcggctttgtttactagttactatatataatagagaaatgtatagcatgagatacaaggcagaaatacatatattttgcatttataaccaataactcagaaagtttcttgggattaatagaaaagcaatgttattgtgtataaattacattttattctggtcaatatttgtgtattattcatagaattctctgacataaacaatgcaagttcatatttctatgagttgttgattttgttcacttttgaattagttcaattataacaagtaatatttcctttgatctttgatcttttcaatgctatttccattagactaactcagcatcacattttgcattttccttggttcatcattgttgttctccttctaaaaaaatagatgagcaataatagttggtaaatgatcttttgaaaaaacttttcatgctaccacgtggcaattctacagctac

SEQ ID NO: 345645 - DNA, 671 bp, Cannabis indica
tgatctgacccgtatacgatacccagtcttatcactcatctaacaacctttgaagtggtcagtcaaactgaccccgcaaataatgatctccttgatcaagtggggaagagcgcttctaaaggagggtgagcggtcatgagtaacatccttccatggacgcctataagagtcactctcagttactgagaggggaggaaaaaaatttcagtcatctcaatacttcttacttatcgttcaatctaattctctctaaaagatacatacttatttccgtagtcaagataggtggtaacttagttcgatcatttattctcatctttttattacattgttaacaatcttgctgacttgaccgtcggagtcccttcggtcggtaccatcccggtgtcccaaggtttcccagttactttcttctttgttctacaggttgtcggtgcctgcgtacgatcatcttcaatcgattgtggattttaccatctacaggctttaaagttagattcatgccactttattttatttaaataaaataatgtgtctaaacttattttaccacttatctcatctaattatttaaataaaacaaaatttaaatatatttattaattagagggataattgcggcaaaagtccccaaaaacttgaggttgatgccgattagtcctcaacctcaa

SEQ ID NO: 345646 - DNA, 876 bp, Cannabis indica
atttttgtaagtttctcaataaatttgatatttttaaaagttgaatttgtttagagtaaataccattttggattctgtgttttgcaaaagttacaaatcggatcttgtgttttgttaaatgacaaatggactttgtattttctaaaaaggtaaaaataggaccttgaccttaatttttaataactttttttctaatataaccaacttgaagacaattttcaatatgaacaaatacagaaaatgtaaacagttttgtcatagtacttttagatcgtattataattaaattttattttgacaaaaaatcaaattaaggtcttatttgtaccattttaaaaaatacaaggttcattttgttatttaacaaaacagacagttcgattagtaacttgtgtaaaacacagagtccaaaatagtatttacccatttgtttatgaccaaaagttctaatttttttatcttttttatttatacaaattgatttaactgactaaatgagtaatgatatgttaacaaaattactgagatttgtaattatttttatataatatatatatatatattattgttcttgttaataggttgttcatgccttagttaagcacactattgttatttctataaatactatgggtgtaaagtcaagagagaattgaaattaagtgtaattaaaggtgattacacagttttacgtgtatttttaaccacgtaattatacagtaattgtgtagttggaagtaattaaaaggcctcaattactttttaattctcatgctcatccttatgagaactgagtgtaattattaataattttctattttaaatattattatgtagtaaatttttttttgtgtaattactaattattttaccaaa

SEQ ID NO: 345647 - DNA, 521 bp, Cannabis indica
taggggtagtttggtaatcttagtcaatcccgtcaaattaataatttaacattctaaactagttcgatacaatttccattccgttccataacttattatcgtgacatttacgaccttcccgtcaagatccacaattgctaggtccgaaaatattttattcaaattatggtatctacgatacccacatattccactacaatttccgtaattaataaattacgctttattattcattaattcatatttccctaatcaactcgtaattagtttaagtaggattataatcctactctaataccactatatttttcgggatattacataaataatcaagtataaaagaaacttaattattaattctaatttaatactaggaaaaatattctaaatttaagttggtccaaaattaattaaaataaataattaattttcaacttaaaataatttcctaattaaatattagaaaaataactagtactagaaataaatatccagaatatatatcattaactaagtgtttt

SEQ ID NO: 345648 - DNA, 821 bp, Cannabis indica
gaaatatagaactagaactcaaaaaattcaatttgcattgttgcaactgtaaacatgaaacagaattcaagtttctactgaaatttggaataaataagacattgctaaatccaaaattctattctgatacttcagtttggcttttccgttagctctaaccgatactattttgccattaccaactttaagtttcaactctccggattttaaataattccaattttcaagcaattgcaatgaacaacagacatggttagtagatccagaataaagaatccagatagatttgtcattctctaaaacacatgattcaaaaactaaagcattggaatcactgcttaactgtttttggattgttcttattgctggttcaatctgttgtgaaagataatctgagtaagtggaattactttctctatcattttcaactgagcctgaagtagtacgattgttggagaattattctcaatatcttctgctttcctttttcccttatctgaattactggagaaggatctccatgcaagtgacaatgtctgttccataagcacgcaactcagcatccaacttatctatgtcggacgagttccaattgttaacaacgaattggttaaactcaggtgatgagctgttgagaacaaaatgtactctttgctcgtcagataaaacaattcccagcatagctgctttctaggaatttcatgtttatcatgagcaagtgtgaagtgaaactctgaccaggagtcatcttcacactttgaagtgttgggttttatgccctaaataaaactctatttcaatgtaatccattttattcaaca

SEQ ID NO: 345649 - DNA, 615 bp, Cannabis indica
aaatcttcacaaaaacattacaaaattatacacataatacctacatacacaaaacttccaaaaaaaaaaggcgagaacctcccaatcggttttgccatctttttgaaactgagttgtttaccgacatttttaaaaaactaattataagagattagaactgaagaaataaataattcaaagagaaggaacaggacaacacttaaagttttttatgaggttgaggcgttaaagagccttagtccacgagtcgatattattatatattttagctagaaagcctttgggaatacaataagtatatgttctttgtttttggctgagcaaatattgcaagagtattcaaccctttatctgaaggatttgttgagtatttatagagtttataggaattatacttagttttccttttcctctagtggggagtttacataaaaactaaacaagttagggttgtatttgtgaggcccaactcatgaagcaataagcatgctgactaggcaggttgaacacgatcaagttgttaatacagtgtcctataattgtggataattaattatgaattaattacttgatcttcattttaggtagtttctccttttagcttgatatgatctt

SEQ ID NO: 345650 - DNA, 718 bp, Cannabis indica
accgtcgcctatactataggcgaatcatcgcctacactataggtgacggttttaaaccatcgggtataaagggcgcattaaaaaatcgtcacctacttctcgccatatttgcccacctacttttttttttctatttccaacatgcccacctatttcttctccatttcccacaccctaaaacgaaaatcttaactctcgaaaacctcactcatgcctccgcaccatcgccctcctctcttgtcgtcttcctccctttcttgtcgtctctctcgtccatcgatctccacccacccctcctcccatcggtgtccctttcctctccatcgcatacgtcgaaagaccaccacctcccgtcggtgtctctctcatctccatctcatacgtcggaccaccaccacctctcgttcgtctccctctctctctttctctctctccaagctcagtataaatacatttatttatttatcatatatatttattttattattgtgtaaatttaatatgttttaaagttagttgttattgtaataaaattaattagttgttttattttaatttaggtaaaattataaaactaattgaggaaaagaaatggggaaaacaatccttagggcatgctttgtttaggtcagtaaagttgacgcaagttctcaacataccattcaatctaaccactagaacaggttttgatacccaaatcagtgttgggttttatgcc

SEQ ID NO: 345651 - DNA, 763 bp, Cannabis indica
tttttttttactattatttttatgtgacaccttaaggtgctcaatacatatcgattaatgtggtatccaataattagttatcagttttctaaattttttatttaaataaaaaaatttgagagttggtattaaaatacaccaataattgtatgatacctttcgtggtgcttaccatcataatgtgtctcttatcattttgttattaatatgtacgtatctttataactacgattagaattttaattttttttttgtggttaattatacataaatttgcaagaacatctaaaaattgtatatttgacaaacaatttttttttgtaatataattgtatcaatttttagcattttgcgctaataacgtgcaattctaaaacttgatgcaagatttactatttttattacaagtataaaaaattaataattttatcattaatattttaatatcaaataataaaaataaatagttcattattaacgctataaatatattaataaaataataaaagtggcataaaagtaaataataaagttgtgcatttatcacaatgtaaattttgtattataataaatattttatcaaatttagctcaatatttactatgtgacaaattcgcataaacttttagcacactattgtagaacaatttttgcgatgtgagctatatatatatatatatatattgacaaaatgtgagctatattttaaatgggcatcacttattaatttacatctccattgaaattgctctaagtttttctt

SEQ ID NO: 345652 - DNA, 677 bp, Cannabis indica
aaccatgcaacattaaatgttatttctgaactatattaataagtaaatctgcttatattgaaatgagtttatttagggcataaaacccaacaaaaacaactatgaacaagatacaaatgccatagatactaaaatgtggttgtggtcttttgatcacttaggtctagttactatgaaaaagttcgtagaatagtccaagtggatcctggtcacaaaatacaaactcaaaatccatacataaacatacagtttggatctattgacggaaaatggatattaaaaacttgtgaaagtcatactgtattgcccaatgtattctaggaaactgaaataaaaatttctatttggaatctaaaatttatagtcgaagacttaaatttatactaaatatacaatgagcgattgttctagcttcgaccaccactactaatctagctctaagttcaagttgctataagtaggcatatacaaatataataggagaattctataaggtcaaggatttatcatttcgggatagaatgtcgggaatatagtcatttgtaccattcaattttataagagaaagtagaataacatcataagcagatgatttataaaccattcatccaatgatatataatttaaacaaatttgaaatgaataagccaagaggaaaaattaaacgataatttcga

SEQ ID NO: 345653 - DNA, 738 bp, Cannabis indica
tataaaaatcttacttctctacttgattttctactataaggctacaatgtcattctttcaatttcataggtgttacccactcatcgatagacacttgttccatgacacttggaaataaacatttaagctctttaaaaggtcttctatatataaatatttaatgatccatttcgaccacctttttgtctaacattcacctcttgatatcctttatccatgtattcattgcacttgtcacgccttcccattttcctaggtaaccactgtcggttccttttgtagtctctttcttgtatcactatattgtattttctttgctaatctctcctatggtgcttggtcctccattacccccttcaatcaagttgacttgattatgagattagctagttttctatactaacttttatctactttggtattatcttgctatagtggtgaactttgaatctgtaatgccgatagattctgatagttatgttcaatgattgcttcttctaatatactagccatctgaggtatcacataacttcatacttatcatagcattgattattccagccatattcatgccctgtatattgtagccttctttaattcaccaaaaaaatatctcaacttcttaattgtacttctaaaacttttaaatctcttaaacatacattccaatactgattatttacttaagactataccatatatgtattaaaacatagaaagcacactaataaccccttt

SEQ ID NO: 345654 - DNA, 524 bp, Cannabis indica
aataataaatatgtttaatttttgggtatttttagcaaacatatttgctttacttgttattttctaaactcgtgtatgaatttattgaaccaataatttatttctgtttattgatatttgtagtgtcaaaaatgtgtagcccacaccccaatcctcatctagaatattcctttaggaatgaacttcaaagtgtgaagatgactcctggtcagagtatcacttcacacttgctcatgatgaacatcaaattcctgaactcagctatgctgggaattgttttatctgaagagaagagagttcattttattctcaacagcttatcacctgagtttaaccaatttgtgattaacaattggaactcatccaacatagacaagttggatgctgaattgcgtgcttatgaacgaacattgtcacttgcatggagatccttctccagtgatgcatatatgggcaaaagcatcttgcgaactgataggggtggagaatataggatatgaagttcaaagatcatttaattgaac

SEQ ID NO: 345655 - DNA, 1217 bp, Cannabis indica
ccctaaactcatccatttcaacccaaacatggttcaatccaacataacctcttatacaattaaacaaccacaaaaggaagttaatccacaaattattaagtttaaaatttcagtccacatgcatagaaattcagattcaacaacatgaaatcaaagctccaaacctagagcaaaattcatcataagttctaatcaagaacttgaacttcaagcaagcttcaaacttaattttttttttccagcaacaacacatcaaacaagacctgaattcaaacatgaaaattaccctaaaagctcatctagaacccaagcaacataatccattacaaaaccaagcaattaacacccaaatttctcaagattaatattgattctccccacaagcaaaccaaaaacatcatacactattttcatgattttgaacaataaatttcagcaagaaaaatcaacaaataaaaggggttaagaactacctcaagctccaaacaaagctaagcacaaaacccaccaagaatccaaactttcaagatgaattttccaacacttagcaaaataaaaatatgaaggaaagagggagagggggttcagctagggcagaagaaaaagcctagaatttttcctttttaaaatgcaaaataactcttttcaatctctatcacaaaagccacaaacccaaagcttgaattcaagcaagcacaacccaaaataaagatttagaaggagtttttgagaagaaagggggttcagccaaagggctgggaaagatgcaagaaattaaatcctaattttgcttaaaatccattttatgaaccttactctaaaatggcaaaattacacaattgcccttaaggccataaaacacccacataagcacttcaagggtaaaatagccacttgcacacacagatagactcaattaatttttagattattcgcacataaataaaataccaaaaattaaacacaaaattgtaattcggccccgaacttggttcggcctgaaatacctagttgtgactatactgcgccaacttgttataacacaccgaaaaatggacaacacaagcatactatataataatatagtccataagcacgtaaataaattaatttcactgttttacccttctcgggtcaaaattactaaaatgcccctagctcacctacggggtctttgttgggttttatgccctaaataaaacccattacaatctgat

SEQ ID NO: 345656 - DNA, 930 bp, Cannabis indica
cataaaaagtaaactcttataatcttcccacatatagtataatttctactaatagaaaacataatatactgtattaagagaaatttaattttctatacttacacatacctaatatctttcccttaaatccataataccccatattccccataatacccctctcatttgaaatcccaaacccaaatcgcctcctctctcttcctcttgccaaaccgcctcctctctcttcatctcgcccaaacccacggtgaaccgatcccaaatccatagaattaaacccacagtgacggtgccccctgctatcgacggtggacgcaatctcaaacccaccgtgacgtggcggcgcccccttgctctcgacacaatgtttaaggtgtgtcccttttattcttctttttttttgtgagaaagtgttaaagattgtgtttttgtttgtgaaacctacattttgttcgatgtagggaaattttgttaaataattatgtcggatctatgggggaaatcgcaatgcagtccgatgcaggaccgatggtcacgcgaatggggtggggaagaagaagacccgatgggtctaataggggacccgatggggggtccgatgcttgtgctgaagtaaaattttcatttgggtccgatgggcccgatgctgggcccgatgggggcctaatggtgttgagtgtttttttcaaaatggtgttgggtccgatgggcccgattcctatgtgttgttctcattttttggggtgttgggtccgatgacgctcgattccttttatacaggtttaatttttttttgttgggcccgataggacctgattactttgtgcagttcttaatttttttatgttgggtccgatggacatgattgtgggcccgatggccttgtaaaaatttaattttcaaatttttttaatttttctttttttttca

SEQ ID NO: 345657 - DNA, 780 bp, Cannabis indica
gaaataaatcatgtgaatcatgtaacataaaacgatttttgatcttttattaattagtaaatctgattatattgaaatgggttttatttaggccacaaaacccaacaaactcccacttgagctaatataaaacaaaagtgcttttcaaataatctcaacaccttgatatctaaatcaagtttagtatgtagtattgtctctgtaataggatctgacaggttgtattcaatacaacctttcctccaccattacattttcttaatcacaaaatccttgatattgtgaaattcctctcaatatgcctactcctctaggaatactggattctttactttttggcaactacatttgtgttagtcagtaagttacactagtagttaataaaataattgtacagcgccaaaaactatatagaactttccatagactgaataagtatctttcttgcaactttaacattcagtctcactggtagagttagagacttcagattggttcttacacttctccaaaatcactgctccaccccagaataattaccatttgatcattagactttctagcactaatgcaagtctagaaacctgatttggtgtagtctaagagcattaaaataccacccttatggactaacatatagttcctctggctgatcttaagattcacttgattgtcttccaatgttatattcctagattaatctgatacctactcattactcctgctcaacaacaggtgtctggtctaatgcattttaaagcatacctgagacctcttact

SEQ ID NO: 345658 - DNA, 1048 bp, Cannabis indica
aaagtgacccaaaatgtaggctaaaaatagcctaacacatatagcttatgatcccgtaatcgttgcaaaaccgctctaagatgcaactcatgctcttcttctgattcccaatacaccaagatgtcatcgataacacgatcacacatctatccatgtaatccttgaacacccgattcataatatccatgaatgccgccggagcattgatgagtccaaaagacatcacaaggaattcataatgtgcataccgagtacggaatgcagtttctaggatatcttcctctcgaattctcagctgatgatagcctgagcaaagatcgatcttggagaagaccgtcttccccttcagttgatcaaacagatcatcaattcgaggtaaaggatacttgttcttgatggtaagcttgttcaactctcggtaattaatacacattcatagagacccgtctttctacttcacaaacaataccggagcaccccaaggcgagtagctcggtataatgaatcccaaatttagtaactcttgcaattgtatctttaattctttcaattctgctggagccattcgatacggtgcttttgatactggatccgctcccgaaaccaactcaattacaaattcaatttctcgggtaggtggcaatcctggtaaatcttctagaaagatgtcaaggaactcgcacaccaatcttgtattcttaggtccagatgtcacaagttgactggtatccactgcagtgattaagaatcccagacaacctctgctcatcaggtccttagctttcaacagtgttattcttggtatgcgttccccctgaactttacccacgaacactgctgggttagcactatcgggctcaaacaccaccatcttcctcttgcagtcgatcattgccccatacttaggcagaaaaacaattcccaggattatgtcaaaatcagacagttgcaattctattagattggcggtcaattcacaatcttcaatccagaagaacaaaaaccgaatccacctagtggatactatatggtctcccgagggtaacag

SEQ ID NO: 345659 - DNA, 1417 bp, Cannabis indica
gctttcgcctttcctttacctacacatggaagcagaactgtgagtcgacagactcagtaagaaaagcatataacatatcatataattccgacttgtatctaggcacccatacacctatttacaacgcttaacaaatgagtaagaacgttcaatactaaggtatagctactataccacatacactacgtacctcactgtatgattgttggcgtagggtttgtttcgtaccctaagtaccattgagtgatataccacacacccacttagtactttcccgtacttgtgccggtatcactgtaatgtaccccaaaacaatattcactatgccaatgcactatgtaccataactatacaagtgttggtagtgcaactaacacataagcatgcatatacacttagcacatatatacactcagatattcatattacatacgatacatagttcttaccttctttccagattcaagtgtgctgcccgacctgaacggaaagtctcgttctagatggatgccctaatcacataatgaaactggataaatcacatgacccaaaaccctaatctaagaaacccgaacccataacattaggttctgttatactctctatggattactctaacttaggaaatagggaaacacccaattatggcactgaaatgacaagactttagaaaatggagcattcaagagccgtgccaaaaccgcctagctagttttacaggtactggtgaaaccgactagccgattcacaccaattcaccctaaaattcccatttcttgctcaatcctccaccaaatgcaaccatactttccagaacacctatacaatgcataaacaacataatccaactaatatttcccagaaaaactcaatataaacaaacatgccattagagatcaaagttaaggtttctatgctcaaacatgcacaaaacctaatccaaacatcaaaactagttgctagaaagtaaattcaactcaaatgaaccctataattcgaaccacaaaaaaactaaaccctaatagcccctaatttccaaaatcacctaatcaaaccaaagtaaaagattcaaaaacacaagtctatggattctagggttaccttagcttgaatcccacttgaatttcctgctgaaaacaccaaagatcatcaatccccttgtttttggctggttcgaagagagaaggaaggaaagagagagcttctcttgattttagcttattcctcttattttcttttaatttctctaaatgaaaagaatttattctctaacataatcttgctaaattaacttgctaggtgtcacccaataaggcagccaccaaatcattctttaggccaattactaaaatgccctctaacttaaactagggtattttcaaaactaggggtaaaatggtcaaattccataaccccg

SEQ ID NO: 345660 - DNA, 760 bp, Cannabis indica
tgaaaagaaaaatagtaattggtcacaagttacaagttttttcaactttggtcaattcttctccaaagtgttccaaatcactcccaattaattttgaactatttatacactttgtaaatgaataaatcaattatacaacagctacattatcaatagctatcatttattcactcataaacaactaataatatcttttactaatttaagaattaatgataatgtagctagaagaattacacaattttatgatcatcacttctcgagaatttgcaaattcctttttatgattgtattacaatattataacatcatattgtatgttactattagacaaacacattattttgtcacgcttaattatttttctcttaattataaataatataatacaagtatatataaattagtatatataatttcaaatatatatacttaagagtatctatcacatgttagtatcttaaatttgatgtatacctaatacctaataatatttattatttcttagtatgtatatagaaattaaagtattgcatgaccatttaaatttaaatgattgatgtttctccttttttttgactcataaaatcagcattgtagattgtttggattgttgatttacatgtatggttggttttggcttattatttttttacagtaaaaattccttatttttactatatgtgtgttgtacctaatttatgtttgatagaaatgaaaagttacttaccaaaaaaaaataatctatgtttcttcttca

SEQ ID NO: 345661 - DNA, 596 bp, Cannabis indica
ttttatatatttaaattgaataattattataaaatattattaactaatttatatatatatgtataaagtgtcatcttgagtatataacacttctaatatcaaatagcaatcctcttcattaatgagatttttaaccaatgacatagatgcataaccatatatattatattggacaataatatttaattatagaatgagatcatatcatataatagagtatataattgatagaaaatattcaaagtaatgacaaaggcttggactaataatagtcttagctaatgtaaatgttatttatagatattagatacaagtggatggttttgtgggttccactaatggacgtaatgccatggctctgcctcacccggcatcgttattcgtgccttttttttaattattattttgaatttctagcatttttttttatggagctttcttgcattattttagttagggtaggtgtgcagaaagtcatctaatctaattctaatcgatcgattcaattctaactgatctaatagaatcggatatctaatcataattggatcggatcagatacaaattttaaaaatccaattagatcggatcggatg

SEQ ID NO: 345662 - DNA, 825 bp, Cannabis indica
tttttaacttttgactttcctttctcatcaaaaaggttctttaataaaaataattcatttacaatttttttattttcctttctcctagaaaggttctttaataaaaaaatttaaagtagtgggtttgcaatatatcatgtatttttagataaattctcgttaatcaaacacatatacccctcaagtaattttaaagaataacactttgtaattacttaaaaaatgattaactttattaataatctgaagttcaaaatattacatgagaaatatgagttacagcatcaatttattggtagtaggttcgcaaatgttccacgttccaatagttctttatcagcgagctattcggctgagccaattagtaaatctcggttcctactatcgcttcaattgcataaagaccctcccagtttgggttaaatactcctgcagatgcgtctctcatatttgcaaatactcgccttagcaccaacgttgaagagcctctttttcacccttttgttgaactatcttgttactcggtgttggtatgctacattagtaatctgcgactcagtacgtttttcatcaagtagatccaaggataatttcaaaagttcttcgttttcttcttgattataaaactctcgtctatgagtagagatacttacttctacaggaaacattgcctccgagccaagtcctagcgagaatggagtatgtcccgttactgcttctcagttgttctatgagaacaaagtacctgttgtagttcgttgacctatttgttggaaatattttaccagggtctagatttactaacaagtatgtttcattaacatc

SEQ ID NO: 345663 - DNA, 503 bp, Cannabis indica
ttaatcgtcgcaactcttcttcttgacgaagtatgacacttcgcatttcttgaaacatctgctgccattcagcaggaggattagcattgccaacctctgcattatttccccggattctgcggaggtgggggcagtgcggtgaattggtttggtctacaccaggctctactaactcgccctgtggtctagatgattaaagagggtccactactagtacccgtgtaatcaacaaccccagcgaattaagcaccaataccacacttacgcacttaatgccttaaaccctaactcatctatttacctcatataaataaacacttaatcatatagcatttaaagcatgacatcacataaaacatacatactctagatgcttgcatactgcctaaaatggaaagcggtaaacagatgatcacacatacagtcaagtatttactctcaatacttactgcaccatgagtcgagcttatctctgacgacgaatgtacatgttcggccggtct

SEQ ID NO: 345664 - DNA, 642 bp, Cannabis indica
accacactctatatcccttaaccccttcatggtagactagaaacatgtatctcaatgctttaggttgtaacttatcttgtctaacatgcacaagagcaatacatccaaacactttcaagtgatctaagtttgggggtttacctgtccataactcttgtggggtcttgaagttgtttggcacagatggtgatatgttgattaggtaacaggcagttttaagagcttctcgccaaaagcatttgtctaaaccagctcctagtaacatgcacctaaccctctcaatcaaagttcttttcatcctctcagcaacaccgttttgatgaggggttttgatcacagttctatgtctcttgattcccattgtggcacacaatcccttgaactcatttaagcagtacttaagaccattgtcagttcttagtaccttaatttcgttctcaatctggttttctagtagcctcttccatgtatcaaaggttcctagagcctcatctttgcttttcaacaaatacacctagaattttctgttgtaatcatcaataatactcataaagtagtgtgctccacctttggctggaatcctagatggtccccaaaggtcagaatggacataagctaacctttctgtggtggtgtgctctg

SEQ ID NO: 345665 - DNA, 769 bp, Cannabis indica
atatgtttttttttattattttaagaaactaaataaaatgaggctagtattaggttacaagtaatttattaattatttttaataaattttttaaattaatcacaacccttttgttgtccttaattttgcctaaaacacgtggacctagataagggtgacacgtggagccaaaaggatcagcgcttatggaaattaactaagtcttagacaaaagaggagtgtctcagggaaggtatctcccggaggagatataaagagtatctttatactcccggaggccgaagatatgccaaggcagttccgagaggtaccgaaacctattgaacaatcacctcgcatttaatgccgcatgggggaagacgtattgaagtctctataaacgacatgacagatggtgtaaccccccttttttcggctactacactatgatcaataagcctagtgacggctactttatgaggaatcacatcaatcaagagggaataaaagattatatccacctaactcctaagatacctacggtataggtcatgtatttcctattttgtatttactgggaatatgtgcccctatgaagctaacacagaaagacaagtgatccattcctagggatcaccccaaaaaaacactataaataccccacaaacagactgaaaagagggtcgagaattctgggttcaaagtaatcaaggagagaaaataggagagaaacacaccaagaacattatctgtaataaatactctcattaataacaaagactcgtggact

SEQ ID NO: 345666 - DNA, 848 bp, Cannabis indica
aatacaacctgtggtatactatattatcaccaaaattgaagctttggtttggttgactatcacaagttaaagccaccatctaaataactataaggcaattatttattttcacacatagtgcgacaattagttttaggtttttttttttttttttttagacagccttagaaataaatttttttaaaaaatatatatataataataaataacgggtacgggttggacccgctccttttaggctaacccgtacccgcccgccaatcaacgggttaaaactcaacccaacccaatttttgcggttttttaatgggcggtttccatgcgggcggattctaatgggttaggcggttcccacggtttagcggtttttatgttccggcctagtgtgtgtgtcgtggagaacaagaatcagcggaagaaaaagagagagaaaaaagttttactatttaatctttacaaagtgttgtaccaatttaccggttccaattttaactcaaattcggaataaagttacctcccttgagacgggcaaatagccttaaacctgaacaagtttttatcatacccaattcaattttaaatggaaaattttatttttaatgcttaaaaaaataaccctctaacaaaatttagactcctaattaatttatacaatttaatactattgttttcaatttctacccaaaatactcttcttttcatttttccttctctctttgtctctttctctttctcttcctcactctctctttctctttcttcgcaccactgagacactcaaactcaggcaccgacaccaccaaccaccaccgatgaacctcttctcctccaccaccgaacctcctcat

SEQ ID NO: 345667 - DNA, 688 bp, Cannabis indica
gtgagtgccgtgctgatcagagcagaaaacaacatacaccacccaatatattacatcagtaagagactcattgaggccgaagggcggtacccattgatagagaaacttgcttactgcctgattctagcaacaagaaaggtaaggccctattttcaagctcatcctgtttgggtgtacactgaccaaccattacgccaaatattgcaaaagtgggacgcttctggacaattactcaagtgcgtagtggagctaggtcagtacaaaattaccttccaaccccgaacaacaatcaaaggccaagccctagcagactttgtggtagaatgcacaggcaaagaagaaagcatatcagaaggcaaccccgagccagtactaacacctcagccaagtaacagtgaagacaagccgacttggaaactacatgtggatgggtcggctacagatcaactatccggcgcaggaatcacccttgtcacggctggggggcaacacctgcatgctgcaattaagtttggattcaaggcatccaatgacgaagtcgagtatgaagctttgatcgatggcctaaaattagcctaggagatgaaagccgatcacattgaaatctatagtgattcacagctggtggtaaatcacgtatctggagaatatgaggctcggggagaaaaaatgatagcatatctgagca

SEQ ID NO: 345668 - DNA, 2302 bp, Cannabis indica
catagtgtgtaagactgtgaagaattcaatcaactagaaggagaatcaggctcaagaaggagagaaagagatccaagtttagatcctgataatgctctgccacagaaaggaatcaagggctagagatctaaacagaaggagtcaatatattccgctgcaaccactgcaaggtttctgataacttttatgtgtttatttcattgttttagaaatttatattaggatgttaatgaaacatacttgttagtaaatctagatcctggtaaaatatttccaacaggggcgtattcgacgctgggcaaggcggtgtggttggccacatgagggtgagacgcgttgactttacgcaatatctgtttagtgcgagccatcatcttgtggctggacgggaaaattgaattaaaatgtccgtcgcttgaagagggtggactagaaaagacgagggtgatcctcgtgcaagagttgaagtaaatcctggtcaattcggtgttcgcttccccaaaactcacctgtgttcatctacaaaagacaacacgggagatgagtggttgctcggcatatcgaacgttaaacaggaaaatatgtcgaccaagagtactcaacatattgaaggatagaaatattcgacgaaaaagtcaaaactcagaagtttgaaattttcgagagttagggaaaaaatttcacgaagctttgaataagcaagatgaaagacagacattgtgcaatcaaaaagcaagcatcatgaatggtgaagtcgcatgaatcattacaaaggaaaatcgcaaagtttctgaacctaggggtttctacatagcttctacagcaaagttaagatcgtattcagaaagtaaatgtgaaaagtaaaactaaaaaaaaccgcgaacttactcaatgatcgacgtttggatttagtttacacaaagctgaacgaacagttcttgtgaaaatttttcaacaaacttgaagctaaaaacctctctttttgctctaagcttactcaaaaaagaaggttggtgaaaatgagtttgtgaaaaatgctctgtcgtatttataggcaaaacagcaaaaaggagtaatcatttcaaaaacctcagacgcctcgtttcccccaaaagcaaatattggaaattaaaagcaatcaggtgcaaccgtcaaacgtggtgagagaaatttgatttcgaagcattaattgcgtctgatcatttattagccaaaaaacgaagagatacttagtcagcctcacatcgagtcgcgaacagacgcaccagacacgtgtcaccatccaaatgcaaagacagctcggatgaagtctacacgcaacttttgaagtcccgtatagacttggggggcaaatgttatcccaatttttgcactgtgacgtggcatcacacgatggtgacacgtggaatcgattctaggtacctgcttgcaagacacaaggcgaacagggcacctcatacatctgctccgatgaagtcctctagaccgagcagtgagcaatccgcgcaacacgccaacacttagcaaattcagctttcgtatcgcgagtcattaaaagaaatccctataactctagattcaattacagaggtatggcaagctgtctaaatcctaggattagtgtattctgtatttactacgcaatctttctacttatcaattgtaactacaagggaaatacttcctctctaaccttatagccctataaatagtgattcatattcactgggcaaagggtcgagagattttgtctaagaattcatattcagagatactattgtaagagctttaagaaaaggaaccattttccttgttcttaagttaatacaaataatgaggattaggctattaccgaactgctcgggactaaatttctataaaattcttgtgactttatttgctttactatatttcactcatattaaactacttgtcgctttcaaaattagactcgctgtcattgactaaaagagaggtcaacacaatccaaaaattaaattgttactattacagcgatagtggatagaacgattgatagaggtgattcacgaagacgaatgatgctgaaatatatatatataaaaaaaattcttccataacttattttattaggattaacttgtaattagatttattaacttgttgacacttgggctaattttacaatatttgtgtaatatataattgtaaatgatttaattacttatctgaaatgaaattaagtatattggctaatcataatattaatttaaattatatttaatttatcttttaaaaaagtaaatatttaatttaaattaaa

SEQ ID NO: 345669 - DNA, 572 bp, Cannabis indica
ggcccgggaagaacaacctggggaaaatgagacaccccctgagtatcaggatgaacagccaaaaaggagacaaccgaaaactgatgaacgagaaatccctcatgaaaatgaggaggatcttgggactcaaccgggagaacagagatcaccagctaaaaatcaccaacattcttcccaaacgcatagagcgaggactcgtacgtaccctgatgggggaaatacgaccaactactctcgggaggaaagaatagagggtgaagaagcaagtgtgactttgaggcgatccaaaacccatacccgatcaactcaaagtggagaaagtactcaacgagctaatgatcgagaaagtatggggagcagtatatcaacgagccactcaaaaacaaagtctatgaataggacgcggtctatgagtaagatgagatctgccaacatttctcccaacaagatctgcgagagcacttgaattggaagaaacctgaccttcgccaatagcttggtccaaagcaagaggatccaatttaattgcggataaacgaaattgaggacaagttcaggagatattaagtggg

SEQ ID NO: 345670 - DNA, 1481 bp, Cannabis indica
ccgacttttacacttagtttccttattgcaagctaaggtatgtgtcacttttcttcgatgcctcgttattcaccttcagtgacatatggtatctcgttaagacactaagtgctagtttgtacattgaatcctcgcctaagaccttacagtcagcgggttacaaatatactctgatacttatgcaattattgagttattccctaaagagatactgcaccgattcacattccctttactttaatacgtgtcatccaccaaatttcaggtataacaattgccccttaaaaagttcttttttagtcaaaagatctttttaataattacggagggcatttttgccaaaatcctttcttggaaaagacacctcctttgattctggcggttgtacggtttcaagagtcattatgaatcgcctattcatattctgcacagctccaagccgttagatttttcaatcttcggctttcttgtcactgtactttgtgtataaaagggcggctcaagtttgtcctattgcttaaacctctggctcctttagtgaaatccattgtcagaatggattatttccttcctgccaaaatgtcccttctgagttcagaggttcgtccttccagactaataatacccaaatgcaccaaccattttccatttgtccctaaagacttcaagcctcaactggagccgaaaacgatggattctagggctgagatgcttccaaccaatgtaaaccaggaaaaccccgtagcctgccatgaccgatcctcacaaatgatcccacagggtacagatcttgtgagcgatctcaaaggtcctcctcaggctgatgaagaattccagaggaaggttggcatggtttcaggtggatcttggaaagaagttggtgtggtttttatcagagaatttggccaacccaagaccctaatctatgccaggagatctttgcgtcgacctctctctagtgttgagaaatttcctgaggctgggaaaaagatctcggctttaggaaatgggatcatttgatgatgaggggaatgaggtctgtgcagagatcgaggctctctacctgtagtcggtctttctcaagctatgtgtagatggtctttttcaagcaatatgcagacgatctttctcgagttcaacggcttcccctctcattctttgtttaggagaatgacttaatggtttgcccttagtggcatttttgtaaagacaagtttctaactagtcttaggtttttcttatcttaaattcctttgtactgttttatttgaatttatacaattatgtttgcttgcgtttttattcacaatgtaaacaattatattttgatcaaatatacagtactttgggttcctccattgctcgtaatcttcctgtttaagtagttagtaatctaccaacttttttatttcgagtggttgtcattctgcttcgcaattgcagttatatctgccttaagaaaacttaaatatactttatgg

SEQ ID NO: 345671 - DNA, 764 bp, Cannabis indica
tatgtcttatttatgaattttcactaagcaatgacttaatggtgaggaaaaacgattttggggtcaatttattaattaagagactttgtatggtcttattaataaataatataaatgacaattttatttgataatttattataattattaaataaatagttttggcatttatatgattgaattggaaaatatggtactattaaaagatgaataagtggttgaaataaagtggtaaaattgtaactagagaatggtccctttatggctggcccttagtgtgatgttttgctccatattttttttaaatccatataattcagctctgagccctagttgaaacactatataaggaacatgatgttctcatctcatccaattgatcattcaaccaaaccaaatctagttttcattctctgacaactagtagataagagacaccttttatatagttttcaagcctccttcgtttttcttcatatcgaccctattgtgatagagtgccatgcccacacatagcaagtcaagtactcaatcatagtgagtaagacggtggtaaccaaacccgaaggagagaaagagatccaggtttagatcttgataatgctctactacagaaaagaatcaagggctagagatcttgagcggaaggagtcattatattctgctgtaatcaatataaggttttcttaaacccttatgtgtttattttcattattttagagaattcatatttaggatgttaatcgacatacttgttagtaaat

SEQ ID NO: 345672 - DNA, 491 bp, Cannabis indica
aaagatcaaaaattattttatgttgcttggttcacatgttacttcatgattatatatgtttagtatataaattttattaaatcctgaacatatagttactcatgattataaaattgtctacacagtagaaaataaacatgattatatacttcaaactatttactttcatgatttatcaccgcactggatttagattgacgtgataatcaacgatgtagtttactacacatttgtatgtgaaatatcctttctaggacattaacaaagtgaacttatatcagatgtatcaactatacatcgaactagactaatattgacagtggaaaatatatcataaacttaccggtattatctttctaagtcaatattatttagttgatcataggtcagtatatctcaatcctaagatggttaagttctagcttaattgtactatacgggttctttgacttgttcgttaccagcttacttgtaggactagcccatactta

SEQ ID NO: 345673 - DNA, 668 bp, Cannabis indica
tttttccgatcaccgatctaaccgggagtgcactagataggatacaccaccacaaaaccttgtgtcgttccaaaattttgctatttcaccttattccagagtttcggagcaacttcacagtgaggagctctttcctttgcttgagccagataagaaaatttacacgagaaaagcccgttgctttccagcgtccaaatccatttatcggttccaattccagatgggtggccacctttaagaatggcagataccgtttcttggtcaaaatagtctctcagcttttgaatatcccactgcccattatttaacataagatcagccacacggttgaggttggagggagcacccccaattggttttgggcagaaacttttacaatgaggaatccagggatccccccagatattagtattctctccattggttaccaacttacaggccccttttctcaaaatggactttacttttacgacacttttccaaaaccaagaatcagaatctttgtacctgcagttaacaaagtctttccctttgaggtatttagcagttagaactctgcagcacaaagattggctgccgttgagaatattccacccccatttagccggtgtttggtaaattataaattttaaagtattgcattaaaattttattataataataataat

SEQ ID NO: 345674 - DNA, 580 bp, Cannabis indica
tccagtgcactggtgaatcatgggacattaacttttgaagaatataatcacaattaccttccactgtgttgacatcactataattgtgaataactatatgttttggatttaacaaaaattgtatattaaaccataaacatgaaaactacatgtaaacataaataatttctaatcttctattgataacaaataagattgtattaaaatagattttatttagggcataaaatcccaataaactcctacttccactaacataaaataattagtagtgcatttcaatcaatctatttacaaactttttaaattattttttaaaaaaataatgtttaaagttttaaaatttgaggaaaacaaataatgtttgagaatattaaaagtgaacatataattccaatataattataattttagttgcatatcgtgagactgagtagaaagaaattttgaaaataataatattaaaaaaaacactaaaaaataataatgttacaaatcaataatattacatgagttttcttatatgtctattctatataaagtgtgtctatataaccgaattcttgatttatgagaaatt

SEQ ID NO: 345675 - DNA, 947 bp, Cannabis indica
attagacttaacaaagtttcttatataacaaataaaccttttatttcatttttcttttcaaatttgtctttgcttagtaaaatttataaataagatctagtctcatttagaattctatttgattaattaaaactaattaattgagtctacaagggaacattatcttaagtagtttggggaccatggacctatatagtcaagcttctaataagtagttctagaattaaccaagtaaaatatctatcttattaatttcttctgactccactatagattcagaattgcactcttgattacatagaatgttctattcttcaggattagatacgctataagttattcattatttcaatctaaataatcaatggtactccatagatggtttatattgaatagggactatattacagttttatccttcaatgtattttatccttaaaacacttagctacttgtaaataatattttaggaaattaatgtgtttgtcgaaacgaggcctcaatcatttaaacgagtttagccaagctctaagaaaattatcgtttcacttctatgaacttatagaagttatagattccatatctatgactagaggtattgtactaccttgctcccaagatgtaagtattgagccaaacctactagtaggcttcgaacaaacaaatcaaggaacaagaataacacagttaagctagaacctaatcatctcaagattaagatcattgatttaagatcaactattaaagatttacctaaaaaagatattacggtaagtttactatatttattctgttgtaaataccagtctattcttatgtatggccaatacatctgatgctagtttactttattaatatcctagaaaatacattatacttattcaagtataagtaaaccccatcactgattatcacgttagtatgaatctagtgcactgataaatcgt

SEQ ID NO: 345676 - DNA, 794 bp, Cannabis indica
atgctacatgcgaagaatgttctgggagattttgggctgaaggtatgaagacaactgctcatgtaattaataggcttccccaagctaagttagggttcgtttcaccctttgaaaaattgtggggttgtaaacctgtagtaagtcactttggagtatttggttgtgtgtgctacgtattcgtgccaagccacctacgtagcaaatttgacaagaaagctatacgatgtatctttgtcggatacgacaaccaacggaaagggtggagatgttgcgaccctactactggaaagtgttatacatcaaggtggtcttcgatgaggcatcatcatggtggtcatcgcaaaaggaagcattaccagattctaaagaaatggaagacgaactgtagaagaaaatgagggagcaaattgttgagttacctccaactcaagatacagatgaagaagaaaacagcgaggataaggcacctcagaatccatggtaaacatgggttcatcaaagagaaggacatgctgatacctaaccagaacttcagagatcaacaagaatgcaaaagccaaatccaaaatatgttaatgctgttgtagctgaagaagaaaagtttagagaatgtcatatgaagaggcataccataactccaagtggctaggagctatgaaagaagaaataagtgcactagcaaagaatcagacttggaagttggtgccaaagtcgaaggaagtgaaacccatttcgtgcaaatggatttataaggtaaaaacacgtcctgatggttcaattgagagatacaaggc

SEQ ID NO: 345677 - DNA, 1620 bp, Cannabis indica
ataattttgcatgttcagtgcccgacaacattagaacgtggtgtttggctattagaatcacatcttagtattttagtatagcggggcgatatagttagacattgggaatgtcaagaatagtcataagtttagaattcccaaaataccctttagtgccctttttggcgttttagtgtgggaggggattaaaggtcattttgccccattagccttttgtcattttgtgactttagataagtaatttaatcaattttctaagttatgttatgctgatattatctttgataaaacccttttattcattattttaaaaataagaaaaaaagtttcgaaaggaagctctttctcaactctctctttccctctctcgaaatcccaagaaccagctagggtttgggtgttcttcagcaattcaaggtgatttccagcagctctaactgtaatctaagccaaggtaaagcatcttgtagccccctctttagattcttgtttttgaagaaataaattatgcatgtttttgggattttggttgttgttcttgttgctggtgtttaattgtgttctctgtagttaaaatttgttggaataagttggtttaagcttggtttgtgggctgttattgggtttgagcaagctttgagttttagaactcaagcttggccccttaatggcaagttttgtttcagtgcttgttgttgtgttttgttgctcggagaatgaactttaggacgctaagaacaggtctggaaggtctcatgtggattggcgttttttgggttgagatatagaatttttaggcattcctgcactgaaccgtaattcaagttcagagggccatgtaggaaccagaattccggtttagagaggcctgtaggaaatggaattccggttggtccccaggaaaccccacagaactggaatttcagttggggaaccggtctaccggttggcgcagttttggggaccgtagttttcccatttttaagatatttagggtattgccatgttattcattgatagggaaacttttagtttcaagttaaagtccttggaaagtgatgtagcgtgtcacttaccactgttgtgattgatgtaatttaggggcctgtaattcgccgagtagttgttccactcaggttggccggcacacctgaattcggaatcaaggtaagattagtataatattttgcatatgtttatacatgtttagcgtgcatgttagttgccgtcagaataacatatcagatatatattaggaaaatctatatccattagattagcatatcaaggcaacagtgatgtgtacatagagttgcaccgagatgccattagatataggctaggctatcagatagtatgagttaactgctaccacataagtaagattagagtactgagtataggctgggttcgcggttagtcatactttgtcaagaacgttcctgattcagtcagggttatggttaggtgaatgggcgcctgattataacccgggatattagtatgtttattatgttatgcttttcttactgagtctgtcgactcacagtgctattgctatgtgtaggtaagggcaaagctaaagttgaggaaccgtgagagcgagcagatgaagattgt

SEQ ID NO: 345678 - DNA, 650 bp, Cannabis indica
tctaacatttgtcgttttggcattccgcacaaactcatttcagataatggaaaacagtttgactgtaaagaaatgcgacagctatgcgatgatttagggattaaaaaagccttttccgcagtcgcttacccgcagagtaatggacagactgaagcagtcaataaaataattaagcacaccataaagggaaaattagaagatcgcaaaggggcatggccagatgaattatcgcaagtcctatggtcttacaatacaacccctcgatctacaactggcgaaacacccttctcgctttcttacgggtgcgaggccatgttgccggtagaagttggggcaggttccttacgcagagatgctttcgatatctcgcagaacaacgagaatcagttgttttgccttgatcttttggaagaaaagcgtgataaagcgcaactacaaaacgcggcttatcaacaacgaacagcaaggtactttaactccaaagtaaagataaaaactctgcgagtaggagacttggtccttagaagggtaatgccaaacaccaaagtcccatctcatggagtctttggggacaattgggaaggaccatacataatcgcagatcaaattggtgatgccacttatcgactcgcaacactcgatggaaccgc

SEQ ID NO: 345679 - DNA, 848 bp, Cannabis indica
tactcattaattctttagtccgagtttttagagtagatttgagggttgtgaaagaattggtgtgtgtttatcaccaatgtttcatgtgaggatttatgtaattcttgaagcaaagcttcctatagttaagttcaatctctccttgtacaaaattgtttaattgtagctcaattcaaatcatgatttgataaaacagaagcagctctaatcccctctctcttgcatgttgtcattttgttgctttcaattcatgttataagtttattattttaaagttgattaactttgttgatatatttctgtttattataaggcattcttgtttatgagttcttgattgagtgttcttgactgacgtgatcaaggatcacaacagtaaacatacattattttaaacaaattttacatcattataaaatctaatgttcaagaaaataaacaaatttagatatgaaagatagaccgatcaatcatggtgaaaataatcctagagaaacggctaaagcagattttctatacttttaccgaagtcataacttgtgtcatgcccaattttatcaaaaaccatgtagcatagcttatatgttacaacaattcaaacatgagaactaaagtggcgtttggttggaggttataatgaaatggaatggaaaggaaagaaaatcatcttcattctattcctttgtttagttgaatattaaagtgttggaatgtcattctaatggaatgacttttccatttcgaaatggaaggaaagatcattggaccaatgtatgatgagaaaaaatttaatcatttttttatcaattttttttttatgcacattttaaattttattctattacatt

SEQ ID NO: 345680 - DNA, 1878 bp, Cannabis indica
aacatgaaaactacatgtaaaaataaatgacttctaatcctccatttattacaaatcagattatattgagaatggattttatttagggcataaaatctcaacaaactcccacttgcactaacataaaacaagtagtgcatttcaatcaatctattgtcttgatatctagatcgagtgtagtatatttgactaaacccaaattacaggaactgtaagtctgtggcaagcaactgctttctctaccattacttcctttgtgttcataaaacgttatgcaacattatttactgtatgcattactcatctaggattactgaattctttactgcttattaagtgcatctgaataaacagaagacagatctatcattctgtcaaaaatggaaaagagatatcacagtgtagaattctcttcagttgaataactttccagtgctttttgaaagtaacaaagttatgtatgttctttgatggagcttaaattattatagatgggttcttacaaccttctagaataatttctccacccccagagtaaccacaatctcgaatcggttatatgagctggtgtagatataaggattctaatatataacccctatcatcatataggtcactttcagaaatctttcttaactgtctcctaatgttccttgtttgattacttcttagatatcaaccactcaatagtaggagtctggttaaattcataatagaagtacatttaacctcttactattgtttttcagggatatcttgttatgacatattatcttagtctaaaactgtaaggtccttctagactaagtcctcaacttagcaatctagtattaacattaatgtaaaatacttgcttaagattaagtaatcattagagataccataaaatatttcatgaggattaggaatttcgcctaagtcattcgaatagactatgcaaaattctactatcttatccttaaaattctgataagtcatttctatccatatgaatggttagatttactttctcagttgtattataaagttcatataacaagttttatctaaatgaagatgggcttagaattttaaaattctcccactcaaatgaggtactgtgatactatgttcaagaacttttattggtatccatttttattacaacagtaaagtattaattggaaaaaaaaattaagaataagtttcaataatttgctaatttttttcattatattaatccatgtttaatcaaaatatgtgtgacatagagattatgtggtgtattgattatagtctagagttcaaaataaattatgtatgtcaataactttatccacccctaagtgttatagagatcatgtggagttatgaatataatccagagctcaatagatataaaagatcgttgaactacatatattattcttaacttcttccacccctatcagatcaaaagatctttttattaaacaaaatcttaataattgcttcagacttaacaattattcataaactgtgaatttgaaattgaagtgtttatgtgttattatctctttgtagagtttagtataccatagaatttgtatcaataatgaaacacaaacacatacaaacattgtaaacatttcaatataattggtattggcatacagaagataaagaaatatgaagctcaattcataaatgcaattcattacaaaaagagaaaacttaattataatattctacaaaaaaaatgaactgtctgcaataatatgaaaaataaggaaaaaaaatcccaaaccaataattcaaatcaaattgttcataaagtaaaacaattaattcaaaaatcataataagaagattgtgagttcatctacaatcttgggcaatctccacccatctatccaacca

SEQ ID NO: 345681 - DNA, 722 bp, Cannabis indica
tcgagtttaagggccatgaaaccatccttacctttccttttcctcttcaaatagtgaagcacttcgaaagagaccaagatattatcagttattagtctccctggtataaaagcgctctgagattctgagacaatgtgatccatatgtggtttcattcggttagccattactttagtgataattttgtacaaaacattacataaagcaataggcctcagatcaaccatgctttcaggggttttcttttttggaatcaaaacgacattggcatccccacacccttgatcaaactcacccgaagtgaagaagttctgaacagcagctatgacatctgtctggataatgtcccaacatttctgataaaaagccggtgtcataccatccgggccagggctcttgtcagggtgcatactaaaaactgcctttctcacttcttcggctgacacagcttggtggagatcttcattaatctgagtggtgactttcctttgaatacactgaaccacttcatcactactcaagtttgatgcactaaatagagaagaaaaatagtctaccactacatcagcaaggccatgatcccaatccgtccaattaccactagaatctctgagctttgagatttgattgaagcttcggcgattgctggcagctctatgaaagtatttgctattttgatcaccttccttcaaccagaattgctttgctctctgcttccaaaa

SEQ ID NO: 345682 - DNA, 508 bp, Cannabis indica
agaacctagacatgcaattggtttatcgaggctgtcaggtcattgagaccaactcgcattatagagaatcgatctctttgttttcgcaggggtatagaatggacacccgcacatatcctgatacatgcgagttggatccgttctctggttccacagaatgcgagatacagttatgcgatcagactttggtcatactcgcattatttcgctgactctagctcaggcgaggtttaaactcgaggagtttctcatggacatctcagctttcattggaaatctgaatacacgtgtcctccaaacaggagtctggtctcgagtttctaggtgagagaaatcccactataacatgcttatttaattaaatacttataatatctcatacaaaatactttgggatcccatttacaaaatactttacaaaaactttactattcattaaaaaatacttgtcgcccgcccagcgactaactatagaagccccaatgtcccgaggatcgtatgctccagg

SEQ ID NO: 345683 - DNA, 814 bp, Cannabis indica
ataaatatcaaccattagatatttgatccaatggtcaaaaataaaatacccatacatgggtaatacccattaagaacatacccatatatatatattaagttgatatattttatgttaatgttagttagacgacagagtatgatgaatagggagagagagtctaatttaaccaaaaaatcataaatctttttgatgtaaaaaattggccaacgcattcatatagtgcctataagagtcgattaaaaactcgtcaccaacttctcgacgcaattctcacgtgcccttctactttttttctatttcccacatgcccacctatttattctccatttcccacatcctaaaataaaaatcttaactcttcaaaaccccacccatgcatccgcaccatcgccctcctctctcgccgtcttcctccctctctcgatctccctttcttgtcatctctcttgtccatcgatctccacccacccctcctcctgtcggtctccctccactctccgtcgcattcgtcggaccgccaccacctctcgtcgatgtccctctcatctccatctcatacgttgcaccaccaccatctcccgtccgtctccctctctctctctttctctctctccgagctcggtataaatacatttatttatttatatacttttttatttattatatatatttattttgttattgtataaatttaatgtttttaaaagttagatgttattgtaacaaaattaattagttgttttattttaatttaggtaaaattataaagttaatccaggaaaaaaatgagggaaaatacagatttttctgc

SEQ ID NO: 345684 - DNA, 693 bp, Cannabis indica
ttgttcaatcatttcttttaagaaaaatactaaaagactaaaaccacctagagtatcatatcactgcaattaagtattgactctcaaatctcaatcggtaatcattttgcaagacatcaacgtgcctaataagaatgttttcttaaaaaataaatattcatgtgctgcgagtgtaatttcattttaaatattttcaatattcagactttagacttaagtattgcaatatgaaaaaaaaatacaaataatcgaaagacctaattattacaagatggtattgccaaaattagcaaactacaagttggtaatttttttgcagtaaaacaatgtcactattagaggtgctgaaaaattctatgccggtaacacagtgaagcatccaacaagcaaccttaatctattctgtgcagggaaaagaagatgtctactagctgactcctgaggcttgtttcaattcaaaaacaacttacaatttcagcaacatgttcacattcacacaggttgaaactgcaatagaattcttaatattcaaattggcagcgaaatgtgcacgagtggcttccaaattgtgagatgacatcaacaagacctccataaccaccaacggctgtaacctaaaccaaacagtggctcaatgaaatgagaagcatgggcatgggtaagcctgagtcacttgagagagagagagagaga

SEQ ID NO: 345685 - DNA, 567 bp, Cannabis indica
agcaattttatgcttgattttccttgtttcaggttcccgaggtatcaaagttcaatttcagtcaatggatgaagagacgagacaaactggtgaaaaatcaaaaaaatctgctcactcggtgtcagtagtcgcgactagccagaagccaggtcgcgacccttttctttggtcgcgaccatggtcgcgacttgggagatttggcagaaactttgtttttcgagttttgcctttagtcgcgaccatcctttaagttggttgcgaccaggtagggaaaaacgctgttttgacctaatttagatttttttctcaattggaggcacacctttcatccctatataaggaatacgactcagaaggtcaaagtaagcaagaacagacttgaaaagtggatgaaagaggacaggaagcgatcttgaagaccctgagcgatatcaccttctattttctttcttttactcttattctttcttttatgtctagtgttgttttagaattaatcatggatgtctttattattgttatatatgtgtttaatttatcgttttagaaagttcttatttaggatgt

SEQ ID NO: 345686 - DNA, 566 bp, Cannabis indica
tcttatgcctctctggatatgcccgtttgagatgccctattttattacagatccaacatctaagattcttctagttatcagattgtaatttagatcttgattttacttttgaacctttgtgactttctcttttctcacttctaccccttgtatatcaccacttctaagattctttgactcactcctttgattcagctcttttgaattcaaggctgattgcacatcatcgagtgaaattgaatctcttccatacaacattgtatctttaaagtgcacaaaagacttcagtaaagaactaagtaacaacaaggcttgatcttcgtctttaatggtgacactaatatttttaagatcgagaatcaacttgttaaactcatcaatctattttccaataaatttgtcttccatcatcttgaatgaatacaaggcctatttgagatataatttgttcaccagtgatttagtcatatacagactttcaagtttcaaccacacacatgcagttgtatcttcttttgtaacctttctcagaacctcatctcaaagattcaaaatgatcgcactat

SEQ ID NO: 345687 - DNA, 500 bp, Cannabis indica
aaccattcatagtccacccctgctcaaccaatctccctttctcattaatatagtgaattactctcggaggattttcagttatatccatttccaccaaaactcgagcaaatttgaccatggatctatccttcgtaactctatccaccattatcggattacctattgtactaaccgaagcactcaaacaattcttcccccaatattgcgaccccaaatcatgtaaacgaatccacaatggtacagattttataagtttcacaacatctaaatctgtagtccaaggtctagtaattaccggttttcgatcgaattggattacaccatgctcaaggacgtgatctctagtagcttcatcgtttaacttgactaaggtgaattctccattcatacgcacaatctgagcaatccccaggttacctcacatccttcgtatgaagccttcaaacacagcaaacggaggattcgcaccaagcaccatacagataacaacagagctccaa

SEQ ID NO: 345688 - DNA, 512 bp, Cannabis indica
taaaactttcatttttattcttaaatctgtatattgattatcaatctcaaaaactcatttgcacaaaaaacttcttttgcaaattagcccccacggccaaaaataaactcaaaaaataaaatggcgaaccttggttgcagaagatcagtaaacgtcaaattcaattagcttattaatttaaattacttgaagaaaaaataaacaaaatttaagttataaaaaataaacaacaacatcaatgaatatagagtgaacgatttcccctaattgatctatctaaccaaatcaaattccagagaaaaatcaagaaatgtttgtctggttaccaaatcgtaatataatttaaaatcaatataacaagaaagctaattattacagtcaaaacttatctatatacacaaaacttaacatatataacaaaataacgagctcaacgaatcaagagtgaacgatttcccctaattgatctatctaaccaaatcaaattccagaaaacaatcaagaaatgtttg

SEQ ID NO: 345689 - DNA, 1432 bp, Cannabis indica
ccacatttattttacgtggtatgaaatcaaaccccacgagttttaggggataattgttgtaagatatcagtaaactatgtaattaactgccctatgatgtaattataaatagaggcaagttatactaaaaaagggatgaaaaaattattaaaaaaggcttgagagttgtatcaaaattctaataagattgactagtggactatccagaattttaactgcaaaaccacgtaaaacctttgtgttcttatcttttctttacgagcttttaatttctgtgcaagtttattactatcttaggctcaaatatagttaacgaaaatcttcattattagtttggtgtttcattgagagccttcatgaaaatagctcagaataaaccctccttacattcaaaaaataattttcttcatggctagcaacgcagagaacgttgatgcaccacatgaagaaacccctcaccatcctaaaaagagccaatgggttccaagaggccttccaactcacaatccaaacggaccactcgctccaggaggacccaacctgagggtggcccgagtacttgcactactcgttccaggaggacccaacctgagggtggcccaaccatgcgaaccactcgctccaggaggactcaacctgagagtggcccaaatacacggaccacacgttcaaggaggactcagcatagagatagcagaaatcctagagtaagggatgaagaacccaatcttggaggtgctcagctcatggatgatggtgcttatgaccctacaaagtacacgcctatcattgaatagaaaattgccatcttaggcgttacttggaggaggtaaactgacagaatgctgaattggagcgtgaggcagccccagccaaggcggcacaggggaatgatactcaaaatcaacttgaccctggagtgagaagaccacgaggcaggcctcgtggctcacgaaccaggaggtaggaaatttcttaggaaaaccctcagaatgcccagggagaacaacctggggaaactgagggactccctgaaaatgagcagcttggggaaactaaggttccccctgaaaacccaaatgatcagcaaaaccatctcatagaattaagaataggaggcgaccagaaaccagggaacaggaaattcctcgtggaaacgaggaaaatcctaggacacaacttgggggacgtaggtcatcagcgaagaaccaccagcgttcttcccagacccatagggaaggggctcgtacaaatcccagtgggggaaacatgacgaaccacgcccaagggggaagagcggggcgtgaagatgtgagtgcaaccttgggccgcacaagaacccacagtcggtaaaggcaaggaggagaaagtactcgtcgcaataatgatcgagaaagcacaggtacaagtaagactgtaagtcactcaagga

SEQ ID NO: 345690 - DNA, 448 bp, Cannabis indica
aaaactgttgaagtgtaaaaatgaaaaaaaatttcttctatttatatctcataaaatgataaataatttctattattaaaaaaatataaacttaaataatttttaatattttgtttaaaaaaatttcttcataatatttaattttaatgtttattttgattttataatttaatttaaatataaatgtaaaaatgtatccataaaaaatctgtaaatatgtattatttttttgttaaaaataaatgtaaatatgtagaaccatagaaaagtgctacaccccataatttccaaaataaataataggacaaataatgatgaaaatgctatcaaaaaaagtaatgatgaaaaagtatcatatctggaaatatattttgatagatgatatccaatttggaaataaatagagagataatttttagggtaaatattattttggatcctctgtttt

SEQ ID NO: 345691 - DNA, 552 bp, Cannabis indica
atatggataatgagaaaaatgtgagaggagatgattgatgacttgaccactacagaaactaatttgtctagttctgatggggataaaccagtgaaagaaagaagaaaagggaatgtaaggaagaatagaaatgatcgtcaaatgcaagacaaggacaagagcaaggacaatgacaaagacaaggagaaagacaaaggaaaagagggatgtgaaaatgaaaaagggaatggaagaccggaaaagaagcaaagaattggaaagaaaacatctagtatttgggatcattacactatgttgccagattgtgatcccgggaagccaagggctgcttgcaattattgtggtaccgattatgcggcagatacaaagttgaacgggaccagcacattatgggcgcatgtggagagaaaatgtaaaaaatgtccttttagtgactgggttgaacaaaataaaaggcaacaatctactatcgatagatttactaaaaagaaaacaacaacttgcaatgaagaagaagttgcttcaagtgggctgccattaagatttaatcaa

SEQ ID NO: 345692 - DNA, 720 bp, Cannabis indica
ccactgcctctgtttgattgacacaaccgatgaggacaataccattagtgttcctagacaaaaaaatcacagtaccttgtcaaagtgggaggatttcaaggaatccaccctattatgacttggaagacactcgtgataaaaatccattgttagtttaaacagtaatggatagtcagaataaggaactaagaagcaaaaccaagagaactacggttaaaaacattcatatggagtaccttaaagttttctattacaaggacaagaagggaaattttgataatgagtctattcaaatgacttaacaaaacttcctgatcctagtatagtaggtttgagattatataaacctttggcttgtcgtatacctggtaattcacttactctagtgcaagcaacttactttagtaagatgctagagcatcttttctaaaggctacctctatagggtagtattttaatactctcagactacaccaaatcagacttttagacttgcattaatgtagagcagtgattttgaagaagtgtaaaaaccaatttggagtctctaattctaccagtgagactgaatgttaaagttgtatgaaggatacttattcagcctatggaaagttctatacaatttttggtgttgtaccaataatgaattaactactagtgttacttcctgactaacacagaagtagttgccaaaaagtaaagaatccagtatcctaagag

SEQ ID NO: 345693 - DNA, 621 bp, Cannabis indica
caatttaaaactgcaaactgcaaaccgctccacgcggtttaggaaaaattcaaactgcgaccgcaccgcaaagaattttaaatcatatttttttgcagtgtggtgtagtgcggacagtttgagcggtttgatgaatcctaacggagagtatgcaatttatcacctctaaggaagatgatcagaatggaaggtttttttttttttttttacttattgcaaaaaagttgaaaaaaaaaaccttaaagatatataacatttaaggaaatttatgtaatagatcattttaaaaggtcgttttgggagatcctatgtgttttgacatctaaaataatttttttttatgattccgtatgttgtagctatataagactacttataaatttttagaaaattttaaataatttatactgctgaaaattaggtttaaacagttacttaccacacgtataaaaagaatagttgtacatgcaacaaaatatataaatcttatttttaacattataaattacttaaatttttttgagaatttataagtaatcctaaataactataacgtatagattcataacaaaaaaaaaaaaaattagggttaatttcacaaatgcacaaaaacaacaaaaa

SEQ ID NO: 345694 - DNA, 1157 bp, Cannabis indica
acatacctaagtatattcttgttttattgacaatcccttggcaagtactaccatgccaacttatagtgagtctcccgttgatgatgttaattcatcaacatctgagactctcgtgttctttttctatcattaacactaagattgcactccctagttcatatgctaccactgctttcttgcaatcattactatctgcatacttggttaaccactctaaaacttattttacacttaattatatagcttgttgtttaataaacaacttactttgtgatccaacattcaccaatcactcaaatagatatccattaaatttcatctcaattcataagtttttccccattctgggtgagtatgccttcccataattgcttaataaagtaatcctttcccagaatttcaatggtcaacttatatattatattgactatccagtcaattataaagtactctccatcaataccgtatcacattggtaatcttctttaccttagtgataccactattcatcctgacattcttttatacgttaccccggtaacatctccacttcaagcctccgttgggcccttacgcccacacaatgatggctcttatacacgagtgcatcactctagctatttcctggactgacaactggtcccacggaccaatccaagtgtttctaacgtgctttgatctgactagcacgcttcatggggaaatttcctaaataaaattacctcaagtcaaggacactagttctttcatggtgagctaccaaaacaagatgcttcttgctaacataggtagtcccacgcctacataatctcaaaattactacacaatcgtcgccttcaattcatttaggattccacacaatactcataaattgtcttacctttggtaaagctagatcacttctaaacaaaatattttgttatttgaatcaattagatcaatgcttccattaactaatcatgttctatattccactagggaatataaataatttaactcatattgtcatctttctaatctgtccatcatgttaaataggttaccactaaataacatacatgcacagtccattcagatttcttgatgtctctaactaaatgtacaatgtttaatatcaataacaattataatattgtccataaattctaacttgagtc

SEQ ID NO: 345695 - DNA, 708 bp, Cannabis indica
aaataaaaaaaataaataataaagagagggaggcgttggtgacttgaatcataggctaaggaaatttgtgcttaattggtaagtttcaatatttattcttctttgatttattttgatatgtttccatttaaagtttgatctcttatgttttgtaatttgtccttaatcttgaaagattttcttaaatgggatttttttttttggaaaatatattggtatttctagtttctctttatttttttttaaaaaaaaggggaaaggggaaaaatataatttggcaagagagtgggcggtttcccttttgttcatgggctggcggttatttttcaaaaattcaaaattggtttcctttttgcttcattctttcatgtttatttaaaccaatttccttgtcatttattctcaccacctacccaattctctttctttattttcttgccttcttgttgttcattctctctttcaaaaatccatggctaagactaagaatctagggcatccaagatcaatggtggaatccgaacaagccccctcgaatgctcctcctgctgctccaatcttactgcctgctgctgcaactgcgtcgaacccaggagattcatcgcttcctcagcgtgaatctcagtccgtgaagcccaaaccaaagagaattcctaaacaagtggttcgaaaatcagtgcgaccctacaaatgttggacttcatcgtc

SEQ ID NO: 345696 - DNA, 627 bp, Cannabis indica
attgtttttaaacttaaaacgaaattaaaccataccttaaactttctattttcatggatttgctatcctgctactaccggagcttaaatcgctaagttttgggttgaaaatcgaaaaaaaaaaatggatatacaaggagaaggttttgtcgaagggagagaacgagaatttcgttcgttcgttcgtttgttcgttcgttctgttacagatatgttaatatatataaataatattaaaataatataataataataatataataatatattaataataataataatataataatattactaaaaactttattattaatagttatcttattatttcttagccactaagaagtttttatttctagggtatttggtcgacttcgagtaccctaaaatactccgatatttctaaaatcaacttatcccaattatctcatcaatatttctaactaaaattgttgtgacatttttggcctctactcgggtctccagggtcgccaaacttgaaaatatttttatttcacaaataactcatattatatccacgtatttcaaataaatccacgtaattaacaaattacgcttatatatccacttattgagtctccagggtcgccgaacctaaaatatt

SEQ ID NO: 345697 - DNA, 583 bp, Cannabis indica
catcgccatcaattgtaaccgagacttgatgattttttatatttaccttaagaaagtgttacgaagccatactagcaaagccaaaagaaacataaaaaaaaatgctcacaaacaactcaaatcaaactacacatattatgtcaaaagacaagacacatccaaaaattacgttgttcaatactctagttgacaatctttactaaatttaattggtaacaaaataaagagaaagagaaagataaaaaaaaataaccttaatggtagtaagaaccagggtatttaattgacatagtttaatttttttatttttaaaaaataactatattgatttggtttggttttatttcaaaaaaattaaaataaaataatctttataagataattttgttttaataattaaagggtaaataccattttggaccctgtgttttgcaaaaattacagattggaccctgtgttatgttaaatgacaaaatgaaccctgtattttctaaaatagtaaaaataggacctgagcttaatttttgataatttttttttaatacaaccaacttgaagacaatgcttaatacgaacagataca

SEQ ID NO: 345698 - DNA, 588 bp, Cannabis indica
cattctctgatatgttgcaccagccttttttaacccgaagggcatgaccaagtagcagtatacccctttatcggtcctgaagctagtgcattcttgatccgcaatgtgcatcttaatttggttatagccggagtaggcattcatgaaggataatagcttgaaatgggaggcggcgtccaccatctggtcaatctggggtaaggggaagcagtcttttgggcaagctttgttgagatcggtgaagtctatgcacactcgccatgtcccattcggctttggcactagtaccagagtggctagccactccgggtaatatacgtctcggattaggccattgattaatagcttgtccacttcttttttctagggcttccgcctttataggatcaaggggaccccgcttctgctggactagaggcatgtccggattgacgttcaagacatgggtaatcacatgcggacttatggcggtcatatctccttggcaccatgcaaaaacatctgtggctgctcttagtgctttgacaattttatctttctcctccagctctggctctttcccagtcagaggatcttggtagggtcgag

SEQ ID NO: 345699 - DNA, 542 bp, Cannabis indica
aattacacaataacttttaaacatgtctttaatgattcatattttttttttttgacaaaatgattagaatcactcataaatttacgacgcagacgtccaccaccgacgttggaaccttctcgaaccaggatagctcatcgtctaattgcagatcatgctttgccaagtcatgatttgctaaattctcagagcgagccacatggggcaaaactgccccctgaaatttagacaataaagttatagcatcttcaaacaacgtttctaactcgttgaaatacattttcccgttgttgatagttgtcaccaaagctaacgaatcagaataaactgcatgaattagaagaccgcacatatgagcccaattgagtccaaccaacagggctaaagtttcagcctgtaacactggaattaggggtgttcattggatcacatccaatatttttaggcctatctagatccgatccaatcatatattggatgttagattttaccatccgatccgatccgatccaattaattttgtcatccaatcgatccaacat

SEQ ID NO: 345700 - DNA, 521 bp, Cannabis indica
tatcttataatgaacaacctatccagatcttagacaaaaaggagaaagtactcctaaataaaacgatccctctggttaaagtcttatggaggaatagtaaagttgaggaagcgacttgagaattagaattgcagatgcgggagctgtaacccgagttattcaggtaaatttcgaggacgaaattcttataagtaggggatggttgtaatatcccaataagcctaatagttaataattagggtttataattatattatgggttaatcatgtaataaatgggattatgatcctactaatctagttgaacataaattttaaattttctataagtggataaataagaataatttataaattataaagatttatatggcataggtgaatgtaatatgagttattggtgtaataaaaatattttcaattttggcgaccttagagactcgatcgggggtcaaaaatatcataacaagtttaattgatagaattagtgggaatatgtgataagttgataatgtaggtat

SEQ ID NO: 345701 - DNA, 808 bp, Cannabis indica
aaagaaaaggaaaaagggtaaaaatcgagaagataaagtcctctctgaacccttgaaagtcattacgggaagaaaagatgggtcattgacgaaaaatacgtagaatagaagtatctcgaacaccagaaaggaggaatctatcgtgttacacagaaactcgagacagaaattccaagaaaattcaaacatcaaacccaaaaaaagcagatgaacagtaaagcatgcgatgtacacaaacaataaactaaagtacgagatgcgaagaacttacataaagcttgagaactgggcgttgttgttgatcgacggtaaagagttgattgacagcggcgaaggaagatcagtaagaaatctatggtgtttgagggttttctgttcgaaggtttctttttctctctggaaaacttgagaaaatttggtgaaattctgaaagtaaccaaatgaagtgagaatggtggcttttataggccaaaaaggatgtgaaacaggcgtgaccagctaccaatcgaacggttgggaaggcacacgattcgaattcccaggatccaacggttgagttggatcgtcattaaggcggtggaaacatttgagtgtccgtttgacacccattaatgcgctgtatcaattaatggacaagaaacgaatcgacgcctacaaaaagtgaatcgctgcagtaacggtgatcattaaatacaccctcacacgcccaaagcacgtgctagaaaactgaggagccaaccgaaggcatctaagcaagccttgttcacttcacaattaaacaaggcttgggggtaaatgttgcccctga

SEQ ID NO: 345702 - DNA, 523 bp, Cannabis indica
ctttggttattttttatatataataatgacgactaccatcgggtccccctagctcccttcatttgcatacatcataatttttaaatatatatttatatatatataaaataattctatagtattgcttttgtttttatattaagacattttctaaaccatattcatcacatgacctttgagatatatatattaattggtgaaatgttaaagggtaccagtgatgcttagcaccctcctatgtatcaatatcgctattggtccatctaagtatcgggtcccatacaattttatataataacttttagggagtatcgctagtcaatcgcaagcgacatgtcgagaaggtactagacactactggtgcctaatagcaatgctctattaattactacgtaattttgtgtatcaaataaattttagtctaaaaatttacacctccttttttctttttttaaaaaaaaaacttgacaccaacaaaatgagaaaaattaaaatactttgattggttttttttttaaaaaaa

SEQ ID NO: 345703 - DNA, 640 bp, Cannabis indica
accagctgtgaatcactacagattttaatgtcttcggccttcatctcctgggcgagtcttagcccaacgattagagcttcgtactcggcttcgttgttagatgctttgaatccgaacttgactgtagcgtgcaggtgttgacccccaggcatgacaaggccaatttctgcacaagatagttgatctgtagcccacccatctacatgtagtttccaggtcggtttgtcctcattgtgacttggctgaggtgtttgtactggctcggggttgctttctggtatgctttcttttttgcctgtacattctaccacaaagtctgccaaggtttggcctttgattgttgttcggggtcggaaagtgattttttactggcccaactctaccgcacacttgagtagctatccagaagcatatggtttttacagtatttggcgtagtggctggtcggtgtatacccgaacgggatgagcttgaaaataaggcctcaacttcctttttgctggaatgaggcagtacacgagtttttctattaatgggtattggccctcatcctcaatgagtcttctactgatgtaatagactgggtgctctacgttattctcttctctgattagtacgccactcacggcatgttccgtga

SEQ ID NO: 345704 - DNA, 767 bp, Cannabis indica
aaaataatttccaacaattattgctttactacatattcttattacgacatattgtttatcgcttatcaaaaagactcattgtcgttggctaaaagcgaagtcaacattttagtgctttcattgagagaagaatcacagatcgctatttcgacacaatggtgcaaactcgtagaggcctgttcgacccagcaaactcacagacgctggacccgacgttgcaggacccagggacttcgaggattccacccgctgtcaatcctggacagacgggaagcgtggtgaatgatagaacaactcctgttactgaaactatgcatggtgtgcaagagaccggaaacaacagttccacacacagctaggacattcataacatgactgttccaccaggcatcaactcccagacgaccatcggagacgcaaccgaattgcaaaacctccgcgctgcgcttggactcatgcacggtcacaacaatactttgcatcacgatcaggaagaattacgtgccgcagtaaacctcgcattcaacgaacagaggcgtatgttcgccgaatggagggagaaagagatggaggcattaagggctcaccatgcagaaatcgaggatcgtagtcgataagccactgtgctaatacaaagagcctatcagactgtagaccagcaggcgccgagcgtcattcccattggagaaaacgaggatgacccgacagtgaatgcttcccagacaaccaatggttagtcgtccaatcctcggtcacgagttccactc

SEQ ID NO: 345705 - DNA, 957 bp, Cannabis indica
tcacagtgatcgagcgtatcctcaacgttttatggggagtgtttggtaatgatcgggtgacatgcgccaccttccagtttcaggaagacgctctcgtgtggtgggagttgataaccctcactcaggacgtcacagtgatgacctgggaagaattcaaggagttgtttaactccaaatattacaatgaagctgtccgcagtgcaaagcggaaagagttcaccgaattggttcaaaccgagggaatgtctgttactgagtatactactaagtttgaccgtctggccaagctcgcagtgggaattgtgccaactgatttcagtaagaaagagaaatatttggctggtttgagtgcgaagattaggcacgatttggtgattactaccaccgaggcaactacatacgcagaaatggtcgaaaaggctttgagagccgagggtgcagtgaaatttcttcaggagccccgggtgactccgagcgttggtggaacccccactgttcctactcctgtttatggtagggatggtggtgactccaccactgaacagaaaaggaaagtgtttcctacatctagtggttcaaggcaaagcaagcggtttcgtgggaaccaaggcagaggtggacgccaggattattcttaccctgagtgtccacggtgcaagaaacatcatccgggagagtataaccggaagacatgcttcatgtgtggcatggtggggcatttcaagaaagattaccctcaggcaaagaaagaggagtcgaaagctgaggtgaaaccaattcctgctcgagtgtttgctatcatccaggccgatgctgcaaccagtccttctattgtgacaggttagctttccgtcaacaactccttgtttacagttttatttgattcaggagctacacgctcatatgtagctacaagagtaattgatcttttgggtaggccttatgatattttagaaa

SEQ ID NO: 345706 - DNA, 737 bp, Cannabis indica
tatttatttttattttttttttgtatgttgaatttgtaacatttgattgtttagtgtatttattttcatgatgttttgttctattttattacttagacatattattgttttaattatttaaaacttttagctacaatacacttgtaagaatagtatatttataaagtattaaacttaaataaaaagtgatacttagttttttacttatttttctttatatttttaagctaatattgaaatttaggtgtgtaattggatatccaattaaaaaaccgatccaatccaattagtaattggattggattggattggattttgaggtctaattggattggatcggatgatgatttttcaaatccaattactaattggattggatcggatgaggaaaaaaaggttggattggatcggatgcccacccctagaccccatggtggctgaacttataaaaggcaattttatttgggcttctattgctagaaagttttgggcaaaaaatagtattattgttgaatacttgactctgacttccctgccgatgccattgctcttatcaaaaataataaatagcacttttaccctctcaattttttaccttattaaatttagccctttaatatatactttctcaaattataacgaatacaaaaatatagtctttctgtttacttctgtttaattttactatttagggttcgtttggatccctgtataagggctccgtattgtattaaatt

SEQ ID NO: 345707 - DNA, 1897 bp, Cannabis indica
gctggccccagtcacttgtcaacactgtctgaagcgctctgatgacgatgtgttcatgtgctaggaagctaacaacttcgaacctcgtctccctttctaccctaatcctgaggaagtattcggccatttctaggagaagaataagaactttaggccattctggaggaacacaggggtccccgtcttcctcctcgggttaactaaatgatttgcttgtttttgtttctttattttacccttccctttcttataaaacaattctatattctttttaaggggagacattttatggcccagccctaggccctttttcatttttttttttggatattcttgtcttctgaacaatttgtgcgtctttggatttatttagcatcttacttttcttatgttcattctgtctatatttatcctgtttatattaatcctattttttgcttgtatgatatgccttaatacccccctaagtgacgtgaaaagaaatttttagttcactttgtctttaaaaattacataagaggttgcatacatttgtccggcacaagctcttttacagaatataaaattcgtttttaactattgatagtatttgcggagttggtcagcattctaggccctaggcactgtggttccgtccattctttttagcttataggtaccagagccaatttcattctcaatttcatatggtccttacaaatttggcccaagtacccccactccaggttcttgagtggttggaaagacccgtcttaggactagttcaccaatggttaattttctatctttgaccttggcgttgaagtatttagccacctttctttggtaagctgccattcgcacctaagactcatcccgaagcttgtctatttgatccaacgcttcttgtaataaggctttgttcgttgccggatcatatgtcgcctttctgtgggatgggaacaaggtttctaccgagaccatagcttcacacctgtacaccattgagaatggggagtgtccggttgtagttcttagggtggtccggtaggcccataatactcatggcagttctttaggccagttgttcttgtaggccaacaactttttctttagggtgacttttagtattttgttgacggcttctgcctgtctatttgtttgcggccttgcaaccgcggagaagcttttaacgactctatgttgattgcagaagtttgttaattctttgcagtcaaactgctttccattgtctgagactattttatgaggcaagtcgtatcgacacacgatgtttttgataacaaagtctaattctttcttagcagttatggtcttcatagactcagcctccgtccattttgtgaagtagtctacggccactatggcatactttacccctccctttcccgttggtaaggacccaatgaggtttatcccccacaccgcgaagggccaggggctagtcattagagtaatttcgttgggcggggctcttggtatgttcacaatggcacgaatcacattttaggacaaagtctatacaatctttcttcattgttggccaaaagtatccttgtctcaatattttctttgagagactcgaacctccggtgtgatctccacaaaacccttcatggacttcctgcatgatccgtctagcttcagggtccgacatacaccttaagtatggtatgctgagccctctccggtaaaaaatattatccatcattacgtatcaatgtgcctgatagtgtaacctcctggataaagccatttcctaaggcaattctcctttcattacgtatttgatgatggagtccatccaactcgatccttgctcattagtagctaccgtttctttggctttgatgcttggctccgtgaggtgttcaacgggtaccacccccagtttttc

SEQ ID NO: 345708 - DNA, 1269 bp, Cannabis indica
gcatctaaagattcaaatttttcacgaatgatctcaacatggccatatcaggaaaaatcataaatgaaggtgataaagtatttataaccaccccaggtggaacaaaaggcccacaaatatcagtatgaaaaagttccaacgcatttgtgcatttgtctgactcactctttctaaccttggcaatcaactttccttttatgtaatcaacacaagcagtaaaatcagagaaatcaagatcctgaagcacaccatctttcaccaatttctccattctatccctagaaatatggcccaagcgtttgtgccaaagcatggaagatttcaaatctgatcttgctcgtttagaaccaacaacatcattaagagaagaagaagaaggacaagagggagaagtaacaggaacaacatcatgtaaataaagtttatataagtttccacacaaagttccatttccaatcaacacagagtcacgatacaaagtcagttttttggttccaaaatgaagactataacctagtctatccaaaatagatacagatatcaaattcctcctaatagagggtaaataagcaacatcatgcaactctgaaaaatgcccagtgttcagctgcagtttaacaatccaaaaaaattcaactctgactttagtatcgtctcccatgtatacatactcctccaacctattcgaccttcttcgacttgtcactgcctacaaagaatttgtaacatgaattgtagcaccaatatctaaccaccaagtgtttgagggcacatcaataatattggattctaaataaaccatcacaagacaattgcctttcttctctaagtgagctttgatctttcggcaatcagctttcttttgctcgaagcattgacaaaatatgcacttccctttgaaaaactcattcttatgacgagttgaagatgagcttgcttgtcaatttcccttaggattggtggctttcttcttatgaaacctttggtcactagagttgttagaagtgaactttctcttgtgagaattgtttggatttatcaccatggagatacttcttgctctcccctttttcatgtcctcttcttctttggcaataatagcagtcatctcttcaatggtccactgctccttttgagcattgtagcttgatcgaatcaaattgagaaggaatggtttccatcacaaaccacaccatgtaatcctcaccaagatccaatcccatgcccttgaggttttggtaacaacccatgagcttgtcaatgtgggct

SEQ ID NO: 345709 - DNA, 568 bp, Cannabis indica
atgatagtgtgtcagattgctgcatgactttgttgacaaaagaagatcctgaatctacctcacttgaaaagtgaaaaagaggtagatgaaattaccttgcaagatacgcggtagaaaatatttgcaaagaaggaaaaagaagcgaaagagcttgaaaaagctaaccaagaccttcgaaagccttcatcttcgtccaaccaagaattcgctaatgacaatcgaagaggcaaaagcactagtgaagatgaaataacgcgagcaaaatatgataaattggctcatctaaagcgcatccctgctcttttaagcgtttatgatgcactgcaaatatctcctgagcatagaaatgcacttattgtcgcattgacaagtctttaattttatacggagaaaatagagccagtgaaacctacatcacatgagatgcatacctcttgtatggcatgcataacttttgatgataaagatcgtcagttgggagttgccttacataatcggcctctctatgtgacgggtatggttgctgatattcgcgtaagccgcatcatgttggattgtggatcggctg

SEQ ID NO: 345710 - DNA, 658 bp, Cannabis indica
tttctcttagagcatcagacactacattggctttcccaggatggtaaaggatttcacaatcgtaaatccttaccaactccaactgacgcctctgtctcatattcaaatctttctgagtaagaaatatttgagacttttatggtcagtgtaaaatttcacctctctcccccatagagataatgccgcaaactctttaaagcaaacactactacgacaagttctaggtcatgagtcgggtatcgctgttcataatctttcaactgacgggaggcataggcaataacccgatcggcttgcatcagaacacaccccagaccctgtctggatgcatcacaataaaccacaaacttctctttgtcagaaggcagagataacactggaactgtaattaacctctacttcagctcctgaaaacttgattcacacttatccctctatacaaaatgttgattcttttttgtgagctcggttaagggtgttgaaattttagagaacccttctacaaactgacaataataaccaaccagacccaagaaacttctaacttctgtcactgttttcggtcttagccaatccctgacaaattctatttttcctaaatccactttgatcccatcttgactaacaatgtgtctaagaaaagacacctgagacagtc

SEQ ID NO: 345711 - DNA, 694 bp, Cannabis indica
ggtaaaatatttccaacaatactgtgccaccttccttctcatttttcgagcttcattctgattatctgggagtttcccagtgtcgaggtaggctgctattggtgtcatcgagtttggggaagtatcaatcatttcgatttcttccatgccagttatgctaggctcttcgaggaactggataggaaccaagttcgccttgtcacttacattactacttgccaatcgagctaacacgtctgcagttctattttcttccattggaatttgtctgagaccgtagcctttgaattgagcaagcagataatgtattttgctcagatatgctatcatcttttctccccgagcctcgtattctccggatacatgatttaccaccagctgtgaatcactgtagatttcaatgcgttcggctttcatctaccgggctagttttaggccagcaattagagctccatactcggcttcgttattagatgctttaaatccaaatttgactccagcgtgcatgtgttgccccccaggcgtgagaagggtaatttccacacctgatagttgatctgtagttgacccgtctacatgtagtttccaggtcagcttatcttcactgttacttggctaaggtgtttataccggctctgtaacaccctaactatcttaggcgtattacgtgattttttaaacgtactgtgcagct

SEQ ID NO: 345712 - DNA, 908 bp, Cannabis indica
cttgcacctaccgaggttaaaaataaatttttaatttagtcgtaatgttatgtaaaagtactgttatgtattgttattaatatttgtggtgtaaaatattttaatttatggcatgaacatgaatgttgaatgtaatattattatgtgttggactattatgtatagcttggtaaattatttctggactttgttaaacatctgtggcaaaaataaaatgattttactgaaaatgtaaagattgttcaaatcgaaaaacgtaaaagtaaagattgttcaacaaatataataatttaaacatccaaagttcatgacaagttttggtaaaataaatctactccccatctatggcggaagagcggcatatggtcatcatttactccatcgaatggtcgatcgaataacttatgctcaatatgctctatgacgtacatttcgcaatcgccactgcaatagtagttaaacacaaaatttaataaaccatagagaataataataaattttttcattcaattagtaaacatattctcaatttatttgtaattataattaattacctcgattttgtctgaggtacaactttcttgtccatgatatccagtcaaattttctgacctgggtctctgaggctgtcatttgagggaccatcaccatgtaatgggtgtcacatacaccacactggtccaccaatttggataataaaaggcaccaagcatccatcatcgtcttcagttcgtcttccgttagagttccaatactcgaatcgaagatgaatagcttccacaagtctagattcgcctccatagcgatccaatgtttttgttggtccaataagatggccatgtatacgcactccatatccttacaagacgtcatgaattggtttggatccccacgaacgagttccaaga

SEQ ID NO: 345713 - DNA, 1515 bp, Cannabis indica
ctaaaatagtaaaaaatgaagaaggtggacagaatcctatagtctttggaatttatctgttacgggcatacactgaagaagtcaactatagatataaaccatggatgcaagggcaagtaagcacccgcattcatgtggaatctagaccaagcactacaacaagtgttctaagaacccttgggagcaccatgttgaggttttcgaacaataatttcaagaagatagtaatcatcttgaatggtttgagtttgaagctcggtaagggtactagacacaaggggcctaagcttgaagcctcgatctctcggagcatcactctcaatgacagctttgagaagcttagttgccatcacttttccaccacaagccttgtctaagttcttagacttagacaatgtcaacttagctctgatgaactaagcaacatggtgatcatactcatcatgtaatcttctgcttctcttcatcctaaccatctcaaattcaacaacttacgctacttacaactcaaggaaagtcaaacttggttgggaaaagtctaagtagctttgaggagttttttcaaggcaaaagaaaggagttttggatttttgggaggcttggggaaactatttcaagggagttttggagttaaggagtccttggagtaagatcagcaaaggaagagaagaagaaaaaattagaaaaaaaaaatcggcgtgaagaaaaaaaatttcttctaccttgaagtggagaaggcttgaaggcttggtgaagatgaaatcctgaggtgctcactaactgctataggcatgtggaattgaatgagaagagtgaaaaaattagttctcaactcacttatttatagttgagtccaataccctaatcctaaatctactttgagtcttttaaatttaaagttgtctaaggaagaagtaaatgataagaaaaagatataattttatcttttcccttctcctttttaagtgtatttcgaaattcctatacaactaggaatatgaatacaaatttaaaaggtaataacaattctatatgctattgggattaataacaaattagagaaatcaaaacaaaaagataaatgataagcaaaaggcccaaaagtcttttcacttcttcctttctctctctaatttcgaatggcatgttcaaccaggattaggattcctatctaattaatcctaataccataacaaaaataagaaatctcacattttcaaagaaagaaataaaagataagtgaaaaaaaaaagataagacttttttttccctctttttctttattaattaattttaaaaattcccaaggactaatggctgggttttatgccctaaataaaattctatttcaatgtaatctctattattcaatattaataaagaaacataagtatttttcattcatttgtgtgtcatttggttcatgttatcaattacttgtcgatttgattgataaattcatccaaacccttttcacatttatattcttgtttattgtgtcgtcagcacagtgga

SEQ ID NO: 345714 - DNA, 602 bp, Cannabis indica
aagtataatctaaaaaaattacatcaatactatagtaaaatatttatcctggtgtatttttgttgttttccaaatttctaatggtgaatttgttcatattaaatcataaatatacatttagatagagttacgtacgtagaaataatgttctggtttttaacgtttcataatagttgcattacagttgcataaacaatttactaacagttatttcgtctgattgaaaccttcatctgatgcaaccttcggctaaccacccagcaaccatccagaaactttcgtctgatgcaacttttagccaaccaccctgcagaggttgattatttattactacaatttatagaggttcgaccctctgaatgggtaatgacctactcctttcagttgtattcactcttgagataataccatgcagatcacaggttaaaactttataatttttagcgatgattctctttacaatcgtgagaaataagtggtacatatcgagaactgataagatcttatgaaaaacttatgaaaaaaaatgaacagagtctaggagggcttagatgcttgtggaacttagagagagagagagagagagagaggagagagagaga

SEQ ID NO: 345715 - DNA, 461 bp, Cannabis indica
catttaatatttttagttgcaaataaattgcacgttagttaaataatagttttgctactacaatattatagtattataaaaacagggcttggaattgccaaatacgcaacctgagcagataaaacacgattgttataatatttgtttgtattaaatatgtggaattattagttgttttgtggttttatgttagttggctcacaatagatacaactgtgtcattacagttttatcacagttgccttgaagttaacttctttctcttctaatcgtcgaagttgaaattattttcaggtaaagacacctttgactttttttttactggacgacgaccacctttagccacggggggagcaaaatcagagtcatcatcgtcgatgattgggcgtttccctttaaccttgttaacagctgatttatgacccatttttgaaattttttttggcaataaagatggagaa

SEQ ID NO: 345716 - DNA, 605 bp, Cannabis indica
acaacaagtattatgactaaaaacagatttagtcacaacaaattgtgatttttgtgactaatccctttaaccacagactttttaatcacaacataggaatgatgatttataattagtcacaattttttttacttttagttataaattttgttgtgaataaaagtaagattttttgttgtattttttgtcattgggggagggaggattcaaacaatggcggagggacatggggtcatgtgggggcacatgaccccactcaattttttaaattttattttctgtatgtatttttttatatatttatattttttacccataaatttaatttttattttagttttgtcatcacatgaccctctcaattttttaaaatttattttctgtatgtatttttttatatatttacattttttcctaataaatttaatttttattttagttttgtcatcacatattacaattttgtctatacaaatttgtattttttattttatcttcacatattttcatatctattctcatatatctactctaatctctataaaatttatatgtttctttataataaaaataatatttttataagtgtaatttttatcaataaa

SEQ ID NO: 345717 - DNA, 1019 bp, Cannabis indica
atggagtagtattttgtttttagctggcgagccagttgtgacaaactctcaaactgaacaaatttcctccgaggtggtagctgcatactccatatcatcttccaccattttgtggattttcttccatgttagaacacctagttggatgtagatttcatttcccttccaactcggtatcaactttttgaccatgtattggccattttggagtataaggccaatgcaacgagtcctcaagatacatgtcaatcggaattcctgaatccaaggacatcatccttatgaaagtgctgtgtgacttcccccatattccactgcccttcggttgtgataaagtgatggagttttgtgtggggttcaactccgaggttttgagtaagcatagccccagacggccgggtagccatttgtcctcccatatccgaatgtctcttccatttccaaccttccaacgagccccttcctttaaaatcttccttccccaacagattcctttcgaaatacaagaagcgcccgatggacaaccagcctccatgaaggacatagtaggataatagctattcttcaaaactcgagctaataaggagtgaggattttggataagcctccatccttgttttgccaataacgcttggttgaatttagttaggctccgaaatactagacctccttcttctttaggcttacaaagtttatcacaagacccccaatgaagtttcttattttccttggtgtcccccaaccaaaagttggctgccaaagtgtgaaggttttttatgagcttcttgggaaggaagaagcagctcattgtataacttggaatggcttgcacaatatcctttataaggatttcccggcctgcttgggagaacatcgagatcttccaccatttgagtttattccaaactttattcccttgtatgacatcaaagacctcctttttccttttcaccacaaagctaggcagccccagatacttagcatggttagatacaaggcgcactcccaacctattaaca

SEQ ID NO: 345718 - DNA, 945 bp, Cannabis indica
actttaacctcttcaggtgaagaacacaggtttactggaatccactacaactgtcaggaatcctacacatccattgcgtaacaaatccctagctttcaacactaagattcttggaacacgagaaccttgaaccgaaccaacaaagacgaatggttcctcattttccggttgaaaagttactatttttcatttacaatcaatactagcataatatttggacaagaagtccatttcgagtataatatcgaactcggccaatggtaactccacaagatcagttcaattctctatcttgaaataattaattccccattaggcatcagggttcccaatcccatctcaaaaacttcccttggtctatcaagttgattaagaactctcgatgacacataagatcgagtagcacccgaatcaaacaaaacagtaaaaataaaaccgttgataagaagctgacctgtgaccagtgaagggctggcggcagcatcagcctgggtaatagtaaatacacgagcaggtgcaggtttggcttcaagctttggttcctccttcttcaattggggacaatctttcttgaggtgccccactgatccacactgaaagcaagccctccggttgcaagtcccaggatgatgtttcttatagcgcgggcactcaggataggaataagtctgtcgtccccctttattctagtttcctcgaaaacttttaccttgccctgaatttcccaaagatgggaaagttctcttcttttgctcaaaagtggagtcaccactctcttttccagggccagaaatagggagagtagtggccccaccaacactagaagtctctcgagtttcatgcaaaatttttactgcttcttcagctcggagagccttatcaaccatttctgcataagttgtagtgtcattgttgtaataaccaaatcatgcctaatcttggcat

SEQ ID NO: 345719 - DNA, 528 bp, Cannabis indica
tttaaatattaataaatattatataatgagtatgagtatgcacttatcatattcatataatttttttatagttttgatgctttttacggtttttatttttgtgccttttacggtttttgtgctttttatggtttttgtgtcatttattatggcttgttcctatttgttttagggtaattttatagtatagtcaataagtaagagaattaatttatgagactttttctattataaacttaaaatgtaataaatttacatttatgaccctaaaaaaggaaataaacaaaaatagaaactataaagttgttaattacaaaaatgccggccaagcaaaacggaacaccatcttcttcgtgacccagccgcagccttcttcgtgacccagcgatccaaccccaacaacccaatctcaaccatctttcttccaaaaccagcaaaatcaaaatctaaaaaaatgtagaactcctaggaaacaagctgaatcccgaaaatccaaaatcaaaaacgaaaaggaaaaaaaaaaaaacc

SEQ ID NO: 345720 - DNA, 462 bp, Cannabis indica
tttgtatcattcatagatgattattcaagatatgcattcttatttctacttcatgaaaagtctcaagtctcggacgtgttcaaatctttaagaatgaagttgagaattaacttagcaaaagaataaagaaagtcaagtctgaccgtggtggtgagtactatggtagatatgacagattaggtgaacaacgtccaggaccttttgtcaaatatctagaggagtgtggaattgtcccacagtacactatgtcaggatcgcctagcatgaatggtattttcgaaagacaaaatcatactctcaaagatatggtaaggagtatgatcagtcattcagccttaccataacactctagggagaggcacttaagacaacatcctacattttaaatagagtaccaactaaaacagatgtaaaaataccttatgagctttggacgtggcaaaagcctagtcttaagcactt

SEQ ID NO: 345721 - DNA, 985 bp, Cannabis indica
taaagaacgtcccaaacggagtcccgagtcaaaagttatgaacaaaacaagttcaacatgcaatctgtccacgcgagtgggccgcgacgcctgggttgaaaacccaaaaactccattctagcagcaccaaaagtgcattaacgctcaaaattaaagctcacatgcatcgaaatcagatttaaacaatatacaatataggctccaaacttgtgtaaaatatcaacaaattcaagctcaaacctttaatctataaaccaaaaacacaagctcaagctcaacaataaaatcagagctgtataagagaattaacgcacaaacttaacctcaaaaattatctcaaaatcacaacacaaagcatcctacatcaatctttaacattatcaagcatagagtatcaaaattaaactaattccaaaacacttgcatcacaaggatctctacaataaaatcatgcttaaatcagcttcaatttcagcaaccaattcaaattaagacagtaagaaaactacctccgaatcctcaacaactcaagcttcaatgattcccataaagtaagcttgaatccaagcaattctccacaaattcaaagattagagtaaatgagtttagagagagaggggggtcggtttgggtaaagcaaaatgcacaaaatgcttttcattaatcaacattcacttgtcacaaaatagacaaaatagtcaaaaagactaaattgcccctagggccatataaaacacaattaagcatttaagggcatttaagtcatttccattacatgtcacatattcaaataattttcaaattaatcacatattaataaaattccaacaaataatcacaaaattgtgtttttgccccgaactcgatttagcccaaaatacctagttgtgaatatataataattactgaaacgcccctggctcaccaatggggtcttaacatatcatatatcaaattaatttacctataataaattatataataa

SEQ ID NO: 345722 - DNA, 751 bp, Cannabis indica
ccgagactaggactcgaacccgaacttaaactaggacccaaacccacccaataatcagcacctgtactcaaaattaggatagggacttgggaaacagaactaggatagggacctagtacccgatccagactcgtacttgaacctaggacccagctcgtgacccgacaccagaaatggaaccagactaggaccctagataaggatccggatctggacccagggcttggacaaaacctgtattcggtgtctggatttggagcccatcctggacccgaaccctgacaaggacccgaacccacacccgaaccatagcttaaattggacctagatccacaaccgtaacaggacgaggacccagactccaaatcagacctagacctgaattgggagccggagccggatcccaaccaaaacctcgactcgggagccaaacccaaaccagaactcagaccaaaacatggaccagactagggacaccatacaagggtcgggacatagaaccgcgcccaaatctcgatcccgaacccaaactaagaaatgggatttgctaccttaaccagaacaagactgagacccgtgacagtgatcgagatcttgactcgggatttgggtaacggggcctggaacagacaagtagtcggtgtttagatctgggactcagactagggccagaacccacactaagaaccaaaaccgaacccaaacctagacctaggaccaaaaattagaacctgaacaagaatcgccgaac

SEQ ID NO: 345723 - DNA, 559 bp, Cannabis indica
ctaattaggtgagctcgtacctatgttcggtactcatcatatatcactgatgcccgtaattaggcccagtacgttgctaggaaaatcacatcacctaatcaggtgagcccatatatcacatgcataataacatcacattatcaatattcaaccaattagtcttttcattatataacaatattaactatatctccacattaatcaattcataaaaatactaattgtattagatagaacgtactatgcagaacaatatacttttcttacctctaatccaggttcatatgtttcggccaacccaagtggagaactatcgctgatgatctcggccctatgtcacaacaacgataaactaataagtgtttatcccaaaacactgcttaatattcacagacgacaatctacgatttgctaccaaacttcgcggtataaatacattaaaataaaactatattttggctctaaattatacatcatattggatagcttgtcgcaaggttcgaaatggtatataaaatgtccaaaacggacacccgagtcaaaagttatgacaaaatac

SEQ ID NO: 345724 - DNA, 524 bp, Cannabis indica
aggtttcctaaactttatatgcgtttatttcatcgttttagaaagttcctatttagggtgttaatcaacatacttgtgagtagatctaagatcctggtaaaataatttccaacaactcattcacgcaaggtttcaaataggtaaagaacaatgaagaatgctgaaatcactatggaaggtactctctcatctactagttatctgacatagaaaactaggttttatttcgttgaagacatcaagtggatgagtgagagcatcatattccttttatagtatttcaactaggacttagggctgaattatatggattaaaaaagaataaaatattgggcaaaaaatcacactaagggtgggccataaagggaccactttttagttacaattttgccactttatttcaaccacttattcttctttcaataatactttattttccaatttaatcctataaataacaaaactatttatttaataattataattaattatcaaataaacttgtcatttataatatttattaa

SEQ ID NO: 345725 - DNA, 597 bp, Cannabis indica
tataaatatgtactattctatgaaatacatacacaattcgattcactattttctacatggtatcagagctttgtgattcgaaattccaaattcaaaattaggtttcaataaaaaaaagagattagggttcgagtttagggttctttttttaaaaaatcttttttggagtgcgaatttactctcaccgcccactcaggagtgttgcccagccgccgatctataaaaccccgaagtccggccgccgaattcctcgctcgtggggttcacgcgctgcctgaagcttttacgcattttcccacgcatcgacgcgtggaggaacgtgtgacggcgtcttcgacggcgttcttttaccggttctttactttgttcttctaagcccattcgcgtgtgtttaaggttgtaattcagtatgttttttgccttcttcgtgtttgggtgttcattctttggtgttctttttgttccttttctctatctattttgtttgcttttaagattatggcatagataaaatcagattcaaaatcagttgtggtttctgatgtggttcctggtggaaatattttaccaggatctagatttactgccaagtatgtt

SEQ ID NO: 345726 - DNA, 731 bp, Cannabis indica
tatatagcatgtgtgaatgtaatatgagctatatgtagaattaaaatattttctggtttggcgaccttagagactcaattgggggccaaaaatatcataacagttgtaattattagatttgacgggaatattgtgataagttaataatatagattaagataattaggaatatgtggaagttgacttagcgccctagaagtagagatttcttagtgattaagaaataataagataattattaataataaaatttttattaatattattacattattattataactgttattattattatattattataacattatttttttttataataacttatctaagtttaatatttatatatataatataaatttataaacagtaaaactaaacagaacgaaaccctcctctttcttcgacaaaaactttcttctcttctatctattttcttctattttcagcccaaagcctagcaatctaagctccgatagtagcgagataacaaattttcaaagccgaaaaacttaagatatagtttaattttgtttttagctaagaacaattggtttcatataggatttttgtgaattagaatagttatggagaacttgaccttatagaattgtcctggggtagtcatgggactagtttcgatgttttcttgttgaatttgaggtgattttgagttagaaattaagtttggaatttttttacagcttaagtccgaacattagtgg

SEQ ID NO: 345727 - DNA, 338 bp, Cannabis indica
ttactacttgtaacaatacgtgcacttgcgtgtgcaaaatatcccaacaatgagttagtccaaatttgaagtttacttgcaaaatggtgctcgggtttcattttcaaataaacatcatgcaaaaatagccaattataaaaaagatttagatagtgaaaagaacaacaaaaacatgaataagaaataactggttcgataaacaaaaaaatacacatgaaaataaaaaaatatatatatatatatatgtaaaaagaaaaatttcttaccacattagaaaaacttgtggatttcttaacagattcttcaggaattgaaggactagttgttgggttttatgc

SEQ ID NO: 345728 - DNA, 1102 bp, Cannabis indica
ggtcaaaaaccgagtctttacacaaattattgttaatattaattgatatttttggtaatagaattgctagaaattcaaaatgcgcatttggtattagatagttatgagattaaaattattcattgaatttgttatgcttacctgtcgtaagttttcacatgtcaattatcgaaaattatgattcatgttaatatttttctcccgtatcaatcataaatattactaagatccatacatctaatttagccatcctgtcgatgattttatggtgaaggaaacacattagatgtcatgaaccacacaatcttttttaccctattggtagtggattaactgaatttggttatgacatttaatgtagttgtccttacttgcataagagtcatatattttgtttaaacgactctagcatgacatgatcatttttgttgatagatcattgagaaagctaagaaaacgagcagattgcataatccttgttttcacatagtggcactgctctaagatatttttttagcttttgagaattggtgaaacttacgtattatgcgaaatgttgttgtgttgatgggggagagaatgttcgtctaaaagaattcatccttgaatgttgttttgttgggtaacctcacaatgatcctgcaatcatttgtgtgggtaccgaggtagtaaaaacctcctaacgctcgctttcttccaggaacaacttttatagaataaaagtacacaatctcaaggggagtgggatactcccatcccataatatgatataagacctttagggaggtcataatcctgtaagaactctaaattaactgaaaaggggaaattctgagataattacataattctttatagtactctcttagggggagaactattgggttttgtgccctaaataaaacccatttcaatataatcagatttagtaattaacaaaagatcagaaatcgcattttatgttggatggttcacatgatttattttataattatatttaatatataaattctattaagtcgagaacatataaaaatatacgtatatatttgttcgtgattatagtgtcgttagcatagaggaatataatcatgattatatg

SEQ ID NO: 345729 - DNA, 606 bp, Cannabis indica
atgcagatatgtgtggtgttcggttcagcatatctctttcgagcagatatgtgaagtcaattccatgtgtcacaaccatgcgatgccacgttagagtgcccaaattgggataacattttccccccaagtctgtacgggacttctgaagttgcgtgtagacttcatccgagctgcctttgcatttgaatgggtgacacgtgttaggcacgtctattcgtgatttgatgtgaggctgaccaggcatctcttcggtttttggctaattaatgctctacttaattagttcctcgaaacccagttttctcctcacgctttgacggttacacttgattagttttgatttcccaatatttgctttgtgggaggaaatcaaagcgtttgaggcatttcaaaatgattaccccttttcaccaaagtgcctataaataaggctagcatttcctcatactttacttttactgatttctctactaaacaaactcagagcaaaaaaggatttttacttcaagtctgtcatgagatgttgggttttatgccctaaataaaactcatttcaatatattcagatttacttattaatatagatcagaaataacatttaatgtt

SEQ ID NO: 345730 - DNA, 1270 bp, Cannabis indica
agtgaaaattcacaaactagacatagtctaattttagaattaaaatcaattaactgagtcttacaagcagttttccaccgcatctatcatctatttgacatagacctacgtgttacgctcacatgtctaattacaataaggccttagtacggtttatctcggttctaattatcgagtctaacctaattatgcctaacacgcataattctttatctcaacatatacagtataatatagcattcaaaatcacttaaatgctagggtaataaccctagaccacataaccacttattttagggtaataaccctaatcctggtttctcacataattacgtataataacagacacgagcgccactccgcttaactctacgtgctagcttgctatcttacctcgtaatccaagtatgtggagattccgaatccctaggtgttcctaagcaagcaccggtaatccacaaattccttaagcttcaagcaagagaaacacacaaatcacattcaaatcctagctcctttccacaatttgagtttgaaaaataccaatcaaagagagagaaagagagagttggccaggggatccagaacctagaatttgcattatgtggtcaaatgaccaaaatgccctaaggcataattattgtcacaaacatataacgagggtaatatagtcatttcactcacacacatatcacaataattcaaattttctcattcatcatataaatgccataagtaaatcctaaaaatatattttgggtcccgaacccggttcggcccaaataacccgattgtgactataccactctaacttgttagaaaacacctgcagatagatagaataaacatactatataataatatagtccataagcacaatatatcataaaattacaattttacccttcttgggtcaaaattacaaaaaatacccctgacacgccaacgaggtctttaaatgcagtaaaccagaatagtttcacatatttaattatataacaatataatttctcattaatacataattaatctagttagggttggtaatccggttattaaaccttagggtattacaattatcccatccttatggaaattttgtcccgaaatttacttgaataactctagatattttgctacatatctatctcgagttctcaggttgccttttcaacataactgttcctccgtaatactttggtcagtgcaattgtcttgtttctcaagactttctctcttctatctaatacttgcactagttgctcctcgt

SEQ ID NO: 345731 - DNA, 713 bp, Cannabis indica
tatattatatataaacagagataaaaggagaaatgtttaaacagctgcagtcccaggctcttcgttcggttcttctgagccaactggagtaggaggatctattgtttgagcaggagaagcaccagcagcctgatccgacgcttggccggaagttgaaacagccacctctttcccaccataggcaacttgggctgcgcagtactcaaggtacatgtccttagcgtcgcccaagtagtcaaaattggcctggggatcagccttccagaatcaaagaagatctcgaggccggcagtctccaaagcatttaccttctccttcaattggttcgcctcggtagccttggcgtccctctcctcctttagccgaagaagaacttgccgcagagaactcctctcatcctgaagactgttaacttcagcagacaagatctcggtggtctcttcgaagcgatcagcagcctctaggtcctttgttagctcagagatcttcttctcggcagcaaacagcttcttgttggcttcacccagcttatgtcggacaactccagtttctgccttggcctcctcaacttctttcttggccaagtccacctccgccttcaaggtgtcggacagagccgcactcttggaagtagcagatttagcccgggagtaagtgtaagccaacttcaaaccggcctgcacaaagaaaaaagtcagcatgtggagctaagt

SEQ ID NO: 345732 - DNA, 1112 bp, Cannabis indica
acaaaatcattagcatctttaaaaagagtaggccaatagagcccactttcaagaaccttagcagctgttcttgtgccgttgaagtgcccccacattgtaaggcatggtagtggttcaagacagaatacatctcttcttcaggacacatcttcttattatctgattagcacaatgtttgtaaagaatcggctcttcccaatggtaatgcttcacctctaaaaagaactttttcagctgttgacgagacatctcagggggtgtaacatttgcagctaagaagttgacatagtctacgaaccaaggcaccatcaagctttcccttaaactaaagaattgctcattgggaaactcttcatttatctgcacctcctttgcattttatctctcttctaattcaagtcttgacaaatgatcaacaactaggttttcagtctcctttttgtcttttatctcaatgtcgaattcttgaagcagaagcacccactgaatcaaccttggctttgcatccttcttggtcataaggtactttattacagagtggtccgtataaacaatcaccttattcccaattaggtatggccaaaacttgtcaccaacgaacacaattgcgagcatttctttttccgtggtggcatagttcaactgagcatcattcagggttcttctagcatagtatatggtatgaaacaccttgtcaactttttgtcccaagacagctccgatggcatagtcacttgcatcacacatcagttcgaatggcaactcccaatttggtgaagtgactataggtgccgatatgaatttctacttaagagttttgaaggccttcaagcattcctctacaaactcaaaaggtaccccgttaacaagaagattggacactagttttgagatctttgagaagtccttgataaatctttgttaaaatctcgcatggcccagaaagctccttagtccttttacagaatctagaggggataaattctcaattgtagacactttggctctatccacctcgatgcctgccttcgagatcttatgccccagaacaatcctctctattaccatgaactggcactttcccagttaagtaccaagtttgactcctcaca

SEQ ID NO: 345733 - DNA, 586 bp, Cannabis indica
cattcattatctgttagttgtaccctttcgatgacatctaaccattttgcttcaaatttttccttcgcgtagtagctgtacacatatctttaaaagtttttaagaagatcagatctttaacctttttggaagcatttgtattgagatgccaagagcatagacggtgtgtaacatctagcatgtgttccatgatggcctgtttcatggccacatcttggtcagtaactacaacatttggcttcttatgtccatggcattcaagaaatttttgaagtagccaagaataggatggaagcttctcgtggaggaagagggcaaacccaaagatgcatgtgttgaaatggtggttgacgccaatgagaacagtgagaggcttactgtactcattcgtcatgtaggttgtatcaaaccccagtacatcctcgaaagccacatagtctacacgtgagtttccatctccctaaagtaagttagccaatcgattctcctcgtcagcctgatagacaacaaagaaatttggatccttctctacgagacaatcaagaaatctcaacaccccttctgagtccatctctatcttttcttc

SEQ ID NO: 345734 - DNA, 599 bp, Cannabis indica
aaacaccatcccagatgtagatttcctgtcatcaagacatgcctagaaatttgaatcggtatagcctacgggattcaaagcaccacccttgtagactaacccgaattgccttgtactcttcaagtacttcaagatatgcttaatagcattcccaatgttcttgtcctgaattcgtctgatacctacgcacaatccccactacataacagatgtcgggtctagtgcatagcattgcatacattagactcccaactgctgaagcataacgaacccttctcttgtcctctatctcttgaggatcaatgtgacactgttccttagatagacggataccaaatctagaaggcattgttgcccctttggtgttggtcattgagaatctctctaaaaccttatctgtgtaagttgtttgagagagagcaagggatctgttcttccggtttctgataatctgaataccgaaaacataatgtcagtcattttcttgatatttttgccaataatcgaaatgtcatcaacataaaggaccaggaagactaccacttggttttcttggaattggtaagcataaggttcatcttcattctgaagaaagccgt

SEQ ID NO: 345735 - DNA, 722 bp, Cannabis indica
tgcgataggcctagagctaaagggataaattcgtgccatattgtaggactgtcatgcaccatgcgacttaagacccgcaataataacttattgaacgcctcagcaatgccatttccttgtgggtagtacctagttgacttcccatgaaaaatttgatagtcttccaacaatttcttggttgcttttccagtaaatggagtgccattatctgacaaaatccttttcgggataccaaaacgacaaataatgtgttctagaatgaaagtggccacaacttctgtagaggcttttttcaaaggaattgcttctgaccattttgtgaaacattctgttgcagccaaaatccaaattcttccttgagaaggtggtgaaattggacctataaggtccatagcccaagtgtgaaacggccaaggggtggttacggattggagaggaatggctggcgcgtgaattttgtctccaaaaatttggcatttttgacacttttttgtgaattccattgtatctgcttccatggttggccaataataccctatacgaatgatttcttcaaatagtttcctccccccttgatgttcaccacagtccccgcggtggacttcttccatgacttcctcagcttcttctttactaatgcagcgtaacaattttccattgaatcctctacggtagaggtcaccatcatcttttaagaaatatgtgtctgagtagcttttctt

SEQ ID NO: 345736 - DNA, 535 bp, Cannabis indica
tatttttgtaaaataaggcaaaatactggggcgttacacttctccactattacatcctccttagtcacaaaattcttgatgttgtgaaattcctatctatatgtttactcctcttagggtattggattctttactattttgcaactatatgtgttatcagaaagtaacactagtagttaatccatgactgaaataatgccaaaaattatatagaactttccataagctgaataagtatctggtagccttctgggccactttaacattcagtctcactagtagaattaaagacttcggataggtttttacacttctcctaaaattactgctccacccccagagtaatcacaatcctaaatttagactttctagcattaatacaaatctagaaatcttagtcaatgtagtgtaaagagtttcaaaaaatcacccttataaactaccatataggtcctactttaatcttaagatttatttgattatttttcaatgttcttttcctggattaaattgatacctactcataactctcact

SEQ ID NO: 345737 - DNA, 570 bp, Cannabis indica
attttaatttcattccagtcttttgtgtagttgcattttgaaacattagaattttttttttttactattttgttaaaatgactattctttttaaaatggcaaaaaaaatgcactccaaaattccatattgaaccaagaacctactaagctataactccatgatagagttttgataatcaaataaattttatttagtgtgattaaatctaataaaaaaaattacatattaaaaaaaatttaattatttttttgtcaatttatataattaataaattttatttcattatatatattttcgttttcattcttattttcattaatgtcaacaaaaaaattgtttaatttttagcagtacaagcggagtggtttagttactctagtacatgtaaactatttttaaattttaaaatattgaatcccaaattgctaaaaaagaagtataagaatataatatcatcataagtaaatttaagattagtgcattgattaaattcataataacgtgaatgtttttttttaaaaaaaaaaattaattaagccatatttctactagtatttgatatttttttt

SEQ ID NO: 345738 - DNA, 654 bp, Cannabis indica
aaaaaaaatagcaaaatttaaaaattagtaaaaatatcttatttctattcaaaatatcatgattatagtaatcttattttaaatttaaataaggtcaatttatttaaaaatagaataacttaaaaaaaaagtaatatctgaccttaaattttaaaataagataaaataatcaaatttaaaaaataagataaaaaattaagcaaaaagatagatttttacctattttcaaattcaaattacactaatatctaaaattaattttacaaaaaaattcaaattaatttatttctgataattagatttgaaatatgaaaagtaaaaatcaaaatacaaaactacacgaaaaatcgaaagttaattccatgaaatagcatgaaaaattgaagaaaacgaaaaaattgtaagtggtacgaacaatatgcatttcatactgtccacatgcatgtacagggctacatgacagagtggatacggcgcaggaggttactagcagcctctcctcgcgcgcccagggacggtttaagacaagcgcccgtgtcctaaccgagaaatctcggacagcaggctatctgagcgcgtgcatccaagggtagcaccctcatccgcgcgcgtagggtgggtgacaccatcctgatattttccgattttcaaaaa

SEQ ID NO: 345739 - DNA, 832 bp, Cannabis indica
cctccactcaatgaactgacacctctgctcttcgaacacaaggtttattatagcacggagctcttcttgatcatgatgcaaggtattagtgtgaccttgcgtgagtccaagggcattgcggaggttctgaatcttagtatcatctcctattgtcgtccgagcattagttgtggatgggattccagtgttgggagtgctatgatcggctgccgaactggtattcctagtctcttgcacacctggtgtaatcccagccataggagatgtcacaccttgacccacagtgggttgctgcgtatttggctgctcgggatgggttcctggtgggacccttgtatttctaagaatttgcaaagcaggatctatcagcagtggatcactctggtcaaccacgcctctgggagtttgcacaccattttgtgtgtctgataaaacttaaggcaaagaaaacttggattttcttcaataaaagcaccaaaatattgacctcacgtttagccaacaatagtgagtcaattaataagcgataagaaatgtaattaagccagagcagaaataggtaagcaacaaagaacacaagattttaaagaggttcggcccctttagttcgttaatagcctactccacttagattgtattgacttgagaataaaaattacggtgtttcctctctcaaagctctcacgatgaaatctctgagtattttctcttagatctctctaaagcaattctttccaccctttttacagtgaggatagatcactatatatagagctaaatgtatgaggaaaggttttccttttgtttacaatatctataattggtaagaaca

SEQ ID NO: 345740 - DNA, 463 bp, Cannabis indica
tgggaaacaacactaaatttaagtgtttagtgttagattagagataactttagttggtgagaatgtgttataggctaagatttattaagggattatatgcaggggcgaagctaagacttgaatataaggagggtctcattgggctctagagaactatgtctcattttgcactaagtcttctccttttttcattggttgtaatttctctaacattagtaggtcttgtaattttatggcccataatatgacttattgggcttttaacaaccagatgtacggatctattccgaacgactctttaccaaattatatttaacaaatttaacacttaactagagaagatcataaatctcaacttctactttagtgataaaagttattaattaatgaatgattttgagctaaatgtgtaaaaaaaaatataacaataataagtaatagaaatagtaaaagaaaaaaataa

SEQ ID NO: 345741 - DNA, 527 bp, Cannabis indica
aacgaatacaaaaaatgtaaacagttttgtcataatagttttagatcgaattattattaaatttaattttgacaaaaaattagtccggtgtcctatttgtaccattatagaaaatgcaggatctattttgtcatttaataaaacagagagtcaaattggtaacttttgtaaaacacaatgtctaaaatagtatttaccctatattaaatgattggagatgtgagtttaatacacttctacaagatatgggccaagaaaaagactagggtaatttataattttataaatatttcgaaatacacatacacatttatatagttataaataaacccttttataatataaatatttacaaataaacatatatatttacaattttaacataatggttattcttaattgatttcctataaaaaaaaaaaaaagaattgtcctatgtattattttttaacttttttttaatttacggtttgagttgctccagtagtttctatatgggttgatatatagattttggttgcgattta

SEQ ID NO: 345742 - DNA, 721 bp, Cannabis indica
ataaaaaaagtttagaaacagaaatcatcttttgttgacgaggtacttgtatcggctagcacaactcttgatcgttggagaaaagctcaagataaatctattctatcatttttatttcttggagacattgatgatcaaactgagctttggataaaacattcactaatcacatcaagattaatatggatgttgccttgttcgagaaagaaaacttatatagtttaggggttgtagctcgagatagctttagaagacttttacgcattgaagccgagtaccatggagatctctactcgacagaagttgtcgaagctatgggcatcaaagaaactctaagttggatcaaacacaagaagtggaaggatgtagagattgaaactgatagcatgcttgtcgttcaagcaatacgtagtaatcagcaaatgttctctgtctttggtttgattattaataattgtaaaactttattttcttctctactaaatatttatttactttttgttaaacgatcagtaaatagttggccattatattgctagacactctcggtactataacaatactctaaagttggtgatgtttgctttgatgtaatataattagaatagtattgataatatgaatggtaatataataaaatgatattatgatgtttgattgaacactataataaacattctaattaaataatgtggtattatcaaaaatatatttaatttta

SEQ ID NO: 345743 - DNA, 718 bp, Cannabis indica
taatttttttttaacaaaactaatatagattatactataatatttcagtaattaagataatttatgttttttttttttgagaaattatagcaaatgatttcaaattaccgcatttgtccttattttaaaatttgtagagaaatgatattttacactatttaatatttatattatcttttgccacataaaaaaagtaattttttctcaataaaaaaaaaatgtcatgtgaccataatttatattgagtaacactttatataaaattaattctaaaaattaaactatattaccaatgtgataagactactctaatcgataaccggagaagctctaagaatccttcaatgttatcatgtacgcagggctggcactgggcatagccgggctaggcttgtgcctaaggcccacctagtccaggggcccaaaaaaatttctcctttaaaaattacacaatttttttgctgattttgaaaaatattattttttttttctaaataaggatccaaaaataatattttttcctatagctcactaaatttccggaccggccctgtacggtgaaaatatttggatatctatatttggcttagacataagaaaaagtgatatactatgtgtaatacgtggtaccaggtcaaggatagtgtggatatatttcatgattggtaagtatcaatagaaaactctttttacaaaaaaaaaaaaacgtaaaaatacc

SEQ ID NO: 345744 - DNA, 883 bp, Cannabis indica
ggcagatgccggttcttgtgagaagtagcctaaccagaaccacccagcgcgtcctttattcctgtggcaaagcctttgtttctacccaacgtcacaatttcttttcaaccaggtgacttagatttggagattatgcctcccaaaccacttacgtccaaaactccttaagaatcccagcgtcaccttcgaggctgagttaatagaatcgaaggtacgatctatctcaggctacacatgcgacatgctgaagacctgtggaattgtacttgggcaatcatgtcaggttaggtcagtacaagagggtgaatttagttgctaccccttgcacactttgccaatagtaacccaagaaccagtggtgagaccagtactagtggttcgactagtatgggcgcttggagccttgagcatatttgtggagaggccatcctccctcttcgggactacttcaaggattaaataaatcacatcggggttgccccattcgagctaaatcccatttcttacaggattcttgctagtttgaaagtcttatataaaattatgaattagggttgtcccacgccggcagagattgagtatctttactcagttaaagtcgttccatcgaggaagaacgctgcatggggctatttttaccttggcactcattctagcgagccaaaaattatcgtagacttgccaaataaggtgtccttcaaagacgacttcttctggacgtcttgtctctcccccattggcactaccacatttcgcaaactcagtaagtgattgttctcttctttcttatttacatcagtcttccttttttataagtacttgactaatgtgttgtttattttgatatctcttctgacgagacctatctgttgggttttatgcc

SEQ ID NO: 345745 - DNA, 762 bp, Cannabis indica
cggggttatggaatttgaccattttacccctagtcttgaaaatgcttaagttatgagaatgagggcattttagtaatttgggtgttggggagtgtggtggctgccctagattttgacacctagcaaatgaatattcagcctaagattaatgtgattaatctaacttttaattagacaaaaaaaaaacaaagaaaattaagaaattaagaaaaatcaagagaacccttttctctctctctcttcttgtttctgcaccacaaaatcagggggaattcagcagcttttcatcttgttttctgggaattcaaccattaaatcaagagtaattggagtaggtaagctctaaaacttctaaccttgagtttttaaaagctttatattggttttaacttgtgactttagaaattgggagctgctagggtttaggggttgtgtagtctgatttctaagttgattttgagttgattctaagctctgaatgttagttttgatgtatcgtgatagaattgagcaagcttgagctttgaaactcaagtttaggtctttaatggcatgtttggtttctgtgtgtttttttctgggatttttctagttggaatatattgtgtataccctatttagtaggggtgttcgcggtgcgggtggtgcggtttttgactatttttttaaaccaacctgcacatgcggttttttaaatttctcaaaccgcacccgcaccgcgaaattaaaaacccacaagaatcgcaccgcaaaaaatagtgc

SEQ ID NO: 345746 - DNA, 798 bp, Cannabis indica
cttttgagttttgttttgacgtcaattttaatgtttctgattcatctagccaaaattaatagttgtttttcgactgttatggtattactctggtggtttcgatgatagatcttgagaacgaagcctttctgttcattttgacctttatacaatataaaaggaagaatatacatttaggacagtatatttataaacttttagtgtggcaatataaaaatgaacttcctctttattttcagtatatttgtatctcctattttatttggaattattacatagaaaatataaagtgacattttatttacaaaattacctccataaggtaaagttaacatttatatcttttatgtaattttaattaccaaaatatcacttatactatcatcacttacattatcagacgatggttgcagagtggttgctgcgtggttgcatggtggttgcatcagacgaaggtttcaatcagacgatggttgcaggatggttgctaggtggttggctaaaggttgcatcagacgaatgtttcaatcagacgaatgtttcaatcagacgaaagtttctgggtggttggccgaaggttgcatcagacgaaagtttcaattagacgaaataactgttagcaaaatgtttatgcaactataatgcaactgttgtgaaacattaaaaatcataatagtattttcacgtacataactctatttacatgtctctttatgatttaatatgaacaaattcaccattagaaatttgaaaaacaacaaaatacaccaagataaacattttactatagtattaatg

SEQ ID NO: 345747 - DNA, 691 bp, Cannabis indica
gatcttcgatctctgcatggtgatcctttaatgcttccatctctttatctctccattcagcgaacatacgcctttgttcgtcaaacgcgagatttactgcagcacgcagtttatcctgaccatgatgcagagtgtttctatgagtttgcattagtccgagcgcggcacagagattttgcaattaggttgcgtctacgatggtcgtttgggcatcggttccaggcggaacagtcgtgttatgaatgccctagctgtgtgcagaactgttattcccagtctcttgcacaccaggcgcagtttcagtaacaggagctgtttcaccattcaccacgcttctcgtctgtccaggattgacagcaggtggaacccttgaactccctgggtcctgcaatgtcggatccaaggtctgtgaatttgctgggtcaaacaggcctctacgagttttcaccatcgtgttgagtgtcgaaaagagcgatttgtgattctgctctcaatgaaagcaccaaaatattgacttcgcttttagccaacaaaaatgagtctttttataagcgataaacgatatgtcgtaacgaatatatataatatagcaataataagacacacgaattttatagaggttcagccccgagcagttcggtaatagcctaatcctcgtgatttgtattgacttaagaacaaggaagaagat

SEQ ID NO: 345748 - DNA, 866 bp, Cannabis indica
aagtcgaaactttcaaagctagatttggacgaattgaacttagttctggtggagatgctgagcgagccaagtatacgttaaacggaagacgtcgagatgatagacagctctcctacatggatgactccaattatcaaatacttactcgatggacaacttccaaacgacaaaaacgaggtacaaaaactactatattaagtgcctcgctacacaataattgaaggcagactatatagaagagggtactcgatgcccctacttcggtgtgttctccctgtagaagcgagtgaaatcataagagagattcatgaaggattttgtggggatcatgcaggttggcaaagcctatcttaaaatatcattacacaaggatattactggccaacgatcaataaggacacccatgagtttgtcaagaaatttgataaatgtcaaaggttttcacttatacctcgcacgccgccaatggaactaagaatgatgaccttgctctacccatttgctatatggggaattgacctaattggggcattactcacagggcgaggaggagctaagtatgcggtagtagctgttgacttcttccctaaatggacgaaggtcaagccccttcttcactaaagttttgttctttaaaattacttaaggggcatttatgtttgattaaccagaattcatctggaaatacatggtctaatgtgaacccaccatttcaattttttttttttaaatttaaatgttctcgactaaacctctttgacgaaagtggagtcgaactgttaaaactccctgaccaaacctagtacagttattcaaatcaggcaaatgggccttcacaattggggtagttcatgtgagggggtgct

SEQ ID NO: 345749 - DNA, 1207 bp, Cannabis indica
tcctcccatcaacagctctagggaaagctcgttgtcagctacggccagctgctcattcacatcagggaccgaccgattcatgtagttggtgagcatatcttttcctctcttagtctctagatgcagtgatggaggtggggtaggatcccggatctgctcaaatccactcttggccagcttggattcgccctttgactatttgggcctgtttgagcttcctcctcgagagtctttggacttagtagctttcagggcagaatggtccatcacggttagctcctcagaaagatcgataaccacttcggccggtaccttttccctagacggggtcgtctcatacccctagatttctttggccagaggagataagctcgcgcttcttttcccaactctcttcctcagagcttcgagcatcttctgagacatgtctgcacgaaataaaagtaacatggttaaaaaaagcactagaagtatgaaagcataataatcaaggaaattaaaggaaagacggagtatcttgcgaagcgtttgcccgaacaagacctgatggctcatcatcacctgacaattctcttatctcttccaggacggctttttcctttcctactacaggagtggatggccgagcaggtagattgggctccctaattcgaattgcatgttcaataggcctgtgctcagctagaagtttcttcttccttttgagcagagtcacctgctcttcctcagcctcatcttcttgctcaagaagctcatgagcatactattttgctcttgcacctcccttcaacttagcttcaggcttaagttaaataagctcatcctcctgatgagttccctcagctcggccagcactagatttcctcttcttctccttcacaggctggggaatgaaatctttcgggtaaagcccgtactccacaaagttgtcctctgaggtcaaaaaagtgatattacgggcagcacccagtagtttcgcaagcctttgagctctatccctgagagcaagtttgaagggttggcggtgatgtatagggatctactggaaccgagtgtaggtggtgcccataccatccaccatgtaatactcgtcaacaaaatttctaatttttctaatggccttgtctccagtgcccgtcaaccacttgaagtctagctgagaaaagtagaagtatctcgacctaccttgcttgggagtagacttcaa

SEQ ID NO: 345750 - DNA, 504 bp, Cannabis indica
tattattatatataaatttctttattgattatatatagatgtattcttaattggtattgatgggtattattaaaaaaaaattgatattctatacctaattttatcatcaaatttttttttaaaaaaaaaaattcttacattatatggcttgaggttgttgtaccagagcatcttcaaagcattttgaagaatatttgatgagatagaaaatttaggtgacaaaatataaggatgttagagcatctcctatggagatactattaaggatgcttaatgacatgaatatatttatagtattttttaattgatgcttaccattggaatgaaaaagaatatcataccataacatcctaatgatgtgtaagagagataaaataaaataatatatttttaagtgatgtggaagtttatgacactcttaaagaatgttattattggagatgctcttataccttagacataaaagaatattattcttgaaatttgcattgatgtcacacaatg

SEQ ID NO: 345751 - DNA, 532 bp, Cannabis indica
gagtcggatctgatttgattcgagtatatgatctagcgaggcggggaagggtagggcagattcttacatgatctggatcaggtcaaatcatagccagatcaaatctgacccaattcatttacactcctacacattagtaatgtgagactatttctaagacacccttctcacgtttgagtttgaaagtgtgtatgaacgacctttaagagaccacgatagtgcccaacatgacattttaaaagaatctcacaaggccaattattggaaaatttataggtgtacacatcaaaaaattcataaattttttaaaatagatcaaagatctcaacactaaaaactaacatacaatagtcgaaaggtcttaagaaaaggtcaaaggctgagacaactaatttttttaattaatatgataccatgttaaaatttagaataaaaatgcattgagttctaataattaatataatgaccaaaaataaggcaccatgaaaaaaagaaaaccatcatttttttagttcatggaatattcacaaaa

SEQ ID NO: 345752 - DNA, 579 bp, Cannabis indica
caaggtccgaccatcggacctctgtcttcttccctctctcaaatcgcaggaaaaaaaaaaaagtttcagagggtcggacgggttggggtcggactggggttgctctttcgggttggggttggggtcggaggggttggggtcgtggtcgacgggggtgagggtggtgatcggcgttggggttgacgtgggtgggtgagggtggttcgggtgagggtgggcggttggggtgagatagagggagagagagatgatgcagagagagagaatattgtgaggggggtatttttggggttttgaaaaaaaaggaatagtttttttaggttttaaatttttggtttagaaatcaaattttttgattttctaagtatagaaaatcaaatttcccaaattttttttccggaaattttatttcacaaatacccaacaaaaaataactgaaataaaataatgtttttatggaattatgatattttttacattgacctattttaggttgttttaaaaaatattattaatatagtataatgttacaataatgtgaaaaataatgttatttaaactctaaaaaaaataacaaat

SEQ ID NO: 345753 - DNA, 424 bp, Cannabis indica
caagtaacagagaattcaaacttgtttttttgtgtgggagagaaagagaggttagagctatgaatatggatagacccaaaaaattatgttcaaagtatggtagccttaatgatgaccgatctcattaattatctaaatatcaagtatccatacataatttcaacttaaataatatagcagttatatggagcataaaatcaagcacaacaaattatcacatgtagctattggatattgcttgcttacctgatcaaagttgatgttaatataagatagattatatcaataaagtcctcttgggctccttcaacggaacaagatgcaagatctagaataaaatatctgtaaaaccaaaatagtgttggaaattattttaccaggatcttagatctactcacaagtatatgttgattaacaccctaaa

SEQ ID NO: 345754 - DNA, 557 bp, Cannabis indica
tttctggattggcttcaattcttcgggcattgacgatgaagcgtaggaactttcccgagctgtctccaaaggagaactttaagggatttagtttcatgttgtatttcttgaggactttgaaacattcttccaagtcgtctatgtgccccccagcctttttggattggacgagcatgtcatcaacgtacacctccatatttcgcccgatctggtttttagacatcctgtttaccaatcattggtacgtagctctagtattttttagaccaaacggcatgacttggtagcagtagagacccatatctgttcggaaacttgtatgttcttagtctggcggatgcattttgatatgattttagcctgaataagcatccatgaagcttaaaatttcgtgctcggctgttgtgtctacgagctgatcgatccttggaactagaaaataatctttagggcattttgatacagactggccatttcttgttcgacttgggcacaagtacggtattcgcgacctaagccaggtaaaaagcttcaattatgaagttgttgttgcgtag

SEQ ID NO: 345755 - DNA, 1307 bp, Cannabis indica
gttcaactcatggaaagccttttcctcggaattccatgcgcagttctcctcctctcgccaacttccgttgcatttaggagacctggtcgaagtcaagcaaagaccaggtgagcctctccgagcatacatcagcagattcatgacggaggcgaccaaggtttcacgggtaactgatgatgtaacattgtccgcgatactaggggcattgaattcctcggcgaactttgaaaggacataagaaagaacggcccggtagactcaatgagtgattttcttgaccgtgctgaaggcttcatcaagctcgaagaagctattcaacgagtagaatgtgagcgaaagcctagcaagtctaaagctccttccactggaacgtccgcccaactccttcattacttaaataattcgagctcaaatgttaaacgttctaacaaaaacaataggcaagggaatgggaagaagggaaagttcaccagcaaaactgaacaggctcctcagaagaatcaagcaaagtacactgcatttactatcttaactgaagatatagaaagtgtctacatggccactcagccgctagccccgtataagaagcctgggcccatgaagaaagatgtcaacaagagagacatgacgaagttttgtcgattccacagagactacggccacgacactaacgaatgcaacaatctaaagcgggaaattgaattcttgataaggaaaaatagcccagacttatagaagtatgtcaagaccgatcagaattagaggaacgacaataaccaagacttgctacctcccccagtagatggacatttgcaagtcatcattggaggcccacacatagctggagaatcgggcaaagctcaggacaggtatgcctgaacagcatagcacgagcaagaagacgtgatcctgaccgtagaagaaaggaagcctaaaattccacaggcaggagggccaaccatcacctttaacgacgaagatgctgtcaaaatcaggtttccacacaacgacccgttggttgtggaggtccagatagctaacaaaatggtggctagaaccatgattgataatggagcctcttccaagatcttgttcaagactacctatgaaaatatgggactctagctcaaggatctaaccccatgtctactgcctgtctatggtttctccggccaaggagtcgcacctttaggacaaattcgtctaccccccactgttggacaagctccgaggagcttgactatcatggtacaatttctggtattagatgttccttcagcctttaacgtaatgctaggccgaccagc

SEQ ID NO: 345756 - DNA, 629 bp, Cannabis indica
attaacataaataactgctaatttccaaattaactaagcgggctttacaaaggggtacagagtacatgtggtacaacactcagtaactcctggaagtacaataatggccctaccaacacgactacggagtcggtactctagtgcatgtggtacagcggtcgtactttcgttgaaaacgttcttaaccatttggtgagtctagtaattgggctcaggacggcttaagtataaagccgatattgcattatctgtatatattttatgcatatctcatcagtttgctaccttgtgtaggtaagggtaaggctaagctagaggagcagtcagttggagtgcagtagggattatacatatcacggcagtgcaacctggaggatttcggtcttactgtattttgagtcatattttgttgctgccctgtagtttgtaaaaaaaaaaaagaataataataatatgtaactatattatggtatatgtattttcacattgttttaatctcggaatcccaacctacaaggtttttattaatataataaaaatatgattaattttgaattagtaactgttctagtgagggcattttagcttctataagtctttagaagtgaaacgatgatttcctttgagct

SEQ ID NO: 345757 - DNA, 1239 bp, Cannabis indica
ctgaatatataattcttagataatagtatagccttagcttagctgcgtatcggcttataatttctcggtcccttgcccagtgaacattcctcactatttatagggctgggaaacttgaggaggaagagtttcctctctcgttacaatgcgcataaacagaaagatcgtgtgatcaatgctgaatgcaaggatcgtgggattgaggctgagtacactgatagtgggatcgtgtgtatgccatatccacgtaagttgatccctgagttgtagggattgagctgatgactcatgatgcgaaagctaaattcgctaagtgttgattgccctgcacggctcgttgaatatctcattctggatgtgccagcgaggcgtcctgctcggtctatcgttccgagcagatgctccaagtggactccacgtgtcaccattctcgtgatgccacgtcagagtgcaaaatttgggataacaacatctttaaattagattattatttgcttttattttttgtgtggttttaggtaaacttttttttttttcttttttaattttgttagtttcctttttggtggcattttcggatatgggttggtgtattgtatttattttttttagatttattggggatatgttgtttctttttctatttttggtaacctttgactattttttgaagtattttttggtttcttttttctctcctcacgtggtgaccaaggtaaggaagttacttgacattttttctctttttttttttggttttttgggtattgatttttaaatgttatgtatgtccaactactcaccattcccacgatcaccactatccacttctctctctaatttctttcaaaaagtctaatctttttcaagtttgagagtgtgttttttctaggatttcaaagaaaaatggccaagaccaaaaatgttcaaccttccaaaagacctgctcgaggttctacctctgtgtctccaccatcgccacctgtgtcacctgttccagtgaccagagctccttggtcgtcatctgctccaacaaaaactgccaagaagtcgaaatcccaagctcgaaagttgacttacaatctcagttctcctctgatcattgcttctccgattttaaccccaactcctgggcttggtaatcatgatgaatcctgtaacaccctaactagactaggcgtgttacgtcatttttaaacgtactgtgcagctcgttgctaatcaaagaggtttatggaa

SEQ ID NO: 345758 - DNA, 592 bp, Cannabis indica
agatcctggtaaaataaattccaacaatcatcataagcaatatcaaaaagtgacttgaaagtgctaagggaagatgggcccaagaattgcccggtgtgctctcggccaaccgaaccacgccacagactagtacgggcgagaccccgttctcacttgtatacgggatggaagcggttatcccgacggaaacgcaagtacctactttgcaatcagaattaagtgatgaagacaatacttccctaagactacaagccgtcgacgatatctaagaaagaagggagcgcgccctaacccgaatgcagaattactgctccgccgtggcaaaacaatataataaaaaagtaaggctgaggaatttcctccagggagaattggtcctgcggaaagtttttcaaaacaccgaagaaacccgagcgggaaaattgtccaccaactgggaaggaccgtactgagtggttaacccgacgggaaagggtgcgtacaggctatccaccatggacggggccgacatcacgagaagctagaatgcaaggtacctcaaaaaattctatgtataaattaaaggttgggcacttcatagtacatggaaact

SEQ ID NO: 345759 - DNA, 677 bp, Cannabis indica
aagttgggacggtatgacgaaaacattgagctcattctagtaccaaggtattggaacgggaaacatttgagaaaatactaccagtaagtgtacatggtctgacgaccccccttcaagtacacaatgctagaacatttacttttaagtaaatggcttttgggcagatcttgttcgaaagattggataaaataactagtactcaggtcggatgacaccccttaaaagcacagtttaaaaaacatgcaatttccaagaaacttacaaaagatagaaacctcagaaaataacttcattgtgtctagacgcaaagataatccctataatcgtgggattgagtcttagaaaaaatgcaaagacaatccctataatttagtttcctgtttcttgaattgtaattatggaataattatgatttcctattttattaattgtaagcaaaagggaaaccgtccctcgtgcatgaagcccctataaatagtgacctcgcctgactatgaaagggatcgaaataattaccttagagagagattccaaagagaaacgagtgatctaagaaataaacacattcagagatcagttgtaagagcttccaagaaaaagaacagtttgttccttttgctgagttaatacaatacaaggggagtaggctattacctataaagaccgcttaactttaa

SEQ ID NO: 345760 - DNA, 790 bp, Cannabis indica
ttaaaaaaaattaaaaaatagtatgtggggtaattttcctaaaatttattgattcaattattttttatttatataattttgaaattatttttgaaaatattaaaataattaaaattatgtggaccactaaaaatttaccataaatacacaatcagtctactgtgacaattaacttagatttttaaacgaaagtgtaaagaataaaatataataaggttcaataaattttgccgtcaaaaattaaatttatgtgattaagtgttacaaaacataaagttcgtgtagttttatcgccaatatctcgtaaactttttttctatttttttttttttgtaaattccgtaatatgattttgcattttaacactaaaaaaatggtaaatactattttagaccatgtattttgtaaaagttacaaattcaaccatctattttgttaaatgacaaaatggaccttatattttctaaaattgtacaaataggaccatgaactgatttttatcaaaataaaacttaagaataatctgatttagagatgttatgataaaattggttacatttttagcatctgttcgtgttaaaaaagttgattatattaaaaaataaaattattgaaaattgaactcagggtcctaattttaccattttgaaaagtataaggttcattttgtcatttaacaaaacagagtccaatttataacttttgcaaaatagagagtagcattttgagaactcacagaaagggaaattttatttacaccccaaaattttttaaaggcaccccattttaa

SEQ ID NO: 345761 - DNA, 540 bp, Cannabis indica
aatataatattgattcattttttaaactcaaattatataccatccattagagatgataaggaaaatactaagggagatactaaacatcataaatagtggcaaaccgttattgatgcattttaataatgggtttcacccattttaagttagtgaataatatggaaaactgctaactaattattaagtgtcatatttgtatagtattgaatatattaaggtcccaataaataataataatattttattaataataataaaaaataattcaccataaaaaattgtacaaaaaaattatacataaaaaaaaattattcataagaataaagaaaattacgatcattgaaaagaaaaccataggaggtgttgtaaaaaaaattgtcattcataaaactactaagaaatgtgttaaacatcataaatagtggcatactattattaccttattcgtcccaagcactacaaattagcaaaaaaatcacacgaagtaatgtaaaaaaaaaattgtaaaataaatattattaaaaaaaattataataaaaa

SEQ ID NO: 345762 - DNA, 572 bp, Cannabis indica
tttaatgcttgaaaagcctcttcacatttttcggcacattggaacttcttattgccttttaaaatctgaaaaaactccttgcatttatcagaggatcgcgatataaaacggtttagagcggcgactttacatgtgagactttggtcttcttttggcttagtcggcgatcacatttcgactaatgctttgatcttcgcagggtttgcctctattcctcgctgattaaccatgactccgaggaatttccctgaatcgactccaaagacacactttagtggatttagccgcattttatatcgtctcagtatctcaaacatggcttgtaaattgttgacatggtcttttgcctgttgagattttacgagcatatcatcaacatacacttccatggtatccccaagaaaatctgcgaacatcacatttactaatctctgatacgtcgcacctgcgtttatcaaaccaaaaggcattactttataacaagatagacctcgatctgtaatgaacgaggtatgctcctgatctggttcatacatcaggatttgattatatcccgagtatgcgtccatgaa

SEQ ID NO: 345763 - DNA, 1015 bp, Cannabis indica
aaattataatttttgtggctaatatttttagttgcagatcgtttagtaataatataagaataataatttatacttaatcagagttttttcacttttaatcacaagttttattgttgtagtagcagttaaaaaattgaaaaagaaatatatatatatatatattagttagttacgactagagatagaaatttatactgcggagatggataattgtagggacccgctcctgatggggtaggaatttcccatatatcttgcccctgcggtggggattgatctccgtcttggtggttaatggagcgatggtaggaaataatttcacccgaagcggggatgtggtggggcgaggataatactattcgcaccatatttgacctcaatataaatatatatagtttcctttttatttttaacgtatgtatagtatatatataatataatttcttaacgtatatatagtatatatgtagtataattttgattgtcattcatgatcataattatatatatgtttaaattataaaaatctaatgacaatagtgaactggtgatcattgtggattacaagtgtaaatatattttcttctcgattctgcttaatttcatttttgtttactttttaatttgtgggagacttgagaagtatgagactataatactatacttggcttattgattttttttttgttttgtttttttttttaaacttttgagacagatttattttttagttctattgggttatgctgtctttttctttaactttgagagaggtttgtcttttatcttctacagactataaatgcataataaatatttgtgagaatattagtttaatttaaattttaaagttttttcaattattttaaattatttaattttttctattttgccttaatagatacctgacaaaggggtactttcctaccccgaattggttattagacgggaatgtaagcataaatagatatcaaagatgggggcaaagattgtaattgctcgtacattaaccatt

SEQ ID NO: 345764 - DNA, 1005 bp, Cannabis indica
ggggacaattttaatacccgaagcggagatggggcaggggcggaaataatactattcacaccatattcgaccccaatatatatagtttctttttattcttaatgtatatataatatatacatcattgataatcatccataatcaaaattatatatcatatacttaaattatgaagatctaatgacgatagtaaacagataatcattgtaaattataagtgtaaagatatttttttctcgatttttaattttatctttgtttactttttaatttgttgggagacttgagaggtatgagactatgatactatacctttgggcaccggggtgcggtgacaccctgctcaaaaataaaagttttctaaatctgattttgatacctcaaatatgtttgtggtacgtctagttcatgtcccaatgcaaagtttaaccatattgcactaagacgggcctaaaaactaaaaccctagttgcgtttgtcaacatgggtgctaggtgaaaccctaggtgcccaagttgatttctgaggtgctggttttgtgtatttttagctcctaaggcatgaacttggatgcttcatgtgttcatgatacagaatactaaaagatagtgagttggatacaatttggtgggatccgaacacccattctggagtcccccaagtcaacttgggtatagggctagggacccctcccaggtcggcttactataatttaggattactcatctctgagatattttctttcttgccacgtgccaaatattaatgtccacattatttgggctacttttggtgtaaacaccctataatcatgttttaaacatattctaacacttaaaacacatcaaaaacttcttgaaataaaatctacaattgttaagctaaatttgagtttgaaaactcaaattcaccaacttatagctgctattagccttataaaccaatcacaaataactaagaatcaagcttagaaacaaattctagcttacccaaattcacagagcc

SEQ ID NO: 345765 - DNA, 598 bp, Cannabis indica
ttcggcgattgctgacctacaatttggcaggctcttcgtatcagcacggtggcttgtcgactacaatcttcaatctttgcatggtgagcccttaatgcctccatctctttatctctccattcagcaaacatacgcctttgttcgtcgaacgcgagatttactgcagcacgcagttcgtcctgatcatgatgcagagtgttgttatgaccctacatgagtccgagcgcgtcacggagattttgtagttcggtggtgtctccgatggttgtctgggtgttggttcctggcggaacagtcgtattatggatgccttggttgggtggggaactgttattcccagtcccttacacgccaagcgcaattccagtaataggaactgtttcaccgttccccacgcttgtcggctgtccaggattaacagcaagcggaacccttgaacttcttgggttttacaatgcaggatccagcgtctgtgaatttgccggatcagtaagacctctacgagtttgcaccatcgtattagttgttggatatcgaataaagagcaattcgtgatccttctctcaatgaaagcaccaaaaatgttgacttcgctttt

SEQ ID NO: 345766 - DNA, 636 bp, Cannabis indica
ggctagccggtttgcaccagtttccccaaaacttttcattccttgctcaattttccaccaaatgctaccaaactttccagagtacctaatgagggtatacccaacatattccaaccaataaaccaaagaaaaactcagtgtaaacaaatattccattaaaaatcaaagctttgaactcaaagctcaaagttgcatcaaacctattccaaccatcaaaaccagccacaagaagctaataccaactcaattgaaccctatgattcgaaccctaagcaagcctaaacctaacagccactaaatctcaaaattacaagttccaactaaagaaaaacttcaaaaacatgctcaagggttctagggatttaccttagcttcaagagtgcttgattccctagttgaatttccaaaaaaataatgaagaaaagaggtgatctcctctggttgcttcagccgaaagagagaaagagagaaaactctctattttgaatttttccttccaattttcttgtcttctaaaatgagacttaaggacaaagtaattaattcttgctaaaaagttatcttgctaggtgtcactcacctagggaagccaactatcctttaccaaataaaatgactaaaatgccctttaaccca

SEQ ID NO: 345767 - DNA, 686 bp, Cannabis indica
tgcctttactaatccaaattactaaagcggtcattacagaacgtgtcgggaggaagttgcacttggtagacaaaacgctcagaggagttgttagacaaaaaggtatattcaaagaccgactttcagtggacgcggagccaacgagttcagtcaaacagcgaatttattttaccatgatctacatttactaacatgtatgtttcattaacaccctaaatatgaattctctaaaacaatgaaattaaagacataagattttagaaaacgttacattgatggcagtggaataatatgacttctttcgctcagatctctacccttattcctttctgttgtagagtaataacaagatctaagcctggatctctttctctcgctccatcgggtttggttaccaccatcttccgcactatgattgactacttgactttctatgtgtgggcatggtactctatcactgtggctcgaattggtgaagaacattaaatgagagtttgaaatcactatagaaagagtctctcgtctattagttgtcagagaatgaaaactaggtttaatgtggttgaaagtgatgagttggatgagaatgagagcaccatgtccttttatagtatttcaattaaggtttaggatttaactatatggattacaacagaataaaaatactatttattttatttattaat

SEQ ID NO: 345768 - DNA, 887 bp, Cannabis indica
tgtcgagtaaaaattcgcaacaccaaatgtatatgatattattaatgacaagaagaaaattatatgaagaacattgcgagtattcaacctagagtggcgagtactcgaactgggaatgggaaacgcttaatagaaaactggaaatcacaataagacagaggattatagtggttcagtcagatcacggtctgcttagtccactgtagcaagagtttcgtagtttttatttcacggtggatcagccctttatatacaaagcaggtgtccaattagttatacagggattgcattcattgtcaatccgtttttacacattgaattacaataactaaactaaacaacgttaacatcaataaatgaataacagttactaaattcagcaacgtatgcgccctcttaacatgcgagttgactgttcatattctaatgttaaacccgcaggcctaacacttaattacgtttaggatgtctgcgttcttaggagtcgcctttgtggacatcgcacgcgagctgacagaacctagacatgcgagtctatatcgaattatcaaggctgtagggtcattgggaccaactcgcattatagagagtcggtctctatgtttatgcaagaacgtggagaggatactcacacataatttgatgcatgcgagttagtctcttgtcccgcataatacgagttataatcatgcgatcagactttggtcatgctcgctgtatctcgctgactctatcttaagcgaggtttaaaacttcgaggagtctcttgcagacgactcagcttttattggaaaactgagtacacgtgtcctctaaacaagagtatggtctcgagtttctaggtgagagaaatctcactataacattgattaatcaattataattct

SEQ ID NO: 345769 - DNA, 806 bp, Cannabis indica
atacttgtgagtagatctaagttcctggtaaaatatatttccaacagtttcttcctcctctttagcggagtcgcctgctcttcctcaacctcatcttcaggattcaagggctcctgagcatgttgcttggcccttgcacttcccttcaacttagcctcgcgcttcagttgaattagctcattctccggatgagctcgttgaacccgtccagcatcagatttcctcttcctaaacttcagtggtttggaaataaagtcctttggatagagcccttacttcacaaagttatcctcggaggtcaactagatgatatttaagtcttccccctgcagtcgagcaagccattgggccctatcctagagagcaagagtgaggggagggcggtcatatgtcagaatttgctggatccgagtgtgagtgatacccgtgccatccaccatgaagtactcatcagcaaaacgcccaattttactaatggtcgaatcatcgatgcccgtcaaccacttgaattctggttgagagaaatagaagtaccccgacctgccttgcttaggggtggacttcaaatcaaaaagtagctgacttcgtcaagagaaggcataccccacttctgggaagcgtagaggacgaagacgacaaacagatatttaatgcccttaagagtgaactaggccgggcaaaggccgaagaagtccgccacattcttgaagtattgatgcaaaggaatcaatgccccttgctgggcatgggcacccgaacaggcgcacatccccctttcagggtttgtggcacgattgttatgggcg

SEQ ID NO: 345770 - DNA, 529 bp, Cannabis indica
aaaaaatattgaattattagatgttaacaaaaaaattattattgtaaaaaaaaggttgtcacattccattctaatgtcaaccaaacatggtaatattactttcctaggtttatcatcctttgatcactctctaaacaatgttaaatctatttccatgaaatgaaatctgcataccaaacggcctcataagagttaagagtttattttctcgttctgataggaatgatgagataaataattgttaaaacccctctaatttgcatcttaaaatggaagccaattaaatcaaacaataaatcactactaaaaatttagtctttagtggcacctttaggatatatgggtctaagggttagtttggcacaatttttgaaaaaactaaaagctgctttataaaaaagttgtgataaaaaaagtgtttggcaagcaattaaaaatagcttattaaaaaatttatgaagaaaatacagttaaaaactaaagctggtacaatccaacttttaaaaaaagttattttaattaaaatact

SEQ ID NO: 345771 - DNA, 874 bp, Cannabis indica
tactgccgtctagcaattgtgaaaatagatttttttacttatcatcatccatgacgtattaatgttatagcattgttattgggtatcgatactttctagatattttgtcttacgattagctagcgatactctctaaaagttattatattaaactatatagaacttaatacttagttagaccaatagcgatattaacagagtattaggcaccactagtaccttttaacatttcttgttatgtaattattatttgattaaattctgttgtatttatactaatcaaaattaatgtgatgattaaaataaaaagcaaactaaactaaaaatttaaggaagcaacgattaggaaattaaacgattaggaaattaaaagagcattgttattgggtaccagtagtagacaacactttttatagatgacgtcctacaattggttagtgatatttcctaaaagttattttttgaagttatatgggatcccaatactttattacatcaataacagtatgacacaaaggaaagtactaagtactagtagtaccttttaccaattctcaaatcaaaagtagacggccaattttgatctagtcatctaaaattggtgagcaaaagactagccactattttgaggggatgttagaccatctccaatagtaaaactttagaggatgcttgatgaggtggatatattatgtgccaaaatattaagattctatatcattggaaagaaaagatgccattttagatattttcatgaatcattgatgctattcagttttttaataaaaaattaagccaaaaaattattgtagctaaaaattaggatatatattaaataataatgtgtgagattataattatagtattttaaaaa

SEQ ID NO: 345772 - DNA, 832 bp, Cannabis indica
agatcctggtaaaataaattccaacaatgaggtccaaggctatatatatagctggccggcctctcctctattttgtttaataaaattctttccttttctgtcaaaaacttcgattcacttttctcaatagtatatataagttgcagaagctaactcaattgagccttagagagaacaagctttcagggctaattagccaaaggattagtaacctcaccaaccttgttcagtttgacatatcttctaatgcattttcaggaaccattccagatgcttttcacagcattggtaagttagagaaatttgttgccttttcaaacaattttactggttttattcctctgtccatgtcaaattctccaactctcacaacactaaatcttaggaacaattccttggagggttttcttaatcttaactgttcagcaatggtaaaattggctactcttggcttagctagcaatgggtttagtgggcctattccagataatctcccttcatgtcaagctctgagtactttagatctttctcgcaataaattcacaggtcaaataccagaaagcttcaagaattttcatagtctttcttacttctttctttcaaataccagcaattctaatctttcttttgccttgagaatctttcagcattgtgaaaaccttagtactttgatcttcaccttaaactttcagggtgagcagttgccaactgatcctactcttcatttcaaaaagttgaatgttctcattattgctagttgcagactcagaggctcaataccacaatggttgagtagaagctattgggttttatgccctaaataaaactcttt

SEQ ID NO: 345773 - DNA, 770 bp, Cannabis indica
tataccaggttactttataaatcataattgacatactaagttactttttttcttaaatcaagacatcaatttttgtaagtaaaaaaattaaaattgtacttgaaacaaaacaaaatatggataaaatgaaattttaatggtactaggttaattaataaaacttaattgaatttcaaaatatagacattaggttactttcctatataattaggttactttgtaaagcattacaaacacactaggttactttttttcttcatcattttttattattctttttttttttaaaaaaaataaagtactcaaagtttgatcaatattcatttaagcaaaagaactaatattttcccaaagtaaagaatgtaacaaatcattacaaccttatgtagtatggtgtccatagtaacttgttccttttttatgaatgaatataacgagcaacatccttaagtaaaactaaatgaatcattctcttgtttttgttgggttgtgtggcttctccatacgtgggtttctacatgttttcctattatgacctgatttgtcacatcgtccacacttcataaccacttttggctctccccgtgctcttattcttctcctccttggtctaccaggaggaatttttccttttggaggtaggacaagtatgtccaattcttctggtagactccattcatcctcatgtggcaaaggataaactgtttctgcataagttgctttcattgttttagttttgtagtaagaagaacaaaagtcataacaattta

SEQ ID NO: 345774 - DNA, 540 bp, Cannabis indica
ggcaaccggtttttgatccactcgtagaggtgtcccaatcggatcaagttttcaatctcgtccttaagatttttgcattcattggtgctgtgcccaatgtcgctatggtactcgcatctcttattgggatccctccgggagctatctttgtacaggggaggcggtctccggtagtgcgtatttgcctagtagcaaaatatacacgttcttgggagtccgttaactccgtgtactgggtatattagggagtataccccctttttttcgcttatcctctgtctgggtactgccttttgaggaccttttactcctcgagccctgggaagcaccgactaaagttgctgtcggagcggagtgcgagggggcttgtccatttatccctgagggatttccaaaatgggacgatgcgggggccaaggcctggccttggctatatccgggagtagtagaaaactatatgccgctcatcggtggagctgccgcgagcacaatgcctgagagctgggctccgggcacgtatcgtgctaccccggtgggata

SEQ ID NO: 345775 - DNA, 764 bp, Cannabis indica
ctacatcacacggagacacactaccctttttagatgtcaagtgaggatattccaactcattgaaaacaacatttctagcaatcacaacctttggtctacccttccaagaaatgtagatttcataccccttggtgcctaaggcataacttatgaaggttcccttactaatttaagttctaacttatcaatagattagtgtacataagttgtacactcaaaggttcttaagtgtgttaggtttggagttctgttgtaccacatttcataaggggttttcaagcctataactcagttcaggcttctatttataaggtaggttgcagtttttagagcttccccccaaaatggtttctctaattcaaaactgaacaacaatctaactttttacaatgggatttggctcatcctttcagcaacaccattttgccctagagtcatcactacggttctatgcctagtgatctcatactcttgacacaacatgtcgaattcaaagttaataaactcttacccattgtttgtcctaaggttcttaactttaaggttgatttggttttccacctgagttttccaaattctgaatttctagacactcattcttagttgctagcaaataggtccaaacacacctacggtaatcatcaactatagaaagaaaatatttcttatcggagtgagtaggaactttgtatggccctcaaagatcagcatgcatatattctaatatcttcttacgttgtgtgccttgctggagtgaacttcag

SEQ ID NO: 345776 - DNA, 1275 bp, Cannabis indica
attaaggacgtgggttatgaagtgagggcttatgccggtcatgtcttcttgagaccatacaaaaacatccgtggcgtcccttagtgtctttattattttttctttttcctctggctctagactttttcctagccggaggactttggtggggtcgaggtcgcacactgacacttcctcgacatcctccatggtttctacaattttttcggatcccacacggggatccaaatcgtcttcttccgccatttctggcttaataatttcacggaccattaggacaggtaggtgggcagcaacgttgtaacactacctggcctccccttggttccctctcacggttcctattccagcctcttgagtagggaatttcaggcacaagtgcctaattgacgtgactgcaccaaaatccaccagggccggtcggccgaggattgcattgtaagctgttgggcagtccaccaccacaaatgtgcagtatttgaaagttctttggggtgtgtctaggaacaaagtgactgggagtctcactttttccattgggataagtgttgttccattaaaccctgtgagctgggaaccgtttggtgaaagatctcggtccgtcaggcctattgttgtgaaggcttctttgaataataaattcacagaactctcgttgtcgattaggattctagccacaatcttattggcaatgggagtctctatgaccaaagggtcgtgatgaggaaaacgcactgtcttagcgtcttcttctttgaatgtaatggtctgatccattagccagggcctttgagctgggagttgagtaacctcccaaacctcactgtgcttcacggcccctgcgtaacgcttcagctccttccgggtagttcctccgatgtgaggtcctcctaagatcatggctactcttctgttgggtcttggtggcaggccaggaatttgcttggcatctttggggggagcaactgcggccaatgctccggctacacccccaggtgctccttgaggcaaagctcctgctgcttgaaccggattgaggtgaggcaaccggttcttgatccattcatagagatgtcctaattgaatcaagttttcgatcttgtccttgaggtttttgcattcattggtgttgtgcccaatgtcgttgtggtactcacatcttttactgggatcccttcgagagctatccttgtacagaggaggcggtctccggtagtgcgtattttgcctggtagcgaaatacacacgctcttgggagtccgttagctctgtgta

SEQ ID NO: 345777 - DNA, 547 bp, Cannabis indica
attgtctcagcaaagacgggtactccatcatcacttgttccttcagatttgcttattcctcgaccgaacccggtgttgacagtgtcagcttcagcaatcaccaactcagacttgaatgagcataccaaaaagtttgtgattgaatgcatgaaagacattcttcatttgtcatcttctcctctgaccacatcagacatttcaaaacatcgtgctgacgtgagtatgcaactcgacgtgttgagtactctttgcgggcattataaatgtggtttagcagaggttgcatggttcactgactttgtcaatgatttgctcaaggcccaagaaaagtatcttgcttctgctcaaattattgagaatgcccttagtcttgatgaatctcttatcatggatattcttcgtcgtgataaggataatttggcagctatagatcatttgtccatatctgttactaacaagacaaaggattttgaagattttaaagcaaaggaagcagagattattgcagcggaactagccatacaacaacgacgagctgagttcgaag

SEQ ID NO: 345778 - DNA, 589 bp, Cannabis indica
aatagcagcagtggttcgaatctaaaagttgaacaagacaataatgcatacttaacaagtaacagaagttacaacaacagtactacatattatgatacactcgaagaagatcaagtaacattagcttctcttccttacaatttataataacagtaatgactcaatcttcttttctctgttggagtcacagtcacagccacagtgaaggtcaattttgtagacttgttagatcactagtttttggtcgtgcattgcacgtgtaatgtaacgaatataattaacgatcacatattattattattattattagggtaaatattattttaaaacatgtgttttctaataattattaattaaattatttattttgttaaataataaaatagaccctatattttctaaaatgttacaaataagacattgaactaattttttgtcaaaataaaatttaataataatatgatctaatgttatgacaaaactggttatatttttatgtatttgttcgtgttaggaaatatctttaagtttgttatattaaaaaaaatgtcaaaaattgaacacagggtcctatttttactattttaga

SEQ ID NO: 345779 - DNA, 913 bp, Cannabis indica
agtaaccctgacgtccacctctgccttgattctcacggatgcgcttgctctaccccgagccaccatatgctagggtaactttcctcttctgatcagtagtggaatcaccaccatccctaccataggtaggagtaggaagagtgggggttccaccaacactcagagtaacttggggctcctgaaggaattttaccgcaccctcggcctgcagggccttctcaaccatttccgtatatgatcttgcttcattggcagtgatcacaaaatcatgtctagttttaacattcaaaccggccaggtacttttcttttttgctgaaatcttttggcacaatacccgaggcaagattggccagatggtcgaactttgtggtatatttagtaactgacatcccctcagtttgaactaactcagtgaactatttccgcttagtactgtggactgcttcactgtaatacttagaattgaataactcttggaactcttcccaggtcataacaatgacgtcccaagtgagggacaccaactcccaccacacgagagcgtcttcttgaaactgaaatgtgacacaagttacacgatcattaccaaccactccaatcaaattcaaaattcgctcaatcacagtgagccactgttggaaatattttgccaggatctagatttactaacatgtatgtttcattaacatcctcatatgaatttctaaagcaatgaaataaacacatataaagtttaagaaaccttacattgggtacagcggaatataatgactcctttcgttcagatctctagcccttgattcctttctgtaccagagcattatcaagatctgaacctggatctctttctctctttctttgagcccgattctccttcttgttgattggattcttcacaatcttacacacta

SEQ ID NO: 345780 - DNA, 686 bp, Cannabis indica
attaaaattagtgctaattgcctttactaatccatatactagagcggtcattacagccatcaatcaattatcaatgtggttaaacactatgactcatgtaggaaaattttattttataccatggaacatagggtgagaatcgcacatctatttcactttcgctataatatgtatttttatgttaatatggcatttttactttttcagcaagtaatggatgttgattgtagcaatgacattaggaagagttgtattcttaaacccacttaaatctaaaatcctaccagtcattactgagatgataaagacgtaagtttagaactttaagttgttcattctaatataatcatcaattactgttgactggatttttagccaatagacgcagagtcgtaataaatgagatttaaaccaaaatcacaataataaatgcagctaataacaccaaaatttgcaataaatgtaaatgaaagacacccgaatttaaagaggttcggccccgaatgtcggtaatagcctattccccttgagttttattgatctgagttgcaaaagtcaagaacaggctcttgattgcaaagaatgagaagtgtttattttactaagtgtttcagattccgaatccccctcccaagtcatggatgaccccttatataggggagggggtcggtgcttctcgctttagg

SEQ ID NO: 345781 - DNA, 826 bp, Cannabis indica
tgctcttgtagaaagtgggatctcactggaattccatgtagtcatgcaatagtttccatatggaataaacatggggaactagaaaattatgtaagtaaatggtacacaaaagagtattatttgaaggttgatagacatcgaatatttccaattagaaattaagattagtggcctaaaagtggtaaggttggaatagtgaagcctatttccaaacaaattgacaaagaaataggattgaatgatgattctcattttgaagccattttaaaaccttttgtgtaatacaaagtttgctggtttatgataaacttatatgaccatatgaatttactttatggtagacatttatctagtacatgatttggtattttgtaggcttccgagttttattagaatggttttatgttatggaacttggttgttgttaagttagcttgctgctatgtatattttgagaattgctcatattacagtatatcaaaccagtttctcattatgttatttcagctgccataatcttttgttgatgagcatttctatatcaaaatcataattgaatatgactcaaaatattagagcacatcaataaactcaacaactcatgtttatcatgaaaatgaaaccaaaatacattagaaataacttatagacataattataattgtcttgactttatgataacttaaacaatacaaagaaaaaaaaaagaaccaatgtacaaattccaatttttactagttgcataaaactcaaaatgcttgcaatatcttaattttttttttctgaataaccttctgcagctgtctaacaacatcttcaatttctt

SEQ ID NO: 345782 - DNA, 445 bp, Cannabis indica
tagtgacactatcactgtcggtgatttggggtctcgtgacacatagtatgtaatcaaattgggggtagtgtaccgaagtcactagtttcgtgacgaaatcactaaccgataccgaaatagggttccacttagtggtgccgatgtacaatggcagtagtgacactatcactgtcggtgtttaggggtcccgtgacacatagtatgtaattaagtttggggtagtgtaccggagtcaccaatgtcgtgacgaaatcactaaccgataccgaaatagggtttcatttagtggtgcggatgtacaatggcagtagtgactgttggaaattattttactagaatctagatttagtaccaagtatgtttcattaacaccctaatatgcattctaaaacaatgaaataaacacatataaagtttaagaaacctttcattgggtgcagcggaa

SEQ ID NO: 345783 - DNA, 332 bp, Cannabis indica
aatgatccagatctacctctagcgtcacccaatgccgcgccctatcgaagtagagggccatatatattctctccttattcttccaactagccaagaaatgaccttcatccccttgaatcaaatataatatgccttcatcccactgatagttagcctggtcatcacccgcagcttcccaccgagcaataactcttgctgggaaaatacacggcatgatgacacatctatttgggtagacctctggataaaagtgttgtcgcctcctcatcaaatggaatgccgcatccaaatgctaaaacatgaaaattaaatatgtcaaagattaaataaaa

SEQ ID NO: 345784 - DNA, 631 bp, Cannabis indica
ttcatttaacctaggttctattcttcatcacaaattgtaatttttcacaaacacttagaatcctagactattaggtgaatagtaatcctaagatgacactagattaaagtaaaacttaaattagcagccgtctaaacaagattaaaaaaataatcataacattgaacatagaagaatagaagcaatttgatataatggaaactaaaaattaacattcaataataaaattaagaattcatgtttcgggttttgaaataacccttaactaaaagaaaactactcagaactagacattaataaaaatcatattgtttaatttgtagtttttgaattcccccatttgtagtctaagtggtcttatttatagtaatgggagagttagttgaatcctattagaattaggattctatttatagtggatagataaatcctcttagaattaggattctatttatagtggatagataaatcctcttagaattaggattctatttataatagtattaggaaatatctcggataaagataattcatcttttaaacaaaagataaaaaatcgtaactcttcttgaaaatttatctttattttcgctatcttttttttagaaattttctgctgcaacgactgata

SEQ ID NO: 345785 - DNA, 608 bp, Cannabis indica
gtctttcaaatcgatttaccacacaaaaaatagtgtgggatgtatgtgaaaagtgcatttttgagtagaattattcaagaggaagtgtatgtcaagcaaccttaaggctttgaagatcctcacttcccaaattatgtgtacgaactgaacaaggcatatatggattgaaataagctccacattaaaatgtatacaaaagagacgttttaattaaattggctgtgacatcctaaaaccaaaaaaagaggtggtggaaatggttaagaatgaattgtgatatatcacttgattaacatatttttttagatgaaatatcaatttcattgaataatttagcatgctaaatacaaaagatgtaagagttcaccataaataaaaatattagaaatgctacgatcagattgataccgagaatgtctagcaacataatgtgctactcggtttgctgatcgtctaatgaataataaattaacatttgggagagtagataacaaagttagcagtctttgattaaaagcccgaaagtagacctcattgcttggttgcttcaaatagcttgtagaaacaagactgtccgtgtcaatttgaacatattgccaattattggt

SEQ ID NO: 345786 - DNA, 1822 bp, Cannabis indica
aatattatacttgaattgttgagttttatctcattatcactaccaaattatactttctaaattctggattaatcaacatgattaaataatgacaataattaagaaaaatttaaaacaacttaaaatttttaagaagcacgatcacaaaataggtattgtttggattggcaataattatatttaattatttacttaaagaaattatattttttttgctaaagaaataaattatatattcaattgagaacatttatttattattattagagtaattattattatactaacattaattttatacaattaatctcataatttttttagtgacaatgcacatatatttacaatgacaatcccaattaataatcaacgataaaatttaattagcgcttcaaatttacaaaacaaagtaaactttaagggaattagcataaaaaaatcaagaaattaaatatataagaattaaaatataatgtgtttcaccgccaataactcttagtattagagtattgttattggacactaatgatgtctagcacattctagacgtgtcagtgtgtcaccttgcaattgattagtgatactccctaaaagttatcatgttaaattatatgagagtcgatacttaattataccaatagcgatattgacacgtaagaaagtgttaggcaccactcctgccttttagtatctcttttagagcactgctattgggtactattagtgtctagcaccttctatagatggcgtctcacgattggttagagatattttgtaaaagttattttcttaagttatataagactcgatacttaattacactaatatcagtatgacactgaggaggctgctaccagtggtgcctttagtaattctatttcttttacgagcattgtgcctaacatcttctagacgtgatatcttacaattagttagtgatattctctaaaagttattacattaaattacattaaactcgatacttaattgcaccaatagcgatattaacatgtaggagagtgttagacaccactagtatctttgagtttttttaataaatcatggaattttgttgaagtcaatcaactaaaataatagcttgcaatccaatcgggatatctcccctattggagacacggttaggattaaaattagaaaaaagagtgaaataatcaaccatctgatttcgagatcgttttaacaaaaaaaaaaaattaaatgaaaaaaattgcagtatcccaattaatcttaaaaaaaaacgtatatttttttttcatccaccgctcagaaactacaacagtagaaactgttgcaacatgttcattcaacttcgtaaatttagcactcaattattgtgtaaggtagaccggaccctaggcatagatgggctagacctgtgtgtccatctagcctagaagcctaaaaaaatcttctcttttttttttgaaaaggaattcattcataaacccaaacgattacaaagaaaatggctcctcagctcaaagagcatgacgaacataagggggtgaaatcccaatccacatagcactatctttggataacaaagcttgattggctaaaatgtgagccacataattggcttctctaaaaataaaagacaaacccataacagaggggtgcaaaagcagttctttaatttgaaataacagcccgtcaatgtcccgacatccttcttttgtatctttaatcaattgaaccgctccaagacaatctgtttcaagtgtaaaccgtttcaagcccctctgaatacctgcctgtagtccccctcgaatggccaacagttccgccacaattggagtca

SEQ ID NO: 345787 - DNA, 667 bp, Cannabis indica
aaggagatattatctaagaagaaaaaaatggaggagtatgaaatagtggcattaactgaggagtgtagcgccattctgcaaaagaaactccctcccaaactcagagatccttggagtttcactattccttgtaccattggaagaattgaaggaataaatgtactgtgtgacttgggagccagcattaacttgatgcctttgttagttttcagaagattacagcttggtcagggaaaacctaccacagtaactctacaattggctgatcgatcactagctcatcctaggcgagtcattgaggatgtgttagtcaaggttgacaagttcgccttccctgccgattttattgttctggacatggaagaagataacaatgtcccaatcattcttgggagaccattcttggcaactggccaagctttgatcgatgttcagaagggtgaattgaagctgcaagtagtaggagaagaagttattttcaatgtgttaaaggcgatgacttttccaaaggcaagtgataactgtttctttgttgatctgattgataccattgtgaatgagaaaaagttgatagatgatcctccagaattgagcttaattgaagatgaattgactgagcaagaaggtgttgggttttatgccctaaataaaactctgtttcaatgta

SEQ ID NO: 345788 - DNA, 892 bp, Cannabis indica
ttttttcaaatgacaccaaagagccactacaaaaaagtggacttttagtcacaacaaaaaaaatttagtgactaaatgtatttttttgtcataataatgttttagtataatgtcatttaaaatgaacgtaaattctgattataatgtcatttgtatatttactctatcactactatatcttacatttttaataaatgtcactaaattatagtgattattattattaataataataataaattataagattttttaatatatcatgtcgtattttttggtttgtcatatgtgtttttaagttagtctattcgtacttacgtgtcctgttttttatgtttctcgtattgtgtcgtgcttaagggcatatttttcatatcgtatcatgctaatttatagcatcgtgtcgtatcgtactcaagcttgtatttttttgtgtttggtcatgctcgtggcttctaggctcgtgccgattttgtatcgtgtcaaaaagtcttgacccctgcgtgtgcattggaaaacattacttaagagagatagacagttttggcaaaatccaaaaaaaatccatcttgaatcttcaataatctacttaaaattatttacttttagtttgaaaaattaacaaattttagtaattgtaaaaattaaaaaaattaaaagttatttcttggccgagtggacatgatgtttccatttttttttattattttttatttgtttttagggtaaatttacaaaaatactagaatttagattaattatataaaaaatactgtcacacgaaaaatcttttcaaaaatacggtatttttataaaacaccagtaaaacacaaagcagaacaactcaaaacaacagtagaatacctaaaaataccagtagaacaccagtgaa

SEQ ID NO: 345789 - DNA, 1049 bp, Cannabis indica
gagattgaggattatgaagaagcatccacccttgtttggtcaaaagagcttggttgaactcagttaggcttcgaaatccaagacctccctcctccttaggtctacataacttatcccacgtactccaatggagtttcttatgatcttttgtatctccccaccagaaattagcagccaaggaatggagattctttatgagcttttttggaagacggaagcagctcatggtatagctcggaatagcttgtatcacgactttgattaatatttcctttccggcttgagagaacatcgaagacttccatcctttaagcttgctccaaactttctctttaattacttcaaagacctcttgtttccttctccccacaaaactcggaagccccaagtacttagcatggtttgacacaagccgaacccccagcctattagccaaatcctgccccatgctcacttcagatttctctagatttacttgttgacccgaaagccttgaatattgctgcaagatattcttcatagtatcgcattcagtctcctttgcatcaaggaaaacaaagctgtcatctgcaaagaataaatgcaaaactttgattctatctctcccgaattgaatcccattaattcttccaaccctttcagcttcacgaataaggcaagaaagaccttccgaacaaagaagaaaaagatatagggatagcgagtcaccttggcgaagaccccgggtaggttggaaattcccaattttctcaccattgatgaggaccgagaaggcaacactttccacacatttcatgatttttttctatccactgttcctcgtatcccaaacccctcatcattgttcgtaaaaagttccattccactctatcataggccttggacatatccaacttcaaagccattttccttccattcccaaacctttttgtcctcatacaatggaggctttcaaacccaattattgcattatcttgaatgagcctaccccccacaaaggcactttgttcctccgaaattacttgatgcatacttgtcttcattcggcc

SEQ ID NO: 345790 - DNA, 557 bp, Cannabis indica
caagtttttgttataattgataaattaccccttcttggaaagattttaaaaatactctcaggcacaaaacaaaagagtttttgttggaaagtatgatcagaaaaacgttcatcttttccatatcgaaaaaatacagttttcataaaaattaaaattccatttgtgatatcaaaattatttgggtgtattcgacggtgctctacagtgcagtggggttccaatacagtttgactgggctgttttatcctggggacgactggcaaattctgactgcttgcacactcctagggagtgccacgaacgtcttaaagagagcgatctagtccacgactcaacccaaaaaaatttattcggtaatatcgttcctcttctatttttgctagcagtttattcaacaattttaagacattcgttttgctatgactgctaccgatgaattttctggttctactgctgacattaacaagccttttcattttaagggtttgcactttaaacgttggagatagaagatgttattttttctgaccatgaaaaaagttgcgtttgtgcttact

SEQ ID NO: 345791 - DNA, 1039 bp, Cannabis indica
agcttacaaataatatcataacatgaatgattatgaagcaaaggtatcctgggaaggatgatgatgatcatagtgaggctgagaagataaaggagttggtcaaagagagaaaccaacttattgggaaattcaatttgtcagatttcttttggttttgtaaaaattgggatttgcaaggatttgaggcaagaggaaaaggcttccatgaaaagtttgaatctatgatggagaggataatacaagagtgtgaagaagctaggaatgtgggaagggaagaaatgatattgttaaagacttgcttaacatttttcttgacatatcaaacgatgaatatcacaaattagatatcaaattagggagagataatatcaaggcctttatactggtatgttctttaactcttacacattcctttaaagtcttaaattcaaagaccactttgatttgcaatatctcagattaatctttaagagtgaaaaggtaaaacaccattgtgcaatttaggccttaaattaccattcatacatttgttactatatatttcacatctataggatatatttgtagttgggactggaacaactgccataaatatagagtgggcactatcagagctaataaatcacccaaacattatgaaaaaggcaaaaaaagaaatagatagcatagttgggaaaaccagactagtagaggagtcagacattgtttatcttccatatattcaagctataacaaaagagacattaatactaagagaatcaattgaagattgcaccattcatggttactatattcctaaaaagaccagagtgtatattagctcatgggctattggtagagactccaaatattgggaaaatcctcttgagttcaacccagagaggtttctaagtgaagatgggagtggaaatatcaaccatatggatgttaggggacaaagtttcaatcttttgcaatttgggagtggaagaagagggtgcccaggagcttcttcacttgctttgctgatcattcaaacaagtattgcttgtatgattca

SEQ ID NO: 345792 - DNA, 769 bp, Cannabis indica
ttaaaaaattcctcctaagatcagtaattttttttatggcgagctgcttcgagtgctttcaacgtgctttcaactccaaaagcgttatgttcctgtcaatgttgactgccctttgtgcaactctagtactgaaactattcaacatgcattggtggaatgctcggttgcaaaggctgcttggcatcgcagcatagtggacgtcgggactggggctgcaacgttcagcagctggttgcagggaattttcaccagggggcacgaagttgaaatggaggaagcaacgatggtgacttgggctatttggcgtgcgcggaatgactttgtttggcaaaagaagagttggcttgcttcaaatattgtaacatcagctagaatcttgcttgatcaatacaaatttgctcaggaaaggaaggggctttcgttgtctcctttgaatgatggggggcaaaactgtgagcgttggattgtacctgtgttaaacaagattaaggttaatgttgatggggctttatttaaacaagagggctggtttggaatgggctgtgtagctcgagatcttcatggaaccatggtataagctttcaagaaaggaaaggttgggtatgtacaacccaaaattgccgagatcgtaggcatcaaagaagcgttgagttggattgcgactcatccctgggacaatgtagtgttagaaatggatagcttgatgtgtgtacaagcagtccaaagtaagtttttatgtcctcacagtttctctacaggttgtgtactt

SEQ ID NO: 345793 - DNA, 545 bp, Cannabis indica
caaacgataagtaagaaacctaaccgcggtttcaagagtaattactcgtaacggtaataaccgtttccaaccctaggtcataacctaggcttaataaatatttaatcaaagtcttgataataatcaaggccacttccattcaaccattaatctttaaccacatacggtgcttaccacttttcttaccttagttcagaagtcaagagtacgggccgacctgagtggaaaacaagctaggcgatcccggtcctatgtcacgacaattaaaactcaaatgaataccttaacttgatattttccggattaaaaccctaatttaaaaccgattagacttagccttaaccaactttaaaataactcaaataactcaaaaacattcaaatggcaggtactaggttcaaccccgagtcaaaacattcaaataactttaatctacccctcttccataataatatttttttttaaaaaaaacctaggggcattttggtaatttcattaattcaccaacccgacattttaataaaattctaacttaatcctggata

SEQ ID NO: 345794 - DNA, 415 bp, Cannabis indica
aggatcaacataaggaataatgttctgaaaacattgataaggaaataaacaacacaataacatgaaaacaaagtgaaatatagaaaacaataaacaaaagaaaacatgaaaatttaaaaacataccttacttacttcagaccttttcctttttttaacataaacaattgtatcaggggtcttatccattgtataaaacctaaaacaaaacaaagtatacagagaaacaaaacaagttaataagtgcacattaaaaactaacaccaaatatataaccaataaattgttactgccaacccacataaaatacaaaaataaaaattaaactgccacatcggggcaaaaaaggagtaaaaacagtaaccacccccactaaatactctaaccaatgaaaataaatgtaaagcccgcttagt

SEQ ID NO: 345795 - DNA, 1276 bp, Cannabis indica
aatacccctagagtttaataaaatcttcgaaattgagaattacaactctaatatttacttttaaatattggggtccaaaataattaaattcataaataataataaaataatagaaattagtgctaattgccttttctaatccaatttactaaggcggtcattacatgtatagtctcgaattaacttatcagcttgattattactcagcaccgaacctgcccgaataatttttatatggattctggttcttttatgcactttagaaccttatagggtgttataaaaatccagaaaagcttttgtgactccctcttagttatccctctaattgttggaatatattttacctagatctagatttactaacaagtatgtttattaacatcctaaatatgaatttctaaaacaatgaaatttaaacacatataaagttgagaaaccttacattgattgcagcggaataatatgactcctcccactcagatctcttactcttgttcctttttctcacagagtattatcaagatctgagcccgattgtccttcaggttgttgaattcttcacagtcttacacactattattgagtagtagaactactatgggtgggcatgcactcactcactataggctcaaaaattgatgaagaacaatgaatgggattcgaaatagaggaaggaagaaggtggtctcaaaactctctagttgtttgacagaatgtaaactaggttatgagagattagttggataatgagaccatcttattcgtttatactatttcacttagggttaggattaaattatatagagtaaaaaataataaaataatagcaaaaataaaccttaagtggccggccatatagatggaccccgctagttataatattgccattttttttcaactgtttatcttttatttcacaaatgccatattttccaattttaatcctataaatgccaaaactatttatttaatcattataattaattatcaaataaaattatcatatatatattatttattaattagactctcttaattaacaaataaaccttaaatttacttttcttcacaattatgttattacttagtgaaaattcataaataagacagtctaattttagaattataatcgattaattaaaattaattaactgagtagtagtattgtctcaactagtatggggaccatgggccaatataatcaagcttccaataaatagctttagaatttaccaagtaaattctctaacctattaattcctccttgcaccac

SEQ ID NO: 345796 - DNA, 693 bp, Cannabis indica
gagggctaactagattacttgaaacatggttgagaattttcacctaatattgtttcagtctcatcctatgaagatttacatatctgcgttgtgaacattgacaaaaatatccaactaaagtcaaatttttgtttattgtttattgttttttttttgtttttatcagtagagatctcaaaaccagtgtctacagttcttgaacagggtgaactgtcacaaaagtaagagtctgtttatccatgtatacaatataaataccttgacaaacagcttgatcaaacggccaattatcttctttgtgaacagtgagaattatgtgtagcctaacatagggaggtccataacaaagattccattaatgtcaattttgtttagtgagcctggaagtggaccattgaatagctgagatggtgtcaatgcttgcagtgatggggatgtttcttgcttttatttttataattgagataaatatttctcagtatgatggggaatgatttgatgaagtgttggaaaatggaaaaggaagaagttgggaaatgctcattgggatcttcggttccctatactcatcactattcaaatcattatgtttttggatacatatttttggacactaccaacatgttaattttttttttatttttatttttctaatttttactattactaaattttagttttttttattttttt

SEQ ID NO: 345797 - DNA, 767 bp, Cannabis indica
taacttttaagtcttgtaaaaattgatattgttaggtgtgtttttctaattaatttttcatgtttgttgttgaaaaaggaagaattaaattgatagaaaaagaaaaggaagcaaggaagaagtgggaatcaaagctgaaattggggcagaatgttgaagcaatgctgaatcacgagatttagctgtccacatcagcaggagtgtatttgtcactaaaatgagaccagctggaagctttgtaaagggaggactaaacctagtgggccaaagggcaaaaagaatcgggcttctaattttagcgtgtgatttttttaccctagggacccaacaactaaaagaagaaaaaaaactaagtacaccatcttcttctctatcacgtaatgagctgcaatttttggaaggggaagtaaatgcagaaaaagtacagcagaggaggaagaaaaggggaccaagctttagtgtttgattttttttttaccctctcttaatagttttctttctctttctcttttcttgttatttgtactcagttattaaaaacttgataagttgtaacaagggcagcagctatggaagatacaattttagattggattttagtttttgatttgaatatgagctagacttttgaggcttgaatggctataaacttctatgttgggtatgattaatttttaagcttactttagcattttggcctttgttcattcacgtgagtttcattttatttgattgttgcttcttggccattaataacaatttgctaa

SEQ ID NO: 345798 - DNA, 1587 bp, Cannabis indica
taagaacatatttaaatcatcaagctttcttaaacactaatatattgcattccgtattcacttttaattgacaatattataaactataatatttagatacacattgtaacaccctaactagcataggcgtgtttacgtgatttttaaacgtactgtgcagctcgttgctaatcaacgagatttatggaaaatgtgattaaataaatttttactttttaattaaatactcataatatttcatacaaaatactttgggatcccatttacaaaatactttacaaaaagttcactgtctatcacaaaatacttgtcgcccaacgactaactacagaagccctgatgtcccgaggatcgtacgctccaggcctaaccaccgtgacatgtacaatatttattggctcgtcctcacggtttctcagctttggccttgcccttacctacacatagacatagcactgtaagtcgacagactcagtaagaaaagcataaatcataaaacatacataaatcccgggttatgatcagacgcccatacccctgaccacaaccctaatccccgtgtcccacacggtactaagtctcgaacgttcgtacgacggtacttttgacagagtaacagcctatactcggtacactggtcatactccagccgctagtcatactttagccttaccgatgtgttacagtatcaacatatactcggtatgctagtcatactctagccttaccaatgtgatacagtcaaacagtacagtaccatcgaccataatatcagcctatactcggtacgctagtcatactctagccgtaccgatgtgatactgtcggatggtacgaagccaacatacatatctaatgtaatctaacagacttcctaacatgcacgcttaacatgtaaatacatatgcattctgttatactaatcttacctcgattccgaattcaggtgtgccggtcaacctgagtggaacgaactgctcgacgaattacaggctcctaaaccataataatcacaacactgataagtgacacgctaaatcacttctcggggacttaaactggaaactaaaaatttccctatcgataaaaagcatggaaataccctaaacaacacaaaaatgggaagaactagggttcctaatttttccccaaccggcacaccggttctacaaccagaattccggttctgggaggaacccaaaacaccaaccggaacaggcgatactgaacctaaattccggttcagtgcaagaaaattaaaaaacttcataactcgaccaaataaaccccaaactaattcaaactttccagacctgctctaaataccccaaataataattccaaagcaataaaaccacccagtaagcacaaatacaaaaaatgccattaaagctccaagctttgagttcaaaactcaagcttggctaaactccacaaacatgcatcaaaaccagcttgaatctactcaaatatacataaccaaacctctgaaaacaacagcaaacaaataccacaagcacaacaagctatttcaacatttcaccattaaaatcaagattttgagtcaaaattccaaacttgaacaaa

SEQ ID NO: 345799 - DNA, 663 bp, Cannabis indica
tttcttgtagaagttaagggaagcgattggggaggttgtaaacttagtgtttatatcggttaggcatcaaagcattgagcatgttgtcgaggttattttccccaaagcatgtcactatgcatgctacaaacatatttctatgattgtcacctacaagttcaagagtgatgtatgtaacacgcaaatatggtcggtcgcttacgcatggtcgaagagggattgtgatagacatttgcaggtgcttcgacatggatcttgccatcgctgcttatgttgagagtatatgattagaaaagtgggttcgtccttattgtctaggagacaggtacagcatcatgacaaacaacgctgcagaaagcctcaagaacgtgacagaagaattccgggcatacccaaaaactactctagttgagttcataaggttcacactacaaaattggtttgctaaccgcctcaaaaagtcaagtaagtgcgttacccctttggaaactcattttgaggaagatttgataaagcaacacaaggatggtagacgtagaagtgtcctacgtacggtgcacaattgtttaacgttgaaagaggttatgacggttctgactttgagaaaggtggtgatgtgaacttagttgagagaacatgcacatgcggcatgttccaattgtt

SEQ ID NO: 345800 - DNA, 556 bp, Cannabis indica
tgactgaagatatagaaagtgtaaatatggcaacctagtcgttggccccgtacaagaagcccgaacccataaaaaaggtaccaacgaaagggaaatgacaaagttttgtcggttccacggagactacaaccatgacactaacgaatgctacaacagaagtatgtcaagactaaccaaggtcaggacaaccaagatttgctacctccaccggtagatggacacttacaagtcattattggaggccctcacattgttggagattcgggcaaagctcgggagaggtatgcccgaacagtgcaacacgagcaagaagaaatcatcctcgccgtggaagaaaggaagcccaaagttccacgagcaggagagccaaccataacctttaacgatcaagacgctgtcaagattagatttccgcacaacgacccgttggtcgtggaagtccagatagccaataaaatggtggccagaaccatgatcgacaatggagcttcttccaacatcttgttcaagactgcttacgaaaagatgggactccaactcaaggatctaactccat

SEQ ID NO: 345801 - DNA, 515 bp, Cannabis indica
ctccttgcggcaaagctccagccacctaacctggattgagatggggcaaccgatttttgatccattcgtagaggtatcccaatcagaccaagttttcaatctcgtccttgagatttttgcattcattggtgctgtgcccaatgtcattgtgttactcgcatctcttattggaatccctttgggagctatctttgtacaggggaggcgatctccggtagtgcgtattttgcatagtagcaaaatatacatgttcttaggagtccgttaactccgtgtactgggtatattggggagtatacccccttttctatcgcttatcctccgtccgggtgctgcccttggaggaccttttactccttgagcccagggaaggaccagctaaacttgcagtcggagcggagtgtaagggggcttgtccaattatccctgagggatttccaaaatgggaagatgcgggggctaaggtctggccttggctatgtccgggagtaggagaaaactgtatgtcgctcatc

SEQ ID NO: 345802 - DNA, 1199 bp, Cannabis indica
attaattttttaaaattaattaataattgtaaatatcaaccatagatttaatgtaatggccaataataaaatacccatttataggtaatacccatttagagcatacacatctaataatatatttaattcaataattaaaaaataattaattaatttaatttaaattatttttataataaaataatcaaacaaaattaacatgggctttaatatgtcaccctacacgtgtgggccatattttacggtccaaaattaatttatcaattttactacaaataaatttttttatttattttgccaataaataattattaattaattctcattaatctcttattttacaaggattaaaataaatattattttcactaaaataatatatttttttccttaagaataatattacatttaacgaattaatatacttttatcaaataaaattagatagtaaatactatttaattatacaatttataattttcataattattaaaataataatttctattaattactattttgccctttaagaatttatttatcatagaattaattctcactcaaatttacacatcaaataaaaccttctcctgtacagtgttgtatagagatgacttgggaaccctgaacctatattttgaagttccaataaacacttgattattatcaatctcatcaatagaataatcaagtttatctattccattattactctactataaatatggaattggactctttgacaatacataattatatttacagaatgtaatcaatataagtagtcgccttccaattattaattcataattagagttagtcaaaattaccattttacctttctaattatctcgtgactccttatgtactattaattcaatgtgaacagttaatctataacttatgatagatttaaatccaattgttagcattcccagaattaacaatataagagaattattattcgatctgttaggaaagctggaattccattattgtataatatgttcccatgcactcttgttattaagctctcaaaacaaaagttgcaagaatcatcttctctgaaaaactttaatgagtgaatcaaataactcaatgaacataaataggagttatttatactcaggattcagattgatctactaatgatcatcgttgtgatatgaataattttttcatggtaaacgacacattaa

SEQ ID NO: 345803 - DNA, 730 bp, Cannabis indica
tgtcatgggaagaaataaggatgccatcttggggttttcaaaagacaagatgaagaagcgcattcaaagctgggagggtcgtttcttgtctaccgttgggcgtgaagttctattaaaaactgtagcacaagctttgccaagttttgctatgtctgtgttcttattgcctttgaaaacatgttcacatctggaaagccttatgtctaagtattggtggagttcgggcggtaggaaaggggttagcttgtttagttggaggaaactatgcaaaactaagaactctggagggatgggttttcggagtttgcgtgagtataatctgtctttgttgggtaagcaaggttggcggttagtgctgtttcaggactctcttgtgcgccggatatataaggctcgatattttcttaactgtacattcctggaggccgagttgggttgcattctgagctttatatggcgtagtgtctttaagtcacaaactcctctcaaagatggtgctcgtaagagaataggacttggttcatctactaaggtgcttaacacgccttagcttttgtctgaggataactcgtgtgtggtctctaatcattcgacactgaccaattgtaaagtgtctcaactcatgaagccaggtagtagacaatcggacttggagcttattgaggacttgtttgattcccgtgatgttgagctcatcaaataggcgcctttgagtgttaatcttgcgagt

SEQ ID NO: 345804 - DNA, 506 bp, Cannabis indica
tagaactttgagaattacagcaaagaaatccccctttccttgcaaagcttggtgattcaaaagagaaggagagaaagacttaggaaaagtctaggtttttcctcaattttctattttagccattaggttccttctttctttttcttttaaataatattaaacctatattcagcatatatcaccaaaataagacaaaacaaggctaaactcaaaaagactactttacccctctagctatttactaattagctactaacccaagggtaatttggtcattctagacccgaccattcaatacataacacaaaaccccgagctaataacatagattaaaatatacaatatgactctctaaaggcccaacgccgctttccacagcttccgaacacaatcacagtaattgagaaatttacataaatagcataataaatatatacgaactcaaataaattcacataattgtattattatcaataataataaaatctcatgcataaaccctaatt

SEQ ID NO: 345805 - DNA, 729 bp, Cannabis indica
agggcataagaagctccgtgaaggcagcttaagatccaggtgataaatttagaagggaagcgaagagcttttaacatgtcagccacaaagcaccagtctaccgtatcataagccttgctcaaatcaatcttcataagacatctagaagaaatggtcttcctagtgtatccttttaaaagatcctgcaaaatcaagacgttatgagctaaaagtctcttcttgacaaaagcaccttggttttcatgaataaggaacgggagaacttccgagagtctggtacaaatcatttttgaaatgcatttgtaagtagtggtgcagcaggctattggtctgtagtcagtagctccttgagggttatcaatcttcggtataagagatatggttgttgcactcacttcctgaggaagcttaccagtttgaaaaaatcccaacaccgcacaagagaagtcatccccaatatcattccaaagctctctgaaaaaacccgaaccaaacccatccggccccggacttttggtcgagtgaatcccaaacaaagcttctttcacatcctttttgctgaaaggacgaattagactcacttgatgttcgagagtaagcttttgcccaaactcgaggcattcctcatccattcgtctagaagccgagctttgcctccccatgaagttgcgaaagtggtttaaaaaatgctcaaccactttgtcatactcatcaacaacaactccattg

SEQ ID NO: 345806 - DNA, 895 bp, Cannabis indica
cagagtattaaaagatctgaacatggatcttcttaagtgatgaaattattcacaatcttccacactatgattgagtactgacttgatatgagtgggaaatgtaatcttcactatagggctcaaattctaagaagaagaaaggagaggattttgaaatttaagagaggctctctttattttcaattatttaacagaatagtctaatgaaggttatcaggttatgagcctatcattatatatgtataggattccttcaagggttaggatttaaattatatagaatttaaaaagataaaataatggttgaaaatccctaaagtggttgtccatacaagtggaacccacaagtttcaattttgccattaatttaataacttacattttcttcacaaatggcatatttcaatgtcaatcctataaatgtcaaatttatttatttaataattataattaatcatcaaataaaattgttgtttaacttatttattaataagaccttacaaagtctcttaatcaacaaataaaccctaattccctctttcttcttaattaagtcattgcttagtaaaaatttataagtatgacatagtctaatttagaatttgagatagttaattaaaactaattaactgagtctacaagctaatattatctcaactagtgcggggaccatgggcctatataatcaagctcccaataagcagatttgaaatttacttacttattaatttctctggactccactataaattcagaattgtactcctgattacataaaatgctctatatgttccaaatataggtacactattaattatctattgttatgattcaaataatcaaagatcctctatagatgatttacatcgagtagggacaaatttgttgttctacc

SEQ ID NO: 345807 - DNA, 547 bp, Cannabis indica
aaatttagactttctagcattaatgcaaatttagagatctgagtcagtgtagcctaaagtgttttgaaaacatcacccttatgaactaacatataggtcctctttgatcttaagatttacttgattgtcttccaatgtcctatctggattaaagtgatacctactcataactcccactcaacagcaggtgtctggtctaatgcatgtcagagcatacatgagacctcttactgttgatgtttaaggaattctttcctcgacctttatcttttttagaatagttgaaactgtttattcgataaataaactctatctctagaagtcaaaagacttcctttagagttagccattagaaaaatgatctagtatcttactaaagtaagttgcttgcactagagtaagtaaattaccaggtataccacaagctataggtttagatgatctcaaacctatgatactaggatcaggaagttttgttaagtacattgaatagacttattatcagaatttctcctcttgtccttgtaatagaaaacttttagttgct

SEQ ID NO: 345808 - DNA, 625 bp, Cannabis indica
taacattctcgagtagattgctgattccctctaagacaacctctccccgtttttggttgggaacttcaagcacgagtgaaatattgatgtgacagcttttaagtcatacaaggctggtcggcctagcattacgttgaaggctgaaggaacatccaatatcaggaattgtgccatgatagttatgctcgttggagcttgtccaactgtgaggggtagccggatttgtcctagaggtgcaactccttggctggagaaaccatagacgggctgaaggcatggagttaaatccttgagctggagccccatcttctcgtaagcagtcttaaacagaatgtttgaagaagccctattatcgatcatggttctggccaccattttgtttgctatctggacttccacgaccagcgggtcgttgtgcggaaatcttatctggacaacatcttcgtcgttgaatgttatggttggctctcctgggcgtggaactttgggcttcttctcttctacagcttggatgaattcttcttgctcgtactgggctgttcgggcatatctttctcaagctttgcccgtgtcttcagcgatgtgcgggcctccaatgatgacttgcaaaagtccatctattggt

SEQ ID NO: 345809 - DNA, 1629 bp, Cannabis indica
gaatctacgtcatctatgtggagtttggtgcataaaattagactcgtgaaggggtttaaatataagaaaattgaatgtggtttctttccatcctgataatggcaacatgatatttttactacgtgattcttatatcattgaccaatatgacatgttgacgaataacacctcaaaaattcgccattttccatttatacatatgttattaaacaagctaatcactaggaaattgcaagttcacacccttttgcatcctctatttccaacaccactcccttctcttgcagcctagaagtattttttattatatttataatttactacctaatgtgtatacactttatttgatatttaatggaatttatttaaggatgttaaaagtacgtttcaacattttgttcatttttcagtatactagttaggagtgtaaatgggtcgggtcggatctaatccggctatgattcaacctgatccaaatcatgtaaggatctgccccgctctgtcccgcttgatcagatactcgaatcggatcagatcccaccttactattttttttttgaagaatttaagattaacttataattttatatatattttaattttgtattagtattattaaatacaatactatgtttggtattgacatatattaatagattgtgtaaagatctgaatctgggttcgagaccatgtctcgtccagatccgggttcgagtcccgtgtcccaggtccgggttcgggttcgagtctgggttcggtccgagtccgggtctgggtctcggtccgggtgcaagtttgggtcagggtccgggtccgaggtccgggtctaggtccgagtctaggtccgagtcccgcgtcagggttcgggtccgggtcccgcgtcagggtccgggtcctggtcccgggtctgagtcccggttttgggcctgggtctcaggtacgggtccgggtaagggtccgggtcccaggtcccgggtcccgggtcccgatctgggtccgagtctaggtccgggtccgagtccaggtcccaaaggatccgagtcttgggtccgagtcttgaattaagttttttttaaaaaaaataaattgaaatcaagtcggatcagatccgatccagaaaaaaattaggcggggcggagcggattttgatctaagatccaataagtatctgaatgtttcagatcagaggtgattcgtcggatcgaagctccaatccgctccaactaaatggatctctttgacatgcctaatactagttggggtctaacatgattcgcacgtgagctcgtagttcaaatatattttttaaaaaaattgtaacatgtcgattttatgtcttggtctttattttattttttggtattttctagaagtaaataatagcttaataatagtaaattaagagtctggttgttaaaaatttatacagaggctaactatgttagatacctctcaaaatgttatattgttattgatacaattaaatatcatattcaacatgatttaatataaattatattataatttttttcgttagatttatttaatataataattattatagaatatcgttaacaattcttatgatgtcaccttatagtggtgttagacattattagtgcctaatgt

SEQ ID NO: 345810 - DNA, 923 bp, Cannabis indica
cgtgcacttgcgtagcaattaataattttcgcaacacctttaccttgagagttatttgtatgccaccaaaatttagtaattgaccgttccagatccttagtcacctccataggaagaagaaagacactcatagcaaaagttgggagagattgcactactgtttttatgagtacttcctttccagctcgagatagtaattttccatcccaattctgaattctctttctgattttatcctttagaaaacccagaatcaatgttttgttgcgacccaaagtgttaggaagaccaagataagtactatgttcatctgcttcaaccatttgaagagtatggcataggagttgtcgtacatgccctccaacatttgtgggattgttttttaagccaaaaatgttagactagaaatgtttttctagtccaataatattagactagaaaaatacaccttttatgtcctagactattatgtacaatgcaaatagactcgaataatttatctagtccaactttgatggacataaaatggtatttttgtagtcgtgattattttttaataaaaaactgaagctaaaaactaaaaattaggatatatattaaataataatgtgtgaaatcataattatagtatttttaaagagtgctatacattggagtgttttttaaagtaaaagtgttaaaaatcgaccattacaataaatcaaacttcaggcgacaacccacttaaatcattaaattgatgttgtggtattttttaacttttgtacttccgaatactcgtggaacgttttcattacgctcgttttcgtcaacaaaagcatcatttcaccatcagagtaataatatgggtaaatggcggcaaaacccccaatactttcgttttggtttcactaaactcccaaaacctaaatttgtgcgggtaa

SEQ ID NO: 345811 - DNA, 2194 bp, Cannabis indica
taaagacaaaataataataataataataataataatatattctgaaataaaaataattttttttagaaattaaaaataatttaaacaaacaaaataagcacactcttaaatactaatatttgctgaggtcttgacatatttacgtatatacaacattaaaataaaacttattatatgtataaattaaataatgcacagtgaaatgaatgaaaaaaaagagatcttcacacaaacacatggatgttatatatatatatatatatatatatgagtactgttatactcgaaattcggctactatctcaatggaggacacgtgtcaagataaaggaaatatggactgatgaaatcacttttaatgctataactcattaattgcataagtagcagagcatactggcaactcgctgactataaggtcttatacgaggaaaagatatgcaaactgttgtttggtatattaatgagaaaccatatgtcactgaatgcataaagcgaggcatcaactacgttatatctcggaagacgaaagcggggcatatcgactgtgaaaacacttagcaaataatgtacaaactaagtatagcagtcgggttggctcgagacctaataagcgaggtgcctatctcgctataggaaggctcattcatataacttccctaagttaacttcaaacatcttctcagcgagacttaccatcttgacgagtcagaagataatattcaagtgagcctcgagaaactctctgttaataaaaactgcgattgtcacaaataaagcattaagctttcaaacaaagaagcaacaaggcgtacattgtcgacctcagaaggataaaaaaaggcttcagctcgctttcacggtcattggaaccaaactcctgtcgagacatccctgaacgttacagttaaagacgtgttttaaatacacgagtgggaaaatcacaactatatgattttcaaataaaaactgcatttacactacgtgatatgtaatcaaaccccatgatttcaggggataatcattgtaaaaggattacggtcaactttatgattcacgccaactatgtaattataactagtggcaagtaagatcaaaaaaggagacaaaaaaatgatacaaaagaggccctgaaaaactatcagaaatctaataagattgactcgtgaactatgcaggattttaactgcaaaaccacgtaaaaaatcttgtgtgttcatactttttatttttcaaatttttttttttctacgtgagattgtcactattacgctcaaatttagttaacgaaaatctgcgttaacagtttggtactttcattgagaacctttgtgaaaaagctcagaaaaaaccctccttttttttgaacaaaaaactacctccttcatggctaaaaacccaaaaaatattaatacctcacatgaggaaactcatcatcatcctgggaaagagcccatgggctccagaaggtctaccaacccacagtccaaacgaccaaccgttccaagaggactcaacctaagggtggccccagcactcggaccacacgttcccggaagacccaacctgacgttggtcatagtacgcgaacaacgcgctcgaggagagctcagcgtgggaatgaccataagcctggaatgagggatgaagagcccaatcgtggaggtaccgaggctatgggagaagatacgtatgaaacggaaaattgccgccttaggcgccatctagaagaggcacagcggcggaacgctgaattagagcgtgatgcagccgcggttagggtggcacaggggactaacgctcaaaatcaacttgaacctggagtgagaagaccacgaggtaggtctcgtgactcacgaaccaggagacaggaaaatacctgggaagagcaaccagggaaaatgagatacctcctaaaaatcagaatgatcagccagaattctctcacagaaatgacaatgggaggcaactagaaactgatgaacaagaaatatctcatgaaaatgaggaggatcttgggactcaacttggagaacgaaggtcacctgcgagaaatcaccaatgttcttcacgaacccatagagcgagggctcgtacagaccctaatgggggaaatacgacaaaccacactcaaggggaaagaacagagcgtgaagaagcaagtgtgacctcaagggagtcaaggacccacagt

SEQ ID NO: 345812 - DNA, 554 bp, Cannabis indica
atataaatttttatttgcgataataatggtactctaaaaccatatatatatattctattattgttgtatgatcataattttcatatcagatgatcatatatctataattcttgatgtatatgaaacgcttttagacttcttttctaatacttatgaacaaactacacacatttaaaattcatcaatatacaaaataaaaaaaaatttcttcaacatttataatataattaaaaaatcttcaagagtatcacaacgtataatttatgaattcatattgcatagataatcatatgtattttttaaataataatttacttacatgtctttgtttcatacatagatctttgtcatatagtgcacacgacttttaatttatatcacttaagacatgtattaaatttttctaaaaattttaaataaagcatattttaaattctcaatataataggagctccaaataaataacttttgttgcaacatttatgtgacgcttataaatcctcataaaatatattccaagctataatcaaatcatgattatattttctcaatat

SEQ ID NO: 345813 - DNA, 645 bp, Cannabis indica
ccacatctcttttcatcccataccaccagaagtaacgtttcaaatcctaatacattttggtggttcccggttgcaatgaataaggtgtggtatgagctttatcaagtatctctttcttaagcttatcaacattaggaacacaaactcgagctttgtataacaacattccactattcgagactgaaaagtccctaggccaaccagccataactttgtcccgaactttaactagctcgagatcttccagttgcgcctttctgattctttctaataaatcagattgaagtatcaaattgtgcaacttccgaactacgaactcaatccctgcactaaccatttcagaggctagttgaggggctatcatcatcgtggtgcaaacctgcccgggaccttttctgcttaaagcatcaacattggccttccctgggtgatgtagaatttcacagccgtagtctttaaccaattccaaccaccttttctgcctcatattcaaatccttctgggtgaaaaagtatttgagactcttatgatcagtataaatctcgcacttctcacagtaaagataatgtcaccatatctttagagcaaaaaccactgcagcaagctctaaatcatgagttggatagcgctgctcataatctttca

SEQ ID NO: 345814 - DNA, 530 bp, Cannabis indica
ctacgtacgtgcgaatatccgcattttatgaattggattagatttcatcgtgcggattaaattagatcaaattcattctgaacaaccctaaatgcaatgtcttttctctactcaattaaaattatataaaatggcccgtttaattttttcttagaaaatttatagaggaaattacactcgatatctactttttatttcttattttaatttttacctttattttattattatttaatttatacacagttttataggttatatccccttatgttcattaaaaactttacttttaataagttatgtaagattatatttagtactttgattataaaagagagtttatcaattaatatattctagagttatatttagttaatttgtaataaaaaagatagtttttaatcatttatatatataataaattactttaaacaattttatattactttatttctttgtaaatagtgctgcagaatactccaaaagattaagagagagagagagagagagagagagagagagagagagag

SEQ ID NO: 345815 - DNA, 668 bp, Cannabis indica
gaaatggttagtgaagttttataataatcattcaattaaaatgtatatgatttgatatttaactatcttactatgggttagttaggattttgtctatcgaattttaatatgtattaaattatattactaaattttttaggtagttaaaattattttttgaattttgacatgtacaatatcatatcctcaaacttctcatttcactaaaaattctcttcaaatattaagattgttagatttaaagacttctattcaattttattaatatgtcgattgtccatgtactaaattgtacctccaaaatttaatatctatcaaattgtattcctaaactttcagcttttatacaaaaaatttcaatttaaatatcttattaatacaattcaagatggtgctacaaaatttttgtgttgtacaatatttttctaaaattatgcattttgtataaaatttcgtacactatttagactatttcgagtcacaaagtcacaagattgatcaataattattatagcatttcgattattcttgaatgattccaaatggccagttcaattgtgaggaaatctttttcgttagctaatcactttagtacttatacctttcaatttgatgcaactaatcactttctctaatttactagaaattgaagttgattagggttttat

SEQ ID NO: 345816 - DNA, 1171 bp, Cannabis indica
aaactaggttttgaagcattagttggataatgagatattttttttctttttatactaattcacttagggttaggattgaattatttggaataaaaaaatgacaaaataatagcaaaaataggagcatagtggtcggccatatgtgggcccaacactagttagatttttactatttttcgcaaccatttatctatttttcacaaataccatattttgcaatttcaatcctataaatgccaaaactgtttatttaataattaaaattaattatcaaataaaattttcattcatattatttattaattagacaaaacaaagtctcttaattaataaataaaccctaaaatcttatttcttcacaaatcaagccatatcttagtgaaaattcataaactagacatagtttaattttagaattataattgattgattaaaatcaattaactgagtcttacaagcagtttgtctcaaccagtatggggaccatgggcctatataaccgagcttccaataagcagatctagaatttaccaagtaaattctctaatttatcaattcctcctttcactactatagctttggaattgcactctcaattatatagaacattctatatgtttcacgatatagataagctatgagattatccatttgttataattctaatgatcaataatcctctatagatgatctacattgagtagggacaaatttacccttacactcttcaatatattttatccttaaaacacgtagctacctataaatgatatttcagtgaactaatataatcattaaaatgagtactcaaccatttatctttattaagccaagctcgaaggaaatcatcatttaacttctatatcaaatagaagctatagattctatatctatgattagcgctcctactcaattgaactaccatgtctgtaatctatatgtcatgagaagaatcatttggtcgactttaatgaacagatttaagaacacaaatgatgcaacaaaactagaacctaaccatcttaggattgagatcatttgatctaagatcaactaggtgatcttgaattgaatatatattacaataagtttattatatctaattcaagttcaatatcggtccctttcgatgcatactccatacatctaatccaagcttactttaaccaat

SEQ ID NO: 345817 - DNA, 892 bp, Cannabis indica
atgaaaattaattagacattaaatatagtgcctaaacttaaaataaaaattacaaaaataaatttcttaaatatattgccacaaattaaataaattttaaaatattatcttttgaacataaataaataatgtgggattagaatcactaacttacatttgagtcttttttttaattgttgttaactaacaacataaacacaacacacaaacaacattaatacatgcttaaacaactaaataacaacaaacaaacaaaaggataagaaactcctatcaaaatatagcatcaaactcaaaataaaaatataaaacaacaaaaataaacttcttacatatattgccacaaatcaaatgaatttaaaatgttatcttttgaatacataaataaataataaaattggacagcacacaaacaattttaatacatgactctacaacaacaaacaaacattaggataacaactcctctttaatatgccaattcaaacatcaacatacaaataataataaattaaaatcaacacatcaataatcctaaaaaaaaaagaaacataaagctaattataaaaaaattatttaaaaaatggtaaaatattaaaaagaataatactattggttggtcaacattcaaaatataatattaaattagtcaaatataaatttaatataatattgttaaaaaaaatagcctttagttaacacccatgtcactttcaacattgatatacgttttttatttttatattataatctgacaatgagaatgacataaactgaaaaaaaaaactttccaacgcgcaacctgacgtgttctccccacactagatgcaagtggagtctatgcgcatcagtagttgtctcctaataaactaacgaccatataaatgtaaaa

SEQ ID NO: 345818 - DNA, 446 bp, Cannabis indica
tccttggccggagaaaccatacacgggcagaagataggggttatatctttgagctgaagccccatcttttcataggtggtcttgaagaagatgttggaagagggtccattatctatcatagttctggccaccatgtttttggctatctggacctccacgaccaacgggtcgttgtgtgaaaatcttattttgacagcatctttgtctttaaatgtaattgtgggcgctcctgcccgtgggattttcggtttcctttcttctacggccaggatcacttcttcttgctcgttttgtactgttcgggcatacctctcacgggctttgcctgaatctccagctatgtgtgggcctccaatgatgacttacaaatgtccatctaccagtggaggtagcaactcttggttattattgcccctctgattttgatcacagttgacatacctttg

SEQ ID NO: 345819 - DNA, 1164 bp, Cannabis indica
gtttgttacaactctagaccgttgttttagggggagttgtcttgtttgtggtttgtgaacttttccgtttaaaaatttgtcttgtttgtggtttgtaaacttttatgtttaaaaagttatttttttatgtgttagagtgcgttcatataggggaagtattttctatactctattgtttttttttctaacacttgatgtaggttttctccaaataaaatggtttttcaatgaaagtgccaaagagagagattgttatttctatttttggcatccttaattgacaaaaatagtttattcatttattattaattttggctatggtgttaatattggttttcatattttgtgtatttaacttttatattaatcaatctatctttggaaggaaagttgtctagctttcctatctatggaaattaaggtaaaaatggtaagtttggttactcaattctttcctatctaaggagctgtgatattttgatcttgtgtgagtttcccatttccttatattagattttttgaggagaaaactggagctaaactttcctttctataaaaggaaagtcacatttactgctcatgattttgtaagtatagaaatgcaaattcctgggctgattgaagatccattttggggaattttctagtgcgttgtgatctagttcagaccgtatgtgagctatcaataaggtgttattgattataaatacaccttatagtacgtaggtcttctatcactttcatacactttgaattgtattcatatcttatggaaagagtgtctttgttttgtagagaagagattgttggactcttactctgtttatttgtatttttcattatctagagtatgtattcaagtccacaaagaagaggaacaacagtgttaccttcaggagaaggttttacaaaggttttgggagattgattttcaagtcttgcatcaggaggaagcaagcactcttcaagaagatcgaagggagttcgagctcttgagttttcaacaaggttttgttagaatgttgaatacatcaagcttgaagcatacaataagagggagtctatttatgtatgagttaattactttgtatttttcagacctatctaatgaatcttatctctgggcgtggcctcgtggactagtaacaatctgaaaggattgtt

SEQ ID NO: 345820 - DNA, 513 bp, Cannabis indica
atcttgtgtgagcttcccattttgttatattagatttcttgaggaaaaaactggagcgaaactttcctttctataaaaggaaagtcacatttactgctcatgattttgcaggtatagaaataaaaattccttggctgatcaaagatccattttggggaattttctagtgcattgtgatcttgttcagaccgtgtgtgagctatcaataaggtgtatattgattataaatacaccttatagtaactaggtcttctatcactttcatacactttgaattgcattcatatcttaaggaaagagtgtctttgtttagtacagaagagatggttggactattactctgtttatttgtatttttcattgtctggagtctgtattcaagtccacaaagaagaggaacaacagtgctaccttcaagagaaggttttacaaagattttgggagattaattttcaagtcttgcatcaggacgaagcaagcactcttcaagaagatcgaagggagttcgagctc

SEQ ID NO: 345821 - DNA, 950 bp, Cannabis indica
gactgtcatgtaataatgcaacggttactttcactcggtgtttttggattttttccaaaaaatataggagacaccataacagaactatgccatttctttagacaattatgttcaaggaaattaaatgtaaaagatatggagaaagcacaaaaaaaaactcatcttgatattgtgcaagctagaattaatttttcccccagcttttttcgacattatgatccatttggtcttacatttgccaaatgaggctataatgggtgggccggtgtttatgaggtggatgtacccttttgagaggtacatgaaaaaattgaaaggatatgttagaaataaagctcgtcttgaaggatccatagcagaaggatatgttgctgatgaggctttgacattttgttcgatgtactttaaaggcgtcacaacaaaatttaattgccccaatcacaatgaggatgcacaatatgttccacgacacttatttgtgtttcaatcccaatgtcgtccacttggtaaaggaattttaattccaatgaatgggcacaagaggagaactattgaatggttcttatttttgaattccactgaagttgaaccttatatgaagtaagtcaattacttttttttttctctcattatttgtaattccataaactaaaattctaacacaaaaaataatgactagggaacaccttgatctcatgaaacgaagggatcctaatgcagatcataagaaattacacaaacaggagttcccatcgtgattttataataaggtatcttcattcgtaatcacttactgagtatgatttgaaattaattggttctaatattttgtaatcccaatttagatctacgagttgcacaagattggatctttaggtcatcatggggaggaattgctagctttagcatctggatcagatcttgttacctattcctatcaagggtgtgta

SEQ ID NO: 345822 - DNA, 803 bp, Cannabis indica
agagagagagagagggagcgtcagaaagagagagggaacgtctgagagagggaaagtttaatttagggggtattttaggaatcttttaaaattagaagaataaatttgtacaaattataaaagggtataaattttgatataagttatattattaagggcaaataatgaaatttcccaatgacaaaatagaccttatcttttttaaaatagtacaaataagactttaagcttaatttttgatatttttttttcttaatataaaacataaaataacattcaattattccattattatttgaatacttaaatgctattttatgcatataaaatatgaatatttgaatactacttttaactattcaattatttcaaactttctaaaaacataaataattttataaaatgttataatttatccaaaaataaaaaagaaatagcataaatattcatttaatagcattcttatagattagtatattacgcagggaattttgattttatatacttaaataattaaaaaaatttattattaaaccaaaaacctaaaccctaaaaaattatgccttttttttcaaaaccccaaaaatacccccctcacatttcaaatcctaatctcagtctctctcttcctctctctcggtgagcctcctcaacccacaaacacccgaagttgtgctcatggtgacggcgcacggcgcaggcaacttcgacccagcccatcgacgacgagcccacccatggtgacccagccaatcgacgatgagcccacccacgccgaagcgaaaccatgttcttcatttttt

SEQ ID NO: 345823 - DNA, 654 bp, Cannabis indica
tttttttttttttttaatttaatttccaaattaatcacaaccatttaatactgatccaatggctaaaaaaaacgtaaccatgatggttacaataaaaatgtaaccattagaacctcctccatatatatatatatatatatatatatatataaatatataaataaatgatacatgtataggcgagtgtgcatggtccgactccactccatttggtcgtttcgtttggtatgacaaatgacaatttctaatatctatagttaaggtgcaatatttcaagcatcaaaagggggagtgacctaactcctcacaaagtcccaccaacacaattaattatcgtggaagacaaacatcaaaatggtaatactaatttattaattgagtcgatgaatgttataaatttcgtatgtatatatttcgattgatttataattatagctaggctctgaatatatggcaacaaaagatattggagtgatcaccgctgtttacaaagcaagcttacattgcccccagtgtgctcttgatatcaagaggcctcttttatgtgctcaaggtacgaatatatatatatatgtaaaaaattcttaatggatattatacattgattgatgattactaaataatttaattataaatattaaattattagatttt

SEQ ID NO: 345824 - DNA, 804 bp, Cannabis indica
ttcaagaggaagtctatgtcaaacaaccacagggatttgaagatccacatcatccacaccatgtgtacaagctcaataaagccctatatggactgaaataggctccacgtgcttggtatgatcgactcacctcatttctcatctctcatggtttcatccgaggtactgcagataacactctattcattaaacatattgaaaaaggaatttttgttgcccaaatatatgttgatgacatcatttttggctcaacttgtgaaagtgaagtacatacatttgtcaccttaatgactagtgagtttgaaatgaatttaataggtgaccttaatttctttctaggactccaaataaaacaactagatcatggcacagtcatatcacagtccaaatatgtaaagtctatgttagataagtttggattctcacaagtcaagcatgcacatacaccaataggcaccacatccaaattgtcacgagatgagtctggtgaccctgtagaccccactctatacagaagtatgataggtggcttactgtatctcacagcgagtcgccctgatatatccttcagtgttggtttatgtgccaggtatcaagccaatcctaaacagtcccatctctctacagtcaaaagaattttcaaatatctggctgggacagttaactatggtctttggtatagttgtgacaccaatacatctttggtaggatatagcgattctgattgtgtagggtgtctagatgataggaaaagcacttcagggggatgcttttacattaggaataacctagtctcgtggtata

SEQ ID NO: 345825 - DNA, 1157 bp, Cannabis indica
acaagcatcctatataataatattgtctcataagcacattaataaattaatttcattgttttacccttctcgggttaaaattacttaaatgcccctggctcaccaacggggtcttaatatagtataaatcatataaattctcatatattaaattatataataatataatttctcaataatacataattatctaattaggattttgctaatctatttacataatcctagggtattacaattacagtcatgacagacttgaaattaaggtcaacaaaacacctcaaagaaataaagtcgtcagccaaggattcttgattggaaatgaccaactgcaacttagatttcaataatccaatgtcctctgaatcagactttttagaagatgaaccactctcgaatgtttgcttagatgtaccgcgatcatcaatagattcatctaaaaataagcctcccaattgcaacttctgcctctcctcatcagtaggacgaatgtttttaatcttcaacttaaaaacataatcaaataaaaaaacatcaaacaaaaataattaaaaaaatgttaataaatcagcacaaaataataataaaacagtaaagaaactgaaaatcaccttgttcaacggcaaataaaaaatcttgcccttaaagtctctaaacgttagatttttggtcacaatattattggtccaatttagaattcttggaatcctagaggaaactcttttgcaaaatgtgtttactatcggaggacaacattcataaaaccaaacaataaacacccaaggacagcccaacgctctataccaaccatcttaggactgacctcccttctcctcttttttattttttattttaatcccatgctctattcttcctttgaatgaatcaatagtcaattcaaatgactccctaccccaactatactcatcctaatgaccactatcaacaacatctagctcaaacctagaaacttctttatctggagtattgctaagaagtaaacaatggatgaaatacaacacagatagtttcaaaccaagggactcatcctgaccccacctacttccgaagaaagcatcctttatagctttatgatctatgatttttacgccacggaaacaaacctcaattaactagtttgattcctgggaaaacaa

SEQ ID NO: 345826 - DNA, 681 bp, Cannabis indica
tttcagtttcttcacggtttttctgatttttttttcataattttctgtttagatcattggagttcttcttttccaatcaaatttcgccgaaatttatggttgttctacactcgttctggtttcattctcgttgcgtagcagattggatcgatggaggtttcttcatcgtcttcgttcgtgacgtgcagcttaaggtatagaccaggtggtatttttgtaatctttttaatatgggctgtataaatgttgattgggccggcccatagtaatattgtaatattttaccctttttggaattttcctatttttttcccaaaaattaaacttattaggtattatttgcaattggaagttaaatttagatatttatgctacaaattactcaaaatataaataccctatttttaattgggtggtatattagataaaaatttacataataaaccaaaaatttgaagaaaaaaaattacaaaatacatcaacacggaaaattttttatttttaccttttgaactttttaatttctttacaaaaataaatttttcagtaaaaataataaaccgtttttttatatagttgtcatgagtttatttatttatttatttttttgttttataatttatttatagttatcgtgaggttgatttttcgttattttttagttatttttttttacatttt

SEQ ID NO: 345827 - DNA, 1683 bp, Cannabis indica
gtggaataaaaatatttttagatttgacgacttggaaaactcgatccggagccaaaaatgtcataacgagtttaattgataaaattggtggaaatattgtgataagttgataatataagtattgcgataattaggagtatgtggaatttgacttagcgccctaaaaatttagatttcttagcagttaagaaatgataagataattatgaataatataatttttattaatattattatattaatattaatattatattattattaattttaacgtatcagtatattatatatataatatgttataaatttataacaataaaataaaatgaaacaaaccctcgttctcctccttgaatgaaaccctttcccttttatattctttttttcaaattttcaatctgaaacctagtgatctaactccagtaatagggggattgcgaattctcagagcgtgaaagtttaaggtaaggtttaattttgttttaagtttaacacaattagtttcatatagggattttgtgaattagaatagttatgaaggttctgaccttaaaaaattattctcgggtagtcatgggactagttccgatgttttcttgttgaatttggggtgtttttgagttagaaattgagtttagaactttttaaagcttaggtccaagctttaatggtgttttccgtttaagggatcgattttaatttctgttacgtaaggactgttgtatatatggtatatatgtgtcctgtgaagtttagaataatttggatagatttcaggggtatttcggtaagtgcaaaatttgagattttggtgcccaaaaacggtctaccgtttctagaaattccagtgagatctgaaatcgtatttttatcataacttttcacccgggtgtctattttggacgttctatataccgtttcgaagcttgcgacatgctctaccatatggtttatgtttaagagccaaaatataagttttattttagtgtatttgaactacggagtttggtaggaaactctaagttgtcctttgcaactgttaagcagtgttatgggataaacaattattggtttatcattgttatgacataaggcctgagattatcgatcgtactccaagtaggttggccaacatacctgaaccagaacttgaggtaagaaaagtatattgtactgcatattacgttgaattgtaatacaattagtattgttgtgaattgattgatattgagattaagatatgattattattgttatataatgaaaatatttattggttaagtaatgataatgtgatgatattgtgaatgtgatatacgggctcacctaattaggtgatgcgatactcctagcgacatgtagatacgggcgtcagcgacatatgagtaccgagcgtaagtacgggctcacctgattaggtggtgtgatactcctggcgatgtgtagatacaggcatcagtgatatgaaaattgtcaagttatggcataaaatgaaattgttgtagggtttcttcctggcgacgtgtagatacaggcgtcagtgatatgaaaattaccaggttatggcatagaatgaagtcgttgcagggttttctcctggcgacgtgtagatacaggcgccagtgatataaaaatatctggttatggcatagatcgaaaccatgttgggtttcttcctgacga

SEQ ID NO: 345828 - DNA, 617 bp, Cannabis indica
atttactttcatataatatgaattcaaacgatgttttatatgttttgtgttgatttggatggtttcatgtttgtttatgtgtttatgtgatgaaagtttgtgttgtacaaattttttccatgaaaaatattttttctatttttgaaaatattttatgtggattcctcgtgaaaaattaagcaatttcttttttacggactcgattccgataaaaattgataaagttatgaattttggaaaattggaaataatggctgtcgaagctaggtgcacgagtgcaccaagtgcttcggacatggaagccatgcgcgcacgtgacacgcccgtgtcacccagcatccgcccatgaaaatcctccagacgccgagcctcatcctgcaagcgctgaggtttctcggcgcctcttcctaattccgcgcgcgcacgggctgcgtgcagcctcctggggctgcacgtgcagccattcctgggcagccaacccaaaatttctatttatggggttttttccccaaaaatccgaattttcatgggattgtttcccaaaattcaatttttccaattttagatttttccaacttgaaatattttaattttaaatatttccaagttaaaatatt

SEQ ID NO: 345829 - DNA, 763 bp, Cannabis indica
tggtgattctattctccattcttcttttcctcatggccatatgaaagtaattagagttttcatcattaaatttgatccactgaattttactttgttgcctcagccacttcgagtacctgtctttagctaaaataaaattctgctgagcaatggtgacagctgcctgctgatgagcatccgaggggttggttgcagcagcctcctgactgaggaagaagttatctttagcagtcgtgtactccataaccacatccccaatgttttccttgcaaaacactttcaactcatgcttcaatctgagcattctctgcaccaacccagccagcccctcataaaccgtaggtttcctccaacttcccatgacagtttcctcaaaccccaagtaggaagaccaatgattcccatatctaaaaggtttcacccccatattgcttacctcatgaaaccggattagacataagctatgatctgaaacaactttccatttgaagcaagcattagtgtttgggaattcatccaaccaaatgttgttagaaaaaacacgatcaagtttggaataaattctatccccaacttcatgtttattagtccaagtaaaataggaaccggaacattttagctcctcaacttggcccaaagcaagctaagattgggcatctaaaatgtctctgctaagaatctgtcttcccccaaatctgtcttggtaattaaacatagcattgaaatcaccaaagatgatccaaggtgttgggttttatgccct

SEQ ID NO: 345830 - DNA, 950 bp, Cannabis indica
aggtcagacagcgatcacatatattctatgtaccagacttatggattttgaggcaatgtatttaaataaataattaaaaaactattatgctccctaacatacttttctaatcacataaattactaaacaagtaaaggcttactgaactttgagtcgagcttttctctgatgatgatagtacatgtcttgatgatcttcggtagacaaacctagcgcctctgataccaaagttgtaacgccctgatacttaggtgcgctacagtgattttttaattaacgtgccgcctttgctaatcaaagggttttcctcgaaaatcatgccaaattaaatttttgatgtaaacaattaaacttcataaacatatacatatatatatatttacataagttgggatcccgtgtttaaacttttataatctttatcaaattacttttacaaacttatcgcacaacgactacaaaatacaacccaagttgtcccgagaccaaacactccaggtcgcagcgtctcgacatgtacaatcatcatctgaggtcagaactcactcctatttagcctttgcctttcctttacctacacatgaaagtagtatttgtgagtcaatagactcagtaagaaaaacatataacagaaaatatattaccgacttgtatctaggcaccaatatacctatccacaagacttatcatataagtaagaacattccttactaaggtacgacaactataccacatgcactacgtaccgctactgtatgagtgttggggttttccctatacctcaactacccctaagtgttataccacatacactccgtacttatctgtaccagtgttggtaacaccgtaatgtactctttatattgggttttgtgcgataaataaaacccatttcaatataatcaaatttactaataaagattagaaataacattttatgttgcatggtt

SEQ ID NO: 345831 - DNA, 546 bp, Cannabis indica
agggcgcaggggagtgcactcaggagtcttgaaggactcaggttgttggtggggcctttactcctcctacctctagttatggtaggggtggtagtggctcgaccactgattagaaaagaagggcacaaacagcatctggtggctcaagtcaaaacaagaggttccaagggaaccaaggtcaaggcaaccgttagggtggtttcgaaacccaatacacttacccagaatgccccagttgtaaaaagaatcatctgggagagtgtaaagggcaagggtgcttccagtgtggtttgtcagggcactataaaagagattgtccacagcttaagaaagaagaacagaagattgcaacaaaacctgctccagctagggtgtttcctctaactcaggcagatgcagatgctagccccttagttgtaacaagtcaactctcagtcaacaactcttacttctttctgttatttgactctagggccactcactcttatgtggcagccagaatttttagtaagttggatagacaacatgatagttatgataaagggt

SEQ ID NO: 345832 - DNA, 539 bp, Cannabis indica
aacataaactgtagaagaagaaagattaaaaaaaacattaattattacattaaaagtattcatatatcattcgaaataagattatttgtcaagttgaggtatgcaatattttgagtatcgacatggatcaaaattgtattaagggttccctacacataataaaaattaatgttagtttaatcaactcactaatcgatctatttgtaagtgcttatatacatataatgatatgagaaagtaaagtgccacgaatatttatgtgtacttttagatcaataaaaatggaacaaaacaacattcatttcaaaaaaaaaaggaaaaaatacaagaaagatgtatgtatatttctaaagaataaaagttaaattgactaattctatatacatgtgtatggtggtatgtacttggacatgtaaatgtgaatgtgatcaactgttctttgatccaatcaatcaccaaacctctgcacgtgatactcaagtgataaaatatctcacccacacccatggtgactaatgactatacaattataaaaatat

SEQ ID NO: 345833 - DNA, 527 bp, Cannabis indica
tattgttgtgaattgattaatattgagatatagttaatattgttatataatggaaagactgattgattgagtattgataatttgataatattatgcatgtgatatatgagctcacctgattaggtgatgcaatttttctggcaacgtactgagcgtaagtacgggcgtcagtgatattattgagtaccgagcgtaggtacgagctcacctgattaggtgatgcgatttttctagcgacgtattgagcgtaagtatgggcgtcaatgatatatgatgagtaccgagcgtaggtacgaactcacctgattaggcgatgcgattttcctggcaacatactgggtgtaagtacgggcgtcagtgatatatgatgagtaccgagcgtaggtacaggctcacctgattatgtgatgcgattttcctaacaacgtcccgggcgtaagtacggaagtcagtgacatatgataagtatcgagcgtaggtacgagctcgtctacttagacgatgtgatatattggtgccagatagtg

SEQ ID NO: 345834 - DNA, 719 bp, Cannabis indica
atctaagatcctggtaaactaatttccaacagaggatagctctacaaatttcatgtaaaactcattcacagtcatatccccttgtcttaaaccatcgaatactccaataagagccctcctgtgagatggactaaaataatattccctgaaaacttcctcgaaatctcttcatgtcatcccaccagcttccattgtcctggacaaggtttcccaccaatctgctgcaccaccctctaacttggacacaacaaaagtaacttgatattcatcgggtgctcctattgtgttgaaaattttctttatcttgctcaaccacctttcagctaccatgggatcttgtccaccctcaaacttaggaacttggatctgatgaaagatttaaaaatgatgactttattgagcggcaggatccatttgttgaccgggaactgctcttaaggcttcgagaagggcgttcatagggaattcagcttgtggaggttggacaatagcttgaggggcatcttctccaaccgttctccttgtcttttccttttgaaggcattttcttaggtctgagaaccaaaaactaatcagttaatgaggattgaatgctaataatataaatatgtcttatacatataaatacaaagatatgtattactattattatttaaaataaatctaaactatttggtgacacactccgaggtaatctgataccatttttctgtcacgac

SEQ ID NO: 345835 - DNA, 399 bp, Cannabis indica
ttaatttagaaaaaaaaaacaaaaaaaatctaatttcaagtgcaacttagctggactagaaaggggttcatagtgtgagattgcttttcaagtccaacattgttggactagaaatatttttctagtccaacaagtatgtttcatgttgtgggaccgctttttaagtccaataatgttggactagaaaaacaccccttttatgtcccaggctattatgtctaacacaaaagggactcgaaacatttatttagtccactattgatggacttaaaaggggttttttctagtagtgagtactcatttcacttagctgaaatatcatttatacaggattaagtgttttaaaatggataactaatgacgtatatatattgtggaacatatagagtcttctatatg

SEQ ID NO: 345836 - DNA, 1562 bp, Cannabis indica
gcaacctaattgtaaaaattaggtaaaatcacaatttctaaaaaaattcaaatgaggtcattcacctcagcaaaattcaaatgaggctgttgacctcaacaaaaaatcaaagtgggttcattcacctcgaaattgtcaaatgaggtcattaacctcaacaaatctcaaatgagatcattcatctcaacaaaagttctaaatgaggtcattcacatcaaaatatcagagtgaattaactttccacaaagatagtttgaactacgtttgacttgattcctacaaaagaatatgtatgcaacttcgttgccaagactgaatgtagtcgctggtaccgcaaaatggtataaaatacaaatctcaaaattctataaaaggtcatccacctaggaatttttttttctaaattttcaaatagcacactactacaaaatactcaattagcgtcggtcaaggcgtctcaccaaaatagttgaccgacgaaataaataggcagtaattttaggcttcaaatgataactgaagctaaaattaataaaattagcgttagttataagtccaacgccaaaagaagaaccgaggcaaaaaagagaatagtttgaaaaatatattttcctttagcgttggtttagtgacgctaaatttattttgctttagttggatgagcactattacccgtatcctcgataatatggaggtgacgggaactgaaagagtgaactgtgcagccttcatgttacaagatcatgcccgcgtttggtgggatatcgtgggccaaacccgggatgttagtgtaatgacctgggaagaatttaaaaatttatttgaggaaaagttttacaacatcgttgtgagaatttcacacatggaagactttgtgaagcttactcaggggaagatgtcagtggctgaatatactctgtagtttgatcggctgtctaagtttactggtgatctggtgcccacagatttcaccaggaaaaagaaatatgtgagaggactgaatgccacaatcagttggggcttgaagattaccacttacatgacactttgtacaagaaagtggtagacctagccttgattgttgaggaggctgagaaacatgttgcgaaagagcaggctgtaaaggattccgtcatggcattgaatcctcttgctgaggcttccagagtatcagggggtaatagaaagttccggggaaacagaggtggtcgtcaaggccgcgggtcctcattctgatcatatctcgagtgtcctaaatgcaagaaacaccatccgagtgagtgtcgggctaagacatgtttcctgtgtggcatggtgggccactttatcagagattgtcctcaggctacgaaagaggagcctaaggagaatactacacagaacccggggcgactttttaccatgactcaagaagacgctgatgctagtccgtcagttgtgacatgtcagttgtctattaattgttgttcatatactgtgttgtttgattcgggagcgactcactcatatgtgtcgagtagagttattgaaagtttccataagccatgtgatatatatgcttc

SEQ ID NO: 345837 - DNA, 580 bp, Cannabis indica
aaacattaggtatttaagtgtataaaatctgaaacattaagtatttataccgcaattaacccttttacttatattaatatcacccaataaattttttagcggttgcagtagtacataggaattgtcgtatctataggaagacaaatcacaactaaaaaaaatattgaaaataataaaatgataaaagaaaaagaggatgatcagataaatttaataaggtcgaaatatagttatataaatcttattctaacactgatattaattagttcacacaagttgtaattctacactatgattacagcgggaagatgaatacattaaaaggataaattaataaatattgaataaattgaagcatatctatatcttcatagcatattatattatatattctaaaaatgcaaaaagaaaaagtttagattttaaaaaaaaaaaaattgtaaaaatgttatatataattgacactagaaaatggagatttataaaagaaataaaaaaaagagtgaattaaaaaggaaaaagttcaaattaaatacaaaattgcaaaaaaaaatagtaaaagtgttatatatataataag

SEQ ID NO: 345838 - DNA, 1076 bp, Cannabis indica
ggtaaaatatattccaacaactgtcctcaaagccatggtaatgatttactttcatgaaatatggatttaaaacaatgtttgtcttgatttagatggtttcatgatagtttatgtgcttatttgatgattgtatagaaatcacaatgtatattgtaaaatatattttttttcgttctaaaaatatttttactggaaagtagacaaaaaactaatgaatttaggcttttacagaacccaatttgaattttttatgaattagttatgattttttgaatttagatgaaaatatctgaatttgggttgcacacacgcgcacgcacgagaagcaagactcggcacccacacgcggtttcagacaacttgaccgaggaaactcgaacacgggctttctgaaaccgtgtcacaccgagttcctttagccactgaggctgcatgcagccctctgtctcggtcagcctcctccatccgagcggccaggggtatgcattccgtgtgcaccaaaattgtttttgtcatattttttgattcaaaaatcatttttcattgaaataaaattcaaattttggtagaattttgtgtagaatctaaattttcaatcaaaaatctaattatcagaataaaattaacttttaattaattaaattagttttaggcattagtaggctttgaatttgaaaatttgatttttccacaaaagtagccttatggttaattttgaaattttgattattttatttattttaattataagatcaggtattacttattttattattaaaaatttgaatgatcttattttgatattaaaatattaataatattagaagtaatctagtttgaatttcaaaatttcctaaacaaaaccatttttttaaaaaatttttgttatttttgaaatatattttattaagttaaattataagatttgaaaaatgttggttttgacattttatcttattagatatttttttttaattaaaattaaattttggcaaaataatatgagatttttgaaaatttgttaatttatgtttgaatagaatattttgggtttctaaccataaaattttcaaatt

SEQ ID NO: 345839 - DNA, 824 bp, Cannabis indica
ctaataaagactactggaacgcagaacatttgcggtcctactaccaataaataaatgatgtaactcacattgcagatgtaaaattttaactcaagttatgaataaagagaatcatttctatcatttaagtaattataaagttttactctttaaaattgcttgaggggtatttatgtatgattaaccagaattcatctggaaatacatggtgtaatgcaaatccaccatttcaaaattaaaaataaatgaaatttaaaggttctcgactaaacttctttgacgaagcagaggtcaaaaagttatagcttccttacaaaaccttttgacgagagaggggtcgaattgttataacatcctgatcaaacctttttgacgaagaatggatcaaatgactataatttttgattaaaaacctaactgacgggaaaggaaaatcaaaagttataaatgagatataaataataactcgcgtataaagctgaatattaacggttcacgcaagctaggaaagtgctaaacgagacatcaagacgtcttgataaaagtacttgaacctagaaaatagatagataacctaactatccatatgagcaaatccaaaatatacaaagtgataaaatcattaaaagtatatataagtttgattaaggcagattataatttccatagcgacgcagaattgacaactgctcgaaaatcaaaaagtttggtagagataagagaaaccaattatattaagttcgaatgaaaagagtacaaggcatttaagataagagaaacccaagttggtttacaaacttgtctttacaaaaatgccactaggg

SEQ ID NO: 345840 - DNA, 679 bp, Cannabis indica
ctgttatggttagatatatttgcagttcagtttataggttttgtttgagttggaattgcgttctagaagctagctggttgggttgagttgtggggaatgatcaagtttgagtttgaaaactcaaacttgagtcattaatggcatatttgaattctgtgttttcttgcttggactatattgtttaaggttattataggtgttctggaaggtttggtaaagtttgggcacaaattgagcaagtttcaaacttgtttgggttacctagtgcaaacatgttaaccagttttattggaactgtaaaaccagttaaccggaacaggtgcaggttccctgaattattcaattcgtcaattcgtgctattttcagagccatggttggttaataacttgttaattagggtactatggtattagtagttaatcacagaaccgttagttaggggtttgggtttcctggattagggttgtgacatgtcatttaccagtatacgtgaatgtgactaaggcatccatccagcatgaggtattccgttcaggtcggccaactcaattgaattcagaaacgaggtaagaatagcatagaacatattgtatatatgcgaatgtatgtatgtgtgaaatttatgcatgctgtgtttatgatatatatgtttgggtaatatcatagcgacacaaccat

SEQ ID NO: 345841 - DNA, 942 bp, Cannabis indica
tggcatttaagggtgtcagattgtataggttggacctcccacgcgtgtcatcttagggcctttcctcttcgagccttattcctagttgttggatcatttggtctggtacacaaggacacgtgtgctctgtacgatagtgtttcgtgggagacaacctctgatgtcgtacttgatacagcctggctactaggtccgtactttgacatgtataggcagggcttccatgggccaatggcatagcccggtttggtgcatctttgaaatgccttggtccttcttggtaaatccgataccctccatgggagtagatggcttcggttcccgggactgagaagacttcaactcattggtccctcttgcattattggtagttaggggactcctagtcacgaaggccctttctgttagttggggctttcatcctccaggagtattaattgaaggccctttctgttagttggggcttttatcctcccggagtattaattgaagaagttggttgactaataacttcttagcctttcttgaataatatccacgtgtcatgatcacgaaaacccagataacaaacataaaactagaagtgtatttcgatcaatctattgtcttgatatccatatcaagtgtagtgtgcatgactaaacccaaataacaggaactgtaaggttatggtaagcagttgctttctccaccattacttcctttgtattcataaaacattatgcaacatcatttttctacatgtattactcctctagggatactgaattctttactgtttgataagtgcatttgaatgtacaaaagacacatctctaattctatccaaaaaggaatagagatgaaacagttaagaactttcttccgtttaaataactttctagtgcttttcgaaacaactaagttatttagcttcactggtggagcttaaattattataga

SEQ ID NO: 345842 - DNA, 661 bp, Cannabis indica
attaaaatttataaattaattttttttatttatatataaattcttactataattattttaccatttaagccatttaattataatatttacaatttttttttacaaaaattaaacttatttttatataaattaaaattatgtccttataataaattttttaattattaatttttttttacaattagatgatgaggcctcaaaccttacgagagtaaacaacatgcctaaccattgagctacccctcttatatctcactcttgaaccagccatcattccaagacttgctaagtcaagctgatacacccctgtcttaaactaatattaaagaacagaaaataataacaaatattactctttagtttagtaatttattagtgtaagaacatatttggttgttggtgtgaagagtggtaacttgttaaatagaactattggctcacttaaccaattaatgaaaaatatatgaattttttattctctctaaactctcccatgtctctcaattcttatgtctctactatcttcttagacaagctaaaacaataattctgatttgatcattcaatgagagttcctacaattccctgcaatgaagaacccttcattgaaagcatacagaatgacactgtaaaggcatatgatataattgttgggttttat

SEQ ID NO: 345843 - DNA, 616 bp, Cannabis indica
attagaggaatatatttttagtagatgagttgtttgtttatggtgtttttattttattataaataattttgtatttatgtacatttacttactaatgtataatttttatttatttgcgttcaaattaatttctttcgttggagctttttgaaaaaaaaaaaaaacaagtttgcaagcacaatgtatgaaattaataattgtaacaagcaatagttaggattacttttcagttatccaggcaaaatttgtggttttacttgtagcattaaatttggctcttaattgtctttctttactttttgttgaattatgtagattggttagggattgttaatgcttcttctaaacattattctttcctcaatgatcctaatttattattagaggattagcaagtttaatgttcaattttccaaaatatctatactaattcatgtacatcggttgactaataaaattacatataaattaactcagcatacttttcaggtagataaacaacattgtatggttagttaagattgcttttgtttgggattcttagagcatgtttggtattgttttctgttttttgtttttaaaaaattagttttttagaaattgagaacaaaaaata

SEQ ID NO: 345844 - DNA, 1240 bp, Cannabis indica
gggcattctgtagtgtatcgagtttcagagctaccctaacgattgcctcgacccaagttccctcgaaacctcttattttgacctgaaccactggatgcagtaggtgcctttcttttttggtcagtggtcgagccactacctcccctaataaagcctgatgtaggaggagtaggagccccaccaacaacctgagtccctcaagactccagggtgcactctactgcgccctcaactcgcagtgccttacccaccatatcagcataggtggtgttgtcatcagtagtgatcattaggtcatgtcttatctttgcatttaatccgtctcgatatttctctttattgctaaaattggttggcatgattcccgaggcaatcttaccaagcggtcaaactgggttgtgtattcagtaacactgatattttctttcttagttagttaagtgaattctttccttttcacgcttctgattgcctcattgccatattttgcattaaaaagttcatggaacctttcccaggtcattgtagtaacatcatgagtcagggacaccatgtcccaccacccccagagcgtcttcttggaactggaatgtggcactagccactctatcattgctggtgatgcccataaagtttagaatgctagtaatcagtattagccactgttcggctttcataacatcgggacccccttaaaaaattagaggtgccagcttgtagaacctttcatatagtggttccattcagttcactgcagcgactggtcctgcctacacagcaggggcaggagatatttgcactgctggagtagggatttgaggagtaccctgctgtctcaggcgtcagatctcttcatctcgttcattaattcttgcttgcatttctgcaaacctattttcctaatcttgggcagcctgggtagcctatgacgggttaacatcatcccggctgcgtgccctgcctctaggacctctacctcagccacgaatatttaggggaatctgaactccctgaccaccactggatccaactgagttaccctggctcctggcgtttcgcctggcgtccatacgaacagaacatcctgcgtaaccaagagctagtctggttagatcgtgatcaagtaaaacttactaattgccgctgatttggaattttaaaaacatgcacctattctactatcacgctactaacatgcttcctaataggctttccttaaatcatactattaaaataaact

SEQ ID NO: 345845 - DNA, 691 bp, Cannabis indica
taaattttttttatacatacatacaattttaattcttactttgaatttgttattttatttatttcaatttgttgttagagacataaaataacaacaatttattttattttgttgctaattatgtgtaaaaaaatattttatttttcataaatattaaataatttaatattaaaatgtaacaaatctaaaataaccaatccaatcaggacttttacggattaaattagattggatgagctattgcgtgaattgaattggatccaaaaataaaatccgcacttagtgcagatcagatgcactatcagcaaaatagtgcagattgaattggatcaacacctctacttaattagagctctttcaacaatttttctactctgtcttttaaaatatatcaccaaaatttattttttctattttacaatatacttttacattatacttctttaaaatatatcactaaaactctactttttaaaattttattatattttattcatttcaaatatataatattaatatatacacgatctctatataaaatttaaacaatgaataaaatatgtttaaaaaaataaataatattctataaattaatacataaagggctcgtttggaacgccgtattaggtcgtattatattgtattgtattatattgaattggattatatatcatatttttatataatacta

SEQ ID NO: 345846 - DNA, 411 bp, Cannabis indica
atattttataaaaaattgtgccttatgtaattattcctatttttaagctcaaatcacaccatatcatatgcatatatcttcctctccaagtattcccattttcattcctcgctcattcccttgaataattcaatcttgcatttctttttttttttttcaacataaacttactaattctcccacacttatatttttgcaagtattcaattattttttattgatatttcatcgatatattttttattacttgcaacttacaaacattgattcaaggggaattgttctttccatttttttttttcataatttatgcataactaaatattatttttcaacaacatccacaccctctacaactacaaaaatcattcatatactatggcctgaaaaagaatgaaaaaagaaaaaaaa

SEQ ID NO: 345847 - DNA, 1472 bp, Cannabis indica
  modified_base (1318)..(1318): a, c, t, g, unknown or other
ccccatccacattaatttttaattgtccagcagccggtttggaccagtggtctctcgtgtcagcgcgattggaagccagggagaccgagtccagcctcttagactgagcacacttccattgtcgaagagtggttcgagccagccaaacaaccttagcagcactacaacttttaccatttcaaaatctccgagccttccaaatcgcccaaccaaccatgacagcttcttcaaccaaccccgtattgcctactgccaacacttccataaaccagtcaaaaaaattggttgctgcagaatgaccaacacctaacgcagatatgatcaagcacaaatgagcaaaggagcattgaaccaaaacatggaatattgactcttccccatagtagcacaacacacaatgtaaatctacaggaacatgtttactataaagttgagtacgtgtaggcaaacaacctgaaagggctttccaagcaaaatgtaaaaccttaggaggggctttaatatttatctttcacaccacagttcatgcctttttttgtcttaaaatttgacattaagtctcgataaaattccataaaattgacttgaacaactagttctactaatcgataaaacaaattttttggggcaatcagaataaattaatagagaaatgtaacagaataaatggagaaaaatcaaaatcttgtgtgcatccctagtttgggtttgggatttcaaatgagagaggtattatggggaatatggtaatgtggtcatatatggaaaatatggggtattatggatttagaaaaataaaattagggtattttatgcatattttttcaaatttccctattattattacggatatgattattattattatattattaatattattagaaatatttatttttaaatttacttcaattgtttaaatcattttctaaaaattaaattaaaattcatcaaaaatgggtcccataatttttaaaaattaatatttctaaacatataaaggataggaaagttgagttaaaacgtatttttgaaattgattgagtcggtcaatcctagtactttttaaagtagtaaattagtaataggacaagatttataattatgggtaaatggcggcaaaacccccaatactttcattttagttttattaaacccccacaacccaaatttctgcgggtaaacccccaatactcgggttctgttagcaatttaacacttccgtccaaatttagctgttaattaactgccaggttggattgtccacgtggacacaatatacacgtggcacaattttattggtctcctaaaaaaattnttttaaaaaaaaaacctaatttaaattaaaaaaaaaattataaataaaaaattaaaataaattttttttacttttttttttttactttgtttttttcttttttcttttcgttctgtaacaaaccctactctctctctacatcactctctctctc

SEQ ID NO: 345848 - DNA, 608 bp, Cannabis indica
gcccagcgaaatacaagaagtcaaggtaatagggttgagaccggaggcagtcagggaaatcaaattccccagaatcctcgtggtcgcgagcgaggccatggtagagttcagggtggtcatcctgtgaattcaccccatgctcctccaaattgggagcggaggtttgcgaagatgcaagatcgtatctgccaacaagatgaagaaattctaagactaaggcagcatggtcctcttgtagtgcctctaccacaagctcatgccatcatagttcatgcggtgccagcagaacaacctgttgctggcaaccgtatggaaccgctttatgagaggttccataagcaagcacctccagtgttcttgggaggtcctgatgtgatgaaggctgagcaatggctcactggaattgagcaaattttgaatttcatgggggtatttggaaatgatcgggtgacctgcgatacttttcagttccagaaagatgctctcgtgtggtgggagttagtgtccctcacacgagacgtcattgtaatgacctaggaagagttctgagatttattcaacaccaagtattacaatgaagcagttcccagtgctaagcgaaaagaatt

SEQ ID NO: 345849 - DNA, 769 bp, Cannabis indica
cttcttcttcagaactcaaaaaatcaaggggatttaccttttgtttcttggctggaggcactggcttgtcacgacttcgagatgatcgaagttccttctcgaccgaagcttgctaggcacgagtgtgagtggaaggaccagttggagtagaagcagcaacttcttttactaatgcagcaggtggagaaactgtagcaggtggaggagatccctttgaagatgaagacgatgaggtccaagttttgtatgggcgcacagattttcgagccacttgtttaggaattcgtttgggcttctcgggctgagattcacgctgaggaagcgataaatctcctatttttgcagcagtaggaggcacggttgaagcagcaggaggagtattcgagggggttgcatctgtttcaaccacctttttaggatttcctaggttcttcgttctaaccatggtgatctgaatgtgacaatgaacaacaaacaaggaagagagacaaagaaatagaatcgggtaggtggtgagaataaatgtcaaaaaattggtttaaataaacatgggagagatgagcaaaaaggaaaccaatttcaaaattttgagtaaccaccagcccacaaccacaaaagaaaactgcccactcttgcaaaaataaaattctgtcctttcccttttttcttttaaaaaaataaaaggaaactagaaaaaccaatagtatttccaaaaacatctcatttaagacaaactttcaagattaaaaacacattaccatataagaga

SEQ ID NO: 345850 - DNA, 743 bp, Cannabis indica
ttagggcacaaatcccaacagataaaatgtcccaacaagatgtctctaagtatcaatagtaagaggttaaatgcacacttgtgtatgcattaaactagactcttaatgttgagtgggagccatcaaagatgtaatcaagcaaggaaaacagggagacaatcaagtcagaatttctaaaagtgacatatatgttagatgataggggtgtatattagaattcttgtatctacactaagtcagaacttattagagatggtagttacattgggggtggaggaatgattctagaaggatgtaaaaatccatctataataatttagttccaccagtaaaactaaataacttagtttctttcaaaatgcaccagaaagttattcaaattgaagaaagttcttaactggtttttatctctatttcattttggatagaattagagatgtctcttctatacattcagatgcacttaataagctctaaagaattcagtatctctacaagagtaatacatacaaaaaagtgatgttgcataacattttttgaacatataggaagtaatggtggagaaagcagttgcttaccacagccttacagttcctggtatttgggtttagtcaaacacactacacttcatatggattgattgaaatgcacttctagttttatgttaatgcaagtgggagtttgttgggatttgatgtcctaaataaaacaatttcaatataatcttatttgttatcaataaa

SEQ ID NO: 345851 - DNA, 515 bp, Cannabis indica
aaggaacttgaaaattttaagaaaaatgttcaaatgcataaccctggatcgtctatttttgaaaaagctcagaatgcaggtcaaagagattttgctggcattggatcaaatggtatggaaaattcttgcataacgaagtttgtaaaatctagtgttccaacgaatcttcttgatgctacaaatatgaagtctgctgcaacagtttcacaacctgtcgaagcagaagcagtttctgctgccgcaaaatctccaggatttacaaaaagagtaagatctcaagtaaaaagatttgttcatacttgtcatttttgtggaagaaaaggacatatcagacctaaatatttcacgttgaaaaatatgtttaaaacaaattatttaggtaatttggaaaaatctaaaaagaaacataaaggttcgaatattgtctagctagtttttctaataagagtgttgcatctcaaatgtggtattttgacagtggttgctctggacaaatgacaggtgacaaggatttt

SEQ ID NO: 345852 - DNA, 836 bp, Cannabis indica
atctgaaatgtaatcaaacaaggaacataatgagaccatcaagaaagatttctgaaagtaacctatatgttagatgataggatgtatatattagaagtccttatatctacaccaactcatataggatttgagatggtggttactctggggtggaggaattattctagtaggatgtaagaacaaaaccatctataataatttaagctccatcagtgaagatacataaatttgtaatttcgaaattactggaaagttattcaactgaagaaaattctacactgcgttatctctattctagtatttggatataatgagagatatctcttttgtttattcagatgcactttataagcgctaaagaattcagtaatcgtagatgagtaatgcatgatgttgcataatattttatgaacacaaaggaagtaatggtggaggaagcagtagcttgccacaaacttacagatccagtaatttgggttgagtcaaatataatacagttgatccggatatcatgacattgattgattgaaatgcactacttattttatgtagtgcaagtgggagtttgttgggattttatgaccctaaataaaacccattctcaatctaatctgatttactatcaataaatattataagtcatttatgtttacatgtagttttcatgtttatgatttaatatataccaaatctgttaagtccagaacatatagttattcacaattaaagtgatgtcaacacagtggaatgtgattgtgattatatgcttcaaaagacaatgtctataattcatcagtgcactggatttacactgatgtgataatcagcgatgaagt

SEQ ID NO: 345853 - DNA, 603 bp, Cannabis indica
aattaaaaatttacatttatttttaaaaacaatatttttgttatagcccccacatcaatcttaatgggtccgtccctgattacaacagacttgtaactgaaattaacagactttggacaaaggttccctaataatacatacatacatgattatcgagcttctatgagtgatatgctcatctcatttgtggaaagcaattcatgattattagaagatgaattatctccttttgcataatctggctccatgaaatagcctggtgctttaggttgaggcaactcattttgactaccaaacatcaaaaccacagatgacatggtgggtctatcagcaggattatgttgtacacagaggagactaatatgtatgcatcgtaacacttgatcaagattttcatctaataaccactcatccaccaaatcatatgccctttcttccttcatcaatgtccatgccttaaaaataaccaaaaattcaatgtcatcacttttctcacaatttagagatatactgtattattaagggtaaattgcggcataaatacttaatatttttgattttatacacttaaatacctaatgtttatttttggtggcaaaaata

SEQ ID NO: 345854 - DNA, 526 bp, Cannabis indica
tcactcatctttaatcttaagtattttagttacttgtcttttattttattttgcaaaactaaaatcccatcaaatatttggagctaggttagaatattcttattttgtttgaaatagtttcttttgatgttagtcaactcccatgggttcgaccttgcacttacatgaacactatattctgaaacgattcgtgcacttgcgagtataaatattaaaacactcacttttgaggacaacatttctcttatcattcctactttttatgtgcttataatttctgaattagattttgtgttaaaccataattgatttctatttattattttgtagtatcttgtatagccatgtcaaatcccatgttatcactcttgactgaaaataagctaagtggatctatctttctaaaatggaatgataacattaatattgctctcacaggagaaagtgccttgtttgtgttaactgagccgtctcctgaacagtcgggtgacaatgcaaccaaagctgttaaagagaagttcgagcg

SEQ ID NO: 345855 - DNA, 584 bp, Cannabis indica
actagtgcctaatagtaatgctcaaaaaatttatacgtgaaatgatttaacagaaagctggtttcctttgaaaattaaattggcttgtagttccccatgaaaaaaaaagaagaaagatttgtagttttggagggaaataaaataagtaaatgggaagagagaggaattcattttaattattaaaaaaaataacataatgaaataaagaattgtatgtgtatggtgtcggcgagggagcaatggcggggcccagcaggcgtcggtggctccggtagaaggcgtttgggtttggtttggctggggctcttgtacggcttagattttccaacacatgcaaaattcaaaccttattataataagattccaccgacaacttatgaaataatgtgttactttccattggaaatctcaatatgattcacttcttcccttcctacctctattattattaaaaatacatttattcattttaatatttttaatggaaccagcattaaatgcttacatctttattttattatggattttcttttgagggattctaatagctaggattcttatatatatagtgttgcgtgttacgt

SEQ ID NO: 345856 - DNA, 533 bp, Cannabis indica
gtacaaagcatttggtaaagatagaacagtcacaattgcacgatgattataaatagagaatgaaattcattaaagataacaaaagcacgtaataccaggatcagaggctgtccggtcagcccgttgtctgtaaaatgaaaaataattccaagtttaaagactgcttggtcggtcatgatgtcttagaaaaggccttatggccgaataagataatataaaaataaaaggataaaagaagaagtatttaaacagttggagtcccaggcatttggttcgggtcttctgggaaaaggtgacgaaggggcccgcatctgctcgggtccactcttgatcagctcggacccacctctctgttgttcaggcctgtccgaactccctcctcgaggctccttagacttggcaacttttggggtagaggggtttgcaaccgttagctcatcagaaagatcaatgacctccccaacaggcatcttttccttagaagaggtcccctcactgcctctagacttcttggctggaggagatgcgctaga

SEQ ID NO: 345857 - DNA, 517 bp, Cannabis indica
cgatatttgtacaaataattttcaaggtatttttataaataaaattaattttaagtataacattaaaataaatccctaatcatatattcattgattttgcaagggaattaatgttatttttgtaaacctaccataaataaacatggtatttcgatacaagttgtcattaatttagttttagtcacaacatgtattgtgactaaaaatacatttagttacaacaaattgtgatatagtgactaatacttttagtcaccgactttttagtcacaatgtaggaataacaatttataattagtcacaatattttttacttttagtcacaagtttttttgtgactaaaagtaaaaacttttatagtgaatatatatatgtgtatgtatgtatgtaaatatagtactttagaaaaatctaaagtggtggtggtatcaatattgtttggtgtaacgtccacgcttcaagcctccattgggtccttacacccacgaaataatggctcttatacacgagtacgtca

SEQ ID NO: 345858 - DNA, 718 bp, Cannabis indica
ccctagcactccacaacaaaatggagttgcagaaagaagaaatcacacgcttttagaaatagttaggtccatgcttaactacttaactctacctacgtccttctggggatatgctattcagatggaaattgatattttaaatgttgctccatctaaattagtctgtaagacacctttagaattatgggatggctgtataccaagtttacaccattacagaatctgggggtgctctgctcatgtcttaagaaagaaagatggtaaactagaaaagcgaactgagatttgcatgtttattggaaattgtaaggagactaggggtggactattttatagttgaaaggttgataaagtgttcgtttccacaaacaccactttcctggaagatgactatattaagaacttcaagccgcaaagcaaagtagtattggaggaaatactttcagatataactccatctagtgttccatcatcttctactcatgtagaggataatccaactctcttggttgaaccaatgcaagttattacaacgaagaaatctaccacaaatgttcctgttcagaagatcaccactcctcgtcgtagtgggagggtttcaacaaaaccagctcgttatggcttggatggtgaaatcaatatggtcgttggtgacggtattgatgacgatccattaacctataaacaggcaatggctagtcctgaacagaaacaatgg

SEQ ID NO: 345859 - DNA, 636 bp, Cannabis indica
tttttaatttttaaatggggtttgagatttttgatctttaaaaaaaataatttagctattgctacattagagtgtcatttggatatgattacatatacgtatttttaaaaatttttaaattttcttaatgagataacgtatctgataatgtatatattgtaatttactatattcttaaccaaaactcacaaaatcaaatttgaatgtgtttataaataaactagattcgtaaatttgatataaacgttttttattcctaaactttacgaaaaatatggtgtgtgaattagtttaccataactaaaatggaaagcaatcaatttcttagtacaaccatttcaatttaaaatataaaataaataataataaagttaaaaatataattaaaaatatttacaatattttaaatttaaatttctttatataaaatatttacataatttttttttattttaatttaaagttaaaccaataactttaaaaatatgattaaaaatatctataatattttaagtactttaaatttaaattaaaatttctttatataaaatatttatataatttttatttttaaatatatataataatattataaaattaataaataatattttgttaattaatgagatattccgt

SEQ ID NO: 345860 - DNA, 566 bp, Cannabis indica
attttttttatttggcttgttttatagtattgaaactggtttttttaacaggtcattgtagatgatattcgtcttactgatgctgagagacataatcgtcttttgaagaattttaagtttcaacccgtgtatcttcctaagagtgtggatgatgagaaggtaagaaacgagtttttaaacattttgtttactaattgttttgctaacatttcatattctcttttttaatatttttggtgtcctttgtaggattttgaggagaagtttgagaatatttgcagaagtttatcatttattaaagattctcaaatatgcatttgtaatgagatgacaatcttgagagatgagttttctagggatttggctaagttgagtgggatgattgaaaaaatgaactccaaaaaccataaaaagatagacacaatcaatttgtttggtgcttttgatagagaggtaaatcgtttattattgtttatattaacgaaattattagtttcttttaatttttatatgtaattattctttagtataattgattatcacattgaaactgttttttttttttt

SEQ ID NO: 345861 - DNA, 632 bp, Cannabis indica
tcgttggtgacggtattgatgacgatccattaacctataaacagacaatggcaagtcctgaacagaaacaatggccaaccgacattgatttagaaatggattccatgaaaaagaaccaagtctgagaatatgtagacgcacctgatgattatcatccaattggatgtaagtgggtctacaagaagaaaagaggttctggtggcgaagttgaaacttttaaagctagactggtcgcaaagggttataacaaaagaaaaggtgtggactaggaggatacttttagtctggtcgccatgttaaatccatcagaattcttctctccatagttgctactttcgattatgaaatttggcaaatggatgtcaagacagttttccttaatgaaattcttgaagaaatcatctatatggagcaaccaaaaggttataagcttctagggcaggaagagaaagtttgaaaactcaataggtccatttatgaacttaagtaagcttcttgttattggaacaaaaggtttgatgaaataataaaaacctacaacttttaccaaaacgatgatgaaccttgtgtttaccaattcaaggataatcaagtggtagtattcctcgtcctttatgttgatgacattttga

SEQ ID NO: 345862 - DNA, 842 bp, Cannabis indica
tgtgaatcgatgtcatatctttttatgaaataactcattaattgcgtaagtatcagagtatatttgcaacccgctgactgtaaggtcttcggcgaggtatcaatgtacgaactcgcacttagtgtattaacgagaaaccatatgtcgctgaaggagaatagcgaggccccgaacaaaagtaacacataccttagcttacaataagcaaactaagtgtaaaagtcggatcggctcgaagaacaagaatgcgagatgaccttctcgctacggggaaacttcctatagtttcatcaaactaacgggagcgaggcttataaccctggcaagtgagaagattcctgtatacctgcgatcgacgtaagacatatcttgtcgacctcggaaagaagaatggttccagcttgccattgggatcactacaatcaagtttttgtcgagacatctccagattccacaattaaagatgtgtttaatacttgatattttttacccagtaaaagcgagaaactcacatctatatgattttcaaaatcatacaccgcatttacattttgtgatatgtaatcagatcccatgattttagggataatggctgtaatcatattttggttagctttgtaattaactgccactatgaaactataaatagtggcaaacaatctcaaaaaagggacaaaaaaactcttatgaaagaggccttaaaaaaatactcaaaatctgaataagattgactcgtggactatgcagaattttaactgcaaaaccacgtaaaaaaccctatgttcatatattatttttctatagcttttattttttctgtgttgaattatcatcgtgaggct

SEQ ID NO: 345863 - DNA, 507 bp, Cannabis indica
atcattcagaaactcgaacaaaatcattcctagaagttcaaacatccaacccagaaatcataaaaagtgctatataaacaaacaataagcaagtacacgatttacgaaggccttacatgaagtttgaaggctaagggttggtgttgatagccggtaaaacgaagactggcaacgtcgaaggaatacgagtaagaaatcaatggtgtttaaagtctcttttctctctgaaaaaactctaagaaaatttggtgaaatgctgaaagtaaccaaatgaagtgagaagggttggcttttatacgccagaacaggtgtgaaacagctgtgatcaaccaccatcgtaaggtcaggagggcaatcgattcaaattctacagatccaacggttggattaaacgctcatcaagccggttgaaaacgtttgagtacccgtctgacacctatttaatgtgccgtatcaataaatggacaagaaacgaatcgttgtctgcaaaaaggaaataactgcagt

SEQ ID NO: 345864 - DNA, 720 bp, Cannabis indica
agtattagtaatagtaatagtaagatagtaaaaagtgatgtatgcggttgtgaaattgaactttttcacaagctgaacccgttcaaaaaacacttggatcagccccagttcttctactacaccacattaatatcccaataactatacacagcaacctaaccaaaaactacaacccttgttgtatgtaataatagtaatagtatattatactaatgtaccccattgcaaagactataaatagcaggatctagttctagtactactggttttccattcccattcccattcccattcccattttggtatatcatggaatcaccattattattattattattattattattattattatgaattctcttattactaatgttgttgttggtctgatcaaattgcactaaactctctagctccccacatgaggctgctataagccctgagaacaatgctgaaggctttcccggtcttgacttgaactccggatgaaactgaaccccaacatagtatggatggttcctaagctcaacaatctaccaacacacacatatatagtcagttgaaactcattcgattatagttatataaatgatgagatgaaactaagttgttagttacctccattcttcgccctgttatatcttttcctgtaaagcacaagccacccttttcaagacgcccaaccatttcaggattaacctgcaaaacaaaacaaaacaa

SEQ ID NO: 345865 - DNA, 475 bp, Cannabis indica
ctgcgatgtttagtatcccaagtactaaatctcctgggcctgatggctttggttcggggttctttaaatctatttggctagaagtgggaaaggaaatctatagggctattattcatttctttgaaacaaataaaattccctgctaaccttcataacacagctctctctctagttccaaaagtggaaaatccttcaaaagctattgattataggcctatagcttgttgcacgactctttacaaatgcatctctaaattattatgttctcgattagctaaagtgcttcctactttagttaatcagaaccaaggtgcttttgtgaaaggtcgttcaataacttataatatcttcattctctaggatcttttgaagaactataagaggaagaattgttcccccgggtgcacggttaagattgatataagtaaggcttatgatacggtaattgggattttcttgagaagttgctgaatct

SEQ ID NO: 345866 - DNA, 629 bp, Cannabis indica
aaaataattgaccctaagtgacccactggtgtctaaaactttagggataagtgcttaatcaaactaagtgaccctagtctgattaatgctagacgacccagcagtatattgtaagctgatggtagatcgacaacaaaaaagtcttgaattattatggtggataaaggtgcttcgctaaaagttaatgcgagctcgattattccttgactggtgacactgtcgccagtaaatccgcaaatatttacaatgtaatgtcttaatttggctttttcaagccccatcttcctcagtgtttccctgtagaggatgttcactgaacttctgttgtccaccaacacgcattttatcctcttgttagcgagctaagtggtgataaccaatgggtggttcttcctctttactctcttggaaggttctagagcaaaggtagactactcgttcttcacttccttcacgtacctcttatgggaattattactttttcctacaatatgtggccatcctgagataaccaggatatcctctccctcaataggaggaggttgtaatctctcggctcttgggttgttgggaggattgggctggttatgtccattgccctattttttcacatattgcttgaagtggcc

SEQ ID NO: 345867 - DNA, 524 bp, Cannabis indica
tgaatcttatcttcgacgtgttacatttttccaaatttcttaaaattttgcaagatatcttaaatagctataacgtacatgaccatgagaaaaaaattgacttaaaaattatttcaaatgctaaaacagatatggatgcatcagtgtatctattttaaaggagtgcattgtagaattttcctaattaatatatataaatgagaagtatcaatatatcaatatataaatgagaagtatgagacggtgacatggcattctaaaatcatttcaaaattatttttctcttctctccttaattctctcaattttaatattttattaaaacataaatctacaaattgatattttactatttttttaataatttttctattaaaaaatataaatctataaattgatattttactattattttaataatttttctataaaaatataaaatattttaaaagaagttaaaaataaaatataaattcaaaaaaaaattaaaacttaaatcaaatataatctatctatctatctat

SEQ ID NO: 345868 - DNA, 715 bp, Cannabis indica
ttatatttcaaaaataaatgtcaaatcacaatttaatcaattcgtacctgctttaattgacattgaagtaactttaatgaaaaacttaggaataaatatatcatcatatcattgctatacaatctgcaatgaaatctcatgtctcactacttggagttccttttaagtccacataagaatattattaatgttagagagttcagattaattaattgtgatgaaaaacaatattatatatttcattctctctctcaaattaatttttttttatctttccatatattaataagtgtatatttttatatctcattttttttaacactatttttctctcttacaaaaatttaaaagcactcctcttatatttttctatcttttacatgattaataaaaatagtatatatttttagatgttttgtagtttattccgagttaatttatgaataatttgtatattttaacaagattgatgccctcttatttttttattaatttatagttatctttttgttattttatagttatttttatgttgttgtttaggtgttctataattgttttataattatttttatgttttttttttattttattaccgttgttgtttagtttatgtgtattttttatagtgtatattttcagtttatttcagacaatattttcattgtatggtacatttattttgttatttttatattattttattaattttttt

SEQ ID NO: 345869 - DNA, 722 bp, Cannabis indica
gtaaaataatttccaacaccccaaccgctggaaagaggccccctccggatgcttgccaaataaggaaaccccaagagactatccttggcaaacatcgagtgcaaaaatcccaaaggcagtgactttgtagaaagaaagagaaaaagggaaagaagacagagtcactctaagccctaaaggcgtgattacgatagaaaaaggcgagtcccaaaagaaaacgtagtaaaaagatacaatcaaggcacaagaaaaggagattttatgcgttgtacagcaaacttaggcaaactcatccccagaagttcgacattcaacccagaaatcgtaaacatgcaatataaacaagcagtaaacgagtgtaaagtgtactaagaacttacatgaagattgaaggctgggggttggtgttgatcgccggtaaagggaagactgacaacggcgaaggaagagaagcaagtaatctatggcgcctgaaatttttcctctctctgaaagctctgaaaaatttggtgaaatggtgaaagtaaccaaatgaaatgagaaggctggctttcataggccagaaagggtgtaagacagctgtgatcaaccatcatcgtacaaccgggataacaatcgatttgcattccacagatccaacggttgggacaagcatttatcaaggcggtaggaaacgtttgagtactcgactgacacccctttaatgcgccgtatcattaaat

SEQ ID NO: 345870 - DNA, 1059 bp, Cannabis indica
tctgtgtactgcaaaaagaaatatcaatgttctcaaaaaggtatttttaacggaacaagtcagctccataatttaatataaaagtcttgttaaacacaaagatccggggtgtcccacaattccatgtattattggtgatcacatgattaacaaagctttacttgatttatgagttagtgtgaatttgttgccttattctgcttataagtaacttagtttaggggaattgagaccaacatctatgacacttcaattagctgatcggtctgtgaaaattcctagaggtatcatagaagatgtttcgataaaggaagataaattttattttcctattgatttcattattcttgatactcattttgttgaagacatcaatgttcaaattcttatcattttgggtggaccatttttagccacatctaatgcaatcatcaactgtcgtaatggtgtttttcaattatcatttagaaatatgactgttgagttgaatatttttaatgttgctaataaatctgtggaatgtgatgatgtgtatgacgtcaaatttgttgattcttctacacaatatttcttgttgaataaagataaatcttttgaaaattatgtaaatcattttggtatgaattttaaaagttctttttatagtgtgaattcgttgtaagagcccccaccattaatgaacacgcaagaatggaaaaccaaagttgaatcagttgaacctcttctctaattagaatcacaatcactccctgaatcacaaaagttagttcaaccccctgattggaacattccttttgatcccagtaagttacgttctagacagactaatctatttacttttcgtactgtttttcctcacaaagatgttgaaattgaaaattctaaaactagtaatgtattcaaagtcaatggacaacagttgaaaccattttagaattaacaccacctgaaatggaggaaatgctcctttatgactcgatttactaaggttagtgaattatttctcaactggtcatatctttaattgctttctttatttttagtattttagtttatttt

SEQ ID NO: 345871 - DNA, 961 bp, Cannabis indica
ttttgggtttaaaatgctagtggtggtggactataatttaatgggccaatttatagtcatttgggtgcttccatgtgcctcaaatggagataataaaaccgaccatcccattatggtcctaattgcataatcggcattataccatgcatatagttatccacatatattaatattgacactctatgagcaacacttatttatgtaagtccatataaaatattctaacattctcccacttggactacatattataccaatatgtgctcactaagcaatagtgtcaatacgcagaaatctcaagaaacactattgtctataagactaattatgcatcatattatatcgacaggatacatatataatacataacgagacatctgagattcatataacaagacgataactattgatctggatccactcgactatagcaccgagactaagccattagctcgcatcaacaagtgtgcacacacaacatcaaagagttatccagaatgtgcatgtattcaacaatcaatagcaattctcaacatgtctatcatacataaaaaacaatgactcccactgatcaaatacatctttggctcccaacaatccaaacaagaaataacttcttagtacatacgttcaggtaagtcatgtcagtgtagtcattaacatgttgtctgtaagtgtgttatgatactggtagaggaccccacaactttctcactacatatggaacgtcatcaccattaatggagtaatgatgcttctcaaattatgagagaaagatatgattgtgatatttatcacataagttcagtaagttcacaatagaatcaactactctaaacactgaaataaaatatcacaattgtaatgtacaatcaatgtcctcataacacgccacacattctacctttacaaatgaggatgttgtaaatgtccataccacacctagtcacatataacttcc

SEQ ID NO: 345872 - DNA, 533 bp, Cannabis indica
tacatcagagctatttgatctaatttgatcatttagcttaacatgaaataaaacaaactgcaaaaataagaaattgtactttaaattgtggtcacctgacctgagtactttttttcttttgtcgaaacctttgagcgtagtccgcccagcaggccattcacttaagagtaaatgttcgttaagtacttagtgtgttcgtccgacctggtactttattggtagtattttgttaaatgttcctcattccaataccgtggtactagaacgagttgcattttttcattatacttacctaatttttatgctccggattcgagaactttgaccacttgctatggtccctcgtagtcacgtccaagtacacctgccgtactgtccttgttgtttaagaatacccttcttaggaccatatctcccatgaagaatttctgagccttcacttgtttattgaaatatcgagctactgtttgttgatggtgttgggttttatgccctaaataaaagtccatttcaatgtaatctattttattcaa

SEQ ID NO: 345873 - DNA, 864 bp, Cannabis indica
tattcctgaatagagtattcttaaatagaggttttactgtatatatataaaagaaaagcataaaaagagtctaagtgtcatcttataattttttttttattttttaacacatttttttttaaaaacaaaccacatatacaaattaaaagtctaacattgtttagaaatattttaaatgttatctgtgtagattataaataatattcttactactattatttttttggtttaaaaagtattatttatttatgggtgattgattaaatatcttacccaatatatttttatttttcatctaataaatatttatatatttttataggtagttatttatcttttcataaatttttttaataataattttttttgtctaaaaaatattataggtgattgattaatatcttacctaattagttttttatttttatttttatctaataaatatttaaatatttttataagtagatatttatttatttttttaaagcaatgaccaatatcatttataaataataatgccatacaggctaaatggctatacatctcaaagaataaaataatagacagtcatctagcgaaacaagttatttatctatccgaagatcatgcacagctaatccatgtgcatccacattttgaaggaaaaaatcctatccaacatcattaaaaattgccagaagatatgcttgaaattctaaaaaaatctccatcttccattcctaaattaacagtcgatacttgtttcacttcctccaaaatgttctatttgaaaataagatgttccaactgcataaaatacaaagaaaaaatgagcactaataaaaaatcactaaaaaaataaatttctaaatgagactgaaaagt

SEQ ID NO: 345874 - DNA, 551 bp, Cannabis indica
aaaaaaaatgattaaaaagtgttactaaatgccaccaaaatttgtgtataatataaaatactataatatatatataataattaaataataatgagatttgcgtacttgattgatccatagcaattattacaatttgatagtacaatactatcaactagtctttctccctgtgtgtttaaatcaaagaagttttatttatctgattatcaaaagtttacaattgcaatgagacaatatatatttatagagttaggtagggaacttagctacataatttttgttagactgggcctactcgtcaaaggttttagttaactagaaaagcccacatttcttcttcaattagattttacacataaatgataagcccattaactattgatcacaaataatataggctagcacaataaagaactatccaatcaactgaaattttaataaaaccaataaaaattaatgtaagcccaaataaaaatctaattacattctcccactttggcacattcattttaatacgtatatattatgtatgaaatttttttttttttttt

SEQ ID NO: 345875 - DNA, 682 bp, Cannabis indica
  modified_base (433)..(433): a, c, t, g, unknown or other
aaaaatttgtaaaccgaccaacgatatggacggtttagtcgggttaacccgcctaagccagccaaaatttttttttttggtttcaaagtcaaagtcaataaaaatattagatttcaccaaaacacaacaaaataaatatgacattgaaattaacaattaagtatatatttatattattatatatttaatcctttatattatatataataaaaacaaaaaagtaaaaaaaaatccaaagtcgggttggtcagattattcggtttaattggacgggttggacttattttcaactcgcccaattaacaaattgggcggtttgaaattttttcaggttatttcggttttgtttgagtgggttattcagtttgggcggtttacgaatttttttgtacagccgtaccgtcaatcgtgttaaattatgctatatttgacncaaaaaaaatagttttgtggtaaatttacactaaattttaactttgtgctctaatgcacaattataaaattttgatgtaaaatttaatatctaattaatgttttattaaaaaaattagatctaataactttataatcaattaattattattttaatatgtaagataataaaaaataatataaatgtttcatactttaatataatagttaatccataattattaaaattggtcatatatgaccacattac

SEQ ID NO: 345876 - DNA, 504 bp, Cannabis indica
aaaaataaaaaaaataaatatgccctttcaaaatctataaacagaaaataattacatgttctaataaaaataattttgtcaaattaaagtatttcgattatctttatgtgattgtagttttctttccgacagtttaataaacagcataataaaatattatctttaattattttttattttaaaccgatacatttctctcattaattaacgagctataaatggaattaaattttaaaaatattttggttttatttattacctattatatatcattttctataatatttttcaaaataattacttttttgatataacttcttaaatatagttttcatggtacctataaagtgttttatataattgagagtgttattcaattctaaatctatagtagtgcaaggcgattaataagttagggaatttacttggtaaattctaaatctacttattgaaagctcggttatataggtccatggtcccctcactagttgagataatactgct

SEQ ID NO: 345877 - DNA, 1630 bp, Cannabis indica
gaagattttccataggcctggctctgcaaaagaaataaacgaagtgttagaataatcatgagaaaggcgtgcacccaacaagaaagcaataaaactagtcctaccctgactctctaactcagccctagcaaagtcttaggctataaggttggcttcatcatccccgggaaagctgtccgaggggagaaaccagctggaagataaatgggctgagtggtccaggggaatagacgccggaggtccagagcccatccaagaccgacccaagaaactggcccaagtgggagaaataatattccttggcgtaactcccccaccgggtggaaggcattctaaacctactgaggcgctcatcgaaccctatgggtctacgctgggtatactctcagacaggagggacataatgaattactaaaggagacttactagaagctgaagtactggcgtcgagagcaccagtgttgggaaccggggccacaggcttgggcctggagggcctacgctccgaaggagcttccagatgaagggtcctcccggctgcagcctgggccttgatgtaggccagctcctactcccacctaaagaggtacttctggtaccggtcctccgctgtggcgattatgtccacccggagcgccctttctgcagccggagtccttacattcgggcaggtgaccttggaaagattgaagtcatccaccgactaattctcggctatcagcttggccttccgacagttctccgtcgtcaccaagtcccccgacgttgagggccttcttgtcgtacgtggagaaagtcttggcccgctgaaggaacacttgagtgggtgcggtccgtatgtaaggtgggatcctaacccaatttgtaagaagctctgggcagtccatggcttggaaaccggaggagaagaagaagcggtggcggtactccttcacgtgtttttgatggttgaaagggactgagccctcgttcaaagggtgggcccgaaggccataaaatatgtctttaaatttgtcccccttcttggggacagatacaagttcataaaaatacaaaattttagccggactaggcgaaccccagctccgggcggcatacataataaacaggcctgaaagcaggcggcatgcttgagggattaattggtacgacgcgaggccaagaaaaactagaaaatttacaaaatagtcctgaagagggagcatagccccggacatcaaatgggtctggctccaagcgccgaagcccccataattgtgattgggcatctcctcatctcgaggcagccagtggaaggtcctggaggctgatggtttgatgcctgccaccaccacaatcttttcaagctggtgggcacaagtcagtgtggagtggagctcatccgcctcccatccgttagcacgggacttatagttctcctgggccacgggaccccgcatgacctcctctagggtggccagttgaacctctcccttcttggaagatttagaactagatgcggaagcagacattttggttctgaaaagaaaaaaaaatcgagaaaaatccagcagttaggccccaaaccaaaccctaatgttcaaaaaagggaatggggtcccctaaccgctgcaaagaggccccctccaga

SEQ ID NO: 345878 - DNA, 839 bp, Cannabis indica
gaggaggagacacttttattttccagaatcatgccctcaccagggtgtgatttttgaacaacactaacacaattcttcacgggcatttaaggggctcaccagggtgacataagcaccttccaatggccaaaagcagtgacaaaatactacaagggtgtggagggtcgttacctattatgtttgaaggaccaagccttcttatacttggtcctgcactttgatagacaacaacattgagtggttgttgaggtagacattgaggagtggtagattcgagtttacgataatgatatcttgtgtaccaactaagatgattttaaagcctaaatgttactttagatgtagctgtttccacatctgctgaagtcgactagttatttcaatctcaacaattacattcctaatgtattactaggggatagcagccaactaagaataatgcatgctaaacgcatcccaagtgaggtggttccccaaaataaaagaaggtaatattaattaatttagtatatttcccttactaatcattaattttttgaagtttttaaatgtattattttttattttgtagtggtgattgcaggatgtacgacattgaggaggaattaataagattgagaatttacttggtaaattctaaagctacttattggaagcttggttacataggctcatggttcccgcactaactaggataatattgttttgtagtctcaattaattaatttatttaattaattagaattctaaataaagactatgtcttatttgtgaatttaaccacggaaggacacaattgagaagaaaagagaaatcaaagtttatttattaattaagag

SEQ ID NO: 345879 - DNA, 1084 bp, Cannabis indica
cacttgggtcatatggggtacaagcaggtttacagttaaagtaattatatatctttagaatcttctcaatgtagtgagattgatctagagaaattcccttatcagacctagtaatctttattccaaggattacactcgcttctccgaggtctttcatatcaaagttggaacacaacattgattttacagtgttaacaacatgaatgttagagccaaaaatgagcaagtcatcaacatatagacatatgattgtgcatatatcattttcagatttgtaatagatgcacttgtcactttcgttcactttaaagccatttgaaatgactaaagtgtcgaatttttcatgccactgtttaggtgcctgctttagaccgtacaaagatttatccaacttgcaaaccttatgttcctggccagggatcacgaacccttcgggttgatccatgtaaatttcctcttctaagtcaccattgaggaatgcagtcttcacatccatttggtgcacaactaagttgtgtatggcagctagtaaaattaaaactctaatggatgttatcctagtgactggtgaaaaggtgtcaaagaaatctacattctctctctgtctaaaacccttcgctactaaacgagccttgtatttgtcaacagttccatcgggtttcaatttcttttttagaatccacttacaacctatagtcttatagccagggggtaagtttacaacacgcaaagttttgttggtcacaagagagtccatttcatcatctacggcctcttgccaaagatctccatctaaagaagtcaaagcttcttggaggttagcaagatcctattctaagctataagcacaaaaatcagaaccaaagtctttagctaaccttgctctcttacttcttctaggttcaatttctaaatccttagtatgttcattactcctaattattggaagattgctagttgatgcgcccccactatttctcaatttaaatggaaatttatcttcgaaaaaatcagcgtcattagattccactatcacatgcgcattaagatcataaaacctataggctttgctattaacaacata

SEQ ID NO: 345880 - DNA, 673 bp, Cannabis indica
aatattgttttgtggttgcttttttgtttttttttctagaagcttagatgatgtttgttttttaatatttttgtaccttgaatttcttctctgatttgattatgggtaagattcaatgtttttccgatctccttcttcaaatcgtctcctctgtacgctttcaatttttgtttgtaggttgtttttgcattttttttacagcaatggagattgatatctctgttttttttttctccttttttgtatttggatttttcgggattttattattttttccttgagatctacatcttgatttgagctgatttccctggtttttgaaagaaaatagtcgagatttggtggattggagtgtttcggctggctcacgaagaaggaggagtttcctccgtttttttttaagccggtatttttgcaagtagaaactttgttttctatctatgtttatttttcctttatagggtataaatgtaaaatgccaactttattagtttactagggaacgaagcagcgcttcgcgcggtgttgtccaatttttataattttctatgttttgattttttttatgttgattaagtgatataattgaatataaaatatttagaattgtatattataaataaagtaacatttttaaggttagaaagatgaataatttattatttttaaaata

SEQ ID NO: 345881 - DNA, 683 bp, Cannabis indica
tatgctaaaaaaacagtaactagttactagttactattttttcagctttggtcaattcttctctaaagtgttccaaatcattcccacttgattttgaaccatttatacaccttataaatgaataaatcaagtctccaacaacaatattttcaataactatcattaattcacattcacaaacaattagtaacatcttttactaatttaagagttaaaaagagatgagagttacatattcaagtgatcatcaatttaaaggatttgcaactcctattttgtgattattgtacacattttgtaactccataatgtatgttacaatttgacaaaattaatactttgtcacacttaattatttataacttaattatttaatctaaatattatattattttgtaactcccttagttttataactacccttgaagagggtaatgttgataacttaaaaaagagtgagattaaattattttcttcaattatattaactaggcaatatagccgcgataattatttttagtgttataattaaaaaaaaaaaatagctatttattaatataaaaactagtcacttaaaaataattctaattagtaataataataaaatcacattatttaatttcatgttatgagttactattatttagagttatttattaaaaattttaaaatttatactatgt

SEQ ID NO: 345882 - DNA, 557 bp, Cannabis indica
atttttacggaaattcatataagtaattaataaaacaacctaaatctacataacaacttacataaaaacaaacagagcaacttaaactataaaagttgaaaaaaaaaattaaaaaataatatatggtgtaatttttttattgtgaattttggggtttataattatttataattttgcaaatttagaatgaaatagtaaaagatatctacagcatataaataggatttttactctataagacatatagagaagaatattgtctttatctttttgtaaaaaattctctaagaattttggaaataagtttccccttcagttatatttcattcaatttcctaatacattttcagagagctataaatatgatatattatttttttttaagtattttactaaaataattctaatggtgatgtaaaatatatattaaatttggactaaattaaaaattatgtcaaatttgacacaaaagataccatggctaaatttagctaacaataagtaatacttttttaaggaaaatttacatggtatactaacttttgtcatttaattac

SEQ ID NO: 345883 - DNA, 907 bp, Cannabis indica
catgatttaaagttgactcattaaaaacattattaggaaaactcaatgggacaaaacctgagctaagaaaaagagagtgcaatatatatatatatatttcatatttgtaatatttgcaagttttctcgttaaaaaccctatcaggaaatctcagtgggacaaagagtgcaacatgaatatgtcttcccctcatgcacatataatccataattattttggtgataatatacatcataagattattgttatcacttttaaaacatcacagtatatattatctatgatcaaatatttactataactctttcagagtatgtgtggacttctaaattatggatgggggattctaggaacttcaatgtaacgccctactaatttagacacgttacaatatttttctaattactgtgtactactttgttaatcaaagagtttactgaaaaatgtgactaattaaaactttcttgcaacaaacataaacttaaataaatacacatagatacataattttgagatcctattttaaagttacataagtttacaaaacacttgtacaccaaaagtcgtcgtctagtgactatcaaaagtgagcgtaaactgtctcgaagacccaaactgaaatgaccgcatagttaaatcatgagaattagcagataattaagaggtttaattattattatgtgattttgtgcctcttagtagaaattagggcttattgtcaaaaatagcccttagaaaaatattttctcaaatacagagatatatttgaatgctagatacattatatatgttatatgtgaattttttataagggtaaatggcgacaaaaacctcaaaactttcattttggtttcacttaacccccaaaacctaaatttgggcggtaaatttcccaatactcgtattt

SEQ ID NO: 345884 - DNA, 611 bp, Cannabis indica
gcataagttgctgaatttttttttacctattgtgtcgtgtggtgaatcctcactctcaaaacaagttgttacaacagtaacaatgtccaagaaacacaaatcaaaactaaaaccaatcacaaaattaaaatttgaacttaattgaaaataagataaagaaaacttaactcaataatgaatgaatggtggatctttattgaataggaatagccagtagtacacaatagatgagcccaagattacaactcaacactgtaagcaattacaaagaaatatctcacattgagggaaatcacttcaagagtgatactctcttttacatccctccacacacactcactataatcttagactctctctctctaaactgaatctaatgtatgagctttggagattagagatcaagactctcagtcagacctcctttttagaataagttggtattaaaaccaactattataaattgcatcaactttctttagattcatctgaagagaaaatagatggacatactgacatgagaggttaagtgagtttgatcccaataattccacctgattagaatcacttataggactgagcatcggtcggtttggtcggtttttttctta

SEQ ID NO: 345885 - DNA, 668 bp, Cannabis indica
aagcttaagtatttaaggagaaatgtggtccttaaagtgggcactatatttggcaagcatgattcgcttggaatcaaaagtgtgtggtcaccaaattgcttaatcttcatacaagaaagcataaatttttcgagggatgggacctaaactcccttagtgttttactcattgatggtaacctatcttaattctagtaaaaatctagtcttaagtttaataagtaataataagtcaatagagtgaatgtgaaattcaaattgtcccatctatgaatgagtacatgtgataaaattgagagttacaatcgaaaggtttattaatagagcttaaaattaagaaaactcacttaagcttaagaagtgtctaaagagtagtgagacactaaaactctacctatatggactagaggtggtgcaaccttttacgaaaattgggattattcttttgaaattctatgaattggaattttgcacatgaccattaacagtgtaagagcgagacatgtagtctcaagtaagcattagcaagtgtgtgtgtgtgctatcaccgatttgtactaaaagaatagtggttcaatgctacgacaactaaattttatcaacctttgtgttaactacactaaggtaaaatttaagtcgaaagacattttacctaatgtacctaagcaa

SEQ ID NO: 345886 - DNA, 573 bp, Cannabis indica
ataaaatattcatttatcagaatcaataatattattttatttccttaattagaaatattctaatagcgattccaatctcttaggatgtagtcttgatgctttcaaattttttgcatagtgtgttactcaaaatatttggaatgccaatgaaacatttgacataattttacattgcataacagaacaatctaaatccctctaacttttattcatagttaatatgagtgtgaggcattcatactttatctttgagatgggatattgaagttaatatatgcccaagttgttgttggaataggtattcctctttgagatgcatgttgagatgatgcagagaagaaaggggttcattaaattttctagcttgaaattgcctttatacttaatatactttggtaagattatgaatcttgaggaatgcaaggctaaatgcttgagcatatgctcttgtaaaacttatacaaacttggatatcagtggagaaagtagagtgactgcttcgtctaatttagagatcagcttaatattcaaaaatttcaatcttgcggacaattgtgcatttgctatcaggct

SEQ ID NO: 345887 - DNA, 668 bp, Cannabis indica
acctacacatggaagcagaactgtgagtcgacagactcagtaagaaatgcatataacatatcatataatttccgacctgtaattaggcgcccatacacctatttacaaggcttaacagatgagcatgaacgttcaatactagggtacaaccactataccacatacactacgtacctcactgtacgagtgttggtagggtttatttcgtaccctgagtaccactgagtgatataccacacaccttagtactttcccgaacttgtgttggtatcactgtactgtactcacaaataatatttactataccaacgcactctgtaccatatccgtacaagtgttggtagtgcacttaacaacttaagcatgcatatacacataacatatatatacattcagataatcatatcacacattatattcagttcttaccttatttctgaattcaagtgtgctggccgacttgaacgaaaatcttgtgctagatggatgccctaatcacatcttaaaactgggtaagctagatgattaaaaccctaatcccgggaaacccaaacccaaaactctaggttctgttatactttctataggttattctaactctggaaattgggaaacacctaaccaaggcaccgcaaagacgaaaattgagaaaatgaaaggcccgggga

SEQ ID NO: 345888 - DNA, 1157 bp, Cannabis indica
tgaagtcatttctttctaaatttcttgtaaccaggctttaccattcttgccattgacaacttcaaagtagcttgaaggaactgaactgtcaatttcatctgcaacagtgagtgcaaaggctataaattcagcatatccaagtctatcaggtagccttatttctcttctatctctatctttagccagctgatagttgctgaactcatcttgatcatcatctgatttatcttgactatcatcaatctgcttgtcttgtgtctgaactaagtcattacttggttccacctcaagttataatctgcttgagtttgtttcttttgtaggtgcagcttcagtttgacttgctgtcactttcatggccatctcatcttctctgaacacaacatccctaattataataaacttcttaaaaccagtttcaaggcaccataacttgtatcccttgatcccatcaggatagcttatgaatagacacttaatggctataggttggagcttatcttgtctaatgtgagcataggttgtgcacccaaatacttttaaatgctcatacttaggaatttgaccactccacatttcttgaggagttttaaagtttatggctgttgagggacacctgttgattaaataacaagctgtctttagtgattctcccgaaaactttctttccaaaccagaactattcagcatgcatctcactctttcaagaagagttctattcattctttcagccaatccattttgttgtggattcttgacaactgtgttgtgtcttctaattccttctcttgtacaataactcttgaactcatatgagcaaaattcaaggccattattagtcctcaaaaccttgatacaacaacctgtttgtttctcaatcatggctctctaattaacaaaggtttcaaaagccatattcttattttcagcaagaatacccagactttcctggagtagtcatcaatgatactgaggaagtaaagtgcaccccccaatgtttgaatcttagagggacccaagagatcagaatgtatgtagctcagtttctcagtagttgtatgcatgccctttaggaatatcactttgcaactttttcccaatatacaagattcacaaaactctaacttgtcctttagaccacctttgaataccccttg

SEQ ID NO: 345889 - DNA, 628 bp, Cannabis indica
aagaaatttttacatcaaaaacacaaaatacaatctttattacataaatacttatacacgggcaaaacaacttttatacacttttgcttaaatttattacatatttaccacattgcacacataattcttgctttttgacacgtcagtgattaatctatcgctctatacatcatttctctcatttttctcttcttttccttttattttctatttcttttcagtatttttttttttaaatattaacctccatacctgaacatttcgccctccacgatcccaactccattttctctcttcttttttcttcaaatttttttaactcccattaaccgaatcccataaccgttttcttttttttttttttttctcttaatccatatataaatatgagtgtaactcgttctttatcaactccttcccatgttcaaaagaaaagttctaaaatgtggttaaaatctttagttaatagaaacaagggtaaacgacctgttgttgaggaggaggactctaattttgctcctccattatcgaaacgtgggcgagctcctccaaagaagaaatctaaggtggctgcccaagaaaaaattcctcaagatgatgctaaaaaaaatgatcaagatggagttgg

SEQ ID NO: 345890 - DNA, 793 bp, Cannabis indica
atattttttttccacataactagcaataaaataatacaaattattgtaattttatgtctctaacaataaataaaataacaaataacaaattcaaaggaagaaaaaaagattgtatgtatagaaagaaatatttagttttgttttaaattatatgtagaaaaaataattatatataaaaatataatatacatttgatctataattgtattatatgtattaagacttttaaataattattttttcacattaaaatattatttgtatattaaattttttttttaattttattataatatgtgtggattggattggatcggttatttttacatgtcaatcaacatccaatccgcacaagtgcagatattcgcactttacggattagattggcttggatcgtgtggattgagttggatcgactattttatgaacactcctaactgttttttttttttttaaaatttagttaacattcattttaaaattaagttaattgaattgtattatattatacgataactaattatctttcaaaatagcaaaaaggtatataaaggaatttttacagttttaaccaaaaaaagtaataatagtataaaaatatttccagctggccaaataaacaaatatacagctcaaataaatttctttacacaaatgccacttacacacaccttcaacccaggattcatgcttcctgggcaactatcccgcaatcacgcagcaacccaacgcaaccgaaacaaaaattcaactagaaagaaaaccaccattaattctggcgacttcacctgag

SEQ ID NO: 345891 - DNA, 472 bp, Cannabis indica
aaataatttccaacacttggaaggctatataatggactcttttgacactttggaagcaacaattggagggacgaaaattggaagaaaaaagcagttctagagacttttatcaattattttttcgacgagtttcttttcttttactcttttcctatgttcttaattaggggtgggcatcatccaatccaatccaattgaaccgaaccgatccaatccaatccaattacaaaaagttggatatccaattacaattggattggattggatgttaaaagttggattctaattggattggatcggttattggatgtcaatctcaaaatccaattaaaaccgatccaatccaattacatttatatatattaaaaattattatataataaaaatattgaaaaatacaataaatattattatattttattagattttttgtatgttaaatttgtaacacttgattgtttagtgtatttat

SEQ ID NO: 345892 - DNA, 715 bp, Cannabis indica
cccaattagtgtggggaccatggaactatgtaataaagcttccaataagtagatctaaaatttacctagtaaatttccaaacttattaattcttcctaattccactatagatttggaattgcactcttaattatatagaacgctctattaggaaaaatagatgaaattttaattacccattgttttaatccaaatagtcaaagattctctatggatgatctacatcgagtagggacaaatataccattatacccttcaatatatcttatccttaaaatacttagctagttgaaaatcatatttcagtaaactaatataattactgaaatgaaacctcaatcatttatcgcattaagccaagctcgaaggaaaacatcattcagctctagaagttataaaagctatagattccatatctatgattagtgctcccactcaattgtactaccatgtttccaagacataagtattgggtcgatccaattagccagctttaacaaacaagtcaaagacagaacctaaccatctcaagattaagatctgattgatctaagatcaactaagtgatattgacttagaaagaaataatagtaagtttatgatgtctttatccaatgtcaatatcggtccagtccgatgtttactccatacatccgatactagcatactttgccaatacactaaaaaaggacataccatttatccaaggtgtaag

SEQ ID NO: 345893 - DNA, 881 bp, Cannabis indica
gaagcagtcaaaaagaccctgaaagatacacaaaagaaaagactcgaggatgctaaaggaaactggccagaagaacttcttgaatatgaagctatgctccctgtagagctcgaaccaccatcccatagaagattgacatacaaccaagaagcaaatcacatactcttggctgaatcacttgatgaaatcgaagagaaacgaaccacaacaaacttaaagttgatagcccatcaacaaaaagtagctcggtatttcaataaacaagtgaaggctcggaaattcttcatgggtgatatggtcttaagaagagtatttctaaacaccaatgatagcatggcaggtgtactcggatctaactgggaaggaccatatcaagggtcgaagttctcgaattaggagcatacaaattgggtaagtatgatgaaaaaatgcaacttgttctagtaccacgctattggaatggggaacatttaagaaaataataccaataaagtacgaggtcgaatggccatattaagtactgaaagaacatttaattttaagtgaatggcctgctgggtggactacgcccaaaggttcggacaaaaatgaaaaagtactcaggtcggatgaccaccatttaaagtacaatttctaatttctgcaatttgttttatttcatgttaagctaaaagatcagattagatcaaatagctctgatgtaagttactacggtaagaacacattttcgattaataaatgaataaagatgtttatttcaaaattcaaattgagtcgaattactaacatgtagtcaatttaccatcaagtgcgtacaaaaggtttggccgaacccaaaaccccgaacagataaaaaagcatacttgcaaaaaacaagtgac

SEQ ID NO: 345894 - DNA, 721 bp, Cannabis indica
tctgtttagtcatgtactcccattgtgcaaacatttcttcataagcattttgtcgacctgtgctatcagcttctgatgaagtggaaacagcatcatcttcagactcaactgggtgacagctttaggccatgaaagccagtacctgcttatcctcatctgatccttcattggcagtggagttcttttcttcttcactatcactccaggttgctgcaagggccttcttctttttgagtgtgttggcgcactcagcctggatatggccatatccatcacactctctgcacttaattcctcgacctttttgatcagtagaagcttgtccttgtttgaaatttacacctttgtttttcttgagaaaattttctttgtcagctggggaatttcttctgtagttttttttcaagaattttgcatagtttctcgtcaataaggcaacggtttcgtcagtaatgccattcaattcttctagaactggtttcttgttttcttgatgaataagtgcaatactcgcatcagatttttccttcaccacatccttctgtttcttggttttcttccacctggacagtgacagctcgtaattttgcaaggacccgatgagttcatcaagatcaagttcctcaatgtttctcatttcttcgattgaggtaactttggacatgaatcttctggggagaacaccaagaacctttcgaaccaattttgaatttgagtaagt

SEQ ID NO: 345895 - DNA, 668 bp, Cannabis indica
tattactgctatcaatgtattctaacaggcatgaacatcatgtatgctaaacatgtaattacatattcataacattatactaatcttacctttttttcaaattcaggtgtgccggccaacctgagtggaacaactgctcgcgaattataggcccctaaatcacatcgttcataacacggataagtgacacgctatgtcacaaccgaggacttaggttttaaaccaaaagttttcctactattagttaacatggcaataccctaaactaacatggaattaaccaactaaagctctgaaaataacacgaatccaaaacataaaaattttaggaaactgatttctggtccggttaaccggttttacagggcctgtgaaaccagttaactagttttacacaaggtaacctaaaaattttgaaaacctaaccaattctactccaaaccttaccaaaccttctacacctgcacattatacccaaacaaacatatccaaggccataaaacacctcaacatgcacaaaatcaagattaaccattaaagactaaagtttgagttttaaaactcaaaccttgtctaaacacaaaattaacccatcaattaacttcaaatcagctcaaacaaccataatatatcattaaaatacagaatccaacaactctaacaactca

SEQ ID NO: 345896 - DNA, 553 bp, Cannabis indica
catcacccacccacccacccacccacccaccgactaccccaaccctccacgcaaccccggccaacttaccgaccgaccgtccccaaccatctctttcccctctcgcatctccctttctctctctgtctcggcatctcttcgctgccctacccaaaccgtcccaaccagccaaaccctcaacccacatcacccacagccgaccgccccaaccgtccacgcagccccgaccgacgtactgactgactaaagaatcaaccgacgtggaatttagctcatttctgggttttgaaggtcgggtctgatggtgtgcccgatggtacactagtttggagtagttctgggttttgaaaattgggtctgatgtgggcccgatgcccgtccgatggtgtgcccgatgcctgttcgatggtgtgcccgattgtacaccagtttggcttatttctgggttttgaaaatcgggtctgatgtgggcccgatgcccgtccgatggccagtccgatggggccagcccgatggtcagtcaattttttggaaaagaggaagagagagggac

SEQ ID NO: 345897 - DNA, 1973 bp, Cannabis indica
ctcagcatgcccccggctgtactcatcaagggcttagttatgcttggccacgcggagattgtgcctctcctcatccgcaaagaccggggtcaacactatgccatgcggcacagtgtattcctccgcctcggaaggaattccagagtcgtggctcaacgccggggccggagtgtccaccctgtgggtccgcttagaaggttcctccaccaccatctttcccttttgcttgcactcaagggcggccgtgtcctccgcttcaccttctttaacttcctcctcttcatccaccaagacgatggtgtctgaaggagcattggaggaggacctcccgggagtagttaactgggaggcagccggaggtagagaagcattcggactgtaggcctcaacaagagttgccaggagatcgtccgtgggcctgactgctgcaacaaagaaataagtgttaggacatttatgacaaaactacacttagcaaaaatgcaataaaactagtcctaccctgactccctaattcggccctagcaaactcctgaatcatagcactgacttcatcatcctcgagaaagttgttcgagggaaggaaccagctggaagataaataggctgaatgatccaaggggataggcgccggaggcccaaaacccatccgggaccgacctaaataatggcctaagtgggaaaagtaatactccttggcatgattcccccaccgcgtagaaggcattctaaacctacggagacgctcatcgagtcctataggcctaagacgggtatactcacggacgggaggaacataatgcattgtcaaagggaacttaccagaacccgaagtgctggcatcgggagctccggtatttggaactgggaccacagacttgggcctgggggtcctccgctccggcagagcttctaggcacagagttctcccagcggccgcctgggccttgatataagccagctcctgttccctcttgaagaggtacttctggtacttgtcctccgccatggcaataatgtcgtcccggaacaccttttctgctgccggagtccttgcgttcggacagatgactttggagagattgaagtcatccaccgactgatgccccagaatcaacttggccttccgacagttctctgtcgtgaccaactccccgacatcgagggccttcttgtcgtaagtggcaaaggtcttggcccgttgaagaaatatttgggtaggctcagtccgcatataaggagggatcctaacccactccgtgagaagctccgggcggtccatggcctggaaaccggaggagaagaagaagcggtgacgatactccttcacgtgcttctgctggttaaaagggactgggccctcattcaaaggatgggcccgaaggccataaaaaccgtccttaagtttatctccctttttgggaatagaaacgagttcataaaaatacaaaatttctgccggactgggcgagccccagctccgggcagcatagaaaataaaaaggcctgaaagcaggcggtaagcttggggaatgagttggtatggcgcaaggccgacaaatacaaggaaattaataaagtagtcttggagagggagcatagccccggccatcagatgtgtctggctccaggctccgaagcccccataattatggttgggcgtctcctcgtcccgtggcagccggtgataggtcctggaggtcgaaggcttgatgcctgccaccaccacgatcttctccagctggtgggcgcatgtcaaagtagaatggagctcagccgcttcccacctgttgccaccgcgcttcccctttccttgaagacttggaaccagacgcggaggtagacattgtttggttctgaaaaagattgaaaaaaatccagcagttaggccccaaacaaaaccctaattcaagaagggaatgggggtcccctaaccgctggaaagaggtcccctccggacacttgccaaaaaa

SEQ ID NO: 345898 - DNA, 524 bp, Cannabis indica
gggcataaaacccaacagtgagagcatatttggttaagcttgttactaattgctttgataccagctgttttccacgggagttgaatgaaacaaacttggttttgatccataagaagaagaatttcacctccatgggtgatctacaaccaattgctctttgtaatgttgcttataaggtgctttcaaaagttattgctaaccgtatgagaagccttatagaccttgttatttctgacacccaaagcgctttcattcctggacgtctcattcaaataatgttatggtggcgtttgaagtgatgcattatcttaagaggaagacgaaaggcaaaaaagattttatggctctcaagctagatatgagcaaggcctatgaccgtgtggagtgggattatcttaggttcgttatggcttgtatgagtttcgccgagaggtggattaatctaattatggcatgtgtcttttcgtcaattatactgttattcatgcaaagccatactatgggtccaatcattccttcgagag

SEQ ID NO: 345899 - DNA, 998 bp, Cannabis indica
cctttcctctgcatgagaccctcgaaatgcatctctgtgagacaagataaaagtgttagaattaaagacaagtaaaaggagagcttggggcatgattttccgcctaaggaatttaccatagtcactagaagacgaggtatcactagaagatggggtagaatgaccacaatatccactaacatccctacaactcgtgatcctgaatatatcatagggattaattggttctaattccagctcgcgtctaaatgacttgccctatccatcatagtcccatactactaggttacttcgtagtatgactcaacaaaactaatttgaacacggaatctgagataccaaataaaaaagttaaaagcggctatctcgaaatataactaaagtgttacattcagccctaagcagtgtgggtgaccaacgacattgattacctcaagatgctccttcaccagcttctcgaggggtagtattctgtaggtacaatgcctgagccacgcgatcttgaggtttctccttgtttgggataggaacttgctgccaggaagaatacttgggatatttgtaatcacaagtaaactccttgtcagttaggagatccacaaacctcagattaacctcgcttagaaggaagtcgcatgacctaaggccatatgggagagtcagcaagagcgtgcgccgttcagccatctcagggatagggcaggtcttttcgagatagctgtcgagaacaaaacaaaattttagtcagataacatagaataaaagacatggattaattcaaccaagtctaatgcaaataatcacttacaaattatgcgaaaagtggttgtgccaatcttggagaggccagtcttccaaaagaaatcgtccttgaaggaagttttgtttggcaaatccacgatgatcttgcgattgtcggagtgagtgccgagatagtaaaagccccttgcggaattcttcctcgcaggaacaactttaacagagtaaagatactctat

SEQ ID NO: 345900 - DNA, 1087 bp, Cannabis indica
tttaaaattaatattacgtggactactaaaaacttgtcacgtgtacaagtatgtacacgtggacagtccactgtgacacttaactgtgatttttagacggaggtgtgcaaagcaaaacggaaccagggtttaggtagtttagccgccaaaaattcagttttcgtggttaagtgttacaaaacgtaaagttcaggtggtttaaccgataatatctctttattgttattaataggttttaattcttcatgttgtatttttttgcaagttatatggatttcctttcatattttatttatatgttattattattattattattattattattataatttacttcgaattgtatttttgatgatttatttatattaatatgtattattttagtagttttattcatataatcaaatgtttgattatttatgtataatatttatatatatatatatatttattttatatttactgtcatttttttagatagtttgtactaatttttttggctagtttgagctattttgcttggctattttgtaccatattttggctagtatgttgttgactcgtttgcgcatggaggtgacctcaaagagtcacaggttatgaatatcttaaaaccaattggcaatgagtggagtagtccatattcttatatatgactcaattctctactatttattctatgtgggacaatgtactccacaacattctccctcaagatgatgcctattttttaggcatcaatcttgaatcgtatcagagtggacatggtcactatctgtataggtgcggatcggataggatcacttgtccgcaagagatattgctctgataccatgttgagaatcatggggttccatctcaaaaccaattggcaatgagtgaagtaacccatgttcttatatatggctcaattctctaccatttattctatgtgggacaatgtccacaacaggctagtttatttctactttagaagacttcgttttaatttttggacatacatattagtttcaatggtgacatcatgcttcaaagataagtttttcttgttaacataatatttgtgttttatccttaatttaaa

SEQ ID NO: 345901 - DNA, 679 bp, Cannabis indica
tatttttattccttccaaccaaagaccacctaattttacaaagtaaaccaaatgggctgtaagagtatgaatactatgaaatgcatcatgcatgtgaccgttagatgactccaatactatactatacgcttatcaataaatacgaatttttatttgctaaacacagtcacgttgtatattcatgtttatatttgattgaaaaaagtacatttgtataacgtagtgttattgtaataccattacgtcaaatataaacatgattattattgttgtgtcgtgttttaattcaacaagtatttgtgtattttattgtgttaacatttaattttagagaggaaatctcccaagctaaagcttttaccatgaaaaagaaaactttacgtaacagcaaaataagcaaaatatgaaagcaagtcaaacagcccaagagaattggggaagaaagttaaaaagtacattgatatgtgtacatataaattacacactgatttaacgtcacaaacttaagagacttgccacatagaattacacacacattcaaggtcacaaacttaagagacttgccacataggtagatttgtgtttgatttatatgtgcacatattattaatccaaatattatattattgttataaaataatataaaataatataaagtagatgagaagaaagaagaaga

SEQ ID NO: 345902 - DNA, 901 bp, Cannabis indica
gagtgcgattccaaatctatagtgatgaaaggaggaattaataagttagagaatttacttgttaaattctagatctgcttattggaagctcggttatataggcccatgatccccatactagtttagacaaactgcttgtaagactcaactaattgattttaattaatcaattataattctaaaattagactatgtctagtttatgaattctttcactaagatatggtttgattgtgaagaaataggattttagggtttatttgttaattaaaagactttgtggagtttaattaataaataaaataaataaaaattttatttgataattaattttaagtattaaataaatagtttcagcatttataggattagaattacaaaatatgacatttgtgatataatagataaatggttaagaaaaatgacaaaaatataactagtcttggccccaatatgtcgtcggccactatgctcctatttttgctattattttatcattttttattccaaataattcaatcctaaccctaagtgaattattataaaaagaaaagattagtctcattatccaactaatgcttctaaacctagttttcattttgtcagacaactagtgttttaagacttcttcttcttcttttctctctactattttaaaattctatagtgttcttcaccattaaaattagagccttagtaattgagtgcatgcccacccatagcaagttagtcctcaatcatagtgtataagactgtgaataatctaaataactaaaggagtgtcggactcagatcttgattatactctacgacagaaaggaacaacggttagagatctgagcggaatgagtcatttaattctgctacaatcaatgtaaggtttctcatactttatatatgt

SEQ ID NO: 345903 - DNA, 908 bp, Cannabis indica
gcttgcctgattaggcaatgcgaatatatgagcatatctatatctatgcaatgcatatggctggttatattatctattattgaatgttatggtttaatcacttatgataatgaaacgtatagttagttatttaatgtattcttctttattacttttcttgctgagtctgtgtgactcacgggtgctctgtgctgcaggtaagggcaagaaaaagttagagcagccatgagatgacagtcttctccaagaatgtacatattgaccccaccgcgctatgtgccgagttgttaggagttgttttgcactggctgtatctgctgtgcattttgattttgtagtttgcactattgtcgtatagtcttttgtaaactttttataacaaagatctccggaaatacttttttactgtcgttatgatgttcgtttttagtattttattgtagtcaaatttttattatcctcacagtttttaataattaattaatctattagtattaaactagtttataaaattacacacgtggtgttatagggcgttacataacctatattgatcctataattacacgactattttcaaaataagtaaaaaatattatgcaaaaatagcttactaataatatctcaagaatagcaagattctcgtaatactaaaaattcatatagctaatattttgatattcttcaaggttaagattcacaagtgatcaatttgactattaaaattattttacttaaggggcgtttgatatcacttttattttttaattttttaatcaaaatgaaagcaaaaaattgtgtttttaaaaaaataataatttgttctataaccactttaatttttaatttttaaaacataaaacaaaactgtgttctataactttcatttttatttttttgtattttat

SEQ ID NO: 345904 - DNA, 735 bp, Cannabis indica
gtgagaatcctttatgttgtttggtaagttaggaaggagagaagattcattcttttgtttggtattgaaaggataataggaggaatggagatgtttttaatcataaaattactaaagtaccaataattagattttttttattatattattatacaaatagtatttttaaaaatctttattaattaaattgtaaaatgtttaaagttaaaaacactattttttatgtatttaaaagattaaattaatctaattttaaaatttatattgtacttaaataatttcaatttaattttttaaaaaatattattttgaatattattaaaaaatataggggaaatatctataaactgttttttttaacttttttttttgaaattacggtttggatttataaagtaagcgttaattacaataggggtttttatacgactttttattgcaaattaggttacagcgctagttgcaatagaggtttctatgtagaatttcgtaaaaataaaaataaaaaaaaaactgttttgaagtgtaaaaatgaaaaaaccccaaaaaaataattatacgtataacgaaagtgatataaagaaaaataaatcttgaaaatatattaaaaaaaattaattgacatggtaaaaaaattataataataaagtatttctttattacgttgtaaagataaatatgtaaatttattaatattacttctctccaagaacaaaaaaataacattttcttttt

SEQ ID NO: 345905 - DNA, 880 bp, Cannabis indica
ttgattaaatacaaaagactatactacctcttgaaaatagatattttccatcagtttgttgggctattaagggcccaatttataggtagcttgtagtccatgttttaggctgttcatagagtcctgctaggttaatcctggccgcccatagacctacaggggaggtctggccaatcatggtggcaatcctggccggccatggtcctgccaggttaatcctagccgaccatggtcctgccaggacctggtaggtcatgtacctgccaagatcctataggtactatggctttaccaagaggaggccagcctttggatatggaggccagccttcagactgtctgttgctgactcgccttgctatgacgtcttggcatgattttttttgggagtttcgataggagaatgaagcatacacacttctcctccttctcccttatacttcatggcaaaaaggaatcattgagtttcccttttttgccattatattggtcagagccatcattgttgtgcttgcctccaccattctcattgtttgagaattaatagagatcgtttgcgctagttggtatgctaaatagtgtttgaggtgctataaggccatgtgtttgtttgtcattctcctgccctcttatttgggcttgttggatagcttcttccaactttatgaagccatcagctcgctcaaggaactcctccatattgttcgttgagatcctcctaatatctttccaaaagtcactcaaaggtaggatgccttcgagtatggtcgtatattggccttttccggcaaacctgtgaccttggtggccttagccatgaaccattgaatgtaatccttcaagggttcatcttgtctctgctttattttgacaagatcctc

SEQ ID NO: 345906 - DNA, 700 bp, Cannabis indica
aggactttgaagcattcgtccaagtcatctatatggtcccccagccttcctagatttgacgagcatgtcatccacatatatttccatatttcgtccgatctggtctttgaacattttatttaccaatctttggtatgtagctccggcattcttgtgaccaaatggcatgacattataacagtatagacccatatctattcggaaacttgtgtattttttgtccagtggatgcatttcaatttgattataccccaaataggcgtccatgaagcttaatatcttgtgttctgctgttgcatcgacaagttgatctattgttggaagtggaaaatagtctttggggcatgccttgttgaggtctgtgaagtcaatacatactcgccattttttttggcttgggcactagtacggggctacctacccaagccgggtagaaagcatcaattatgaaattgttgttacgcagcttttctacctcttctttaagtgctaaggctcgttctttgtccaatagtcttcttttttgttgaacgggccagaagtttggatcaatgttcagggcatgtgaaattatagaaggatcaattctgaccctgtcctcatgtgaccaggcagaaaagtcaaggtttgctcttagaaattttatcagagttgattttacttcaagcaacaaaccttttccaattttgagttttttggt

SEQ ID NO: 345907 - DNA, 709 bp, Cannabis indica
atttaccatgcaaggttttaatttagctttttcaagcctcattttctttagtgtatccttatagaggatgttcactgaactttcgttgtctatcaacactctttttatccttttgttggcgagctggatggtaattaccagtgggtcaacgtgaggatatctctcgcctttttcatcttcctctaagaatacaattggaggttcttcgatcttagctttcttggaaggttccgaagcaaagacagattgctcgttcttcacttcattcacatatctcttttgggcattattgctttcactcgcaatatgcggccctcccgagataactaggatatcctgtccttttagaggaggaggttgtaatccctggttgtctaggttattgggcggatttggctagttttgtccattgctttgtcttttcacatattgtcgaaagtggcctcgcgcgatgagactctctatctcatctttcagctgacgacacttgtctgtcgtatgcccaatgtctttgtggcacttgtaaaatttggttgcatctctcttatgtcttgcatgccttatgggcttaggtttacgaaatgcgaccctgtgctcatgtgcgagatagatgttttctcgagtttcattaagcttggtataaatggtgtagattggcacgtacccgtcgagcttcttttgctttttcttgtccttggctgactcctta

SEQ ID NO: 345908 - DNA, 640 bp, Cannabis indica
tgtatgccatatccacgcaagctgatccctgagttatagggattgagctggtgactcacgaattgcttggctaaattcgctaagtgttgttcattctgcacggctcgctgagtattccatcatggacatgccagctaggcatcctgctcggcatgttgatatgaccaggtgctctaagttgatgccacgtgtcaccattcttgtgatgccacgttagagtgccaattttgggataacaacagtaatagtatacatagagttgttctgattagtgatatatgtatgttggctgaaatactgatggatgctatcacatcaatatggctagagtataactaccatattgagtatatgctgacattatggttgatagtattgtcttatgaatgttttagactcagtaccgtgtgggacacggggattagggttatgatcaggtgtatgggcgccaggttataacccgagttatttgtatgatatatgttatgcttttcttactgagtctgtcgactcacagtgctatttccatgtgtaggtaagggcaaagctaaagctgaggaatcgtgaggacgagcagatgaaggttgtacatgtcgggacagttaggtctggagcgtacgatcctcgggacatcagggct

SEQ ID NO: 345909 - DNA, 577 bp, Cannabis indica
tgattagcaacgagctgcacaacatgtttaaaaatcacgtaatacgcctatgttagttagggtgttacaaaatggctccttccaatcagatcactaacccttgttcctttctgtcgtagagtataatcaagatttgagcccaattctccttcaattgtttatattttttatagtcttacacactatgatcgaagattaacttattatgggtgggcatgcactcaatcactaaggctcaaaattttatgtgatgaacactttggatttcgaaattaggaagaagaagaagaagaagaagtctcaaaactctctagttttcttacaagatataaactaggcttagagtcattagttggattatgagactattcttttatttttatactaattcactggcgtttggttggaggtaatgaaatggaatggaatggaaaagaaacaattttcattccattcttttgtttggttgcattttaaattattggaatggcattccaatggaattctctttccaccattttggtggaatgactattccattttaaaaaagaagaaaacaccattccaatgtaacaaa

SEQ ID NO: 345910 - DNA, 1128 bp, Cannabis indica
gtaaaatatttccaacaccttctagtatcaatatttcctacataattagaatcaacatagccagttacatcaccatgtatttgatctctgctatcaaataccaaccctgtgttcagggttcctttaatgtatctcattttccacttgagtgcagaccaatgtttttctccaggattagccaaatatctgcttgtaacactcatggcatgggcaatatctggtctagtatacaccattgagtacattagacttcctacacaactagcatagggtatattgctcatgtgttttctttcagcatcagttgttggagcttgagtagcagatagattaaaatgttgagctaatggtgttgatacagctttggagttgaacatttcaaacttatcaagaaccttcttgagatagttgctttgagataatatgatcttgtgaggcttttttctgatactgtcaatacctaggatcctttttgatgtccccagatccttcatttcaaattctttacacaacagctgctttaacttgtcaatctcagacctgacctttccttcccaacaaccagtatgtcatcaacatacaatagtaaatagattttgttagcaaaatatacacagggtcatatttgctcttgatgtagccaatcttgttcatgtattcatcaaacttcaagttccattgtctagaagcttgcttaagaccatatagagagttcttcaaaagacaaacttgatctttgtctttgctttcaaagccttcaggcaattgcatataaatctcttcttctagatttccatgtaaaaaggttgttctcacatccatttgatccacctcaagatcaaattttgcagcctttgataggatcattcttattgaggcttgtataacaaccagtgagaaaatttcaatgaaatctacaccctcttgttgagtgaaacctttatctaccaatcttgccttaaatttctttgtattatccttgaatcaccttccttttctcagaaaatccctttgcagccaacaacccttttaccagcaggcttcttaaccacaatcaaagttctattttttttttttttgagtgaagtcatttctttctaaatttcttgtaaccaggctttaccattc

SEQ ID NO: 345911 - DNA, 485 bp, Cannabis indica
gtaagaacaatctattaaatattataatcaaaatacattaatttactatcgaaagaatagataaattgtgattcataatatttaataattttcttcatcgtattaagcatctttaataagcaaccatcatcgataggatagtttattacttatataaaaaaaaaaaaatcttaatgatctttggaggaaaatacaatacttaaataaattaatatttaagcgttcctcattaccaaacaatttcccatgcttaattttacgatagacaagaaaataagcacaaattgttgaaataaatcacaaaatttatgtcacaatactaaaattattaaccaaatatgaataaaattcatgcaattagtattgtgcataccaaaaaaataatagagaattaaaaaacatggaaatggtagaaaaatggcccgaaaaacacccttgcacgcgcccccacgcgcctattttcctcctctttttttttttttttt

SEQ ID NO: 345912 - DNA, 1024 bp, Cannabis indica
tttagaagttcatatttagggtgctaatcaacatacttgtgagtagatctaagatcctggtaaaataatttccaacaatatgtgagttatgttatttttttacaatttgtgctcggcgacaacagaaaatgcgatggatggctagtttgatcacatgggtaggtttagaaccttattttttaatgggatgtatgttggaggaaatagaatatcgagtttgagcgaggttatggattttgactatttgacccctagtcttaaaaatgcctaagttattagtttaggggcattttagtcttttttcaagggagtgtcttggtggctaccctaaatttgacacctacccattcctttttcagcaaggattaattaacttaatccttaattcatttagagaaaaataacgaaaaagaccaaattgaagaaacctctcttcccttctctctcttttcgaaccaaccaaagaccataggaattgttgctgattcttggtgttttcagcaaggaattcagagagaatcaagctaaggtaaccctagaaccatggttttgtacttttgaagcttttaagttttgtttgagtatgtaatttttagctttaggggctattagggtatagctcttgctgctggttgtgatgtgtggtgttggaattgagaaagtttgagctttgaaacccaaactttggtctttaatggcatgtttgaattcagtgggtttttctgggatttactggtagaaatatattgtgtatgccctttttaggtactccggaaggtttggtagcatttggtggagttttgagcgagattagggtttttggggagcctcgtacaaatcggttaaccggttttggcaggttccccaaaaaacccattttctcaattctgatccatttcagtgccttagttgggtattttcctgtttcctaggctattgtagttcctagtgaagataacagaaccttgagctgtagtttcgggtttctcgggttagggttttggacatgtgatttactcggttt

SEQ ID NO: 345913 - DNA, 536 bp, Cannabis indica
acataagtaaagactaaacaaatattaaaactaaccactaaacaatcatagcataacaatctgaaagcttttattgtgtcggtgagactcacaatacgggcaaaaagatccaggcttcaccagttcaccattgaaataacctaatatgcaacgacgacacccttcggggaaccatggtggtggacgcagccattcatttgttttgtgaaattttttttgaagttgtaggtacctccattcgtttgtgagcctttcattttcaaattttttaaaccaatctatatgttcttgcatttttagagtaatttcgtcactaggttcctgtttgatctcttcggcagatagaagtttttatttgttctctttactaaacatttagaagtataagagaagaacacttataaagtataagagaagaacacttatgaattagaaaagaatttgcttttatagagcagaatacttgtttaggatggtagaaaaaattaattaaaattaaatgtgtaattgtagacatgtaagacatgcaatgtgta

SEQ ID NO: 345914 - DNA, 574 bp, Cannabis indica
ctctcaatgaaagcaccaaactgatttgagtctcacgaatataattcaacacagaaaaattatagaaaaagaaggaacactagatttttacatggttttgcagttaaaattctgcatagtccatgagtcaatcttattcagatttctgagtctgtgtttttttttcttgatcttatctgccactatttataattgcatagtggcagttaattacaaagctgaccagaatgcatttacggctattatccctaaaatcatgggatttgattacaaattaagccaaataaataaggtttttacacaactatgaatatcctgcccttattgggccgagataagcgcataattaaagacatatggtaagttgtatctcatagggatgcctcgtcgaggagcgagccaagatcactttgaaagcgagcagctgcttgtcattttagcttctcgagactagtattgtcttaaccctgatggttacaccttttggggtcgagaagatcttcctcgcatgcaaaacatcttttagcaggataaacgcctcactgttatcttgactctgttgggttttgtgccc

SEQ ID NO: 345915 - DNA, 893 bp, Cannabis indica
taaaccctaaaccctaaacccaatgaacaaaaaacccttcccaaaccaattcaaacccaaaaaatcacaaacatagaatagctaaacacaatagtaaaaacagcaaagaaaaatgagaagaaaacaccagatttttatagaggttccctaaaaatgtgttgggtacgtcctcttcgcgctcgcctcgtttcactatggatctttaatgatcaagagattacagtggtgggattccaaaacacacaggtattattttggtaatccctaatattttacagtgttttgatactctctctttttctttgtttctctctgaatttgatactgacagtagtttttcttttctttgttgcatgaacaattctccccttgagttggatatccgaaccctagtccaagggttccaaggtccaaattcaatctttggccatattctctctggacccgattctggtgttgtattgaactgttatggatctgattttttgtgttgttctttttttcttttgttttgttgctcttggtttatatatcctgttgtagtggaatgttgagaaaatgagagttagttacaaagtggttaaaactttgtaactaacttaagtgatatgcctaggtattttagaggccgaaggccacatagggaataattttactgtcttgtaatcctttgtaaatattctagttttacagtgtacatgtaatatggggttctatgtcaacaattttattctttttaatccatataattcaatcctaagccccagttgaaacactacaaaaagaacatgatgctctcatctcatccaactgaacttgatttttcaacctccaaaatcagtttttattctctgacactagtagatgagagagttccttctatagtgattttc

SEQ ID NO: 345916 - DNA, 668 bp, Cannabis indica
ccttttcctcgaattgatgatctattttgatcaactgaaggggaagacggtcttctccaagatcaatattcactcaggctatcatcagctgagaattcgagaggaagatatcccgaagactgcattccgtacttggtatggacattatgaattccttgtgatgtcttttggactcaccaatgtcccgacagcattcatggatcttatgaatcgggtgttcaaggatcacgtggatagatgtgtgatcgtgtttatcgatgacatcttggggtattttgaatcagaagaagagcatgagttgcaccttagatctgttttgcaatggtaacgtgaccacaagttgtatgctaaattcaaaaagtgtgaattttggttgtctcgtgtctctttcttggggcgcatagtagataaggatggaatcatggtggatccgaccaagattgaagctgttcgagattggccaacaccaaaatcagccactgacgttagaagctttctgggtttagctaggtattatcgtcggttcattgagggtttttcaaagatagttgtacccttgacggagctaacccgaaagaacttgaagtttgttttgactaatcgatgtgacaaaagttttcaggagtttaagcagcgcttgattaccgctccagtgctaactcttcctt

SEQ ID NO: 345917 - DNA, 802 bp, Cannabis indica
aaatccctactacttcattctcattcacaacaaatatatatatacaatacatttacacaaaatatacacaaatagtatatacacaatatatataaaaatacatattcaataataaaacacaaaatatatgcatatatattattatatatatcaagttataaatatttaccttataaacgtaattcagcgataaattacgacaaaaatcgggtcacctatagcacacacaatataatattaataaaatgaaaaaaattccaaaaaaaatttaaaaaaaaggaaataatattaatgtacattaataaaatgaatagaaagcatatttatacattaatagacgttggcattcaacgttttctccgctaaaatcgatagccggagttataccactacctttttttaaaataggttcaggtacagtgtaaatgggtgaaaaaacaaaacttttttagtgtatgagattagatattaaaaatagaaaatttaaagacaaaaatgggatgaaatggtgaagaaatgagggagatagggtggtttttaatcgtggtcggtgagggtttcgtgggttttcagggggtctagtggctgctagttatcgtgtgaagaagaaaaagtggggaagaagaaggtgacatagggctgtttatataaactctatgccgtcagttactagcaaagaaccgacggcataggtgcacacgtgtcaataaagtgttcacatatcactacaacatttatcactaatagcggcggacctctccgccgctattagtatcattcctggccgctaaagggtatagcg

SEQ ID NO: 345918 - DNA, 647 bp, Cannabis indica
aaaatttttttacaaaaatactaaatttgaagtaaaagtttataattttactgtcacacggaattttttataataatactgcctttttataaaataactataaaacaacaaaacataacaattaaaataacagtggaataactaaaaaataaccatggaacaatcgtgaaaacttaacacagtacacagtataaaacgtacataatatttttgaaaaaaattccaccccgcagtaaaaaaagaaaaaaaaaatagaaatttcagtatgtggtataaaaatctcttattttttccagcccaattggttttatctttttctgttagtgtagtagattttgtgtttgtttgtggtattatttaattattagagtgtgctatattagcagctcacctccatttttgttgttttttatatatgatttctctccttcctctgttttttttttgttattattttatagtttttattgggtttttgtttctttaattttctttgttttatttctctctctagttttagtttctgattctctttgttatttttgcttcatattatatactcaaatcaattttgatttttgagcaagcaaataaaaaattaaaccaaaataagagaatgaatttagaagtttggttattaggtattg

SEQ ID NO: 345919 - DNA, 847 bp, Cannabis indica
cggagatgaagttgtgtgttgcgccggtgtcaatcagtacgctcttggcctgcttaccgtttaaagtggcctccacaaacatcaaccccttcccaagggctttcttccctccgacgccatgcttcttaagagcagccattaatcgaacagcgctcatgtgcgcacagtcttcatcctcatcatcttccccacatccttgctcctcttgagcaatggatgcctttatggcactcaacttggactggtgggggcaagcagccgccctatgtgggccttggcaaagccaacacttaaggggcttcttccccgttgcagcatcacttttagaggaggaactagattcaggagtcctcttgtctcctcccccacttttactcggccactgctttcctgacttcttgctcgcggcattgttggtgctggtctgaggattcgtcttctttggctgcgaattctcagaggtgtagtcagtcagtcgctcggctgcagcttgagcagtggcgagatctgccacccgctgcctttgcagctcttgtttagcccatggtttgagtccttcaaggaagtagaaaagtctgtcgacttcattcatatctttgatgtcgagcatcaatccagagaacttctttacatagtctcggactgtcccgacttgctttaactctctaagctgacgtcgagcgaggtaggcgacattctctggcagaaattgggcattcaattctttcttgaggtcttcccaagtgtcaatggtgcatttaccattctgaatgtcttcatatttcgtcctccaccacaacttggcgtccccggacaaatacatggtagctgttgctaccttagcttc

SEQ ID NO: 345920 - DNA, 612 bp, Cannabis indica
gatttctgatagtgtttcagggcctttttccttatgaaattttcgtcccttttttagtcctcacttgcctctatttataattacatagtcaggcaattaattacagagttgactgtaatctttacaacaattatcccttgaaatcgtggggtttgattacatatcacgtaatataaatgtcgttagtatttgaatatctcacaactgtgattagcctacttttattgggtcaaagtaaatgtgtattaaacacgttaaaaatcataatattctgggaaatcttgataggaactcagtaccaatgaccttgatagcgagctggagcttttcccatatctttctgaggttgataatgtaaatcttgtcgcatttgctctgaagacataacgctctatctgtcaatcacagttctcggtgaggaggtaaacttcaacatccaatatcatttgaatgttagcttctatctgagagaactaactcgtcaagactataaatctcactaaaagatgcttgaagttgattggtgaaagcacaaggagtgtgctttcctatagcgagatgggcgcctcgctattagttgcttgggtttacccaactgttatacttagtttg

SEQ ID NO: 345921 - DNA, 1065 bp, Cannabis indica
aaacttgacacacaaaaaagttctaaatcatacatatagtcatatataaaaaaatatgtaaattaattatttattataaacgatccagtccagtttaaccgttaattatttattacgaaccacaaccgaaccattacgacttaaacggtccggattgaccaaaccacaaaaaacggtttccccagttacgatttataatggttcggattgtagtggtccggatttaaaccgcagtttcccggtttatatgaacagccttaatattaacaatggaaaagatattataaaacttacagttatatatcttttgaagttaatattacttagttgagcatagatcatttgatctcaatcctgagatggttaaactctggcttaaatgtattgcacgagttctgtgacttgttcgtaaccagcttaccgtggaaccagcttaatacttacatcttggaaactcagtagtacaattgagtgggagtgttaatcataaatatggacatctatagcttctatgctattagaagtgaaatgatagttttcttagagcttgacttaacgcgataaataataagggcctcatttcggtaattatattagtttcttgagatatcatttacaagtagtcaagtgttttaaagataaaatatattgaagggtaaaacgataattttatctctactcaatgtaaaccatgtatagatgatcaatgattattgtgattgaaaaaatagataattcatagcgtatctatatttggtatatagatcattctatgtaatcaatagtgtaattcaaaagttatagtggggtcatgaggaattaataagatagaaaatttacttgataaatttcagatctatttattaggagcttggttacatagacccatggccctcacattgtctgggataatatcatcttgtagacttaattaattgatttaataagtcaatcaaaattcgacaatggactgtcttatttgagaattttcaccaagtttggataattttgaggaaaaaaaaaaaagagaaataggagtttctttgttaattaatacactttgtg

SEQ ID NO: 345922 - DNA, 766 bp, Cannabis indica
tttcgatttgaacctttgcgttgtgaatacaaattagaatatactagagtgactcgtagtcttaaactctatctctaacgatgtaccagacataacttttcttggctgtagtccaaaagcccttgctttaatggccagcacatctaattcataggaagcagtcccactctctcattcacgtaggtgtgtctatcaagagtactcctgtagctcggtactctaatccacattgagtacgattctcattaagagtttccattaccttatattgcttcaggaattcatgcttcatatttcttgtaaccatagcatgatctcattcttatcacatcataacttattattacccattgaatctatttcttaggatcttcagtctataggtcgggttaccattatgagtgactcattattctaagggcaatagtcccataccgtttgaggttttaagaactttctcaaggatcgactaaattttcatcagtgcatacatgatccactcttactgctccaatagagaggaactccctaattgtactatgtttacgatgtatctgtcgtctcaaaccgttataataacgattctaaacttatgcaatagttgcagtactatcgcagtggagcaacacagcgggtatttgtctttcccataaagggatctcaactagtaggcttctcaaccaacatgcttcttcactagcagttgctagtgctatcatttcagactccatggtggactgtgccaaagtttagttttttttttttt

SEQ ID NO: 345923 - DNA, 574 bp, Cannabis indica
gtatagtcatatttaatataatactatgttattgttacgtgcattgcacgtatacttagttatatattttttttaacaaaaaatatttaaatttttaaaaattttaaaaaactaaatataaagttaaagaatattaaaattaaatatactctcaatattagaaataacaagaaaaaaataataataatataaataatctaaaattaatataaattaaattaatctaaaataaataatattaatatggatatatattaaattaacctataataatattataaataatttaaatttgatataaattcaattaatttaaaataaataatattaatatttatatatattaaattaatctaaaataataatattaatatttatatatatttataaaactaaccttacactaatactgttaaatttaccagaatattcttaaaatatttcgttaaaccaacaaaaattgttagataaccaaactttatatataaagatatataactataataactttatattatataaactattttctttatttacaagtgttgctccagaattcgcccaaaatacgtgg

SEQ ID NO: 345924 - DNA, 747 bp, Cannabis indica
atttacaaaaataatattataagcataactaatacctctatacaaaaaatttaaaaagtaaagggaaacttacaaaaatactaactttttccctaatctttacaaaaatacttccacacggcataaatttcttttatgctgtcaggtttttttttcttttatactgtcctggcccatttttttttcttttgtcctgtgaacggtgacacacccagatttagatctgaaaattcaaaaaattttaaaagtatgatttgaaaatgtataattatacattctatttaaaaaagaaaaaaaaatattcatatagatcatccctaagaaacgattaataatgtagattacaaaattcaaggttgttctaaagttatttttggtttataaccatatattcattgctaatcaaaagaatcagtcaaataattaaaaagaacaccaacaaaataatttttatttattgttttttagtgttattttactggtgttttaattggaaaaaaggtcaagtaaatgaaatattgtgaaaaatgacaggttataaaacctataccaattatgataaagagcaatggacaatgggaagaagaacatagttatgtcaaatatgaagctagtggagaattcataccaaaagatttcaagtatgaagagctattacagatactacttacttcattggggtgcgaaaatgtggaagaagaacatagttatgtcaaatatcacatccacaacaacaccatatcaaga

SEQ ID NO: 345925 - DNA, 1252 bp, Cannabis indica
ggatcatgcgggttggcaaagtttgtctaaaaaagatcattagacaaggatattactggccaacgatcaataaggacacacatgagtttctcaagaaatgtgataaatgtcagagttttcacatatacctcgcgtaccgccaattgaacttagaatgatgacctcgccctacccatttgctatatgggggatcgacctaattggggcattacccactaggtgaggaggagctaagtatgcggtggtagcagtcgacttcttcactaattaaatggacggaggtcgagcccctcgtatccataacctgcaagaaaatccttgacttcttcatcgagaacattatctgtaggtttggaatttccataaagatagtatccgataatggaacccaatttgatggagacttgttcactgaattctgcgagagggataaaattatcaaaaacttctcgtcagtatcgaggcctcaggcaaatggacaagtggaagccgttaataaaacccaaaagaatactatcaagaagaagttagacgctgccaaaggcaggtgggttgacgagctacctcaggtgctctgggcccacatcactaccaagaaaacagccacgggacacactcctttctcgctagcaattggctcggaagcaatgctgcctgttgaagtgaacatatcaactcctagaagagagttttataatcaagaagaaaacgaggaactttttaaattgtccttagatctacttgaggaaaaacgaactgagtcacaaatcaccaacgttgcatatcaacaccgaatcacaagatacttcaacacaaaagagtcaagaaaaaactatttaatgttggagacttggtgttaagacgagtctttacaaatacgagagatgcatcagcaggagtgttcaacccgaacttggagggtctatatgtcatcgaagtagtagttggagttggagtctataaattgggtcgacctgatggctcactaataaaaaactactgaaacgtagaacatttgcgaccctactatcaataaataaatgatgtaactcgcattactgatataagctttaaacttcagttatgaatagagagaatcatttatattaagtaattacaaagtttcattctttaaaattacttaaagggcatttatgtatgactaaccggaattcatctagaaatacattgtataatgcaaacccgccatttcaatttttttttaaattcaaaggttctcgactaaacctct

SEQ ID NO: 345926 - DNA, 1379 bp, Cannabis indica
tttaatcttttattgcattattgcttgatgtataatgtcatttctaggttctacgtaagaataaatcatttcttttatttgcaagaacttgtatactcaaaaatataatgaactttaatgttaaatcatttatcaactttgtgaatcaagggtacaagatagctaaacaagcatatggatgattcttgaagcctttttttctttttaccattgattacacctttacttactctcttttaatatttattatcaaatcaaaaaattgcaaaatcatttgttaccattatcactatttattaacctttagtttctatttttctactaacgtttttatccataatcacctccctatggaatcgaccgcccgatctatactacaaccaccgctagcggaagacacattttggacgtttaaccatcaggtaagatagtagtatgcacgtagagttaagcgcagtggcactcatattgtatgttgtgattgtgattaattaagaagcgggattagggttattaccctaaagttagcaattatttggtctagggttattaccctagtagttaaaagatgttgaatattatgccatgttaaatatgttgtaataaagagctatgcgtctaggcataattaagctagattcggtaaactagtaccttgagtttaatatggtctagggtcattaccctagaatattatgaaggtaagaaagcattaatatatggtaatattattaatccagtaaaaacatgagttagggttattaccctaagattttatatgatgtggtaaatattgagtacacgcatggatgttaagagttatgtgtataagacataactgggttagacctggtatatatcaccaagataaaccactgaaagaacgtaatgtatggattacgtatatatatatatatgaatagggttatgcgagcaaggcataatcaggttaggcttggtaaccaaaaccgaggtaaaccccaaccctacgtaggtctacgccacgtagacataaataggcatgtgagcgtaacatgcaggtctatagcaagtagacaaatagtgcagtggaactattaattatgtgttatacatattgagattaagggttatgcgttcaaggcataatcaagttagactcgataaccagaaccgagatgaactattctaaggccttattatatttagacgtgtgagagcaacacgtagatctacgccacgtagacataaatagatgtgtgagcgcaacacgtaggtctacgccacatagacataaataggcatgtgagcgcaacatgcaggtctgtgtcacacatacaaatatgaatgacattactatttatatagtaagataaacatgttattgatattttatactg

SEQ ID NO: 345927 - DNA, 647 bp, Cannabis indica
cttaaaaatccacttcccgggaattaaccctttcacaaacaaactcaattctactcacaacaataatttttaacaatgtatggagcaaaaatctcaaaaatccaacaaaaagtccaaaattctctaacaatccacaaataatccaataaaacttatatagagagattcaaaattgttacctcaatgagaatccatctttattcaacctccattgaagaaagtcttgaagttttgtgaggaagaagaagatgaatagtgatttttgaaatttgggtgaggttatagggatttagggttggatttttagaggaaaagagtgtttgatgagagaaataatggtttatgatgatttgggatgaaaatttatggttaggtttgatggaaaagggttttcaatgggatttgaagaagaaaaatggtgtaggagaggggtattcggcgtggaggttagggttgagaatgagggaatttgatttttgaaattatggaagttggctttttattaccgtgtcagaccacctcgccacggccaaacaggcccaaaattttggccattctgcccagaccttttggccgcggccatatatgccctcgccgcggccagataacaatgaaaaataggccttctgtaaggaccttttggccgc

SEQ ID NO: 345928 - DNA, 705 bp, Cannabis indica
tagggattgatcttgtgcttcacgatgccaatgccgaaattgctaagtgttggcatgctactcggattgctcattgctcggctaggaggacctcgtccgtgcaggtatatgcggtgttctgttcggaatatctctttcgagcaggtatggagaatcgggtccacgtgtcaccagcatgtgatgccacgtcagagtgcaaaaattgggataacatttgccccccaagtttgtgtgggacttacgaagttgcgtggagacttcatccaagctacctttacatttgaatgggtaacacgtgtcaaatgcatctgttcgcgatttgatgtgagtctaactaggcgtcccttcgattttcggctaattaatgctctgactaattaatgcctcgagacacatttccccttgcacacttttgacggttattctcttgaggcacttgattgcttttaatttcccaatatttacttttgggggaaatcgaagcgtctaagggattttgaaatgattacccattttgacaagtgtgcctataaataaggctaaaactttttcagaatttactttcaccattttctccacaaaacatactcagggcaaaaaataagtttccttcaagtatgtcgtgagatttccagtagaggtatccgagcagctccatcaagacaacgtttaggcttcaaacagtgagtaagttttcaatctttt

SEQ ID NO: 345929 - DNA, 718 bp, Cannabis indica
gggcattgatgataaagcccagaaacttacacaagctgaacccaaaggagcactttaggggattaagtttcatgctgtatttcctgaggactttgaagcattcatccaggtcatctatatgcccccagccttcctggatttggcaagcatgtcatccacatatatttccatatttcgtctgatctagtctttgaacattttgtttaccaatctttggtatgtagctccggcattcttgaaaccaaatggcattactttataacagtacaaacccatatctgtttggaaacttgtacgttcttggtccggtggatgcatcttgattcaagtgtaccccaaataggcgtccatgaagctttatatttcgtgtcctgctgttgcgtccgcaagttgatctactcttggaagtggaaaatagtcctttgggcatgcctttttgaggtcggtgaagtcaacacatactcgacattttttgttcggcttgtgtactagtacggtattagcaacccaggccgagtagaaaacttcacttatgaaattgttattgcgcagctattctacctcttcttttagtgctagggctcgttccttgtccaacaatcttctttttgttgaataggccagaaattagtatcaatatttagggcgtgtgaaatgatagaaagatcgattccgaccatgtcctcatgtgaccgtgcaaaaatgtccaggtttgctc

SEQ ID NO: 345930 - DNA, 716 bp, Cannabis indica
aaatccactgttgtatttaaattattttttttatcttttcaaattatgcatgaaaatagtatttttgtaaaataaggcaaaatatcggggcgttacatcaatacaattcctataacccagggaccaatttacgtggatatggcatacacacgatcccactatcagtgtattcagcctcaatcccactatccttgcattcagcattgatcccacgatctttctgtttatacgcattgtaacgagaggagaaactcttcctcctcaagcctcttagccctataaatagtgatgcatgttcactgagcaagggatcggtcgaaaagcagttgagctaagactatactattatctaagaattatatatccagagatactattgtaagagctataagaaaaggaatctttctccttgatcttaagtcaatacaaataacgaggattaggctattaccgaactgctcggggctgaacctctatagaatccttgtaactttttattgctttatcgtatatctgttattataaatcatttatcgcttatataatagagtcattgtcgttggctaaaagcgaagtcaacacataatttattttaaaatattatataattattagaatgtataattaggaaaatcaatatcatagtaatcataccataatatctaaacacccccttattaactaattttttggaaggttgcaattctataaaaata

SEQ ID NO: 345931 - DNA, 662 bp, Cannabis indica
tattatttttaaaaaaaaatagggctcaaaattggcaatgcacgactcgtacaaagagaactcgattgtggtaagttttgtttgtatcacataaagacattattagttgttttaaggtttactattagctgactcacagtaaatataactgttgcattacagtttcatgtttgttatcccataggtttcaattttgctatttatttaactcatctttcttttcacaaatgccatatttttattctaactctataaatatcaattctatctatttaataattataattttttttttggatcaaaggagaaaatgctcattaatcaacaagctaaagcctaaaaaggctcggcaactagccaaacaacaaacctgactcaggctaagattctattaattagcctttgactaatggtatctatcttcctttgcctatcgttatacaacctgtattttgcaatctttttaatctcttttacaatgtaaatcaccatgtaagcactatcatcatgtatacatttattcctattcatccaaataaaataaacagtagcagccagcaaaaagatcacaattctatccttaaaacagtctcttgttgcagtcaaaaattcctccagcagctgaattgagtgctccaagcctgaaaacccagccagttgaa

SEQ ID NO: 345932 - DNA, 880 bp, Cannabis indica
agatctctaacccttgtatcttgtctgtagtagagtatcaccaagatctgagcctgaatgtcctttcttgattctggattcttcgcagccttacacactatgattgagataccacttgacgtgtgtgggcactcactctatcactcaaggtatagaaaatacgaagaagaaaagagagaagggttggttcgaatataggtataaaatagatggctcaatttttccttaaggcaagaaatttcatcatctttaagtgtgagtcatcactatctatttataggcaaccgcctaggtttaggttagtaattattaggaggcattaaaaaaaatagaaaaaataagtgggaaacactcatcaagtggccgaccatagttagtgggccccactttgggaattttttccacttttgacaattttccttttattttctcaaaaatgtcgtttttccaattctaaccacttaaatgccaaaactaattaatatatttattaatttgacttaataaagtctcttgattaataaataagacctagaatctcttttcttcacaattatgccattgcttagtgaaaaaaatcataaactaaacatagtataattttagaattataattgattaattaaaatcaattatctgagtcttacaagcagtatggtctcaactagtatggcgatcatgagcctatacaaccgagcttccaacaagtagaactagaatttaccaagtaaactcccaacttattgattccttattgcatccgccatagaaattggaattgcactctcagtcatatagaacgctctatatattccacgatatagatacgctataaacatttaaccatcgttctaatctcaataatcaaaaatcctctata

SEQ ID NO: 345933 - DNA, 703 bp, Cannabis indica
cttacctccccagaaattcgattttcatattgatgatagtataaggtttgtgattagttactagttgttgcctaagtccttctagggatataccctagtgataggaaaacttcagaatgatggaatggttgtgtacttagtgtaaacaattactagattcatggatgtcctaatcgtgatcttaagaaagctagaactgttaactaaggtttgcatgtttactagctatcctaagtgattaggggtggaccatcacatggtcattagataagaaagtatttgtttcaagaaatactacttttctaagaaaatgaattagtatgaaaacaaagtagaaaagtagaggaggtattttttttcttgattccaaaagtgctctatcatcttattttgtataagatggtcccatttcctctgttgttgtcccggtaccactgcatactgtactcctcctttgcctttgggtagttttccgatcaaatcgattccctaaatggcgaagggccacggactttgcatctaggttaactcgttgggcggagctcgaggtatcttcgaaaatctctggcatttgtcacatttcttaacataggcctttgagtctttgttacgaaaaattattaaatacttcgcaagtgcacacaatcaagtagtaaactcacgcaagtgcggtcgaacacagggaattggattaattactact

SEQ ID NO: 345934 - DNA, 664 bp, Cannabis indica
gcctgaaaacccagccagttgaatatctcatgaaccacctgtcttgggtacaaacaatcaaagaattaattatcaaataaaattgtcatttaatttatttattaattagaccttataaagtctcttaatcaacaaataaactctaaatcctattctcttctcaaataaggccttagtgaaaattcacaaataaaacatagtcttatttagaagtctaattgattacaactaattaaatgagattacaaaataatattatctcagttagtgcggggaccataatcctatgtaatcaagctcccaataagtagatctaaaatttactaagtaaatttcttaacttattagctcttcttgactccgctatagatttggaattgcacttctgattacatagaacactctatataccaaacaatagatgcgctttgaattactcatggtttcattccaaataattaaagatcctttatagatgatctattgagtagggataaccgttctacccttcaatgtattttattcttaaaacacttagatacttgtaaataatattttagtaaactaatataattactgaaatgagcgctcaatcatttattgcgttaagccaagcttgaaggaatcatcgtttcacatctaatagttatagaagctatagatt

SEQ ID NO: 345935 - DNA, 800 bp, Cannabis indica
ggagtttacttggtaaattctagttctgcttattggaagctcggttgtacaggcccatggtccccatactagttcagagcatactacttgtaagactcagataattgatttaattaatcaattataattctaaaattagactatgtctagtttatgatttttcactaagcaagggtttaattgtgaagaaaagagattctagggcttatttattaattaggagactttgttaagtctaattaataaatatattaaatggaaattttacttgatatttaattttaattattaagtaaatagttttggcatttaagtggttagagttggaaaaattgttaaaagtggcaaaattccaagtggggacccacatatccatggctgtccacttgtagggtatttttcatttaattttttcattattttaatgcctaataaatcctaacctaaacctaggtggatgtcaataaataaatagtgatggctgacactaaaagatgatgaaaattcttgcctttaggaaaaagttgagccttctattgtatacctaatttcgaaccccattctcttcttctcttcatatttgtcataccttgagtgatagagttagtgcccacacacatcaagtggtatctcaatcatagtgtgtaaggctgagaagaatcctgaatcaagagaaggacattcgggctcagatcttggtgatactctgctacagacaggatacaagggttagaggtctaagtggaaagagccattaatatttcgctgcacccactataaggtttctcaaactttatatg

SEQ ID NO: 345936 - DNA, 1083 bp, Cannabis indica
accattgatattgacttagaaagatataacagaaagtctatgatatcttatccaagataaatatctgtcccttccaatgtatactctgccaatgccctagaaaggatataacacttatctaaggtgtaagtataccttatcgttgattatcatgtcagtctaaatctagtgaactgaaaaatcacgggaattgaacttttgaacatataatcatgattatattccattgtgctgacgacactataatcatgaacaaatatatatacttacatatgtcctggacttaatagaatttatacattaaacataatcttgaaataaatcatgtgaaccatgcaacataaaatgatttatgaccttgttaacgcagattttctttaactaaatttgcacctaatagtgataattttacacaaaaaaggaaagcattaaagtaagagatatgaacataagggatttttttacgtggttttccagttaaaattctgcatagtacacgagtcaatcttattagatttttgatagcttttcagggcctttttcgtatgatctttttcatcccttttttgatctaacttgcaactatttattatcacatagtaggcagttaatttcaaagttgactatgatctttataatgtttttccctagaatcatggggcttgattacatatcacgtattgtaaatgcggttattatttgaaaatcaaacagttgtgatttttcctgcttttactgggtcaaagatgatcgtgtgtttaaacacgtctttaattgcaacattctaagatgtttcgacaggaactcagttccaatgaccttgatagcgaactggagctagccttttcccctatcttttcgaggtcaacaatgtactcctcgttgcttctttgtttgaaagcttaacgcttcattgtgacaatcgtagttcttattaacagagagtttcttggtagtcatttaaatgtcagcatttgactcgtcatgattataagtcttactgaaagatgtctgcagttaactaatgaaagtaacaagaatgcgccctcctatagcgagatatgcgcctcgcttattaggtct

SEQ ID NO: 345937 - DNA, 939 bp, Cannabis indica
tttcactcaattacttttgatttgccatattcattttttaggcgagaagctgaggcgtctgaggtttctttgagacaattaccccttttagtgacgcctataaatacccacagcattggcacataaactcatttcatcacccttctttgctaagtatgcttcagagcaaaaagaaaatttcttggcttcaaggtccccgaagtgccttcataaaattgatggttggatagacgttgctcaaacccaaacacttgaatcttgagtaagtttctgatatcctttatgcttgtctttgcatgtttacatttcgaatgcaactttcactgtgctgtagaaaaaatgcttaggaaaccctagggttagaaacttctacgattcttctttatcatgtcttcatgtgggttgacagccataaaacttgtttctgaaccgcattacgtctgcctttcatcttgcttattctaagcttcatgaacttttttgccctaactgaagaaaattttctgacttcttgagttttgacttttctttaaacattgtcgttctttaatctgtggagtactccaggtcggcatattttcttgtttatcgttcgatattccggccaacactcatctcgtgtgttgtcttttgcagatgaactcaggtgagtctagggaactcggacatcagatcgaccaggatttgcttcaacttctgcatgaggatcaccctcatcttcattctagtcctcctacttctagtaaaggacattcttctgaccttgtacccagccataggatgatggctcgtacaaagaaaaccacgcgtatgggtaatgctactgatcctcaagtggctcggcttgctactctgcctagcgccgaacaggattcggccgtcccgatggaggaggatcatgacggggacgctgaagttttttgcacacgcaagtgtacg

SEQ ID NO: 345938 - DNA, 561 bp, Cannabis indica
gtggattagtagtgtttgaaagagcactgataccatgtacaaatctcttgtgtcaattgatttaattttctgcaattatttttatattctgtctgttctgttttatcgctgcaaaactggattctgcattaacggaattacattatgcttctgcaggcgtatacagttttatattttcatatatattattgacatttgcaaaaactcaatttctcacattacaattttattgtagaataatacgagaactaaaataaaaggttgcttaaatatatgttataatacacatatatacaatatatattacatatatatatatgaaatgtagaagaaaaagaatgtacaacgtgtaatataatacatatatataataagagaagaatatatatatatgtatatacactcactcataatctttgagtgtagattagtggagatcatcataattgaacaaaatattacactttcgtccaaaaccttatttctctctatctctaagcactagaggaactctcatggaatagctttgggaattatcaagccttaggattttctagcaat

SEQ ID NO: 345939 - DNA, 749 bp, Cannabis indica
ctatcattcatttttagaatacaacatgaagccacatatgatcacaaaacctctcttttccactaatacttaatatacttgaacctgtaacttgacaaaacaacttttgaagccatacttcttgtgccaaacctatattctccaaatcattggaacggactatagaagaatcaaaaatcgagactcttacactgcacccttttatctgtctttcccttcaattatattttttgcctaaaagaaattgtagattaaagtacgattttgtgtttaagagttgaatcgtagtagagcttatacattttttccgctcttctgaaggtggttagttctaaatcgtcggaaactttatcgattctgtacattatgcatagtcgttatcaccaaatgttggtttttttttaatttttaattaaaaaccccaaaataatatgttaaaccaagaaattctgttatataggtacttttaaaatataaagtgtgcctatataacagaattggtttatgagaaatttatgggtatggtttattattaaaaataaaattaaatccaaaaaaaaaaattagggttccagattttctttaattaccgtatttctaaccatatttaattatttatgcctcttttcactacaagaattccccccaatagcggcgggggtattagcggaggagctaataatgcccgtattagcggcggaccccctttttggccgctattgggggctgaatttttttttttaaaaaaa

SEQ ID NO: 345940 - DNA, 637 bp, Cannabis indica
tgtagatcatctatagaggatcattaattattcggattataacaatggataattcaaagcgtatctatatcatggaagatataaagctttctatataattaagagtgctattccaaatctatagtggtgtaatgaggaattaataagttagagaatttacttagtaaattctagagctacttattagaagcttaattatataggcccgccccactctagttgagacaatatttcttgtaagactcaattaattagttttaattaatcaattatatttctaaaattagactatgtcttacttatgaattttcactaagtaatgacttaattgtgaagaaaagagattttatggtttatttgtcaattaagagactttgtggagttttgttgacctcgcttttggccaacgacaatgagtaatgatataatataattgtaataataagtaaagacacagagtttttaaagaggttcagccccaagcagttcagaaatagcctactccccttgatttgtattgacttaggaacaaagaatgcagtgattcttctcttagagcttttacaatgatatctctgagtatatctcttagataagttttttgaccctttgctcagtgagaatagatcactattta

SEQ ID NO: 345941 - DNA, 617 bp, Cannabis indica
gacctggacatgaataaacaagactgggacccgtgattgggatgcaaatcttgtcccgtgatcagagaaccggggcttggacaagacccatagtcgatgtcttgatcagggactcggagaaggacccgaagttggacaaggacctagaccaggcccaaacgtgggacccaaaacctaaacttgaacaagaacgtgatcaggaccctagaacatgaccgtgagtgtgacctggacctcgacccggacccagaactagaccgaacctagaaccggaactcgggctcagacccagtcctagacctagactaggactaagactcgaaccagaacctgaacatgaactcgggactcgatcccaaacaaagacgaggcccctgaccgaaagtggaattcggacctagacatggacacgaacccatacccagacccaaataccgacccaaacctagacagggattgaaacacgggacctagacccaaacgcagacgtagacccagacacgaacttgggacccagaaccaagatctgaacctgaaccttgactcagacttggacccaaaccgagatccgaaaaacccgtacccagactcgaactaagactcggaccctgacccaa

SEQ ID NO: 345942 - DNA, 997 bp, Cannabis indica
atttaaccttaattaaacaattgagtattaattgaataagctcaatactaattggactcaaatatattaaagagaggaatttaaccttaattaaacaattattattcattgaataagctcaatactaattggacttaaataaaatctatcatacgtgacaattttatttggaatttttttaataatatacttaaaacaaaaattatttacaaaaataacttagtaaatctcaattacaataatacaaatatattggacatgccctataagtatttatacagcctaacaacaaaaatttataaaaatacctcttactctaaccattcagtcacacaaaccaccttcttcaacaatgacatctttcagcaaccaaactagtagcccaaatgaaaagaaaccaagctagacagagaattaccataaactctagcgacttcacctgagaagaagaccgtaagaaattcaaacacatacaattttagatttatgcaaagtcgggcagaaaactagtccgaaactaaaattcaaccctgaattatgattaaaattacagaaaattaatactcctaatatcaatttttagattcataaaatgtagatatgtgtgaatagatctgaagttcctgatcaatctaaatcaggtataaataaaaaaaatgtattaatacactagctaatatttctcccgttgcattaacgttgttttctaaattttcaatagtgaatttattcatatcaaatcacgaataataaagaaaatttaaattcatctagagccacgtacatagaaacattgttctagtttttaagattctgcgtagttgcattgcagttacattaacattttactaacgctcggaaactagacatatcaataatttcaaaatgataatgatacaatggtttttatgatatttgcaggtgtttcatatcgacaatctaacacaaagctctttaaaaaaattataacatggtagttttattaatatattcattt

SEQ ID NO: 345943 - DNA, 774 bp, Cannabis indica
ccaggccaagggcctgaagatggctaaatatctaaagaaggttcaaaagaacttggaaagattcaattactttaaaatcgagcaaattccaagagaacaaaactctaacgccgatgcaacggcaaaaatggcctcgcagaacgaaggagaaattaaacttggttccagtggagatgctaagcgagccaagtatatgtgaaaaggaagacatagagatgatagacagttcacctacatggatgacccctataattaactatctactcgacgggcaacttttaactgacaaaaaagaggcacaaaaactcttgtattcagtgcctcgatacacaataattgaaggaaaactatacagaagaggttattcaatgcctctacttcggtgttttcttcctacaaaagtaaacgagatcaacagagaaattcatgaaggcttttgtggggatcatgcagcttggcagagcttatctaaaaagatcattagacaaggatattactggccaacaatcaataaggacacccatgagtttttcaaaaagtgtgataagtgtcagaggttttcacatataccctgcataccgccaacgaaactaaggatgatgacctcgccttacccatttgctatatgggggattgatctaattggggcattacccacagggcgaggaggagccaagtacgcagttgtagcagttgatttcttcactaaatggactgaggtcgagcctcttgtttccataacctgcaagaaagtcctcgacttcgttgtcaaga

SEQ ID NO: 345944 - DNA, 738 bp, Cannabis indica
tgtcataatcacataacggcatgagttaacaatacctcgttgcatggtgtaagtggagtctgtcttagtctctgtatcccagaattctttaaaacttgaagataatttatgcaccagaacatttatgttttcagctttcccatgttttctagcaaagtttctctactgccatataagagagaatacacagccagcatagaccagcatatgatttcttgaatttcctgaagctgagattaaattttctaatatctgggctatgttctctcctgggattgagtgtatcatccaaggctcaggacccgcgaaccagatcccacgggcaaaggtgcaatctttgaacaaatggttgtttgtttcttcaaaatcatggcagaaagagcaggctttatcactaaggaaatggagattggatttgagaggaagggtattattgagcactctccatagcatcagagcaattcttggatgtattttagaatcccaaatccatttccacaagacaaatttatctccaaacctatgttgttggtcctccacatacgccgctttcactgagaattctccacttttttttgacttccaaattaaagtgtctccactcgaggctggcactctaggaatagtcaagatttttctaccctctatctccccaaacacagagataattgttgctatattttataaacgctacgcaagtatacgcaatagagtagtaaatctcacacaggtgaggtc

SEQ ID NO: 345945 - DNA, 1878 bp, Cannabis indica
agaaaaagctgagaaaaacgtgaatcactctaagccctaaaggcgtattacgacataaaaaggcaattcccaaaaagaaggcgtagtaaaaagaaacaaccaaggcgcaaaaaagagagagattctatgcattgtacagcaaactcaggcaaaatcatttcccagaagttcaacattcaacccagaaatcttaaacacgcaatacaaacaaacaatatacaagtataaagtgtcctaagaacttacatgaagtttgaagactggggggttggtgttgatcgtcgatgaagagaagactggcaacgacgaaggaaatggagcagataatctatggtgtctaaaatttttcttctctgtggaaactctgagaaaatttggtaaaatggtgaaagtaaccaaatgaaatgagaaggctggtttttataggccagaacgggtgtgagaaatctgtgatcaagcatcatcgtacggtcaaaatagcaatcgattcgcattctacagatccgacgattgggacaagcgctcatcaaggcggtaagaaatgtttgagtactcgactgacaaccatttaatgcgctgtatcattaaatggataggaaacgaatcgttgcttgcaaaaagcaaataactgcagtgatgatggtcataaatgcatccccacgcgcctaaaagcacgtgcaaggaagttaataaggcaaccagaggaacctaagcaagcctcgtttacttccgaccaaacaaggcttgggggtaaatgttgcccttaattttgtccaaaatacgtggactaacacgactgtgacacgtggattgaaggagtaaggctttgagataattcaactaagtcttcttaatcaaaaggatcagcaaggagcatgcctcccgaagaaggtatgagagattcacatactcccggagagcaaagctatagcaaagcacctccgggaggtatcaaatcctatctgtacagtcacatcgcatttaatgccgcatgggagaagacgtattggaactgccataagtattaaagtctgcagctactacgctatgattaatgagcctagtgacggctactttatgagaaatcacatcagtcaagaaaggataatggattatatccacctaacccctaaaaagcctagggattagaccatgcattttctatgatacactcgttgggaatgtgtgcttttactgaataatacagaaagacatgtacctcggttctagggatcaccccacaaaaacactataagtaccccccaaactcattaaggcaggggtcgagaattctgggtttcagaagaaccaaagagaaaaactaccaagaacattctctgtaataaatactctcataaataacaaagactcgtgaactaaggctcattaatgccccaaccacgtaaaaatcttgcgcattaacttcttatagctttctaatatattattattatattggttgctgaaatccttagtcaacatttctaataagataatataatataatatcatgaagtttaaaatttagatatttctaatattatattcttaatcttataatttaataaattaaatattacaaaataaacaatttgaaaaataagatattttatggttaggatattaccaattttattaaaaaataaaataaaataagtttgaaaattttatggttagaaaccctaaaatttctattcaaacctaaactaaccaatttttttaaattttcatgttatttttgccaaaataaattttaataaaaaaatatctaataagataaaatattaaaactaacatatatcaaatcttataattttaatctaataaaatatttcaaaaataacaaatttgaaaaaaaaatggttagcaaattttgaa

SEQ ID NO: 345946 - DNA, 540 bp, Cannabis indica
cgtttggtcagctttaatgagcaagtcaaataacatatataatacatttaagccagaatcatagcatcgtaggactaagacctactgatctaagataaactaagtgatattgacatagaaaagacataacagtaagtttatgatatcttttccaactgtcaatatcgatccagtccgatgtgtacccaatacgtctgatactagtatactttgctaatgtcttgaaaaggacattaaactgatcattgtataagtgtactttattgctgattatcacgtcagtgtaaatccagtgcattgataaatcatgagagtaaatactttgaagcatataatcatgattattttccactttgtagataacactataatcatgaataactatatgttcaagatttaatagaatttatataaacatataatcatgaaagtaatcatgtgaaccatgcaacataaaatgatttctagttttttattaattagcaaatctaattatattgaaatgcgttttatttagggcataaaatcctaacaaactcc

SEQ ID NO: 345947 - DNA, 686 bp, Cannabis indica
agtagaacttattctttgatcttgtacatgtccactgtctcttacaattataataacttgatactagtaaaagtccttagtcaaagaatcacagtaccttatgttactgagaggattttaaaagtccaacccattattatttggatgatactagtgataacctactatgttatgttcaagataggaactttaaaataaaacaaagaaattaagttattctaaccattcatatggaaagtaataactaatcagtattatgaggataagatagaaaattttgcaatgtctattcgaaagacttaaagcacaattcctaatccttatgaaatgttttatggtatctatagtgattacttaatcttaagcaagtattttatattaatgttaattctagaatgctatgttgatgacttagtctagaaggaacttaatgttttaaactaagataaaatgtcacaacaagaggtcctcaagcaccaatggtaagaggttaaaagcacacttgtgcatgcatttaaccagactcctactgttgagtgggagccatcaaagatgtaatcaaacaaggaacattagggagacaatcaagaaagaatctctaaaagtgatatatatgttagatgatatgggtgcatattaacccttatatctacaccaactcataacttaatatcagagatggtggt

SEQ ID NO: 345948 - DNA, 882 bp, Cannabis indica
aagccgacagcaatggaagacaaaatgcgtatgaagagatgtttgcttagtgggaatatatgacgaagtagattagaggtctaaatagtgccaaggagcagatagagtctgaaaaagtcaagctcgaggacactattaagaatctcaacaaacttcttgatgagaaggacaacgagatcgacaagctttcagctgaactcataagagctaaacaggctttagagtttatccctccaggaacggctgccatcaatcaaactcttcaacttcaaaaaccttatggtgatcgagaacttggggcacaaaacataatcatgaaataaatcatgtgaaccatgcaacataaaatatgatttctgatctttattaaccattacatttccttaatcactaaatccttcatcttgtgaatttcctctctatatgtctactcctctagggatactggattctttactttttgggaactacttttgtgttagtcaggaagtaacattacaagttaataaattgttggtacaatgccaaaaaatgtatagaacattccttagactaaataagtatctttcctgtaactttaacattcagtgtctctggcatacttattgacttcagataggtttttacacttctccgaaatcactactccacccctagagtaatcaccatcttatcagtatacattctagcactaaggcaagttttgaaacctgatttggtttagtctaagagtattaaattcttgatcttaagatttacttgattgtcttccaatgttcctttcctggattaatctgataccaactcattactcccactcaacaacaagtgtctggtctaatgcataaaaaagcatatctgagacctctcattgttgatcct

SEQ ID NO: 345949 - DNA, 669 bp, Cannabis indica
tgtcaaactgccctagttcaattaaccattttatcgatcttctagaagtgtctgattttgataaaacttgtctcaagggttgatcagttaacacttttattgggtgtgcctggaagtaaggtcgtaacttgcaagatgcgtggattagacataagagggggatacctcgattctgcccctagtaaccttttattaacatagtaaacagggtgttggtgctttccctcttctcgcactattgctgcactaatcgcatctttcgagacagctagatagaggaataatgtttctccagttactgattttgccaaaactagaggtttcgccaaatgccttttaattctttgaaaggcctcatctcattcctttatccattcaaatttcttgttgccttaaaatatattaaaaaatggcacacttatcagttgactttgaaatgaatctattaagtatagccatccttcctattagggcttggacttccttaggcttggttggtgatggcatatctatcaaagccttgattttcttaggatttgcttcaatgcccctcgcgttgactatgaatcccagaaactttcctaaagaaactccaaaggaacactttttcgggttaagcttcatattgtacttccttaatatttcaaagcactctgcgaggtctgtggt

SEQ ID NO: 345950 - DNA, 670 bp, Cannabis indica
gaaaccacttggtcgaccattgctgcatttttggcacaagtggtggcagtggtcagccaccatatagaagggggagtttctttggcaaaattatatttttaccatccatatatcaaatatgagtgagaaaatttatccaagggtccatagcccccttatgcgaccactgccactttttttggcaaaaattgtggcagtgctctcttaaccaattgaccaagaaccaatgtgaccaaagtatttttatagcatccatatgactaaaataggaaagaaacaccatccgaggcttcccataagccatggccaaccactgccacttttcggccttgattggtggaagtagtctcccgttagggtttcagacgtcgaaatgaggttgttaggtccccgagactcctaaaatatgactaaacataaataaaaaatcaaaacacaccccaaaggggttcgagaacatgcatggccgagagctgccacttggccagtgctcgcaactactgcaagtacaacacaaactatacgttacagtaaaacgagcataactctctcaatttttatccaaatgatacctggttaaaattgcattgaaaagatattttcaataacctggttcaactatagcaaaagccacctttagtgataatattttagtcacaatataattttt

SEQ ID NO: 345951 - DNA, 597 bp, Cannabis indica
tttcttgccaactttgctcaaatttcctagagagaaaattctcagacctagaacaaggcctttaaacactttgcgattttcccagttcttcttcgttcgttgctaccagtccttcttgtctttactcgactcgcagcaggacccccagttaaacacttcatcgtaagttttttgcatcctttgctttattattgaatggcatgctattacttatctattcgttctattctgggtttgaattcgagatttctgggcatgcaagtgtttaaatccttcagatggtctgtttgagtttagtgctctagtgataggattgctattgtcacgcctctgttgttattgtgtattttctttgtagaaggccatacgttcttcgtacaatggttgcttagggcataggatagaccttttctttctgttttctttatcgcgtaaagccgtcttctgtgcatttactgcacccgacacttgtccagggaatccttccaggatttcctgtgtgacacgtgtccggagggggcctctttccagcggttaggggacccccattcccttttcttatttagggtttggtatggggcctaactgctggaattt

SEQ ID NO: 345952 - DNA, 524 bp, Cannabis indica
gtggaatgaggggctgctagtgtctaaaatatttttcagcaaacaaagtggcaagttaggaatagaatttcttttgttatgccaaagaatggaaagaaagaagaagttgaatagtttgagaagttgtaagtaatagtggaaattgtatagaatcatatgacatctcttgatggtcattaagtgtaaaaattgtttgggtggaatgaaaatctaattcatcaaaaaaaaaaaaaattgcgctgtatttcaaaaatcaaaactaatccaatgtactttgcatattatcttcaatttggggggaaaggtcaaacggtttagaccccttttgaaaaagagaaaaagccatgcatttgagtggtcttataggtctgaccaggagctttcagttcagttgggtagggtgttcacaaagtatccgatccaatccaatccgcacgatccaatccaatccaatctgcaaaatgcggatatccgcacttgtgcggattggattggattgaaaaaatctaaaatccgcacttgtg

SEQ ID NO: 345953 - DNA, 788 bp, Cannabis indica
tcaaaagacaagactaatggaaaaactaaattagtttcaacgcataaacacaatcacatcattaatattattaaggaatgaactccttataattctaaccccataaaaacattaattggaattaaactaataatagtaaattaataaatgaaaacaaaaatctgaaacggaggacgtcgttgagccgaaccgaaccactctcagacgactgctcttgaacccctcacagaagaagacgttgatgtgggaatgagaaaaactttggcatcaatcaagaagatcaatacaatagtcttctccttcagtaatatcttgtcctcaagtttattgtctataccattgcctcaggcttgccgaaaaactctccaatttagactgtgtgtgcatgaattcttgaatgggagagatggtggacagccgataaaaataagagagagggaggaggcgattcaaatcataatattaatgtacttaaattaggtagtaagaatcttggattctatttagattaatgctttaaatgagtgttaatgatgataagggttaggttaagcttacttagagtcttaacgaactttactcgttcacctactatggtgactcttagatctattgtttgtatatttaatattaacaaattaaaatttaagtagcttaaaattattaaataggtcattggattgtaattatacttgttaccctaaattgtttaaataatgagtaaaatgtaactacaagaagatatttgcaaagttgagagaaaattttcaacaacaaaaaaaaaaaaa

SEQ ID NO: 345954 - DNA, 1395 bp, Cannabis indica
gtcagtaaacttttgtaaaaggttttgtaatcgggatcccgagtattttgtataaatattttacaagtttaattaataagcaaaaattttaattactcacgttttccataaacctcgttgattagcaacgagctgcacagtatgtttaaaaatcacgtaatatgcctatgctagttagggtgttacaagttcaatcacacacctatctctaaaattccaaacactagcacaagtaggtgtggtacgaggcgaccaattgttggctcgtgaatgttatcgcgtagaacttcaaaatagaagagccaaacatcaaataatggtggtcataatagaagaaggcgagaagaaagaagagaatctagaccctagaatccaagacaaaaataaccagttaaaaccaattgaagaacatgaaggggtcgtgttagatccagacaatcccactaaatgtttgtttattgggaaaaatatggatgaaaaactaaaatagcagttaattaactaactgaaggcaaacccggatcaattcgcctagagccattcaaacatgatagggattgaccctaaggtaatatgtcatcgtttaaatatcgaccctaattacccagataaaagacaaaaacggcgacccttagactctgagagacaaggggcacttaaagaagaggttgaaaaattattgacaaatgacgttatacgcgaggctttttacctctcatggatttcaaatcctgttcttttcccgaaaccaaatggcacatggagaacttgtattgattattcaaacttaaataaggcatgtccaaaatattgtttcccactaccaaggattgaccagctaatggatgtaactgcaggacacgagctaatgacattcatggacgcatattctggatataaccaggtcaaaaagcatgtccatgatcaagaacacacaagtttcgtaacaaatatgggactttattattataaagtcatgccatttggtttaaaaaatactggggcaacatatcaacgactagtgaatgggatgttcaaaaagcaaattggataaaatatggaagtctatgtcgatgatatatttgtaaagtcgataaagagtgaagatcacacgaaggatctcgcagaatgctttgaattacttagaaaatataatatgaagcttcacccaaagaaatgctcttttggagtttcctcgggaaaatttcttggcttcatagtaaatgcgagacgaattgaagcttacccagaaaaaatgaaggccctaatggagatgcctttaccaacgaatccaaaagaagtctaggccttaacaggaagaatggcagcattaaacggattcatttcaaagtcagcagataaatgtctacaattctttaatgttttacgaggcaa

SEQ ID NO: 345955 - DNA, 1215 bp, Cannabis indica
aaactaattttaaaatatttaagttatatttgaattattttatcaaatttaattaaatttctaataagataaatgatatgaaataaccaactagatattttttttatattattttctgatcttataatttaataaaattaaaataatcaaataaatcaattttataatatatatatagttaggtaattattatcttaaaataaaatcataagtaaataataatttttaaaattatattccaaaatatcttattttaagtcttttcaaatttctataaaaatatttaggttatttaaatatatatatataataatatttataaatttctgataagtaaaatgatataatataatcataaatatcatttttctaacttataatttataaataataaattatatcataaaataatcaatttataaatttgaaaatattatggttaggatatctataaaaatatctaggtttatttcaaatctatagttatttaatttattatataagataattttaatataattcttcaaattaaaatgataataatatattttaatttaaaatatatctaatattaaaatatcaaattttgttattaaataatctgtaaattttaagaaattaataaatttttaaaatctaaccataattaaatataaaataactaatttttaaatttaaacttaaaatatcaaaaattaataataaactattaaaataattaaatactattaattttaaaatttaatatttaggttcaaatattaaaattaatattttatattgatatgcaaggatttgaaattgaaaaatctaaaaaaatggtgaaaaaatcacaaaatttggatttttttgggtgaaaatcaccattggctgttccgtgcacgggcgagggtgaatgtaaggtctatggccgaggaatttcggcgtctttcagggttaggtgcgtgcgtatcatgtctgaatcgaggggcaccatgtcttcgaacatgggtttgtccgaggatacgcgctcggagcttaccttgtccgagggtctggtgcgcatgagagcaccaccctcaacacccaatggaccaaaattttcaaaccttcatatcttctcatttttaatcggaatcaaagttccgtaaaaaccgaattacttaagtttcacaagaaatccaaataatttatactagaacgtaaaataaaattattttttaatgggaaattcgt

SEQ ID NO: 345956 - DNA, 1064 bp, Cannabis indica
tttgagtttttagtaatgccatttgggttaacgaatgcacctgctgcatttatggatcttatgaatagagtctttagacctttcttggataagtttgtggtggtattcattgatgatatctcggggtattctaagacacgtgaggagcatgctgaacacttgacaatagtattacagacattgagagatcatcaattatacgctaagaaagagaagtgtgaatttgagatgaccgaagtcaaattcttgggccatgtaatttctcaagatggtatcactgttgatcctgcaaagatagactctattctacagtggaaagaccaaaaaatgtcactgaagttcgaagttttcttgggttggcaggctactaccgtcgccttgtagagaatttctcacgaattgctatgcgtttgacaaagttaacaagaaaagaagtaaagtttatgtgggatgatagttgcgaagaagcttttagagaattgaaggaaagattaacttcgacgtctgttctcactgttcctaatagtgaggaaccatatgtggtattcactgatgattcaggtactggattaggaggtgtcctcatgcaaaatggcaaggtggttgcctatgcttctcgacaattgaaaccacatgagaagaattaccctacgcatggcctagaacttgctgcggtaatctttgtcttgaaaatttggagatgttatttgtatggcgtaaagtttgagttatactcagatcataagtttctctttccatcgattgcattaccatcctgggaaagctaatgtagtagttgatgcactaagtagaaagcctcatggtactttggcatgtttggctcttgaggacttgaaaaggacaatcacaatgggtgattgtaacttgcaatactatgaaggggaagaagtaacttgtatctctaacatagtggctacaccagtgctacttcaacaagttaagcaacgtcagtggcaagatgaaaagctaagacttctttggaactaaatccaggatggtgagcaactgggatgggtggtacagttaatagtgaagggtatcta

SEQ ID NO: 345957 - DNA, 646 bp, Cannabis indica
agggcaatgttgttagttgggttgagctgtagctgcagtgtcaacctagagtgtcctcaaagtaactgtaagaattcaaagagatattcctacgaaccacagcaaaaagaatataacacaaatatagaaatatttgtataattaaatatctaattattatatgcagaatatattgtatatataagacgagtgtaattaaaaacgcaccaaactttacattcccattaatccgtttcttaacgtagaattctctaatgtgaagcaagctaagaatccaccatgctgtttctttgtcactatctcttttaagtcagtgtaaaaaactaattgctgatcatattagagagcccagatattgccaagcacgttaaatggtgctgttttaacacagagtccagagtcaaaagatttaattgctcattatatattgtcatctatattgtggttaagtatgttgaccatacgggtaaataaaattcataattatttccgtaacaacatatttgactttgataatacttttttaatcatttgtttatttttaaaattagaaataaaattatttttactttttcaattttttaattgagaatcaaaattttaaaaacaaaaaaaaaaatcaatttcaatatttttttaaatagtt

SEQ ID NO: 345958 - DNA, 1223 bp, Cannabis indica
taatcaatattttagattctgacccagagccaaaccccaaaaatccctccccacagccctagcactgaacccgacttctgacccgaattcgaatcgaattcgacccgtacttagacccgatttaaataaaatacaaaaaatgaaaatgaacattataaaacacacacttttattttttattttaaaattaaaatataaaagtggttacagaacgtatttttatttttcaaatacataaattttaaaaataaaaattttacttttattttttaattaaaaatttaaaaaataaaaatgttaccaataaatcactttgtaaaacattctttattacatttgtggataaaagaaaactatgcgtacactatgaaatatgtaacacagactattattgtctaaaatttataaaatacacaatagtatacaaacacaataaattaagaaaaaaacacactttatacattaattgataaagaataaactacaaattaagaagacacaccacatgtataaccactgaggaaaagttatgtgtagctacaatagatttcgtcacctgcaagtcttaagtgacacgtggattttcgccaaaccaaaacgacttttattggtcacaggttggcaattgctagagcataaacaggtggcaactaaaaatagttgccaattagtcccacataataatatatttttattttaatgataattgtgtctattcttgattttttttaggagattttgatttgcacccataaaattataaataactctattattaaaaaaaatataaatttaaataatttttaaaaattacttttgatattttttttaaaaatttttcctcacattatttaatgttaatttcaatacatattttgattttattttcataattttttctaactcatgtatatatttttttatttttttcttagaaaaatttcgtaaaaaattttattttaatttttttgtcataatatttaaaatataatttaattttatttgataggtatattttttaataatatgaattggaagaaaaaaattcaaaaaaattagtacaattaaagatataaattttatattaaatctatattattaaaatggagtgcctttaaaatttttgaggtgcaaataaaattttcatatttttattatctttttctttttttttcctaattaatacaatatgactagaaatagaaattgaacgattaatgtat

SEQ ID NO: 345959 - DNA, 1405 bp, Cannabis indica
aaaatataacaatttttttttttttaaaaaaaaactatgattaaagtgtttaacgagttatacaaaatgcgtaaattttagatggtttcttctgtgagataaatagaagaaaatatctttctgtgaaagagaaagagaacttttgtttttgtatatataaggcataatgctttcatatttggataattaacttggaatgaaatgatcatatatataggcagggccgtctcaaggtgatgagaggtctagggtgaaatttgaaacaaggcattttcttttaataaaaattaaaataaattttaattaaattttgacacaatatcaattttaattcttttatctctatgtaataaataattttttgcattaaaaatgtacgttaatattttaaaattaaaagtactttaatatatattttttatatagtgtaatacaaatatttaagttataatattgttatttatttatttttgaaatgttaagtaaaatttttcacaaataactaaaagtataaaaggtgtattttcaaaaaaagtataaaagatgactagagtaaggtttgaacgttgaacctcaagactaacataagctttacttaccatttgtgctggatgctttttcatgtaatttattgagttaaatatttacatattatatgtttttatatgtatattgtatattaattttaattttttcggggcctccaaaactgtggggcctggggccgaggccccggctgccccaccctctggccggcagtatattgtatataatatagggtgactattcaatggttacttttttattgtaactatcatggttacatttttctttgacctgttattacaggttactaataggtaaacatttattttttaaaattaattaattataattaactattttctttaaataattaattaaatatttaacaagacctcttttagcaattaataattataaatattttgtttttatttatatttaaatccctactctaattatttaacaattaagtcattcaattataatatttacaataaaattttattttttttacaaaaattaaacttctttttacacaaattaaaatcctcttcttataataaatttttaaataagtaattatttttaaatgatatttaattattgtgttacaattagatagactaagtatgaggtctcaagctagtcaatcaataacaaaatttgtatatctatctatctatatatctatatattaatataattttaattttctaacatctcattttctccttttaaacttaatacacacgttcattgcctagtttgtcattaatggttaatctattcgataatttagttttatctctctagctagatgttatttttactaaattttttacagtttgaaagatttgtc

SEQ ID NO: 345960 - DNA, 1992 bp, Cannabis indica
ttaataattgaagttcaaaatattacatcaacaatagagattacaacatcagtctacttgtagtaaggtcacagatgctccacgttccagtattccttaatagcgagtcattaagctgagctaatttgtgaaccccggttcctactattacctcgatcacataaggaccctcccagtttgggttaaattcacctgcagatgcgtctctcgtatttttaaatactcgccttagcaccaagtcaccaacattgaaaagcctcttcttcactttcttgttgaagtatcttgtcacttgttgttggtatgttgcattggtgatttgcgactcagtacgatttctttaagtagattcaaggataatttcaatagttcttagttttcttcttgattatagaaatctcgcctgtgtgtcgcaatattgacttctactggcagcattgactccgagccaaatgctagcaagaatggagtatgccctgttgctgttttctcagttgttctgtgagcccaaagtacttgtggtagttcatcgacccatctacctttggcagcatccaacttatttttgatagtatccttcaagattttattaacagcttctacttgcccgtttgcctgaggccttgacactgaggagaagctcttaattatcttgttcctctcacagaactcagtgaataattcaccatcgaaatgagttccgttatcagatactatcttaatgggtattccaaacctacaatttatgttcttgacgacaaagtcgagaacttttttccaggttatggaaaccaaaggttcagcctctatccactttgtaaagaagtcaaccaccaccactacgtaattttctcctcctcgtcctgtggggagtgccccaagcaaatcaatcccccatatcgcaaatgggtaaggcgaggtcatcatcctcagttacgttggtggtatgcgaggtatatgtgaaaacctttgacacttatcacatttcttgacaaattcatgtgtgtctttgtttatagttggccagtactatccttgtcgaattatcttcttcgacaaactttaccaacctacatgatctccacaaaagccctcgtggatttctttgatgatctcattggcttctgagggaaggatacaccgtaaaagtggcattgagtagccccttcgatacaattttcctaccatcgtatagcgaggcattgtgtacaagagtttttgtgcctcatttttgtcggttggaagtagcccgttgagaagataattgactatgggtgtcatccaggtgggcgagctatctatcatctcaactcttcattttcacatatacttggcttatttaacacctcaaccggtaccaagttcaattcatccagttcattctgcgaggccaattttgctaaggcatcggcattagagttttgttctcttgggatttgttcgattttaaaataatcaaacttttccaagttcttccaaaccttctctaggtacttttccatttttaagcccttagcctggtattcccctaggacttgatttacaattaattgtgaatcaatggcatataagatttttaaccttcaacacttcagctatcttcaaaccagtgatcaaggctgcatactcagcctcagtgtttgaagtgtcgaattgaaatcttaacgcataatgaaacttaaagccctctggctaaattagtatcacccttgcacccgagccattctcattggatgctccatccacgtactgtttgaattattttacgaggatctagatttactaacaagtatgttattaacatcctaaatatgaacttctaaatgatatgaaataaacacatgtaaagtattatgaaccttatagtggttgcagcggaatataatatctcattccattcagatgtctaacccttgtatcctttctgtagctgagtatcaccaagatctgagtccgaatctccttctcttgaaactggattcttcacagcct

SEQ ID NO: 345961 - DNA, 1033 bp, Cannabis indica
atatattatttatttttgcttgaatatgggatggaaggaaagtgggaatggaattctttcaacttcccattttggatggatatgaatgtattttattttggggataattacattagacaccttaaattacatcttaatatcaaaaataacttgacccatttaaccattctattttaacgtccaatataacgtttctgcatatttttgttgttggacttagtttaatcacccacgttcttagctttaatctacacattttttttaatttattatctttaatctataagctaagaatattcacaaaaggaattatacacatctttaatgttatttattttctttaatatatatatattctatactaaattttttctacatttttttaacaaatattttctaattatttttttcttaatttttttttgaaaataatcatatatatatatttaaatttaaataataaattttaaatacttaattattgttcatgtctatcacatccatcacttctaaagcttgcttaattcacacacccatattttttctgccactatttttttttactttttcaaatttaattctgttagtgtattagaaatagtttatttttcaaaataataattttaaaaaattaaaagtctaaaaaattgtcaaaataaactaataaatttagtaacatatacaataggatatgttatataaaaaggctaacatgtagacaaagaataaaaatttattttaatatgccaaaatatatgagtataggcatagtatagtcatattaaataaacttatgagcaagacattttatgtgagcaaaacatttcatcatattcaaaactttgacaagtgcatatattattatccaaatttacatgtaagtctgtaagacatgttatagtcatgtactttgcatatacaaccaaatattgatgtctcaacgtgaaaaaatagactaattagtttgttattttagagacacatattttttttgaaacaaaaataaattcttgtttcaatatacgaaaaatag

SEQ ID NO: 345962 - DNA, 935 bp, Cannabis indica
tttagagtttacttagcagtgaagtaatggcgtttttattttattatccttagtggattaagatgaaatttttaatttaagaatcgagatagactcaaaaattaagttcatctctcctccctttgcctctcttcttctcggcttagtaggaatcaaggaaccaagcagatttttagagcaaactttagcaattcagcaagggttttagcttgtttttgaggaaggattgaaaggaagactaaggtaaagccctagactcttttatgttgttagtttaaaaaagaagtttggttttgggttgtgttttgaggaatttatttttgtatgattcgttagacaccaaatgctaagcttgcttacctaacatagataaactaaaatctcctaagtgacaatcgaaatcctaatccaccattgtgttcatgcttataaagtctttttcaagacatttaactcgcgtgactaattattagaacttgacttccaccaaaatttattcatcattccttccaacttatatagtgtttgcagtcatcatatattttttatctactttcaataacatcattaaaatgtactacgaaaaaaaaatatatatttagtgataactttttagtcacaatataaatttttcgtgactaaatgtgatttttagttacaacaaaaagttactcgtgactaaaacatagtatttagatacaagttgtcactaatttagttttagtcacaataagtattgtaactaaaaatataaaatatatttagtcgcaacaaattgtaatttttgtgactaatacctttagccacagattttttaatcacaatgatgatttataattagttataattttttcacttttagtcatattttgactaaaaataagattttttgtagtgatgtgggtgatttaattttgaaaacgtgcaaattaact

SEQ ID NO: 345963 - DNA, 646 bp, Cannabis indica
ggaaaagggttttgaatgggattagatgaaaaaaatatggtggaaagaagtattttcggaggtgaaggttagggattttgaatgggagttgtttgaaatgtttgggaattttgcctcttttaaactcgtctgacgcttctcgccgcggccaaaatacgtgaaaaaacgggtctctctgtaaggcttaaatggccgcggcggcattacccctcgccgcggccagatttcctcgaaaaataggcccttctgtaatccttaaatggccgtggcggctctaaatctggccacggccactgggcgaatcccaaaaaaaaacttttttttttctctatgcagtgcataaataacaagaatactaaaaattgttttaccggttttctaaacaaaactagacagaacagcaaaagaaaataatactaaaacataaaggagttcaactaaatcataaagatcgcttgggttgcctcccaattagcactgcctttatcgtcgcacagctagacgttgatcgagttcttcatagtggcgccagaatcgggggcgagtaaagattcagtttgggggaatttgttaggctatttttagcctaagtttcgggtcacattttatagttgtttttcttctttattattatttttggaataga

SEQ ID NO: 345964 - DNA, 871 bp, Cannabis indica
agttgttaatgcaaagtactatcacgaagtggttagaagtgcaaaaagaaaaatttactcaactgacctagaaaagaatatgagtgttactgaatacacaacatagtttgactattagctaggttggcctcgggattgtgccaacaaatttcagcaataaaggaaagtacttggatggcttgaatacaaaaataaagcatgaccttatgattactactgacgacaacaccacgtatgctgacatggttggaaaggcactgcgaggtaggggcatagttgaatgcactcaggtttcttgtggagcccctactcttgctaccccttatttttgaaggggttgtagtcacttgaccactgaacataaataaaaggcaccatttgcacccgatggttcatgtcaaaataagaggttctgagggaaccagggtcgaggaaattgtcagggtgaatctaaaacttgatacacttactcggagtgtctcagttgtaagaaacatcatatgagtgagtgtagagggcaaggatgtttgcagtgcgggttgccaggacattataaaagagattgcccacaacttaagaaagaggaacagaagacagctgcaaaccccgctccagcaagggtgtttgctttaactaaggttgatacagaagctagcccttagttgttacatgtcagctattggtcaacaactcttacttctttgtattgtttgactctagggccactcagtcttatgtggcagcaaggatttttagttagtttgatataccgcgtgatagttatgataaagggtttggaataatgcttgacggagaattagtcatctccaaaagattgattaggtctatgccgatcagaattgaggatatg

SEQ ID NO: 345965 - DNA, 691 bp, Cannabis indica
tttgaagttcaaagaacagcaactgcaatctgcctgacacaacaaaaatataccagagatcttcttgcaagaactcaactacttgactctaagcctcaatcaacacctatgtgctctaccacaaaactgtctgcaacatcaggtactcctatggacaatcccactcactaccgaagcattattggtgctctacaatatctcacaatgtcaagacccgatattgcttttgctattaataaattgagtcaatacatgcaagctccaacatctgaacattggggtgcatgtaaaagattactaagatacctagctggctcaataggacatggattgatttttagactcacaaatcgacttgacattcaaggatatactgatgctgattgggcagggtgctttgatgacagaaaatcaacatccggatattgcatattttttggagggactctaattagttggtgttctaaaaagcaaactgttgttgctagatcaagcaccgaatcagaatatagagcacttgctcttgccactgcagaaataatcttgattcaatctcttcttactgagatttgcatttccactccatcaccaccaattctttggtgtgataatcttggagctggatccttagcctccaaccccgtgtttcatgctcggcaaaaacacattgaggtggagtcttcattttgtt

SEQ ID NO: 345966 - DNA, 540 bp, Cannabis indica
tcacgcatctctagctagcgatatacctcaaaaaacggctgggagaatctcagtgactcaaggaacatgcgttctcaagcataaccctgaagttactgagatactcccaccgtttcgagaatatctaccagccaaagagtacgcttatcaaaacattagcgcatgtcacaaatggctgggtgtatctcagtatttcaaggaacatataaccgcatatatgaacattagaatactgtgatacacccaccatttgaaagacttaaccaatgttcccacaacaaaatttacagagtacaaaatcctaaagttctaagtaacagtgagaagtgattaagtctctgtgaagcctaagatgaacagacatgcgagtattcgaggtgttcatccgaatacctgcgtgtattcaaaatataaagtggcgtctgttcaagcattttttctaaagttcacggttatgccaattttaagtcattttccctgaaattacccagtttcttacctaaaaacataacctcacacgtatttcttacaaacatatat

SEQ ID NO: 345967 - DNA, 658 bp, Cannabis indica
ttttgttcaaccaagggaacctggcctcaaggaaaaggtgtacaaagctgaccaccacttgccgaaggctggcctccatcttagaattaaggttggcctcatcttggcaaagctggcaggaacatgacctgcaggatgctgtcaagcacatggccagccagaccctagcaggcacatggtcggccagaccctgacaggagcatgaccagctagacctcaacctgcagaccttgcatggccggccagacctcatcctgcaagtgtatggccagccagacctcatcctgcaagtgtatggccgaccagcttctcccatgcaggacaatgatgtgcagccttcatccatgacagcaagccaagccgcgagttgggccttgacagtccattaagatgctacgaaaatatctagtttcaaggggcaacttagtcatttgtatttattaatttaatatgtaaatatctatgattttatctgctaattaaggtttatgctctcctatataaaggaccttaactcaaccctagaaagctaagtctcatttaggccataaagctttaagtttgaaatcctagttctttctttcttttacaccccaaagggccttctctcttcctctctctcacacgcctctaaggccatctctctctctctctctct

SEQ ID NO: 345968 - DNA, 1237 bp, Cannabis indica
actaccactcgcacacttatttttcatgtatgaaccaaatgaatacatgataacgtaacgtataaatataagttttgcatcaaattctaattggttttggtaatttatacagtgaggataaacatcgatcaataagtatatttcgttcgatagtaacgtaaatgattaatttaacttattatcctttaataaaaataaataaaattaggcataatttcaaaataaatgcaattaaatattaataaaccattaaaaattatttaaaacatttatattttttttactcaattaaatcatttttctgtaatttaaaagtttgttttggagctctaaaaatattattatttgttgttggttaggaagtaagtaagttttaacttttattcctaaaaaactcttttgatataaatcaattttagtagttttcttataagttaaaaataaaatgcacaagcttaacgatgacctatatcatatcaaaataaaattgatcaatattaataatattctcagtaataaatagataatattgtttcggaaatttgaatttatatgtatataattagtgtatattaaatttttgaatacaaatttattaaaattaaaaataggtacattttatatccatacccattatacacttttctcttttatttttttcttctaacttcaccatccatactctctattcccatctatattgatggggtccgatggtggcccgatgctaaccatttttttttttttatatatttttgtacataaaaaaaagtaacatcaggtgactatcggaccaccatcagatcaccatcggaccatattaacatttatagatgttaagctccatttattaaactcgttaggaaggcatcgggtcaccatcggactactatcggaccccatgtcatcgggctaccatcggaccttcgtcttcaatcttcattttaacaacaagaaggcatcagactactatcgtactaccatcgggcctgacaaaaaaacaagttttttgcccaaaactcacatctggccattttcaaccctaaatcttacatctactcacacataacaaatattaattatacaatttattcctttgacaatattaccgatggtgaagccgtggttgatggagaagtcgttgggttcgtggtagtcattgggtccgtgggcccttgggtctgtgatcatgatgatcgtggagagaaggaactaaggttgtaggtggtgggttgtg

SEQ ID NO: 345969 - DNA, 1384 bp, Cannabis indica
aaaaaaacctaaattaataaatactaaccctcaaaataaaggtcataaaggacaaaaagcctttagcaaaagacctaaatggcccccttgattaaaagaaaactaccatgactaacaagggtaaatatgtcattttcaaatccaaaaaattccaacacctccaatacccaacaataacatcccgataaaatattctaaacatataaaatacgactctctaaaggcccaacgtcgcttttcacagcttccgagcacaaacacagaaattgaataatttacataaaatagcataataaacatatatgatactaaatatatttcccaaaatatgcatttcataaatattaattaaatctcatgcataaaccctaattttttctaataacctaaaatattaatcttaggcggtctttacaactatccccccttcaaaaggatttcgtccccgaaatctaacctgaacaactctggatgctgagtcctcatattagactctagttcccaagtggattcttccactttactattcctccagagcactttaaccaatgctatggttttacttcgaaggaccttttctttcttatccagaatttgtactggttgctcgtcataagataggtccggttgtaattccaatgcctcataactcaagatatgtgttggatcagacacatactttctcagcatggaaacatgaaacacattatgtacagctgacaatgacggaggtaaggctaaccgataagccacctgcccaaccttttcaagtatttcaaaatgtccaataaatctaggacttaatttgcctttctttcgaaaacgcctgattcctttcattggggacactcgtagaaagacatggtctccagcttggaatgtaacatctcggcatttagggtctgcataacttttctgcctgctctacgaagcaagcattcgagctttaatcttatctattgcctcatttgttttctagaccaactcagggcctagatacttccgttctcctgtttcgtcccaatggataggggatcgacatttcctgccatagagcaactcataaggagccattcctatggtactttgataactgttattataggagaattcaatcagaggcaaatacttgctccatgaccctccaaaatccatgacacaagctcgtaacaaatcttcaagtatctgaatagttcgctcagattgcccatctgtttgaggatgaaaggccgtgctgaattttagactagttcccatggccttctgcaaactcacccagaactttgaggtaaatttagggtctctatctgaaacgatagacttcggtaccccatgaagacgaacaatctctttcacatacaaatcagcatactgatccactgta

SEQ ID NO: 345970 - DNA, 917 bp, Cannabis indica
gagtggtcattgaatgagtcagatcttcctcgattgtttgcagattgttgcccctgagatccattattctgttgacggtttgggcaccaacgataatcatggtttgatgagcgacaaatgcgacaatgtcttgaatttcttgggatctactccctgtttggtccttctcttggatttcttgtacccttggttctcacaacttcggggtctttaataatattggggttgttacgatatcttccaggttgtggcgtctctcctttcgaattggaactcaactcaaatttttccttgaacattagtgttagtcgtttaatctattcctttgcacggttatacaaatcctctgattttaatgcatagaaagtcacgttataagttagtgaactgagggatccaaacctagccatctcataaatgtgctattgttattgtgctgggtggttaaaatgtaggtggaaatttgtcttcacgattttgctccatcgcttcatgagaagagtattaggtattcttctcatgtttaatcttttcattgtagcccataaatgtctacaagggtacccctgactttcataaagcatgcagctacattgtagtgctcgttggccttcataataattaacttggtattggacttccggatgctgaaactttccaatggtgaatatctgccactctcctttgtcctcctgacctaggacaaaataattattctctaaatcaagctgctcagcaacattgtggtacatatttcttgtgtagaattcagcacattggttatagtacgtggtcaagcatgtaggattaggtgggtgaggtcgagtgcattttcttttgaagtcatttgcagtctcatcgtgtctaagctttgagactgtcatatctatggttgttactgttaggttttatgccct

SEQ ID NO: 345971 - DNA, 855 bp, Cannabis indica
aaataatttccaacaatattcatctatcttatctatgtatgcattcaccttctccatgaatgttttcatcatttcgatctcttaataaatcatcttctcatggtccttgagtatcattatcgaaagttggctccatatggctagaggtattctcctaaacttggttagttgttgaagaattccaacaacactcatcatactccgccatgtcctccaacatccaatgggcttcatcgatatatagttggtaaaaattggtggtaccatctcctctgtctacctcttctcttgtgcttggatgcaacccatttaggaagacgtcaagtacacactctctagacaaactatggttaggaaaccacattagcaaatccttatatctccacaatgttctatgtaaaggctatgagtcatgttgaatgaaattagtaagtacttgttgacaagacatagaggaatgcattaataatcaaattttgtcaactgaaaatataaatgaacatatgatttttctaaacctatatgtaatgggctctcaagattatattaacatatttctatgcaaatctagacttagagaacacaaattaagcaccaatttcccatgggtcatacaaggtaaatagcatattcttataccatctacaaatcacacttttccaaggtgataatcttgcatcattcaagtatttccactaatcttactttttttccaaaatcaagattagctaacaacctacaattgttgatcgagcaaaagtaggtagacaaacatcaaacatccttgaatgaacaaaacatcgccaaaaatattcataaaacatcaacaaaattcacaatccaaggttcattaaa

SEQ ID NO: 345972 - DNA, 785 bp, Cannabis indica
agtgtaaatgcagtttatgatttcaaaagcgtatagctgtgattttcccgctttcactgggtcaaaattatcgtgtattaaacacgtcttcaactgttaaatctggagatgtcttgatagaagcttgattatagtgatcccaatagcgagtttgggccattcttccttccgcgatcgacaatgtatgtcttatgtcgattgcggttatttataaagaaatcttctgactcgtcggggttgtgagcctcgctcctgttagttggatgaagctataggaagtcttcccatagcgagatggtcatctcgcatacttgttctttgagccgatccgacttttacacttagtttcctcattgcaagctaaggacttttatagttggtatgtgtcactttctccggtgcctcgctattcacatttagcgacatatggcttctcgctaatacactaagtgccagtttgtagattgattccttgcctaaaaccttacagttagtaggttacaaatatactctcaaactgtaagttccttctagactaagtcatcaacataacaatctagtattaacattaatgtaaaatacttgcttaagatcaagtaatcattagagataccataaaacttttcatgaggattaggaattttttcctaagtcatttgaatagactatgcgaaaattctactattttattctcaaagttctgataagttatttctatccatatgaatggttagatttactttctcagttgtattttaaagttcctatcacaagtttcatccaaa

SEQ ID NO: 345973 - DNA, 455 bp, Cannabis indica
gtaattttggtaattttttttattgggttgtatatttatttatttggccaactagaagtatttttgtaatattgttacttttttctggttaaaattgaaaaaaagcccttgttaaattgttttagagttgtttttaagttattttttattttattgaaacaatatttttataattttgaaatattaacacaatatttttgaaaattttgtacaataaaaatataataaaaaaagagtataatactaaaaatgacaaaaaaaaaagtatttttgtatgatccccatgaaacaatccattaaaagaagatgaaatacctattttactttatctattttaatttttatttttatttccatattctttaagatatactcacttttatagatgatgtccctattatactcttaggtggcgtttggttggaggtaatgaaatggaatggaatggaatggaa

SEQ ID NO: 345974 - DNA, 783 bp, Cannabis indica
agggctgaattagattttttgtgggtaggattagttttactgctttgtccttatgtgcataatttctcgtgatcattctgacacttgtttgtttgtttcttgaaatagctaggccaatggacgagcctttggctacccttgcccagacttacagtcccaaacccgccttgtctcaagcacctaacctgacggtaacctcaaggaggtcttcgtcgagcgttcccttaggccaaatcgtcttgatcgatgaggacggggaggctgaagaggaagaagagggcgagattctgacccctctagatcagaagcgcaagagcaatatggtggaggttgagtctaccaagaagcccagaagggtcaatactccggctcctagctctgactcgaggatcccacctgaggcgtaggaatatactgtgcctcccggcatagtcctgactcccgttcctgctgatgaggagagacaacagctctggattaccaagcataattatgctatggccgaatacacaaaggggaacgcggaggtggaggccttgaaaaaggtcataagggaggcccatgacaattccacacgcagtgagtactttgggacgcctgggatctgaatatggaccccctgacggactggttcaaccgcttcatcgggcctaccctctactctttttgtctcagatatgacaagccacttcgtctccaatttgaccctaactcccggccaagagatatgcaacctgttgcttccacgaactcaatctaccagattcaggatattagtgctgc

SEQ ID NO: 345975 - DNA, 859 bp, Cannabis indica
ccatcggagcaatcaacggagatcgaggacagcaccgactgaagaagtgatgaacttacagttccctccctgaactcaccgagtcaatgcaagtgacttactgaattttgtgtttatacaccctgagcgaaatagaaaaatgggagtttttttattttatataaaatatttggtgctttgctagtacaatatactcatattaaaatattaaaatgagcattattattggccaccagtaccaatactttttataaatggtagcataagattagttaagcaatataatctaaaagttatttttttaagttttagagcacctactacttaattacaccaatagggttataacacgaaagaaggtgctagacattagtagtgccttttagcaattcttttttataatagatgcattgatattaacttgattttgacgatgcgggatcggaggatggatactaatattgggagactgattccgatgcgaaaatattcctactagtgctagctcctcatatacatggagtactcgaacatagtaatagagaggggtaacgactatggaacctccaagaatcgtaacttgaagggaagctgtgacaccaaaggatactaggcgagatggtgctggtgcttcggacctactggtaagtgactactagtggaaaagaaagaacaactatttaagtaaaccatagctagtccgtaggtccgttaaggaagtggaacgaagccaaagcttgactttactaagcaagcgagaaaagccctttctacgttagcttaaaaattcgctagaatagcggggaggttttccacatcatattgatgctccaagagctctaaaatttcctgcaagcag

SEQ ID NO: 345976 - DNA, 587 bp, Cannabis indica
tccgctgaagagaatacttgagagttgagtttatgcctcaactgtactctaactcttaagtcctttacccatattaaatttactactcatcatcatcatcatcatcatcatcatcatcatcatcatcatcatcatcatcttcctctctttctcttcaacacaatatataccagcaataccatggtaagtaataaacaaactcaccatttcaataacttatatcatgtatttattataattagatcagatagtatatagtgttatttatttatttattgggtattgcatgcagtctctaattatgccattgatgtttaagtcattggtgaggtttttaacaacgctaattgtggagccagcagcttcggtgtcgaccttgctattctacagtgagcttttaccacaaagcaacgtcttagaaagactggttcgtcatgaaatgcttcgtcaagataataattatctcttccatttcattgttaacttcttgaggtgtttttggtaataatcaatttttttatttaccctaaatttatataattgattaaaaatcttaaaaaaaattactaaagtacgtcaatattatt

SEQ ID NO: 345977 - DNA, 610 bp, Cannabis indica
tatttattatatatatataatactttttgacccggtcaaatcgaagtcttacaagcttgctcctgttaccattagaacccaaaagaaaatctcggcaactcttatcaatagcagccatgaccttagaggggagaatgaatatgctcatccaaaagttccttattcaaagcaagaccgagtggatcaattgagccctacccgcaaaggacaagttttccctcaatttctatgtattttatttcattcgtacttaatttcttttaattgcttgaccatcagttaattgtttataattttgatacaaaatctgagaagtgagtgtcaattatgctatagtgaaatagaaccaaatttcgatataggacgagagtacctatatggtttggatagcttatacgatttctgtatttaataccttttacatatttaatttatcatgagagttagaaaatttacatgtaattgaggtttatatatatctgagaagactataaattactttagtaaacatgttattgcattgaatttggtaatttgacatgttaacccataatcaatagatgcaataaatcgaaagccctaacttttaatcatcgttaatttccttatt

SEQ ID NO: 345978 - DNA, 383 bp, Cannabis indica
taacataatcgggtaaatcacacatcaaataccctaatctgagaaaacccgaacctctaacttaaggttctgctattactaattggaactacaataccctatgaaacaaggaatcatctaaccaaggcactaaaatggacacgaatcgaggaaatgaattgttcgaggaatctaccaaaaccagttaaccggttttacaagtcctggaaaaccggttaaccagtttgcaccaggtttccccaaataattccaaacctactcaaaacatgtccaaatgccaccaaatttttcagaacacctataatgacctcccataaccatttccaagcaataaacccaaaaaaacaactgaaatcaaatataccattgttgagttgctcaac

SEQ ID NO: 345979 - DNA, 679 bp, Cannabis indica
tttgttgtattttattaaatataatttttaatttaaagcaaatatgttgagttgtttagtaagtgagttagagaaatgaatatttataagagatatataagttacacaaagtttttttttgtgtagcgtatgtaattattttattttttaattgattaatttaaaatataaatacattaagaagtttatttagtgaattacaaatttataaaaattaaaaaaaaattgcatagccaatgagttacagaaaataaaattcatgatgttaaattttaaaatgtatgtaacattgatatgtattaattaattgttaataaactaatataatattaatgtgtcttagtgtattaaaatgattgttatataatttttttattaatttttattgtataacaatatttttatcatcttaatttatattaaaagaataaatgaaaaacaaaaaacagatttatagatttatttatttttttgatgtagtgaacaaagtcacacatgattaataaagtagcaaatcacaatcggcagtggaatcttctcgaaccaggatagctcatcgtctaaccgaatggcatattctaccaaaccacgagctgtagaattcttattgtgagccacatgggacaaaactgcctttaggaatttagacaataaaactataacttcttcaaacagcacc

SEQ ID NO: 345980 - DNA, 616 bp, Cannabis indica
atgactctttccatttaaatctccaacccttgattcctttctgtagcagagcattatcaagatctaaacttggattttctctccttcactttggttagacatagtcatcctcactatgctaggtgttgcttagacatgagtgggcatattcttaattcactgtgggatttgaaatttatgaggaagaagaagagaattcgaatagaaggaggctcttttctattttctaattgtttgacaaaagaaattgatgtaggttatgaaataagagccatcataatctatttattggattctttctagggttaggtttagaatttaaattgaattaaaaaagataaaataatggcttaaattaccttacgtggtcggcctcattgtggaccctactagtttcaattttacaattttatttaacaacttatcttttctttcacaaatgctatattttagttctaactctataaatgtcaattctatctatttaataattataattaattattaaataaaattattgttaacgcaaatttttgttaacgaataatcaacctctttcgtaataaattaagcacgaatatataagaaaattgataagtataataataataataat

SEQ ID NO: 345981 - DNA, 725 bp, Cannabis indica
ccagtccaatgtactactccatacatccgaaactagcatactttgccaatgttctggaaagaacataacacttatgcaaagtgtaagtacacttcaccgttgattatcacatcagtgtaaatccagtgcattgatgaattagggactttgtcttttgaagcatataatcacaatcacattccgctgtgttgaaatcactataattgtgaatgaatatatgttctggacttaacagattttgtatatattaaactataaacatgaaaactacatgtaaacataaatgacttcatatctttcgttgataacaaactagattagattgaaatgcattttatttagggcataaaatcccaacaaacccccacttgcactaacataaaacaagtagtgaatttcaatcaatctattgtcttgatcttcacatcatgtgtagtacattatttgttatatgcattactcattttggggtattgaactctttactgcttataaagttcatctgaataaacagaagacatttctctaattctatccaaaatggaatagagataacatagtgtagaattttcttcagttgaataactttccagtaatttaaaattacaaagtttgtatcttcactgatggagcttaaattattatatatggatttttctatcctactagaataattcctccacccccacgagtaaccaccatctcagattctttatgagttggtg

SEQ ID NO: 345982 - DNA, 1176 bp, Cannabis indica
tcatggtacctaaaagagggttttatcttttgcacttgcaaatgcatcgtttctgcgaggatacatatgtcacttttttgaacctctcgagcatcatctcttgactttgtatgaaaacatttatcccttacaatgtacgcttcatgctttgctactgaaaaatttggtttaagggcaatacgactcaactaaatggatactccatgattcgtttcgttcaaatttgctagaattgtattccttaaccacccaatgaaagtttgatgatgctcgtctgcaacccatttctatttatttttatgatttcttggaaccatttattgtaatatctccatatggtcactacaacacatgtaatgttaatcaagttattgttcatcgtgacaaattaaaggaaaagctacctataagttatgttatatatggctgaacctctgcattattgttcatcatgacttagacacggtcaccattgttcctttctaccttaatcctctatcaacctcatctaggtccattcatggtttgctaattctaattgcctaacctctggccatgtactctgaacaaacttccatagccacttcaaatatgtagtactcaatcatagatgcttctagccaatagtggttacgcacataacttgtaagttccttcatatttctttcaaatggatacatccatattgcccatactggacaatgcaaccttgcttccctcactagatgaaccaataaatgtatcatgatgtcaaagaaggatggcagaaaaaactttttcaggttgcacaatgttttgactacatgttcatgtaatgcatctaatttattcatttctaattccttcctacataacttattaaagaaaatgcaagcttgcgtcaaacactcttgaatattttttggcaagactgatctaatagcaattggaagcagatgttgcattaacgcatgataatcatgttatttcatactcattagtttcaattcatccttatttaccaagtttttgatattaaacgagtatccatcaagtactttcatatttgaaaattatttacaaaccattttgatgacctcaaaaagtgatcaactgacagtagggtcgtatggatttgacgcctgcccgtgttacacaacaagaatcgtaaagtaaatgagacaagaatttttatag

SEQ ID NO: 345983 - DNA, 785 bp, Cannabis indica
aagaggatggagagtattctatctatatcagcttgtccaaagttagctgagatagtcgttaaatcccattgtctatgctgagtgatcagatcagcaacttggagtgaattatcattgcctatgaaactgaaaggtgtgaatcagtatgaccaggaagccacggatcagacttgcaattgattcgatttccaattcctactctccaacgaaggcccttagaagaagttcttttccccaaacaatccttcgccatgttaatgaaggacaggcacctaaaccagcagtaagaaaacccatttaaaaaatatctgtgatgcagaacacggctgagaagagagttaggtgattccaatattcgccaagcttgcttagctagtaaggcttgattgaaatggatgaagttcctaaagcctaaacccccatgaatcttggctttacaaagagaattccaattcttccaatgaattgcattgccagatgatgtggatccccaccagaaattagccatcatgctctcaatttggttacacaaagtgacaggcaatcgaaagcagctcatagcatatgtagggattgcttgcactactgctttcagaagaacttcctttccaccagcagaaaacaattgctctttccaactactaaggagcttccaaatcttatctgtaatcccactgaaaagtttagttttatctctaccagcaaaagagggaagaccaagattgtaatacccaaaattaagaaaaggattagcaaaaccctaattagataattatgagttaatt

SEQ ID NO: 345984 - DNA, 649 bp, Cannabis indica
gaagcacccattcatcctcctccacgacaagattaatcgttgcagcgtaagtattcttccacgtctcttttatgtaataggggaggacggagtgtacagactgacattctgagtaagcgccacggcacatgcatggggacaaggaattttcaacaattggaacatgcctcatgtgcatgttctctcaactaagttcacatcaccacctttctcaaagttagaaccgtcagaacctcttccaatgttaaacaattgtgcactgtacgtaagacacttctacgtctaccatcttcgtgttgctttatcaaatcttcctcaaaatgagttgccaaaggggtaatgaacttacttgcctttttgagatggttagtaaaccaattttgtagtgtgaaccttatgaactcaactagagtagttattgggtatgcccagaattcttctgtcacgttgttgaggctttctgcagcgctgtttgtcatgatgttgtacctatctcctagacaataaggacgagcccacttttctaatcatatactctcaacagaagcagcgatggtaggatccatgtcgaagcacctgcaaatgtctatcacaatccctcttcgaccatgcgtaagcggccagccatatttgtgtgttacatacatca

SEQ ID NO: 345985 - DNA, 984 bp, Cannabis indica
atatttataataataaatagtatcaatctatttatatatataaaaaagagatataagacgatgatatgagactctacaatatctctaattagtattatttgttctcttatttttttttttaattttttattaacttcataaatcataattccaaaatctatatttaaaaataagtatttaattaatattattgagtatttaattttttttagttttatttaatatcacattcttaatttttgatttttaattgtttttaaaaaaatatcaaatacgtatttgctttctttttctttttttttttattttttaaaatatcacatttaagcttttgatttttttattatttttttttttaaaaaaaatctcatatgtatttgctttattttttttttttaaattaagatattaatctaataactaacctataaatctacatcataaatatcattttaatttgatagtataggttttttttcctcattttattcttatgccatacaatattaatcaataaaagttttaataatttttttttatttattctttctttgtttgttttctttttggtgcatcaatagtttgtaattttttttagttattttttttagtactaaatttttaacattgttttactctatgtatgtatctcacacaattattctctataccactatacttatctttggatcatgtggcaaatgcattttgttttattactatagatggtgaaaaataaatttcatatattttaaaactaattatgttgctaattcaattttaattaggttagactaatataattaacctaatataattatttaaataaggcaaatgggccttcacaattggggtggttcgtgtgagggaaggttgggttcagtatgtcgcacccattactaatagcccctaactctcacacaaggcccaaaggaaagaaatttaaccattaaataaataattgttatttattgaataagccca

SEQ ID NO: 345986 - DNA, 639 bp, Cannabis indica
taataatatcctctcttgtattgtcaatattgtacttcatctgggttctgactatatttgttatcttattctttttgttttatcatcaactatatgtgcttgaaaagtatgtttttttttatcgatccagcttgggtacagtttatgattgcaagataatgtgccataggaatgggagtccattttaaatgttattgttgttgctagcactttctttctagaacaagtttccattgatgagtgcctttcaatgtaatttcattatatacaaggcaaaaaggttaaagttccaatattccttgtcccagctacccaaaaggtttgtctcctaaatgcaatgctaaaataattagttgcttaatgttgtccataagaggagagaaatttgtctaacacatctgttgggattaaactcacttaacctctcaagttagtatgtccatctatttgcctatcagatgaatctgaagaaagctgctgtaatttataatagttggctttaataccaactttaaggggacccaccaacaactatatataggggttcctctattctaaaaagagaggtttgaggggagagttttaatctctaatctccaatgctcatactttaaattcagtttagagagagagagagag

SEQ ID NO: 345987 - DNA, 536 bp, Cannabis indica
aaaaaagtgttacagtaatttttttcatcattagaaataatgaagattcaagcaaactcggggagaaaaccataaacctgagcccctagaaacaggtcccagtgcccaagttgacttggtgctgggcccagcgcccaagttgacaatcaacctggtgtgctagtttcgatcactcaaatgccaaatctaatttgagcaacgaatccagaatggtaaaaaatggggtaggatatctcgtcctcaagttcaagaaccttggaagtatcaaaatgacaacccgggagtcaggaatgagtacccagtgcctaggttgacaaatggccttgtgcattgggttctgcttatccaattctgattctgttttcaccgtctgtctagtttttcacaataactaagatccatgaagtcagagaatcaaattcataactttgcatttctcatttacaacctatgaaactcattcgaaaatgaagagttttgagtccctcatttcggcaaaacagcaacatctccgagaactagtgaccagctttgcc

SEQ ID NO: 345988 - DNA, 647 bp, Cannabis indica
aaaattcttaaaacaacaaactcgcacaaacagagtgataaaaatatattaaggtttcccaaacaacaaccagtttctacaagtacaatctacacaattcctcaaaacaaaaaaaaaagaacaaaaaagaatgaattttgacgattacccatcaaccattacaccctattgaacctctgaaataataacaacggagaaatcaaatttaattgaaataataacactgtagaaataataacaatggagaaatcaaatttaattgaaataatatcatagtgtctcaattcttgtggaaatccctgaaacacacaaaaaatagatacatgaagttgtattggattctaacaataaggcaaaaatctaccaaaatcaatattacgtctaaatgaaaagacagattcaatgctccaaaatcaatgtattttatacttacctacaagatatcagatacctaaggctactattatcaattcatataacactcaacacaagcttatttgccataatctagattatttgaaaagttgtttaagttgttttatttttattttattattttattatatataaataatattttattattttattaaatataaataaaaaattacccatgaatttctcataaactaagaattcagttatat

SEQ ID NO: 345989 - DNA, 706 bp, Cannabis indica
agtgcctcatagcaatgctcatggattaatgtaagcaagagaatagtaatgtaaaatattaacttgtttgttttgagggtttaatcttgaaatattattcccttagtaatacaactatacttaagggggtgatgttggcaccttaaaataggtgggtttgaatgattccctttcattatattaatttgaatattatttttaaattaataaataaatttaaataacattaattatgatttattataaaaaatggataaatatttgtacccaaaattttaaatttgtaagtggtataaactcaacgtttatttttagtggtataagtaccaaatatttgtaaactaatttcctctagttttgtcagtacaaactctgatttgaatttgttaaaagaacatttggaagtaactgatactatataacctaatgatatagaattagggtcttatatgtgccatgttaaagataatcgcagagtctatattgacgaaattagagaaaaattatagttttataaacgttgggtatttatacagttaaaaataaacattgggtttatgccactaacaaacttaaaaacttggggtacatatattcatatattcatttggatggtttgtaattttctattgtatttttttgtcgatttattcggtttggtttaggcgattttttcaggttgagcggtttgtaaattttgttgaac

SEQ ID NO: 345990 - DNA, 1202 bp, Cannabis indica
acttctgcatgtggtgaatctgcccaataatatgcactattgatccgataatttgtgcaatcgttaaaagaggcagtgttcacctggtacactcaattacgcccaagatcgataaatacttgggatgacatgcaaaaagcttttctggcacaatttgttagctcaaagaagaccataagtctccatcacctggtggaaacgaagcgacgaactagtgaaagtgctaatgagttcataactaggtggagaaatctcaatctccaatgtccataatggatattggaacaagcagcggtttcaatgtgtgcccaaaacctcaaccttgaggtggaaacttttatgggcacaacaaaatccaaaactttcaatgagctcgtctcgaaggcctgcaatgttgagatacaaatttctcagtaaaacggtggcaaaccctcactgagattcgaaaacaaaaaggcatttaagaagggagaatcaatggtaacttttatcaataccggaaacaaagataaagggaaggcacgggagccacaaaagatattaactctcaaagaaaggaaggaagttaagtattcattcgacgatgatgacgtcgaccaaattttcgatgagttgttaaaagctaaggcaatacgactccccgagccaaaacgaccaaacaaggtcggtatgatagatgacccaaattattgtcggtaccaccaaatcgtgagtcatccactgtgagattgctacatccttaaaaacagtatcgaaggcatgatcaagagaaaatagattgagattgactcttctcttggaaaagcggcaacaaatacaacctccttaactaagaaagaccaaatgccaaaggatcccacacaaagggacataatttctatggtatttgaagttgacaaggaagttacaatagtccaagcccactcagatatgccaaaactagaaaacccaaatattcctacgttgtatgagctcatgacaaagcctaatctagaaatttgggaggactagtatgatagtgaataggatttggaaagtacatggaaaacatgtactcggaaaaaacttacaaaaattccatctcgaaaaccatgtggaaactccagagtcaaattttggggtcgaccagatataaaggatcaaaagaataaaaacaggatcagaaagaaaaaggtcgtttccaaaagaaatgaattcgaaca

SEQ ID NO: 345991 - DNA, 550 bp, Cannabis indica
agagggtggggaacggttaaaaagaaagtaaaagagggttttgaaaaaaatatctttggcaattgtttcaagctcataaatggatctacctctctttcttctttctctttatttttgtttactgcaaatagtcattccaatctcctttgattcactaaacttcagaaaataagttgatgtgatatataatcaaagagaaaggaaaaaactaatatttttacgctgtcaatttcattattgatttctataattctcttcgattcactagacttcagaaaataagtcaatatgtgatatataatcgaagagaataatataaatctttatggtgttatgccgtccaatttattgtaaatccctatgattttcttttagttcactagacttctaaaaataagtcgacatgtgatacataaccaaagagaagaatataagatttaaagaaattattataccatcaaaattatcataaggtgtagattctcataccaaagaaatgagagtaatataaggaagttgattgattacttactgcacactcaaaaaaaaa

SEQ ID NO: 345992 - DNA, 624 bp, Cannabis indica
aattatccaccttggccatatataaaaaacagtagcatcaaaattggttgtagctgttctggtcttgacattctcagcaagtgagaatgcatagtaagttcagacaaagtttgaacttagcttgtggaacatacttagttaacatatttgcaggattctctttagttccaatcttcttgacttgtatttctttccttgtaatgacttctctgataaagtgtagcttgatatttatatgtttagaccttttatggtacattggattcttcattaagtgtatggcactttgataatcacaatgcactgtgatatcttttgctttgaatccaagttcctctgagaaaccttttgaccaaattacctccttaatggcttcagttgcaaccgtatatgctgcctttgtggtagatagagctactaccttttacaaattcgatttccaacttatgcatccactaaaggctgtaggcataccctgtaatagaccttctagtgtctatactcccagaataatctgaattaacaaaccttacaatttccagtacaaaaatgcagtctttacatccatctgatccatttaaagatcaaactaactacctttgccatcatgattctaatagaagt

SEQ ID NO: 345993 - DNA, 916 bp, Cannabis indica
agaaaatggccagcttcttgctgctccaagagggccgaaaaggagagagagttgagagaaaaagtttgctttttcttttcaaattttctaattttttccaactttgtaaaaatgaaaataacaaggttcatttattcatttcagccaacaattattattaaaagtcaataatctcatcacataatgtccactaaaagacaaaacataaatggggcaaaatgaccattttgccccttcacactaaaatagcataaagagcactaaaggggtattttggcaaattctaaattcccggccaatcccgacatttccaatgtctaataaaccgtcccacaatactaacatactaagttgtgaatttactgagccaaacatgataaataattatttaaatatctataaataattttccataattaaacatgataaactactaattttcaaattaaactaagcggtctttacatcacggtagtctacgcacatcctcatacttccatctttcttcttgacaaagagtaccggcacaacccaaggtgagtaactcggtctaatgaaccctttgtctaagagctcctgtagttgtattttaagctcttttaactcattaggtgccattctatatggagcctttaaaattggattagtccctcgggctaattcgataatgaactccacctcactgtttggaggtagtcctagtagatcttctggaaagacctctggaaattcacagactatgtgcacattctccacatttagttgcgtctctattgctcgatccactacactgaccaagaatgcaagacaccccaccttcattagccgactagcttttagtgaagagattaatggagtcctcagggccagcttgttgcccttgaaaataaaccgatccccagcctttgtttcaaaa

SEQ ID NO: 345994 - DNA, 774 bp, Cannabis indica
cagacaaatttattatatgggaagaatatcttatcaaggttttggactagaaagatgaggtactatgaaatgagacaattccactagttaagaaagtgctgtagaaaaataacaagatagaaacagtaatttgagagttagaatcataaatataaggataatatcctgaattgtttaaataaattttgaggacgaaatttctataaggaggggatggttgtaatatcctgataagcctaatggtaaataactagggtttatatttatattataggttaattatgcaataagtgggattatgatcctactaatttatttcaacataaaatttaaattttgctataagtgagtaaataagcgtaatttattaattacggagatttatgtagcatgtctgaatgtaataagagctatatgtggaataaaaatatttttaggtttggtgaccctgaagacttgacaagtggatatataaacataatttgttaattacatggatttatttgaaatacatggatataatatgagttatttgtgaaataaaaatattttcaggttcagcgactttggagacccaattggaggctaaaaatgttacaacggttttagttataaatattaatgagattattgagataagttgattttaaaaataccgaggtattttggggtactcaaaatttgccaaataccctagaagtaaaggtttcttagtggttaaaaaataataagataactattaataataaattttttgttaatattatattatat

SEQ ID NO: 345995 - DNA, 702 bp, Cannabis indica
taaattttgttgaacacctctatctggtggtagggatgcacactgggcagaaaattggcggagagtgctcctcccattcccattcctgttaaggattttaatccccatccctgcttattccccaccggggatggggcgggaaatcccctaatgggagcggggacgaggcgagaaatcccttaataaaaatatataaagtttataataaaaatttaaatatataaaaatattaaattacttaaaaaattaaaatattatacattaattattattcaataaattagttattatccagaacacaacttaaaattcataagaaatgatacaaatatactaaaaaatgcagacataaattatataatctaaaatattactaaaaatataaaataaaatactaaacgggtcgccatcgggtctgggagtgtgatcctcaccccatttaacattcgaggacaaaaagtagtcctcgcccccgccttgtttcccatttagacggagaattcctgccctattaaaagcgggtccccgacaggtcccatcctatgagaaaatatgcatccctatctagtggtgtcgaaatgaaatctagtggaaccaaaaagtataattgaaaatttataagtatgatgcctgttgcccctaatttcacccaatatacgtggaccaaccgaacagggacacgtggatcagataacttataaa

SEQ ID NO: 345996 - DNA, 1068 bp, Cannabis indica
tacgtcaatagtacggaaccaccaaccaagtgtcagcctgatcggtcgaaccggtcatactccggcttctggtcatactccagcctgtaccgacgtgatagggttggatggttcgaagccaacatacaactaatgtaatctaacaggcttcctacatgctcgctaaacatgtaatccacatatgcatactgttatactaatcttacctggattcggacctgttcagacctgttctaatcaaacccaattcataccaaaccttccagacctgttctaaataccccaaagaacattttcaaagcattaaaataacccagaaatcacagatacgaaaattgccattaaagctcaagctttgagttctaaactcaaacttgagcaaatccctctaacatgcattcaaatctgattaaatctacttaaatatgcatgactaagcttctgaaaacaactaaaaatatcaacaacatcacagcaacataatctaaccaattctctttgaaaaccatagttttaacatagaaaaatcataactttactcaacctaactatcatgcttcacaacagttcaaatcaactcaaataaacaagctttaaacctcagaaatcaacaacaaaacacagcagcaacaacctcaatttatcatgcatgcattacatcaatttcatcaaaattcaacaaattaaagaaggaaaaacaagagctaacctagcttgaaatggaccttaaaaggagatgaattctcaatcaaaacttcaagggagaagaccaattccttgctgctccaaggtggccgaaaatgagaggaaagaaagagagagttttgcaatttttctattttctaaattttgaatgaaaaatgaataaaatgaaagctttaactattaatctatttcagccaaataatcaaataaataacatttattttcaaataatcaagtcactaaaagacaaaacactaatgggcaaaaagaccattttgcccctccaccttaaaaccacataaatcaaactaaaggggtatttttgggaaattctaaattcccggccattcccgacattctcaa

SEQ ID NO: 345997 - DNA, 349 bp, Cannabis indica
cttagtaaattcggttcacttattggaagctcagcatatagatccatggtccccattctcgtaatactctggaattaaggaaatggattagcaaagccctaactagttaattgagtattattgtagaattatattatattataatttattatatgcgaattaatatgagaaatgacatgttaagaccccgttggtgagttaggggcattttagtaattttgacacaagaagggtaaaactgtgaatttaatttatttatgtggttatgaactatattattgtatagtatatctggcgtgtccttttttcaggtgtattctgcaagttggcgcggtatagtcacaatcgg

SEQ ID NO: 345998 - DNA, 603 bp, Cannabis indica
acgagcggagccaagaaaaacgctattttttcagattgacgcaattctggccgcgactagatcagtgtggccacagctatatcacgaagacagattgcacactttttgaagttccagtcgccgcgacgagatacaccctcgccgcagccatagtggaattacagaaacgttgtttttacaagcatatctcgtcgcagtgaggaataatgtggccgcagcgggatcccgtacggctaggggaaaaatcgtccgacgaaccctaaaaatcacttataaatagaaaactgcgattggaaatcaggggaagcgatttggagaccctaaaacacagcagaaagcggcaggaagggcagagtaattcaaagtgaagatccagaatcaatccaccaacagtttctttctctattcctctttaatttatttatgctgaatattgttataggaatggttatggatttatttctgaacaaaatttcccatttagggaggatgatgactgctgtttaatgtttttacctagttgatgcataattgccattcctccattcttgattgtgaaattatctattatttgtgtttaattccatgtataagcttgatcac

SEQ ID NO: 345999 - DNA, 645 bp, Cannabis indica
atttcatccttaaaacacttacccttctatgaatgatttttcagtaaactaatataattactaaaataagagctcttccacttatctctagtaagacaagatcaaaagaaatcatcatttcccttctatgtctttaagaagctatagattctgtatctatgattatcgctcccactcatgtgtgctaccatgtttccaagatgtaagtattggcctgatccacttggtcagatttaacaaacaagtcaaataatagaaataacacagttaagctagaacctaaccatctcaggattaagatctattaaactaagatcaactaagtgatattgagttcaaaagatataacaataagtttatgatatctttttgaagttcaatatcagtccagtccaatgtatactccatacattcgatactagtatactttaccaatactctgaaaaggacatactgcttattcaagtgtaagtaaactttatcgctaatcatcatgtcagtataaatctagtgcactgataaatcatgggacttagactttgaagcatataatcacaattaattttaactgtggtcacatcactgtaattgtgaattactataggttctagatttataagaaatagtatattaaaccataaacat

SEQ ID NO: 346000 - DNA, 814 bp, Cannabis indica
tctaaaccgcccaattaacccgaataaaccgaattaaaccgatttatatatttttaaataaaagtatatatattatattacataaattatatttgttagttaaactattttgtatttaaagcttagacattttagtgtttaagttaaaacttagactttatagttaataatttttattatatttagatattaaagttgaagtttaaaatctataccatgttattccttttttttatattcttttattcaattattttatgtttactcaattatatttattttatattaaagttcttaaaattaatttaaaatatattattttttagcttgaaatataaataatatatttttatttttttaaatcttattatctgaatactagaaattaacaataataattataaaaaaagtaaggaacggtttggacgggttaacccgaccaaaccgacaaaatcattggatgggttgaactttttctaatttttaattgggcgggttgcggttaaatatttgtaacccgatatttatattgagttaataaaaatatgctacaaccttaccaaaccgaccgatgtacacccctagaaacaacactttttgggtgttagaagtaaggcacgatgatgttttctgagaactcttccaagcatcttctttgtttttagaaaagattaagattcgattatttttgggaaccaaacaaaacttctgaagagccataactgggacctagcacccaggttgacaccttgaactgggtctgtttccaatcaagttcacaaaaagtattccgcaaattttttcgtcacaaaaa

SEQ ID NO: 346001 - DNA, 603 bp, Cannabis indica
atggtagtaaaagagagattatggatgagtctcatatgactccttactcagttcatccaaggtcaacgaagatgtatcaagatctaaaagtcatgttctggtggccaggcatgaagaatgacattgctgagtatgttgctaagtgtcttacctgtcagcaagtaaaggctgaacatcagaggtctgcaaggctgttgcagccattgaacattcctgagtggaaatgggaagatatttctatggacttcgtggtaggtttgcctagaaccacgagacagtttgactctgtgtgggtcatagtggacaagtttacaaaatcagcgcatttcctacctgttcggacgaacttctccattgatcagtatgctgaattatatgctagagaaattgttcgtcttcatggtgtcccaaagtccattattttggatagggattcaaaatttacatcaagatttttggagagtctacatcgagctatgggtactcagtttaagttcagcatagcatttcatcctcaaacggatggaaaatttgagaaattattaagttcagcatacaatcgttttaaagtccaaatttcttgcaagtaaatcaattaccatg

SEQ ID NO: 346002 - DNA, 1783 bp, Cannabis indica
acaatcttcatctgctcgctctcacggttcctcaactttagctttgcccttacctacacatagcaatagcactgtgagtcgacagactcagtaagaaaagcataacataataaacatactaatatcccgggttataatcaggttcccatacacctaaccataaccctaactaaatcaggaacgttcttgacaaactatgagtaactgctagcccagcctatactcagtactctactcgtactgatgtggtagaagttaactcatactatctgatagcctaggatatatctgatggcatctcaatgcaactctatgtaaacctcactgtagccctgatatgctaatctgagggctatagatttgcctaacatatatctaatatgttattctgacggaaactaacatgcaagctaaacatgtgtaaacatatgcaaaatattatattaatcttagcttgaattcgaattcaggtgtgccagccaacctgagtggaacaacggctcggcgaattacaggctcctaaatctcatcaatcacagcactggtaagtgacacgctaagtaactttccggggactttaacttgaaactaaaagtttccctatcgatgaataacatggcaataccctaaatatctcaaaaatgggaaaaactagggttcccaaaactttcccaaccggtagaccggttccccaaccggaattccggttcctgcaggcccctctgaattggaattccgtttcagtgcaggaatgcctaaaaattccatatctcaaccaaaacaaccccaatccacatgagaccttccagacctgttttaagcatcctaaagatcattctccaagcaacaaaacacaactacaagcactgaaacaaaacttgccattaaagggccaagcttgagttctaaaactcaaagccaactcaaacccaataacagcccacaaaccaagcttaaaccaacttattccaacatattttaactaaagtgaacacaatcaaacaccagcaacaagaacagcagccaaaatcccaaaaacatgcataagtcatttcttcaaaaacaagaaactaatgagggagctacaagagactttaccttggcttagattacacttagagctgctagagatcaccaagaattgttgaagaacacccaaaccctagctggttctagggatttcgagagagagaaagagagagttgagagagagcttcctttccaaacgttttttcttatttctaaaataatgaataaaagggttttatcaaagataatatcatcataacataacttagaaaattgatttaattacttatctaaagtaacaaaatgacaaaaggctaatggggcaaaatgaccattttgcccctcccacactaaaagtccaaaaagggcactaaggggtatattgggaattctaaaatgacgactattcttgacattcccaatgtctaactatatcaccgcactatactaaaatactaagatgtgattctagtagccaaacaccgcgttccaatgttaccgggcactgaacatgaagaattatgaaatttctatatacgacatataaaatgcattctaaattcaaataaaacatcttaaattaataatttagatttaacaaataatttatgtaattaaaccctaattatctgctaattttcaaatttaagctaagcgatctttacaccacgtacagggtctaaatggataattttcattggcgcaatgacctctagcttccaatgcgcactagaaaattatattggaatataag

SEQ ID NO: 346003 - DNA, 618 bp, Cannabis indica
aaggcaaggaagaccatgtttgcaagcttgacaagtctctatatggactgaaacagttcggaagacaatggaacaaaaggtttgacacctttatgaccaaacatgggttcaatagaagctattatgaccactatttgtactttaaaggttcgaaaattgctaaagtttacttgctactctatgtggatgatatgctaataattactaaggagaggtcaaatatcaacaaggtcaaggatttgctcaagtcaaaatttgaaattaaggatataggtgtggcaactaagattttggggatcaacattctaagggacagaggcaaagggaaactcatgctacattaggaagactatatcaacaagatcatagaaaagttttctatgaaagatgcaaaggctgtttcacagccgattaccaaccaataccttatgtctaagtctatgtgccctaagaccaagttagagcaagaacagatggctaatgttcccgactctaatgcagtagggtccataatgtacttgatggttagtactagacctgaccttgcttatgtaatcagtgtgctaagcaggttcatgtctagtcctggaaaagaacattggaaatggcttatgagat

SEQ ID NO: 346004 - DNA, 775 bp, Cannabis indica
ttatacgctaagtgttctaacaattaacaagtctcgcttacttttcttcatacatagcgaggttggttcctcgctttgtattaatgatgtcgtccttgctatcatatcttcatatacgaaatggttttcttgttaatacgtgaattaatagtttgcacatttgtgtctcgctcaagactttccaatcaacgagttatagatatactctaccagttctgcatttaatgagttattccattttaatgttcccaaatataattttcattatatttgttgaagcgtattctcccaagttggcatgtgtcctcctctgaagtaatagccgaatttcagatataacacatgtaaagaccgcttagtttaatttggaaattagcagttaattatgaaaattatttatagatatttaaataattatttatgttattacttttgaatccggaatgcatttttatgtcagatagtaaaatttcatatttttgcattttcggtgcccggcaacatggaactcggtgtttggctcagtagaatcacaacttagcatgttagtatagtgggacggttatttagacattgggaatgtcgggattagtcgggaatttggaatttcccaaaatacccctttagtaccctttatgttattttagtgtggaggggcaaaatagtcattttgccctattgatgttttgtcctttagtgggttacattaatcttaattatgtgtttttattcattaatcttggctggtggtattatcaaaaaatcaaagaaaaga

SEQ ID NO: 346005 - DNA, 662 bp, Cannabis indica
gtgtgtaagactgtggaaaaacaaccaacaagaaggagattcagcatcaaaggaaagagagaaagagatccaggttcagatattgatcatgctctgctacagaaatgaatcaagggctagatgtctgaacggaaggagtcattatattctgctgcacccaatgtaaggtttactaaactttatatgtgtttatttcattgttttacaattcatattaggatgttaattaaacatacttgttagtaaatctagatcatggtaaaatatatccaacagtaggtgggcagaccttgtctaacaattcatcggaagaagtcatacccaacaattccaatttggttaatggtgtcggtcagcacatttgccaaaaccaccaatcactaagacagccaagcacttccgtattcgataggttggggacgactcatgatctcagaaatgatctaaataggaggagaggagtggacgatcagcttgacgcactgatcgtgcagcccgaaacccgtgctcaaattctcgctcagaaagatactgatgtgactcagatcggccaaaatgccgaacaggttagtccagctgtgcagggacagctggacgaactaaagaatatgctccaaggcgtggtcggtcagagaaacaatgatctcgagttggaccgagca

SEQ ID NO: 346006 - DNA, 653 bp, Cannabis indica
tgattgttgtaaacagattacagtcaactttgtaattaactgcccactatgtaactataaatagtggcaaacaagatcaaaaaagggacggaaaaactcatacaaaagaggccctgagaaacaatcaaaaatctgaataagattgactcgtggactatggagaattttaactgcaaaaccatgtaaaaaaccttgcgtgttcatacttttacttttaaagcttttattttttctgtgtgaaatcgctactgtgaggctcaaatttggttaatctgcattagtagtttggtgctttcattgagagcctctgtgaaaaatcttagaataaaccctcccttcttttgaagaaaaaccaccttcttcatggcttaaaatccaaaaaatgttaacaccccacaggaggaaactaatcatcgttcttggaaagagctcatgggctcaaaaaggtctaccaagctgcggtcttagacggaccacccgttccaggaggactcaaccttagagtggccccaacacacaaaccacacattcccagagaacccaacccgacgttggtccctagtacgcagacaacacgctcgaggagaacttactgtgggaatggccagaacgctgggacaagggctgaagagcccaattgtggaggtgcccag

SEQ ID NO: 346007 - DNA, 509 bp, Cannabis indica
tttttaatatttttctgtttttttccctaaaaataattctctaatagtgatacataaacatttttatagcattactgataacatttttttaataatttttcttcttgataaatatatatcatattttttatctcctctttcactattaattaatgttatttatattaaactttgtgattaaatctattaagaaaatatataacatataattttgttaatttttactaaatatattgaaaaacaattttgcaatatcgaacaagagatgaggaaattacactttatatctagaagaaattacactctataccctttttatattgtcctcttttatttttaccttcttttttaaagtttattatttttacctcttttttttaaacattgtaccaattttacccctgttacttcaagatactctccatgcgactctcttatgttaaggtattttgagtacaatacatataaaaagaggtatgtttcaaataaatatagaattagaggtaaat

SEQ ID NO: 346008 - DNA, 709 bp, Cannabis indica
tcttggaaagctttttcacattcttctgtccactcgaactgcttgtttcctcgcaggatgttgaagaatgggacacacttgtctgttgattttgaaacaaatgtgctgagcgtggggatccgaccaattaagctttgcacttctttggcttttgttggcgagttcatatctaggagggcttgaatcttttctggaatagcttcaattcctcgggcattgacgataaagcctagaaactttcccgagctgactccaaaggaacattttaagggatttagtttcatattgtactttgtgaggactttgaagcattcgtccaggtcgtctatgtgccccgaacctttctggatttgacgagcatgtcatccacgcacacttccatatttcgcccgatctagtctttaaacattttgtgtaccaatctttagtatgtagctcaagcgttttttagaacaaacggcatggctttgtagcaatagagacccatatctgttcggaaacttgtatgttcttggtctagtggatgcattttgatttgattgtagcctcagtaagtgtccatgaaatttaatatttcgtgccctactattgcatctacgagctgatcgattcttggaagtggaaaacagtctttagggcatcccttgttgatgtctgtgaaatcaatacagactcgtcatttcttgttcggcttgggcactagtacagg

SEQ ID NO: 346009 - DNA, 789 bp, Cannabis indica
ttgatccaaaaagtagtttgctaataaagcataatatagttattgaaataaagtatataatattatgtaaagccaaaaataattataagcactataaataccgagaaaagaaactaattagttaattaaaagttaaataaaaatattgtacgtacctcttgtggaagattttgaatgccattaatagtaatgatattattatattgaggagttcttagaacagtttgacttgggaagagtcttttctcattgataatggcagcaaggtattcttcattgttaatgctcctattaatttataggattaaattatcagatatataagaattatttatagataggtgtaataaagaataatttataaaaaataagtatgaattagtttaccattgacgaagctcatttatttgtggaatatttgtaagattaataataaatgaactttgttgtttggatgataaagatatacctattgaattgttaaaaaaaatatattataagatgtcttttaataatactaaataattagttgaaataattctaaccgttgtgtgaaacaactttcaggcgtgttcctattataataggattttgtggaagaatttcacatattgtttttccaacggtctcagttagttcatcccacatagttaaagttttgggttgtaagctgcacaaatatattttgttaaaaattaacataacatatgcagtaattttttaaaactataaacatattagtttaaacctttgatcaacaaggagaaattcttgaatatttgcaggtcc

SEQ ID NO: 346010 - DNA, 597 bp, Cannabis indica
ttagtataccatataaatttctctttccgtttcccattgttttcattaattttttaaatatagtaatatgaccctttaatatttattatttataagtataataatgaaaaaataaatgtttgcgcccacaatgcaataacatgatataatggtaatgagatagggagataatcaagtggccaccatggtgtgtccattatcttttaatttattattcaaatgcattaaacatttgtctatgccctaattataattgtgtatttattttcctattctatatatctatatatagagaccaaaatgtgaaattacatttttaattttaaaatacaatgactaatgactaataaataacattagctgggtaaggaaatcataatatgaattatgagtattaatgaactaaataaatatatttattaatttatttagtgcatataaaaatattaaattttaagtaaaattttataatgttattgttacacagattttttttataaatatactatatttttataaaacaatcgtaaaataataaaataaaacaattaaaactaaacaattaaaaaataattgtggaataacagtgaaaactta

SEQ ID NO: 346011 - DNA, 599 bp, Cannabis indica
attcgatcctaagtgcgaattttattttttagatccaatctacaaaagtgcagattagatatgttattttggattggttactttttaatattaaattatttaatatttataaaaaaaaaaatatttttcttcacataactagcaacaaaataaaataaattattgttattttatatctccaacaacaaaactaaaataaataaaataataaataacaaatttaaaagaagaaaaaaaaattatatgtataatgtttaattttattttagattgtttgtagaaaaaatataatataagaatggaatatatataaatttgatctattaagttttaactttacattaaaatatcgttacttttacatgtgaatacacatccgaggattggaatgactattttataacaacccgtcaattgttaaaattatatagtttttcatttcttcaaaaattattttacgaaaaaaaaaagttaaaaaaatgaagaaaaacagttgaaggtaagtgactatttctactaagggcccgtttggtacgcaagactggattagattagacaggttaatttgtccaatccagtgtttgggcatgttagaagtc

SEQ ID NO: 346012 - DNA, 558 bp, Cannabis indica
aataaactacatccaagaatagtggttctttcttaaaaatttgtagttttaaggatttactcagggtttgaaattaaatttacataaaaaaaaatatctaaaatatctatatcagtaattattatatatattctaaaattataatttaaatgttaaatgatgtttaatcatatacacaaataaattaatctattaaatatatattttaaaatatttgtttattaactaattaattttattagttatttaatttcttatgctaaattaataataatatataattggataatttaatttaatttttttataaatttaaattattatttttaatacgtcaaaaaaagttattatttttaagttaatttatattattgattttttttttattataaagtattttaattatttaaatctgctgcacgaagggtggcaaagttatctagtttaataaaaaaatatatatatatatatatgtcatatatataactatatacacatgtgactgcatcaattaagacccatatacacacgtgttcgactttgtgaggagcagtcaaa

SEQ ID NO: 346013 - DNA, 523 bp, Cannabis indica
ttacaaatctttggtatgtggcttacatttttgccaacgacatgactttatagcaatacaaacccatatctattcgaaaacttgtatgttcttggtctggtggatgcattttgatttgattataccctgagtaggcgactatgatgctcaatatttcgtgcccaactgttgcgtcctcaagctgatcgattcttgggagtggaaaacagtctttggggcacgccttatttaggtctgtgaaatcaatacaaactcgccatttcttgttcggcttgggtactagtacgagattttcaacccaagctgggtagaaagcttcaactatgaaattattgttgcgtaacttttttacttcttccttcagggctagtgctcgctccttgtccaacagtctttgcttttattgaactggtcgaaagtttggatcaatatttagaacatgtgaaataaaagaaggatcaattccgaccatatcatcatgtgaccagacaaaaatgtccatgtttgctctcagaaattttat

SEQ ID NO: 346014 - DNA, 420 bp, Cannabis indica
taaaggctatgccctttaccccatgtatgcctataaatagtctaattctgcttagggcgaggaggaaagaaatttttacatacaatgactctacaaaatttctcatgcaaaagaaacaaaataacctccattacaatatcatataaccttgaaatatttgcccattgaggctattaatatagactcgtggactaaggatcagtaacgcctgaaccacgtaaaaatctacttgttaattgttatcttctttaatctatcaaaatgtttggttttcaaaaaactcggtaaatagtagggtttaggtgagacaagtccttatccttccttgatttgatgtgatagtacattatgtagccatcacttacatccttgattaacgcgcaattgctaaagaatggtaaatatagatttaaaataaat

SEQ ID NO: 346015 - DNA, 587 bp, Cannabis indica
atttttaggaatatgtttaaatctgtgatttatatatttcttgagtgttttataaatcttaacatgtggtattagagccaccttttgttaaattaattgaagatctgaagattttatttatgaaatttggaattttaaaaattaaggttttgatctacttatatatatatatatacatatttgtatgttaacataaatttttgttcaccaaatttgagccttacggtaataattccacacagaaaaaataaaagctatagaaaaataaaaaatgaacacaaggatttttacgtggttttacagttaaaattttgtatagtccacgagtcaatcttattcagatttctaagtattttttagggcctatttcatatgattttcgtccctttttgagattgcttgccagtatttataatgacatagtgggcaattaattacaaagttgaccgaaataattttacagttttcatccctaaaatcgtgagatttgattacatattttgtaatgtgaacgcggtttatgattttgaaaattataaagctgtgattttcccgcttttactggatcagaaatatcgtgtattaaa

SEQ ID NO: 346016 - DNA, 678 bp, Cannabis indica
ttaaacacaaccttttctccaccattactcttccttaatcacaaaatccttgataatgtgaaattcctctctatatgtctactctttttgggatactggattctatacctttggcaactacttttggttaatcaggaaattacgttgtagattatcatatcagttaaaccctgtgtactaataaatctaggaatacatttaatcacttaatcttgtttactttctactgtgttgataacacaataaacaagaatataagtgtgataagggtttggatgaatttattaatcaaataagtaaataaatgatcacataaaccaaataacacattaaacaagtaatgaaattgaatttgtttctttattgataattgaatagaaaagattacattgaaatagagttttatttagggcacaaagcccaacattatcgagcttgcttgcattcttcttgaaggttcctttcaggttgcttaacaggtggtatacacaatagccatgcgttatttctagaaatacacgagcagctgccttaattatgatctcatgtctgtctgagatcaagcactattcttctctgatcccatatatttccctcagttttgtgaaaaaccattgccatgagttgttgttttctaaatccacaacagaaaaaactaggggaaaaatgtgtccattt

SEQ ID NO: 346017 - DNA, 769 bp, Cannabis indica
taaacataacacaaatataaattgtataaacattaaagtattaaacaatattcttctaaaactaatacatatatttatatattgatgtaaaattctaaatatcaacttcaatattcaaatacaattaaaactaacaatttaaatactagaaagtataaatttttaatataaaataatttaataatgtaatatataatagacaattttagtaaaaatatattgatcggtttatttgggttatttggacaggttagaataatattctacctactcaatatattcattgggcggtttgaattttttgttaggttattcgagtttttttctttgtcagtttattcggtttggtttgggcgatttatttagattggacagtttgtaaatttttttgaacacccttaatgcactcccttaaaaaaaatgtattgatgtacacctatttgtttcgacattcaaaaaaaaaatagtctaattttttttttataatcgtgtacaatacaatttttcaagacatcttaaaatttattgagagattcaaaataattcacaatatagaatgtagtgttcaaaaagtctatttcatacatgtataaaataaaggagtcacacgtgcaataaaatatttgaagcgaattttcgatttgttaaggtggcgtttgataacacttttttaatcaattttaactttttaaaattgaaaaagtgaaaatatttttcaaaaacatgtttataaaacagtttttacttttcaattttttaattagaaatc

SEQ ID NO: 346018 - DNA, 937 bp, Cannabis indica
gcccgtacttgtttagtattttaaataattgtgaatgtgagagcatgttaggaagcatattagattttaattaattattttaaagtgcgttgccttagaatccataagtgcggtagaaagtttgtaatggggtcgttgcctgaccagactgacttactaattggcaggtttgtcctatagtatggacacctggtgcaatatggggagtcaggatagtgtggtcagggctagtaacggttggagagaatggagtttgagttctccccgcaaccaaggtgaaagcctttggatggcttctgatgggagtgatggtcgttcgtcacaggctccgtgggagttggagcaaagattcgcagaaatggaagctatgattcaacgacacgatgaggagattcagaggttgaaacaacaaaggtttcctgtactatctttacctcatatgccaggcattctcaattcggtattaccagcagagcatagtatggctgataaccaagtgggatcattgcatgagaaaatttggataaatgaacctacagtccttcagggagattcagatatgaagaatgctctctggactggaagccctaaagaatgtattttaggacctcaagaggttatgccacgaaatcgggataccgcttgccatatttctagttatggcagaggtggtaggggctccatggttgagcagaagagtaaacctacgtcgtcagtggtgggtttaaaacggaacaagcggttccgaggaaatcaaggcaagggtgtacgcaaggattattcttaccctgagtgcccgcgatgcaagaaacatcatcccggagagtgcaaccgaaaagcatgcttcctgtgtggcatggttgggcactttaagagaaattgccctcaggcaaagaaagataagcagaagctggaagtaagcctgtacttgctcaga

SEQ ID NO: 346019 - DNA, 941 bp, Cannabis indica
acattatctttatggtgaaaaaaaagtgagatttatactgatcataagagtctcaagtactttttcacctagaaggatttgaacatgaggcagagaagatggctggaattggttaaggactacgattgtgaaattttatatcactccgggaaggccaatgttgtgactgatgctttgagtaaaaagggtttcgggcaagtttgtactactgttctgttagcccttaactagtctctgaaatggttaacgcagggattgaattcgtagttggaaagttacacagtttaacacttcaatctgatcgaaagaatcagaaaagcgcaattggaatatcctgagttagttgaggttcgagacgatgtaatggccggtcggcctaaagactttttagtctcgaacagtggaatgttgttatttaaagctcgagtttgtgcttctaatgttgaagagatcaagaaggaggtacttgatgaagctcataccacaccttattcattgcatccgggaaccaccaaaatgtatcaggatttaaaatcctatttttggtggtatgggatgaaaagagaagtggtggattatgtgtccaagtgtttaacctgccagcaaattaaagctgaacaccagaggccggcagggttactgcaatctttagtccttcctgagtggaagtgggaggacattgcaatggactttgtaactggaatacctagaactacgggaatgtatgattcagtaagggacatagtggacggattcacaaaaaatcagctcactttctaccagtgaaagttacatattcagtggatcagtacgctgaattgtatgtgaaggagatagttcgtctccatggagcccctaaatctattgtgtcagatagggatccaaagtttgcatcgaagttttgggtgagtcttcagaaggctatgggtaccaagttaaag

SEQ ID NO: 346020 - DNA, 566 bp, Cannabis indica
atctctttgttggtccttgtattgtattacaatagagttgtaatatcttgattttcttccattgtaataaaatctctaacattttatccttaaaacacttagctactgttgcccttaattttgcccaaaatacgtggactagtatgaagacgacacgtggagttgaggggatcagctcttaaagaaatcaaccaagtcttgggcaacagaggagtgcctctgagaggataactcccggagaagatatgagaaggatctttgtactctcgaaggccaaggccatgctaagacagctccgagaggtaccagactctattgaacaatcacctcgcatttaatgccgcatgggggaaaacgtattgaaactaccataaacgatatgactgacggcgtaacccctcttttacagctattacgctgtgattaataaggctagtgacggctattttatgaggaatcacatcaatcaagaggggataaaagattatatccacctaactgttggaattattttaccgatctctaacccttgtatcctttcggttgcagagtattaccaagatctg

SEQ ID NO: 346021 - DNA, 526 bp, Cannabis indica
tgtgtcaagttatttatttttctgtaaatatttttgcattctgcctgttctgttttgtcactgtaaaattggtttctgcagtaatagaattactttatgcttctgcagacgcatacagttttatattttcttattataattgacatttgtaaaaacacggtttttcagatgttattgttattgatcttgtgatgcttagtaccttggtggcccttgtttttgttctttgtgtatattttagagatttatatcatcacgatgtataatgtgtagtgattaatttagcatttgattgattttttttttgtagtgtatttattttagtgggttgtatacagattatatatgctataagtgacttagtttagtgttttttttttcatatatgtataatgttattgatcatatgatgatgtggttttgttctctgtatatattttaaatatttatatcatatgtagttaattactaatttagttacttctttttaaaaattatataaagaagttacttttatcttggttat

SEQ ID NO: 346022 - DNA, 469 bp, Cannabis indica
aatatttcttaccagtaaggtttgaatatgacacagaggcgttggttggagttggttaaggattacgattgtgagatcctttaccatcttgggaaggccaatgtagtggtcgatgccctgagtaggaagggtcccgggcacgtagctagtatggttgagatttcacctcagttagcagaggacatggtcagatctagcatcgagtttgttgtaggcaagcttcataacttgacgctgcaatctgatctgtcagaacgaattaaagtcgctcagttaactgatccagagttagtaaagatcagggaagaggtatcagctggtcaaatcagggactttgaagtgtcagacagtgggatgttgttcttcaaaacaagggtttgtgttcctaataatggggaactcagaaatgaaattctcgaagaagctcatactactctatattccctacatcccggcaccaccaagatgt

SEQ ID NO: 346023 - DNA, 676 bp, Cannabis indica
attcgaagactctcccccaatttcctttcaactcgtgaaccagtgagttcagagagcatcaattggtgatccatagatattattgcattggtgacattttctgccatttgcaaagctttggaaatatcttcttcagcaaaggaaaaccaatgacctctaacaaacacttttcgaaagagtctagaattctcatcaagaaaatcatcagataagttagcatagaattctttgacaatgttttcaatatatgctttgaaaccagtgagagtgttctcccattgatggtattgaatgaacttaacaacaccatatacccaatgagcatgcaaatcataattcctttcactttcaaactttcgggtagcatacaaattccaatcacgctcattatcactaaagtaaaaatgagaactataggagtgagatttagggatattaccaggagatgaatccttcatgggctacttgcctttggcagtagcagaagccttggctgctgaagatgtacgagaaggcactggagcagatttggtcaagggaggctctggatcgagatcagtttcctcactgtccaaggaggctctgatgtcttcaggaatctctttttcagaatggagcgacacaaatttatcagaggaattaacagagggatcatcctgttgggttttgtgcccta

SEQ ID NO: 346024 - DNA, 978 bp, Cannabis indica
ttactaatttagttacttctttttaaaaattatataaagaagttacttttatcttggttatctttttttatacaaaaatatacatatatgttttttatatttcaaaatataatttaaaattgactaaaaaaaaaaattaataacgtcaatgtatttttaacaataaaataatataatatagcctaaaaattaaaaaaataaaattatactttcaaagttaactaatcaaaataagtaatgagaagtgtatgagataaaaaattatcttaaaataattttctctttaataaaaagtaactaattgatatattatttacatcaaaagcaaccaaaaaggttaatatatatttctcacatattaaatggttattttattatttatatatgtgtaaaattctaaaataattttcttactagaaaggtaatcaattgatatcttatattcagatcaaaagcaactaaatgattgcttttttcagaactcccaaaaagcaaaaaaaaatttgaaaactgagatttttccaaattttttctattttcggtcattattttaaatttcggtatgtatgctgacgtggcacatcagtatttgtgcaaataattttcttaaatagtatttttataaacaaaatcacttttaggtaataatattgaaaaatcccccttagaaaaatagtgtatttttagaagatcataatttttttgagcaatctccaacaatgacttcaagtgtttgcttccgctcatcccgttatcttctttttctttaatttaacaaatgtatagaaaatataatttattgttttctatattaaagcacttctgaaatataattaaattatagattattcatattttttttttgaatattttataaatcttaatattaatatatatatgtgggtacacttttaatgggtattacccatgaatgggtaaaattagaaaattttgagtttttatgcttaatttttctat

SEQ ID NO: 346025 - DNA, 550 bp, Cannabis indica
tttatttaacaataattaattaacaatattttgttgattttaagacttacgacgatcctaggaatttacaaaatacccttgcatctatggagaatagttttgtaatttgattttaatttttaaagggttgtcaaattagaaatacccaattattatctagttcatcatcattatttatatattatttttaaataaatactgattaatggttgattaataacatgctcatccattagtgaataagatgacatacatagaaatctcacacagttatattatcatgcatctcatagtagaaatttaatatattacgattgttctatgtgttaatgtgttaccatttttgaaactgaaagcatgtgaacttgctaagattaatttgttaggatttataaaacactcaagaaatatatatcacatatctaaacatattcctaaaagtgctttaatatagaaaacactaaatcataaatctatagaacttttgctaaattaaagaagaagaagatgataaaagatgagcgaaagcactaacctgaagccattgttg

SEQ ID NO: 346026 - DNA, 544 bp, Cannabis indica
gggcataaaacccaacaaagaaggggagtgtcctatcgagcaattaataaaagaggagtttgggtagtacctagcagctgaaactctagcaacagttgagcttggatgtttaagaaggcgccaagcttgtttagccagcaaagcctggttgaaatggaccagagatcgaaagcctaacccaccatactctttggacctacaaagctttttccaactttgccaatgagtcttgggacggttgttatcattaaagccccaccaaaaattagccataatagactcgagagagtggccagtggcgaccgggaggcgaaaacaagccatggtgtacgtggggattgcttggatgaccgactttaggagtgtttctttaccaccttttgaaaaaactttatgtttccagctgtgtaggtgaccccaaactttatcatgcaggtagtgaaagacttgttttttgggacgcccaatacgttatggaagtcccaaatatttttcaaaagaggttctcgcaggtatctactggtggttttgtgccctaaataaa

SEQ ID NO: 346027 - DNA, 521 bp, Cannabis indica
aatgtaacgaaatcaaatataattacaatggcaataaatttccctagacgaagaatcatatcgttcttcaaatcaaatatgatcagaccttgagtgagggtgagtgagcttttttaataatcaaaatgaaaaaccaatataagccaacgaaactctaccaaccttaaaacttttttttagtatatatatatcgacaggtcctaaaaattaaatatgtatataaatcaaagaatttgttacctcaatgataggcggagacaggtgttgcccctgatttcgcccaatatacgtggaccaatcagacagggacacgtggatcaaaacatcttaatgcttgaattatttgctaagtctttatgaaataagatagcatccaggacatgcctcccggagaaggcatacagagccccctgtgctcccggaagcctaaataacattaaggcatctccgcaaggtgtcaggcttcccctgagcagtcatttcgcatttaatgccacatgggaggaaacgtgttgggactg

SEQ ID NO: 346028 - DNA, 556 bp, Cannabis indica
actgatttggcttcattcatacaaaacttgtcaattagtttcttaatgtatcccttttgtgataatgagagtctctcaggtctattacttttgatgtcaattccaagtatcctcttagcttcaccaatatccttcatttcgaattcaacacttagattttgttttaacttgtcaatggcctgtctcttttcaccaattatcagtatgtcatccacatacaacaataaccagattgattcattgttgtaatacacacatggatcatagttgcgtcagctatatccaatgctcatcataaaatcatgaaatctcaagttccgttgccttggagtttgtctcaggccataaagagatttctgtagtagacatacctggtttggtttattacttttgaatccatctggtccttccatttatatttgttcttcaagtctcccatgtaagaaagctatcttcacatccatttgatccatttccaggtcatacttggccactttagtcatcatgatccttatagtgttgggttttgtgccctaaataaaacccataatcatat

SEQ ID NO: 346029 - DNA, 629 bp, Cannabis indica
aagcctgaaagcaggcggtaagcttggggaattagttggtatggcgcaaggccgacaaatacaagaaagttgacaaaataatcttgaaggggaagcatggccccgcacatcagatgcgtctggttccaagccccaaagccttcgtagttgtggttaggcgtcttcgcatctcggggcagccgatggtacgtcccggacgtcgcgggcttgattccagccacctccacaatgttctccaactggtgagggcaagttagagtggagtgaagctcggccgcttcccatcccgtagcacgaggtttgtacccctcctgggcaacgggacccagcatgacgtcttctagggtagccaaacgcttaccccccttcttggaagattttgagccggatgcagacattttttctgaaaaagagttaaaattccagcaattaggcaccataccaaaccctaaatcaaaaaagggaatgggggtcccctaaccgctggaaagaggccccctccggacatctgtcgacaagaaagccttagaaggatttcctggacaaaagtcgggtgcaaaaatctcacagatggtgacattgcgcatgaaagaaaaagaaagaagggcagaaaatcgagaaaaacgaag

SEQ ID NO: 346030 - DNA, 926 bp, Cannabis indica
caggaataggaaggaagacgacccccataaaagatgaagatgcacatcagcacatggacagaggattagacactcaaatttgaaaactaagcaaaaataaataaataaataaaatcaaaaataaaatattaacaaactaattaaattattttcgatgtgcataaaatccaattacaaaagattggatgtcatttttaaatatccaattggatcgaatcagatggtggatgaggtgtccaaaaatctaatacatccaatcgaactaattagtattttcatttagtttggatgattaattaaattttatattgttatacgtaaaatttatatgtatatataaaaattaacaataatttttttttcaagattggattgatacagtctaatccaatacatactacatttaaaatcaatatcatcaccgtacctcacttatagtttccattaatattctttcttgtaggtttgctctgtacataaatcaaacaatgatcggtaaatatttatttttatacataacatgaatcattagttatcatatacagttatatattttgtacataatttttaattaattgataatttttatttttttgacaaaaattaatgatctttaattaaataaagtagaataaaaataattaattaatgatctctaattaaataaaaatgacaataattttaaagggaaaaaaataggaaaatataaaaaagaaaaaaaattacaaatatactatgagccagcccattaaacatttatacaacccacacataaattcttacaaaaataccacatgctctaaaccttcagccgcacggaacgaacgatgaagatgaacatacctcgatcattcaaatcagtaacacaactagaatgaaaccaaaacgagagaaatacaatccttaattctagcgaaatcaactgg

SEQ ID NO: 346031 - DNA, 641 bp, Cannabis indica
aattagattttaaaaaataaaaatatattatttatattttaagttaaaaaatgttatagtttaaattaattttaagaactttaatataagaaatataattgagtaaatataaaataattgaataaaataatatggtataaattgtaaatttcaacttcaatatctaaatacaataaaaattatttactataaagtctaagttttaagttaaacactaaaatgtttaaactttaaatacaaaatagtttaactaataaatgtaatttatgtaatataatacatacacttttattaaaatatataaatcggtttaattcaatttattcaggttaattgggcaatttaaaataatttgtaaactatctaatatattcattgggcggtttgaatttttattgtattattttggattgtatttttttgtcgggttattaagtttagtttaagcattttatttaggttaggcgatttgtaaattttgttaggctaattagtaatttttctccctgaactttgacatgtagtaaatcgttcccctgaatttttttagccgttaaaaatttccccgaattatggaaattgttaaatttaaggccttttgtctaatttcattcaatttactgtttcagtgattgtttatg

SEQ ID NO: 346032 - DNA, 578 bp, Cannabis indica
cctcccattaccaattgattttgggatggaacttcattcatcttattcctcaaattctaacatggtattagagccatatcccttgcgggcaagcgatcctatccgatccgcatctatacagatattgactatgtccactctgatacggttcaagatcgatgagcaaaaaatagccatcatcttgagggagaatgttgtggacattgtcccacttcaaataaatggtagagaattgagccatatataagaacatggactactccactcatagccaattggtgttcagatagaaccccatgattcttaacatggtatcagagccacttgtgatccattgtgagcccaaattgccactggtccaaaaagtcgtttgtgatccgttgtgagccaaagtgtcgccggtccaaacagatacttccgctgtctcccctttaacctccatttgggacctttcggccaatgtgccagtttccagtattgggtcttttcaaaatcccctaatttctcgatatttggccttgtgggattctttcaaatgtcacgttcggtcctgtggttagtcccacattgctaatgtg

SEQ ID NO: 346033 - DNA, 603 bp, Cannabis indica
taacattcgcaccatctggccgagggaccattatccatacaccaagtcttttaaaatttcccatttcatcctgcattgcagccaaccagaactcatccaacagagcatctcggacacttttgggctcaatttgtgacagatagcaagcaaaggctaacaaattctgcagttttcgtctagtgaccatggtatcattcggatttcctatgacagtggcctgaggatgagctttctcaacccaggatgggggtccgtttttatataatttggcttgttggggttctttggtcagggcactatcaacttcatttcctcttcctggatcactggcaactgcttgattgtcacctgatacacctggtgctgtatttagggactctgtaggagtgtcaggatacacttgaggcggtctagtgaggactggtctagggccagagaggacaggtgcatcatcttcgacccacacttcttcatgtccttctaagtcatcaaatttcacgttcattgattcgaccacagagagagtccttttgttgaatactctgtaagcacgactgttggtgggtaccccagaaatgtcccttcatcactcctgggatcaaa

SEQ ID NO: 346034 - DNA, 588 bp, Cannabis indica
ggagtagtgaataggaaggaaggaagtatgtcctggaatccatggatcaaagccagtgaggatcgttctaccatcgccaatcttccaacgaaggcccttgataagaagctctcggccccaatgaattccttgccatgtgtaggaaggcgaatgacccaaaggagcatcaaggaaaccattttgagaaaagtatctgcttttaagaagcctaccaagaagagagtccggttgttgaaggagcctccaagcttgtttggccaataaagcttggttgaagtgaacaaaagaccgaaaacccataccaccatccgatttggacttgcatagaagattccaagagcgccaatgaatcttagatccattttcattggaaccccaccagaaattagacatcatggattcaacttgattgcaaaagtaaacaggaaggcggaaacaactcatggcatacgtaggaatcgattgaactacggctttgagaagaacttcccgtccacccgctgaaaatattttctcattccaagtgttcatgagtttccaaatcttctctttgatattgctgaataattccttcttatctcgcccaga

SEQ ID NO: 346035 - DNA, 883 bp, Cannabis indica
gataatcacctgaaccatcaaacttatctatatcaaccttcatggaactcataattgtatatgtataaagttatttcaaagaaattatatagataatgagtttagaaaaatcctggtgttgttctttgcaatcttggttttgtgtgtttgaattcttgctggtatgaatgtgaatcttgatgctttcttgatgatttctttatgctttctttatgctttcttgattaatctttgctgcagattgtgccttgtttggctctgataccactgtaggaatattttattccttctttacccctacacacagcaaaaatctaatcaaaagcaaggtcaattaagacctttctctcccagtcaaaagctccttttgactctctgatttgaatcctcaaaaaatagggaaacgacagcccctttaatttacttttggtcatttcaattttaaagcaaaagaaaccctagtctataacatatatatatatatattatctttatctcttttatttcactcagcacacacacacggcagccctaaaataaaccctagcagagaaactaaatgcctccttcttcttcaatgttcttcaatgaagaacatgaagaacagccacaaaacccactgcccagaaaatagaaattaaaccccttcctaaaccgattataaccctataaatcccaagcagaaaaataacaaacacagtataaaattgcagaaagtttaaaggaaagaatgcaccagatttatagaggttccccaaaaattctgggtacgtcctcttgagctcgcctcttccaatatagatcttcaatgatcaaagtttacaaggcttggattccaactcacaacactttgagaggtaatccgaatatatatgtatatata

SEQ ID NO: 346036 - DNA, 732 bp, Cannabis indica
atttattaattttgaatcaacttaaattgagatatttttttcaaattaaggtgattagttcaagatacttgatttgtcatttaatttaattttgaaaattatttaagttgaaaatttagttattttagaacaatttaaattagatattttattttattattttcttatataattttgaaattatatatattatgtgtatatatattttcaaaattaaatttaaggtaaaaattaatttttaattaattttagaccaacttaaattaagtaattttcattattaaaatacatagattaaaataaatgattaattaaaaatacattattttaaataatgagctttaatcaaaaggacattcgatctcacttgttggtctaacatggttaattgtttcaatgtaacctcgagacgctagactttgtcccccttatggatggttatccattgaagcattaacaacgtaagatctcgtatgaaaagtattttataagtttttgtttctattagactctcccctacggtgactacttagtaataaatttatgaagtatgaaacaatggtggaagctcataaaataagaataaccttgactctcgccaaccgggataacgttggattcttattttgatagaataaaaaattgctagaatggtgtcgattttagatgagctaactactctattgaactaatgttatctttgactctggcctaccgagacactgtatttca

SEQ ID NO: 346037 - DNA, 716 bp, Cannabis indica
aagacaacacacgagatgagtgtggtcggaatatcgaatgacaaacaagaaaatatgccgaccaggagtactcaacagataaaagaacgacaatgtttaaagaaaagtcagaactcaagaaatcagaaaattttcttgagttagggcaaaaaagttcatgaagcttagaataatcaagatgaaagacggacgcaatgcagtttagaaacaagctttatggccgtaaacccacatgaagacatgataaagaataatcccagaagtttctaaccctagggtttcctaagcatttttctatagcacacagaaagttgcattcgaaatgtaaacatgcgaagataagcataaaggaaacaaaaacttactcaagattcaagtgtctgagatcgagcaacgtctatccaaccagtagttgtatcaaggcacttcggcgactttgaagccaggaaattttccttttcgctcttaagcttacttagcaaagaagggtgatgaaagttgttatgtgctaatgctgtcggtatttataggcaagtcatgaaaaggggtaactgtctcaaaaaacctcagacgcctcagcttcccaccctaaaaacaaatatgggaaatcaaaagtaatcaagtgcaaccgtcagccgtggagagagaaaatcggatttcgaaatattaattgtcagagcatttattagctgaaaaaacgaagggacgcccagtca

SEQ ID NO: 346038 - DNA, 940 bp, Cannabis indica
atagaaaaaataaaagctatagaaaaataatataagaacacaaggttttttacatgattttgcagttaaacttctgcatagtccacgagtcaatcttattaagatttctgagtattattttagggcctcttgcataagagtttttttgtcctttttttgagattgtttccactatttataatgcatagtagcagttaattacaaagctgaccaaaatatgattgcagtcatcatctctaaaatcatgggatttgattacatatcacaaaatgtaaatgcggtgtatgattttgaaaatcatatatatgtgattttctcgcttttattgggtcaaaaatatagtgtattaaacatgtctttaattgttgaatctggagatgtctcgacataaacttgattgtagtgatcccaatggcgagctggaaccactcttctctccgaggtcgacaagacatgtcttaggtcgatcgagggtatagaggaatcttttgacttgccagggttatgagcctcgctcttgttagttggatggaactataggaagcttccttgtagcgagatggtcatctcgcattcttgttcttcgagccgatccgacttttacacttagtttgcttattgcaagctacggtatgtgttacttttctccggtgcctcgctattctcctttagcaacatatggtttctcgttaacacactaagtgccaattcgtacattgaatcctcgcctaagaccttagagtcagcgggttgcaaatatactcagatatttacgcaactaatgagttattccataaaaagatatggtaccgattcacattccctttaccttgacacgcgtcctccagccgaatttcgggtataacataaacataagagggttttgccaccaaaaaagaagataagggggttaagtgtataaaaattaaagcataagggg

SEQ ID NO: 346039 - DNA, 569 bp, Cannabis indica
actttctattgtatatacatcacactattagaatatatagcgtgtagaaattattattattatatataaaattaaaataaatatattagtataaatatttgtttatgtagcatcaattatttaaaataagttggttttttttttgctgaatatttaaataagttgttagtatttaaagttatacataatttgcaccaagaatatattataatattgacagtgtgtcttttattttattttcttaattagtataaaaaaattccacatcctcataattttttaattaatatattattagccacaatatatatatgagtgactatttaatggttacatttttattgtaaccatcatgattacatttttctttgacttgtaatagcaagttactaataggtaaacatttcatttttagaattaattaattataattaactattttcttgaaataattaattaaatatttaacaagacctcttttagcaattaatatttataaataattttttttatatattaatccttactctaattattttaacaattaagccatttaattataatattta

SEQ ID NO: 346040 - DNA, 690 bp, Cannabis indica
ggagtggtcactctatccgtaccattcaggattcttgggttccaaatcttaggatccttaggtataaggataattgtcttcctccttctgataaagttagttttttcatgagttctaatggtacatgggatataaataagttatcaaattactttgataatgacactatggctaatattctccaagtccctattggaggtcatgataaagctgactgtcttatttggaaaggagatccttctggccttcttactgtcaaatctgcatatcactttgtaaatacttcttctttgcctccttgctcttctaatactagtttctataatagctggtggaaatttttctggaatctatgtattcctcccaaaattaaaaactttggttggagaactttttatcacatttttcctatagcctataatcttcaaagaaagaaaattgttccttccccttcttgctcttcttgtagttgtcctatagaaactgtaactcacgctctactagactgttccagggcgagacaggtttggaaactttcccctttatatcatttttaccttatgcatatatgttatctggatatactgatctaaataatgatgatttttctttattgttgtgtactttatggtctatttgggaacctaaaaataaaaagcttttcaggaatattcattcagatgctgcaga

SEQ ID NO: 346041 - DNA, 2329 bp, Cannabis indica
aactacaaaactacgtaaaaaaatcccatgtgttcatatttcttactttactgctttcattttttctgtgtgaaattatcaccgtgaggctcaaactttggttaacgaaaatctgcgttaacagtttggtgctttcattgagagcctttgtgaaaaagctcagagaaaaccctcctttctttttttaaaaagaaaaacatgggttaaaatccaaaaggtgttaatacaccacatgaggaaactcaccatcgttctgcgaaagaacccatgggctccagaaggtctactaacccacagtccagacagaccacccgttctaggaggactcaacctgagggtggccccagcactcgaaccacacgttcccaaaggacccaacttgacgttggtcgtagcacgcgaacaacacgttcgaggagaacttagcgtgggaatggccagaaccttggagtgggggatgaagagcccaatcgtacccaacctatgggataagatacttatgaaacggaaaaccatcgccttagacgccatcaagaagaggcgcagtggcggaacgctgaattagagtgtgatgcagtcgcaactagggcagcacaggagactaatgctcaaaatcaacctgaacttggagtgagaagaccacgaggtaggcctcggggctcacaaacaaggagacaggaaaatacccagaaagaacaacccagggaaaatgagataccccctaaaaatcagaatgatcagctagaaccctctcacagaaatgagaatgggaggcgaccagaaactgatgaacaagaaattcctcatgacaatgaggaggatcttgggactcaaccgtaaagttaggaatgatttggataggttttgcaggtgttttggtgagtgcaaaatttgagatttttgtgccaaaaaaaggtcttccgtctttgccaaaacagcctgctttttgtagaatcgtatctttgtcataacttttcgctcgggtgtctattttggatgttctatataacgttttgaagcttccaacaagatctaccatatggtctatatttttgaaccaaaatatatgttttattttagtgtatttgaactatgagttttggtaaggaaaccttaagttgtcctttgcaacgtttgagcagtgttttgagataaacacttattggtttatcattgttatgacatagggcctgggatcatcgatcatactccaagtaggttggccaacatatctgaaccagaacttgaggtatgaaaagtatattgtacttcatagtacgttgtattataatataattaatagtgttacgaattgattactattgagatagagatatagttaatattgttatataatgaaaagattaattaggtgatgtgataatgagtatttagtgtaggtacaggctaacttgattaggtgaagcgatactccttgcaacgtattgggcgtaggtacgggcgtcagtgatatatgagtaccaagtgtaggtacacgctcacctgattaggtgatgtgatactcctggagacgtgtagatatgggcgtcagtgatatgaaaatttttaggttatggcatagaatgaaactgttgtagggtttcttcctagcaatgtgtagatacgggcgttggtgatatgaaaatttccaggttatggcatagaatgaaacagttgaagggtttcctattagaaacgtgtagatacaagcgtcaatgatatgaaaattaccaggttatggcatagaatgaaattgttgtaggtttcctcctagcaacgtgtagataggggcgtcagtgatatgaaaatgcctagttatggcatagatcgaaaccattgtttggtttctttctagcaacgtagcgggcgtaggtacgggcgtcagtgacatatgataagtaccacccatagttacaggctcgtctaattagacgatgtgatatattggtgccaagttgtggcacaggctcacttaatcagatgatgcaattatttaacaggtgtaggtacagacttgtctgattagacgatgcgatatattagttccaggttgtggtacgggctcacctaattaggtgataaattatatgatatatatgggtgcaggattttggcatgggctgacctaattaggtgatgtagttatgcgatataatgggtgccaggctatggcgcaggctttcctgattaggcaatgcaatacaagattattagattaaagaatcaacttgcttgattaggtaatgtgatgtaatggagattgttacgttatgaagtaacatatatataatttatatttttaaatgaatatgattcctattattggtat

SEQ ID NO: 346042 - DNA, 638 bp, Cannabis indica
taagtccctattataatatttttaatatttaaaccatttaactataatgtttactaaaattctatttttttttttcacaaatttagacttccaccccttccaaaataaatttttgaatacttaattaatttttaaaaattacatctaattattattttgcaacaaccgcttgaccgattttcctcctttgtaaaaaaaaattaaaaattagggttttaatttgtcccaatctaacattatgtgaatgatccacttcgatacaatctcctacatctctgtcacaaactcatttctctattcaacaagctacagtcatatttgtcattggtttttaataatttgcttgctattttcttactgttatgcttatttgtgaaaaagaagcagcagtttcaattaattgctaatctactttgatattattttttacaatctttagattgatgaagagaatttcaacgaggagcaaaaatagttaacaattattaactttatagttgttattacattttaaactattttttttacttaattttttattatttaaaagaaaaaaaaatactaattaaataactgttgaccgaggttttcggaaactaataaaatatgattatactattgagctgtaagaaagtgag

SEQ ID NO: 346043 - DNA, 506 bp, Cannabis indica
attcattgtccgtgtgtagattgttgtaatgtatctaaagggaatattacaatgattaaggacaatgtgtatttatgaagtttcaatagaagttatacaaattggtattaccatggggaacatttacctgatgatccatatccattaggaaagccgggggtagatgatatcaagggtaatgattttgatgattatccattggacttgctaaacgaagcacaggaggaatttcttaatgatcctgcgaaattcaataattttcttagtgatactgataaacccatgttcgatggttgtaaaaaattaagattaccaacaatggtaaagttttacaacataaaagcagaaaatggagtgagcgataaatgttttactcaatttttagctgctttaaaagatatcttaccatttgccaaccgcttcccggaatctacttataaagtgaaaaaaacgttaaattctataggattgaagtatgaaaaaattcatgcatgtccgaacgattg

SEQ ID NO: 346044 - DNA, 554 bp, Cannabis indica
tgggtctaagtccttggttctgatcctggtcaaggttcgagtttgggtccgggtccggttctagcattgggtctgattctaggtgtggggttcagttcgggtctgagtcagtgttcgggtttgtttccaggtctcgaccccgatctgggtctaggttcgggtccaggtccaagttggggtcccgagtgcgggtccacattttggtgtaggtcaggatctcggtccagatctaggtccagcatttcgatcccagtctgggtctttgtctgagtctaggttcttatgaggatccctatctacctccaagtttgtgtttgggatcggatccaagatttaggtccaagtttgggtctcagttccggtctgggtacacaaccgtgtccgggccagagttccagtctcagtttgggtctgaggctaggtctgtgttcgattctatgtctgggtccgggtgctggtcacggtcctagtcttgttctagggtcttggttcggtgattcatgttcatgttctaatttttgctcctaggtctaggtttgggttcgggtttggtt

SEQ ID NO: 346045 - DNA, 685 bp, Cannabis indica
gaagatttcatctgatttggttgagttgaaagagtttttttctgcacagtttatttcttttgctgctcaaatggctacaatgcagacagttttcttctgtgtttactgattctgttggtaaggtatgatagtatttttatggttgttttcaagttttttagttgctttcacatgatttttcttatctttttgttataggacaaagggagtgactcttccaataatgatggtggcaatgataatgaagaagatattgattcaaagggcaatgaagaagaagatgatattgaagaggaagatgctgaaggtgtagatttggatgaaggtagtggtgatgaagaggaagagggtagtgacagagaggaaaaagatgaggatgataatgaagattttgaatccaaaggaaaaaatgataagggcagtgatgatgaatgcgatgatagtgagaagaaggtagataattagacaatgtaactaggttttagttactttgtatgttttattttgttgtaattccatttagttcatggattagtatttttatggtgttgttatgttgttttatattttagagtcttttttcagtattaatttactactaatattcaaactcttactatgtacttcttatatttttgtaatggttatattttgattatggtgttcgcatttaaccatgttctat

SEQ ID NO: 346046 - DNA, 1046 bp, Cannabis indica
gctagagatctgaacggaatgagtcatttaatttcactgcacccaatgtaaggtttcttatactttatatgtgtttatttcattattttagaaattcatattaggatgttagacaacatacatggtagtaaatctagatcctggtaaaataattctaacaataattggagtcaaggaaggcactaagtcaaaaatatacatattttatatataaagcaagtagttattacttcatattttgctgattctaagctaaagtgacattattaaatgagtggtaacaactaagtagagcacatagaaattaaggagcccaaacatttgatgacataagatatgatctgggctttagtcaaaaaaatcaaaagtggtgtatataacataatttcattgtattcatcatttaaaaaaaacttgtagtttaaacaaatttgtgaaatgataaattaagccacaaaattaatcttcgaggtactagaccactaacaacaagtgtgtagatttttattggaaattttaacttgaattgggtctttattttatgttgttataaattggaaaaccaaaaaaacaacaaacaaacaaataaaatttttccataaaccccaaaataatgtatgaaattgaacacaagtaatttaagatcaaagatagaagattaatatcatatgaaaaaaaaaaacaatgaaattgaaaataaaacaattaataattgcaaaaagaacatagacaatataagaatacacaccttattttttccgaaaacttctttccaaattgttttcaagcgtgagctacgctgcaagttggtcatcttccagtttaaaattttaggaatgttatttccaaccttaattgcaaaagatgaacctaaacttggaagaatttcaaagccccaaacttgaaaagctaacgggaatccacatatctcatatcccgtttttcggcgattcaaaacagtagaaagactgttaactgtgtcattgaaagaacgacgaccccaaggatacttttcaaacatttcttcatcatcaaccaacttcact

SEQ ID NO: 346047 - DNA, 847 bp, Cannabis indica
ttatgttctttgtattcaaatcattagaaaccagaagaatagatcacttgctctctcgcaagcaacttacattgataaggtgctagagcaatgtttcatcagtggcaccagaggggcagttatgccttctagactcggtatccgtctatctaaggaatagtgttccactaatttgcaagagatagaagacatgagaaaggttccttatgcttcagcagttggatgtctaatgtatgctatataatccactaaaccagacatttactatgcagtaggaattgtgagcaggtatcagacgatctagaagaggaacattggacaacaggtaagcatattcagaaatatttgaaaagtacaaggcattatgtgttagtctacaatggtgttgctttaagtcccgtaggctctatcgactcaaatttttaggcttgtattgataacaggaagtctacatcttagatggtctttactcttgggggtgtagcagttgtttggggaagtgtcaagcaatctgcaatttcagactctaccatggaggccgaatacatagctaccgctgaggctactaaggaacgggtatggctaagaaagttcttcatagaacttggtgttgttcctggaatagaaaaaccactagttttactttgtgacaacagtggtgctatagccaccagtaaagagcctcgaagccacaagaggagtaaacacattgagaggaaataccatatcatcagagaatatgtggcaagaggggatgtacttgtggagaaagttgataccgaagaaaacttagctgatccattcaccaagattttgacagtcaatacatttgaaaagcacagaacga

SEQ ID NO: 346048 - DNA, 1059 bp, Cannabis indica
aattatagtgtatgatgggaagaaatagtgtattgattatctatactaagaatatgtgtatggtatacgcatatttatattgatatctgtttgagttttaagtgtttggaagatgtatattaaatgcgtgacaagttatacagtaagggcaattgaattgcctaattagcgagctgtctaggctcggggcaaacggtaaggaaaagaatcctttattgtcataatacttgaaacatataaattcttctatgcaagatgttattagacaacaaggggaagcagattcgagatctgagggaacaacatgctcgtcttttgtctattattgtactaccgacacttcttgttgtaccactggatatggtgaaatatatgaacccaacttacgagcagatcagtaggtgtaaactaaatgaaccaccaattatggaatagaatgaaaggttctagggtgaccaggatagcggttaaagtgagaataagaaatggtgaccttatcttgagtgttcaagatgtaaaaaaagcgccatttgggctaatgtagagtcaaatcttgttattgtgggggtagtgggtcatctgaaaagaacctgcccacagttaagaaaaactgattttaaagaagaaaagtgtacgagtcatgcccaagtgctaattatgattcaaggggacctgggtatcggtccttcgactgactaaagttagaattttgtgagtaagattatagttgttgtttcaattgatatcaatatcaaacattgtatactcaatgaggggatatcaaaatatctaaatgggcaatgtgtgtatgttatttagtgctaactcatcgacagggtagacagattagaaaaatggcaatatgagttaaatttgctgatattctcaagtggaaacataggatatgagtagttaatgggagtattcatctaattgatttggagaacagaatcttttgatataaagtgatctactgttagtataagtgggataatgtatgagtattgtctgaaaccctgtgaattaaaggcgatgattatgtgggtggatctattcact

SEQ ID NO: 346049 - DNA, 602 bp, Cannabis indica
atttttgaaaccaccagtttcgagcctataaaaaaataaattattatttatatttttctaaacattcctaagaacatataatatcactttgagattcatattatagaatttgaaaatttattattgaatttggaggaatcatgctttaataaatttatgtattaattaagaataaaagcagagatttcacaaaattcttcttctctttctttcataattatatacacaatatgaaaattacagatcaaatattccaaaattatgtaaaaaaataaatatatatatcaagttaggttgatcggcaaatagagatggaattggccgaacctttgtggttaataggaataaactgttattttttgaaggcataacacactgttgttgatcctcttcagttgatgtaaacttcagttgctgtaaactaaggtgatggtggtggtggtggcaaaacttgtagagaaggcaaaaggcagtggtcgagaagggatttagtcgccggagctaccactgatcggtggttagagagagagaagaaaggagagaggcagctactgagtggtgtggccttcggtttcagtccgattggagagagagagagagag

SEQ ID NO: 346050 - DNA, 915 bp, Cannabis indica
atttgtgtagccaattagttttgactcattcgtgacttcgtacgacattctgaagagttttgctcctaacaagtatctaaggattttcttggctgctccatagtgaactttgacttagatcatgcatgaatcttgataggagactaattgcatacattatgtctggtcttgtagtagttagatagagtaagttgcttattagacttgacttggcactaaaatgaacttagtgaaatcagatgcaactaactacagaaaagatgttagacaaacaaatactgatgcagaaacactgaacaagagcattatctaatttgccacacaaaacatgacacttacaatctcccccttggcaaattatgatcaacgacaatccacattaaaacaaccaaaagtttagacaaaccataatcaaaaagatacacaggcaaatccaaaatattaacactagcccaaaaaaaaactgtgtacaaagtttatcaaaaggtaaaataactccccctcgatgatcataatcaatcactgctggaataagagaccagaggagcacaggaaccaagaatccttgagtcaccaccatcaggagcagatgattgagccacagtggaaatctccccctaaacagctgccacatttgaaggctccccctggactacagcagtattcgaagtctccccctgaataccagcctcaatatccgcaccttgctgaaaccatgaatcaatctctttttcaagaccagctggtggagaaataacctgagcaccttgaacatcagcagataaaggtactggaagggctgcagacatctgtggctgactttgttcagcagatggatctatggctgcatgagatggagagagaccaggagagaccttatgctggtcagactcatcagcagaggagctagacaca

SEQ ID NO: 346051 - DNA, 515 bp, Cannabis indica
ttttgctttgagttgtaactttgccttcatcttttatttctctttatttgtattttgtgctttgggattgtaacttttatttaatctatagtccttgcaattttattgcatagagttgtaattatatcttggtctcttttttcatcttattgttattcttctattgatatctcatattttcctaacagtaaccctacagaatacactctggcatctatattcctaatagcagtaaatgagagattttatccctaatatggtatcaaagcggggcggggcaacgacatcggaagttgtggcgtcaatggaggaaatgtcttgacttgagacgatggtcaaaggtggtgacgtctcactgaaggaggcggcatcaatggaggagtttcttatacttgtgccatgtaaaaagttcaagattattacacaagagaccagatcctctagttcttggttggtctcaatgaatcttaatggggcatttaggctcagatcatcctcttgttgggttttatgcc

SEQ ID NO: 346052 - DNA, 671 bp, Cannabis indica
ggagtgcataatcaaagaggaaggtagaaatcttaacaaaaaaattgttatgctgccaaatttctcatagatttttatacttttttttttatttcctagacttcagaaaataagtcaatgtaggatgtaaatcaaagatgaaaatagaaaccttaaataatgataaatattatgttgtcaaaattttcccaaatacaaaaaaaaattgatagagagtgaaatttggtaaaaaaacttataaaagattaaaaaattaaaattgtgtggtggaactagggatgcacatttctccacggggatggggccccgcggggacccgtccctaatggggcgaggattccccgtcttaatggggaacggggcggggacgaggattactttttgtccctgaatgttaaacggggcagggtcggggatcacactccctgccccgacgaggacccgtttagtattttatcttatatttctagtaatattttataatttatgtttgtatttttttagtatattagtatctttttttatgaattttaagttgtattttggataataattagtttattgaataataaataatgtgtaatattttaattcttatgtattttaatatttttgtatattaaaagttttattataaattttattttctattaggggattcctcgccccgt

SEQ ID NO: 346053 - DNA, 1118 bp, Cannabis indica
cattgaatttaaattctaagtgtttatgtggtattatctcttcgcagagattattataccataatttttatatcattaataaatacaaaacacataaaacatgataaacatataaatataattcagtattggcatataagttaaagaatatgaagctcaattttataatagcaattcataataaaatctcttaaagagaaaaatttatatattaatactctcaaaaatgtcacaataaattatttgcaataatataaaattagggaataaaatttttaaactaataattgaaactaaatagttggataactaaagcaattaatttaaaaaaattaaagaagataatgagcttcatcttcaacttggacaatctccacccttctgtccaaccatttgtctgaattcgcttggatagcaatccaagtttaagcagctggagctgaaataagattaaaataaacacggttagtagatctagaattaataacccaaagagataataattttctaaaatacatgaattcataacaaagttagaaatactttatttctttgccaaaacttaggacactggggtttccagtggctctttttgttaccataggagcattttcatttttcttttgcttttgattaggagccttcttacccttattggctgtgttaacagctttaagaggcttcttgttattcttctttttattcttctttctgggttttgaagtagaagcaatgtttgcctcaggatttgccttaccaactgtagcattattagaacttggagctttgtttcctcctttttgcagtcgtccaatcaaatttttaaatgtttgaaggttgttgatcaacttctgaaagtcaaaagtcaacttgttcatgacataatttgaagtaaagggtagaaaagctggagtgaaactatttaagatcaaactcacttaagtttcttgatctataatagctccatgattctcagcttcttggaagtaactagccatttggcgtaggtgatcacgcacgttctgatgaggtttcatctgcgcattgataaagtttttggtcgcctcaaaacgagcttgatcagacaccatcccaaacagttcagttaactgattcat

SEQ ID NO: 346054 - DNA, 584 bp, Cannabis indica
ataaatggtcgagattataattaaaatgttagtataaatttcaactacttttaataaagctcgaccaaatgtagtctcaaaagtcttgaaatattagtgtagagctctattatacagagtacatcttgaccattcacggtcaagatgtagtctccaaattcttgtaatgttagtataatcaaatgtcttgagttgagctcaactgtgtgtgggtaaagctcgactattatgtttttgctcaattaatttaatatttaccttctttttttttaaatcttagttacatagtgaagacgagtcaatgaaaagttttgaagaacaatcagagaggagaagaaaaatcagaatcaagtgaacaagaagaaacaaaatcagatagagaagaataattagaatttgatggagaagaacaagttaaatccgatggagatgaacaagtagaatccaatggagaagagcaagaagaatttgatggagaagaacaattagagccttcatcagtgtcacgagacaaaacacgtatggtattttttgaatttgttcactttattttattattatttttcttatgttattcagataat

SEQ ID NO: 346055 - DNA, 763 bp, Cannabis indica
attcatatttaggatgttaatttcacatacttgttagtaaatctagatcctggtaaaatattcccaacaggcaggaccactatagtgagccctacaggtttcaattttgctattttatttttctttcacaaatgccatattttaattctaactctgtaaatatcaaatctatttatttaataattatagtttattttcaaataaaattatcatttaacttatttattaattagactttataaagtctcttaattaacaaataaaccctaaatcatgtctttcatctcaattaagtccttatttagtgaaaattcataaacaagacatattcgtatttagaattctaattgattaattaaaactaattaattgagtctacaagataatattatatcagacaatgtggtgaccatgggcctatgtaaccaagctcccaataagtagatccaaaatttaccaagtaaatttcctaaattattaattcctcttgactccagtatagattcataactacactcctgattacatagaacactctatatgttctaaatatagatacactatgaattatccattatttcaatccaaataatcaaatatcttctataaataatttacatcgagtagggataaatttacctttctacccttcaaagtactttatccataaaacacttagcttcctataaataatatttcactaaaccaatataattactaaaataagagctcttccatttatctctattaagccaagctcaaa

SEQ ID NO: 346056 - DNA, 1275 bp, Cannabis indica
tttattttattattatatttttcttatgttattcagataatttaatattgaagaaagattgtgtttaatttattacaagtgaaaaaaaatatctcgattggagcctatattaaaggaaaatgaacattttgagtgcaaaataagtataaaaagccagatggacgagatcacaaggcacattaatgatgtactaaagaatgacccgactcacttaaaattattcaaataatctccgttcggccactttctcaatatttttaactaatatagatattttagccaagtgatgtggctattacttgttcgagaagcagattgttacagagatttaaagatgtggtttgttatgaatgaaatactaatttgactctcattgatggagtatgcattaatatccagactaaaatgctcaaagtaccctaaaggttgggattttaagctgagtcaaaatcattcaatgatagacactttcgtgaaagactttcatgcatcaccattgacgacttaaagaccaaataaaataattgtctaactagaactaaaattaaaaatcacgaaagaataatgaagttaaaaaatattaaagatggcttcactcttgttcgtctctggagtcttaatgcacggagacaaaaaataagctaacattgacccaaaattattaggatcggttgataatttagaaatgttcaacaaattcccttaagggactcattcttatgagtatacgttaaagcaactatagaagtcactaaaagaaaaaagaaatatcaatgcatgaaaaagcgcaaacgatgtccacgttcacttattcaggcttccctcttccattatgagtaagtatatttccctaagtaaagtacaagaatattgaaatacttttttataatttctcttttttgtgtgagtagattttagtgtatgaataaatcctaacagtggcaaacaagtatgtagagcttagaggtcacattaataatccagtcccgagaatttactgatggacaacttagaagtgtaagaaatatccctcttgtagtggtgtagtagaggcttcaggtgattcaaatgttaaaatcttatttattattgatatttacttttctttttattatttaatttttatattaataattttatattcaagatataaaaagtattctttcacctactaaaggggagaaaaactgccacacatgcaaggcttctgtaacaccctaactaacataggcgcattacgtgatttttaaacatgttgtgcagctcgttgctaat

SEQ ID NO: 346057 - DNA, 1267 bp, Cannabis indica
attggctgtcgaactgcttgccattgtcaaagactattttgtacggtagtccgaaccgccatatgatgttcttcacaataaaatcttgaactttctttgatgtaatggttgcgagtggttcggcttcagtccacttggtaaagtagtcaactgctaccactgcatactgcactccgcctttacctttaggcaattgtcgaattaggtcaattccccaaatggcaacgggccacagactttgcatctgtgttagctcgttgggcggagctcttggtatctttgaaaatctctggcatttgacgcacttcttaacataggctctcgaatcttcgatcatcgttggccagaagtaaccttgccttagaattttcttggataagctttgtccggcagcatgattaccacagatgctattgtgaacgtcatataggagtcgtgcagctttgtcttgagtaactcatctgagtagtggcatcgagaatcctcttttgtacatgactccctctactatgatataccgcgtagctttccttctcatcttctgagcttcatttcggttatctgggagttccctagagttgaggtaggctgctattggcgtcatccagtttggggatgtatcaatcatttccatttcttccgtgccagtgatgctaggctcttcgagaaactggatatgaactaggttttccttgtcactcacattgctgctagccaatcgagctaatgcatctgcagttgtattttcttctcttggaatttgtctgagaccgtagcttttaaattgtgcgagcagatcgtgtatttttctcaaatatgctatcatcttttctccccgagcctcgtattcttcagatacatgatttaccaccagatgtgaatcactatagatttcaatgtgttcgaccttcatctcctgggctagtcttagtccagcgattagagcttcgtacttggcctagttcttaaggtgttgccccccaggtgtgacgagggcaatccctgaactagatagttcatctatagccgacccatccacatgtagtttccaggtcggtttgtcctcattgtggcttggctggtattggtgctggctcggggttgctttctggtatgctttctttttttcctgtgcattctaccataaagtctcccaaggcttggcctttgattgctgtttagggttggaaagtgatttcgtactgcccaactctaccgcccacttgagtaaccacccagaagcatctggcttttgcagtatttgtcg

SEQ ID NO: 346058 - DNA, 579 bp, Cannabis indica
tagacgatgcgatatattggtgccagattgtggcacaggctcacctgattgagtgatgaaattatatgatatatgggtgtaggtctttggcataggctcacctaattaggtgatgtcattatgcaatatatagatgccaggctatggcacgagcttgcctgattaggtaatgcaatataggattatcagattaaagcatcgacttgcgtgattaagcaatgtgatgttatgaagatggttgctttatgaggtaacatatatataatttatgtgattaaaagaatatgaattctattattgttataatagttttgtattaccaaatatctgtatactgatgtttatttgtagctgattccagtagtgatttggatttcatcatatgaataatgtgtgatgttttgattcttattgtgtataaattacaatatttgaataataaactatatgattgttattattacttttcttgctaagtcgttgtgactcatgggtgctatgtggtgcaggtaaaggcaaagaaaagcagatcaaccgtgaggtgacagtcttctctagcaatgtacatattgacctcac

SEQ ID NO: 346059 - DNA, 882 bp, Cannabis indica
gaacggaattagagaaatttctcggaacccaaacgaaaaaatcgagagataattgaatgatggctcacttggcgaccatcgatctcttcggacagcactcgaacatgttcgactgctctagcttccgagaactgatccagaggtgcgtcgatgccaagcggcctaacgaatttcatgtgaagaatggagtaggtaagcattgacattagcccgtacataacggcgagaaagaacaggaatttgaagccagaggcatccgctgaactcaatctgatcgccattggcgaacctttagtctcccactgtgcttgaatcagtataaactgcgtgaatgtacacacactcctttatatatatatatatattatatattgactattgaatgaggaagaagcgtgtgagcaagggaaacctttcactgctttgagtttaggcaatggaaattttttttttttatttctatttaaaatttatttaataatattttattcaaatgcattgtagcaatggtttcgacaatgaaggctgctccggctttaaaaatattctgggttttggcagtgagcagtacgggacattgttgtttgttggtgttttggagtttaatgattattattattatttaattaatcttttttattattttattaatggaaatagatctttattagaaaacaaataatttaacaaaatagacataaatttagcagaaaaagattcgatttcaaaaataacagaaaactctaatggttgagatgtaaaatggcccttaatttggtaactaagttagtaaatgtctactttttaaaaaaattaagaaaatggccaaatctaataaattagataataaaaattataaaaatagatttatcacatattttt

SEQ ID NO: 346060 - DNA, 471 bp, Cannabis indica
cttattagatttctctgatacaaactacggttctttctctcaagaattttttgtcccctttttcagtgtattctgcccctatttatagttacatggggaggtagttaattacaatcagattattatcccacaataatatttacctaaaattatgggatttcattacgtcccacgtaaaataaatgctgttattatttgaaagtcacacagctgtgatttattcgcttttacttggtctgctgacgtggatttagatgcgctgccaaatgtatctcgctaggtcaccctgctcggatagcaataataaccttgatagcgagctagagcttttcccatatccttccgaagtttataatgtacatattgtcgtttctgctattgaagacataacgttgcatctgacaatcgcagttattggtgataaggtgaacttctgcagtcaacatcatttgagtgtcagcttctatctga

SEQ ID NO: 346061 - DNA, 447 bp, Cannabis indica
tgaagctagaattgtagagaaaataatagatttaagctccattaaaaaacttatgtatatttatgtatatatagtttgttatatatataataaaaatttttattatatttaaaaaaatcgtgtcaaacgtgtcacatttgtgttaagcgggtcgtgtcgtgtttgatccgttttttatttcgtgtcaagtcgtgtcgacccgttttcaacccgcgtctaattttttcaaaacccgtaaaattcgtgttgtgttcgtgtgctgtgtcgaaacccgttttgccacccctaatattatattaagatatatcccaagccaacggatctatttttacataaatggcagcgccataggaatgtcaatggggcgggtcggatctgatccgattctgatccgacgtgatccagatcatatacggatctgccccgccccgccccgctggatcagat

SEQ ID NO: 346062 - DNA, 603 bp, Cannabis indica
aataaaaaattattaaaaaaaatcataactaaaataaaagaaaaatgaatgaagaacagttgcaacgttttgagctttattttccagcatactatgcttcatgtaacaattttgcaaattatagtactactgattgtactaataattttaatggtgtatttcaacttagcgaaagagagaaacttcaagctgaagtaaatttattagttagagaagtggaagttttgaaagctaagtatgaggatacatatgaagtttatgatgaaccttattttgactatgacgcagttgataataagaatggtaatcataactcgaaaaatcttattgactgtagttggaagtctgagtacaactacaaggcaccaattgattggaattttgctgaaaaagcttataggttttaccattcatctcaatttagcgaaagcaaatcttttgaggaaaatagggcaacattttttgctagtctggagaatgaaagaatgatgaatgaaaacaaaaacgctttgctcactcaattagtagaggaagataaggaattcaatgaacaaatttcaaacaatgttcttcctccacaaattgaaataataccatcaccct

SEQ ID NO: 346063 - DNA, 1019 bp, Cannabis indica
atgtgaaccatgcaacattagatgttatttctgatctatattaataagtaaatctaattatattgaaatgagttttatttagggcataaaacccaacagtatccactgtagtgactatgaaccccagacaacctctgctcatcaagtccttagctttcaacaatgttattctcggtatgcgtgccccctgaattttacccacgaacaccgctgggctagcactatcgggctcaaacaccaccatcttccacttgcaatcaattattgctccacatttagacaggaaatccattcccaggattatgtcaaaatcagataatcgaaactcatttagattggcggtcaactcacaactgtcaatccaaaaagacaaggaccgaatccacctagtggatactatatggtctcccgagggtaacagggttccaaaccctgaagcataaatatcacatggcttgtgaaaactttctatcactctactcgatacataagaatgagtagctcctgaatcaaacaatacagtatatgaacagacattaatagccaactgacctgtcacaactgacggactagcatcagcgtcagtctgagtcatggtgaaaagtcgccccgggttctgtgcagtattcttcttaggctcctctttcttagcctgggggaaatctctgataaagtggcccaccacgccacattggaaacatgccttggctggacactcaccaggataatgtttcttgcatttaggacattcgggatatgatcgaaatgaggacccgcgaccctgacggccacctctgtttccccgaaactttctatttcccactgaacctccggaagcctcggccttccgtttgtgctcagaattgccactgtcggtccccttactgatattaccactggcagaaaaatttgatgccgtgacggcatcctttgcagcctgctctttcattacttggtgctcggcctcctcaccaattaaggccaagtctaccactctcttatacagagtgtcatgtgat

SEQ ID NO: 346064 - DNA, 524 bp, Cannabis indica
tgaagactggtcgaatatgtacatttactgcgaggacaggtcgactcatggtatatagtaagtatttatattatttgctattggattacctacctacgttattataaagtatgttgggaaaagtagcatagtgatgattgtgataagaatatgtttatggtatatgcatattgatattgatatccgtccaagttttaaatggttagaagatgtgtactaaatgtgtgataagttatgcaataagggcaatcgaatagtctaattaacgagctatttaggcttggggtaaacggtagggaagagaatcctttattgttgtaataatggaaacatgtaaattctgctatgcaggatatgaatagacaacaaggataaatagatatgagatctgagagaacaataggctcatcttgtgtctgttcttgtactactgacacttccaattgtactactagatgtggtgaaatatatgaagccaacttactagtagaccaggaagcaaaaactaaatgaaccaccaatta

SEQ ID NO: 346065 - DNA, 764 bp, Cannabis indica
tgtactcttgttaatttgttgttgattttttgttatcagtatgttattttttttgttgttgttttgatgttattttcattttactttcatgtaattttcttgttgtttttgttttgtttctataaaaaatcgtaaaaatatatgaaaaaaatcttcaaatgtaaaaatgtaatttttttataaaaaaagaatgcattatgtaattatttctaaaaaaaattgtacacacttatttgttttttttttttttaaaaaagcatttttatagaacaataaaatcagaaatcatatggttgttacagataatgcttactgctattgaagaagttccaattatactagataaattacgttacatttaaaataaaatgtgtgctttaagtggtaaatacatgtcaatttctattgtcatattttaaagatagttagtaattacacaataaattaatattatataatatttaaaataaataaaaatctcttcataaaataaacttaaatttcataacaattttgtaacaaatatttaaaatgatttttatctattaagattactttataccttaaaagtttaagtatctatcattcctatgttaattaaaaattaataataaaataaatttaagtatttcattaattaaaatttatattaagtcatgaataaatctattagatatataattgggtaaatagtagcataagtactcaaaattttgaaatttgtaagcgccataaacccaataattttttttagcggcataagt

SEQ ID NO: 346066 - DNA, 568 bp, Cannabis indica
aaaaagaaagagaaacttatgccccatagagcttgatcaaagaggacagatgctcggacatttcttgttgaacctcctccatggcagcaagacgattgttcagttgttggacctcatgcttgacctcctagacatctgcaggagcaaaactcaagcttgcaccagcagcagcagcagcagcaccagctttaggacgcttgggaaaagctccatcaaaatactccgagggttggaatatggtgccagtaaggggaggctcaagtgtttcatgagagtaggccacatctttttgagaagacaaaattttattgattaagttaggaaacacaagcttatgagatcgcttttcacctcttcaaaatgacacaatgtgatcgaagatataggaagctaaattgatggatgctcctgaggtgatacgaaagagaaaagaggccacatcttgagacaccacagtttcgttggaattgggaacccattttctaagtgcaaacctcatgagtgatgtatgtgcataagtgagatgagtaatacgaagactctgcccagatttccactcaacctgtgc

SEQ ID NO: 346067 - DNA, 863 bp, Cannabis indica
ttttacatttcagtgattgtttatgtactaaaccatgctccccagactttgatatctaccaaatcatgtccctcgaactttgacatatagatcataccctctgaactttcatctatgttagactttttttactaaaattagataaaagtttttaaatctaacaatctcaatagttcagggggcatttttaatgaccttaaaagttcatagggcatgatttggtacatgtcaaagttcggaaggtaaaaatcctaattagccaattatgtattctctttagtttaaatacaaaaattatttatcttaacctctattttgtgttattttttaaaatttggtgcacaaattagtaaaactgaaaatgaggagtgaaagcccaaatgaatgtctaaacctaacggaatctccaaagtccaaaccttctcactccaatcaacttcaatttcaaccattttcattaaaagcctgagaagacttaaatcaattcataactcataaggctcatcatcacgtgagttatatttaattccaatcagctacaccaactcacaccatgcgacccattctctcttctaccaaaagccctagtgaagttatatctaagagcatcttgaaggagagcaatagttgtaaaaaatgtacatattatcttaaaatatatatatatatatattttttattttacttttcattcacataaaatttaacaatttttcatattaaaatcacttcaataattaacaactttaaaaattgcacactagctcacgtgacactatttaaagagaaaattacacacactactaactttttcctttttttagttttatactgttaggcggtataatttacatttatactgt

SEQ ID NO: 346068 - DNA, 1167 bp, Cannabis indica
gaagaagaagaagaaaaaaaattgaatcaaatataataaatgatatgcagaaaaaggaagaaaaatcagtacgacgtttgggtggagagctccttggctgttgagaacacatgggtgtattatcactgactttgcttggattctccctgattcacatttgtttgtttgtgcttagcattcttctagtgttaaccgaaactggttttacaagctttgttatgatattatatgagttcacaagttttgttatggtttcacaagttttgttatgaattttcataaggtcaaaactgttttcacagggttcataagtgttgacgtagtttttcattgacagatctaaaaagatcgtaatcaaggaagacaaacacaagaaatcgttaatcaaagtaaaccgatttgtgaaagaaaatttgacaaagatgaacataaagattttatagcggcacactgttgggttttgtgccctgattaataaatttttatttcaatgtaatcttgaatattcatttatcaataaaaaatatatttatttccttacttgtttaatatgttatttggttcacatgtttatttcatgatcatttgtttgatttataaattcatctaaatccttatcacattgatagtcttgattactacgatgtcaacatagtagaaagtaatcaagattatgtaattaaataaattcttatgatttatcagtacacaggatttcattggtatgataatctacaatgtagtttacttgcaccttggataagtgttatgtcctttccaaggcattggtaaagtaagcttggattggatgtatggagtttacattggaagagaccaatattgaaattggatatgatatcataaacttaccgtaataactatctaattcaatatcacctagttgatcttagatcaaatgatatcaatcctgagatggttaggttctagtccggttgtattatttatgtgctttaatttgttcgttaaattagtcggccaatggatcttctcatgacatacagattaaggacatggtagtttcaattgagtgggagtgctaatcatagatacggaatctatagcttctataaatgcatagaagtgaaataatgattcctttgagcttggcttaatagagataaatggtagagtactcatttcagtaat

SEQ ID NO: 346069 - DNA, 609 bp, Cannabis indica
cttcacgatcttcctcactatgattgaggtatcacttgctgtgtgtgggcactactctatcactaagaggttcgaaattattcaaggaagaagaagagggtgaaggtggcggctaggtttagagagagaaggctcaggtttttctctgaaggaaacaagatgtgaaagtgttatatttcctgaagccttcactatctatttatagcataccacatagggttaggtttgaattatttggcattaaaataatgaaaatatcagatgataatccctataaaagtggccggccatggcattatggatttgggcctcacttttgcaattttgcagttttatcatttctgcatctcattttctcaaaaatgccaattttcaaattcaaccatttaaattgagttttatttagggcataaaacccaacatatacaggcatatgcatgtggagaaaacttgtgtcttgtattggctacagatgaagcatacgcaaggcacccaaaaatttctaaggtggtcatatgtaggaggtttattatgcagcaattggaaagagtaatgtggtttatgcctaaagaactcatttcaatataattagatttactattaatatag

SEQ ID NO: 346070 - DNA, 548 bp, Cannabis indica
cggggttatggaatttgaccattttacccctagcttttagaatatcctagttttatgtgtaagggcattttggttatttggttaaatggtgggataggtggttgccctagcttggtgacaccttgcaacctttttctcagccaaagataaattaattaggctattttatttagttagaaagaaagagggaaattaaaggaaaataccaaaatttgagagaaagctttctttcttctctctctcttcgaaaccagcaagatcaacggaaggagctgctgatttgtggtgttttcaacaaagaattcaagggggaatcagcctaaggtaagccctaatggaacccttctctagttttcaagttttgagttagtttgaaataatgaatttgtgttatagtggctgttaggtttaggtaggtctagggttcaaattttagggttcttttgagttgattttaactcctagcaactgcttttaattggtgttgttggttttatgcaagtttaagctttgagttcaaagctttgttcattaatggcaacttgagt

SEQ ID NO: 346071 - DNA, 1004 bp, Cannabis indica
aagtttggggtgtgataactctatggtatacatttatttttatgcttttaagctgaaaatattgtgaggggagtagtaaaaatgtgttgagttgcttaatttggagtagttttagtttaatttctagttaggaagctatcatttgagtcttgtaaaaattatggtgttaattgtgtttgtttcaattaaatgtggttatttgtcgtgggaaagatgaattaatttgataggaaaaaggaagtgatgcaaaggagaagtttgagcaaaagctgaaaactgggcagaaatgctgaagcaatggtatagcattctgggcagtttgggtaatgacgtggaaaaagtctaaaaaatgactttcacttatccacatcagcgaattcgtccaagtcacttaaaatgcaccagttggctgctttggaagaaaggagactaaacctagtgggccaaagtggaaaaagattgggcttctattttagagtgtgaattttgtaccctaaaaacccaacaacaaaaagaggagaaaagcaagtacaccatcatcatcttcaccataacgggcagctgccatttttgaagaagagctttaattgcaaaaagtacaaagagaagaaaggagaagggggacccaagtgcaaaagaagagaaggacacaagccttattttgtttgcatttctcttccctttccttttatattttgttcttgtctttcttatctttaaatatcaaaaattgataagataaaaaaaaaaaagcgcagcagccatggatgaacaatttcgaatttggattgtaatttttgtgttgaacatgagctaattttcttaaggcttgagtggctatgaactcctatgttgggtatgattaactttttaagcatattttagcatttatgcctttgttcattcaagtgagttctcatttctatttgattgttgtttcttggccattaataacaatttgctaagctagatcttgttcaggaagggctagatctagtagttca

SEQ ID NO: 346072 - DNA, 545 bp, Cannabis indica
aaagagttttatttagggcataaaacccaacaaaagattgtcacgaggaggtgacctttggttgtcccttcgagagtttcaaaaaatgacggctataatcattacttttattgcatttatgatgccacgtcacaaaactcttcgatttctgtgtaggcgtggcatctttggccgttggattggggactctaggccttctaattgccacgtgtcctgatcccaattaatgagggatttgggtatttaaaccctctgattcgaaccaaaaatcccatttccctcattttctttaatttccttaaacttccttatttcttctctttcagagaaaccaccaaaaatacttccgtaaattgcccatttttttcgcctttctccgtgggtttttccttaattctacagtgctgtcaaggatgaatcgtgggaacaaatttatcagaagcaaaaggttagttttcgaatctcctctgtgtttcgttttcggtttgagtgagaacagtgtcttctgggttttattttttgttttgatatgcatgagagagttt

SEQ ID NO: 346073 - DNA, 969 bp, Cannabis indica
tgaaattatgggatttgattacatatcacgtagtgtaaatgcggttattatttgaaaatcatatagctgtgattttcctgcttttactgggtcaaaatgatcgtgtatttaaacacgtctttaattgttgcattctgggatgtctcgacaggagctcggttccagtgaccatgatagcgagcgggaacctttttccttatccttccgaggtcgacaatgtacaccttgttgcttctttgtttaaaagcttaacgcttcatttgtgacaatcgcggttcttattaacagagagtttctcaaagctcattttgaatgttagcttctgacttgtcaatattgtacgtcttactgagaagatgtttgaagtgaactgggggaagttacaagaatgagccttcctttagcgagataagcacctcgcttattatgtctcgagtctactcgtctattatacttagtttgcacattatatgctaagcgttttcacagttgatatgcgtcgctttcgtcttccactacaagaaatgttacttttgccagcacatttttgtgctaacaaaagttagtattgcgctggtaaaatagaatttacttgtgacgtgttgacaaaaggaggttggcaaatcaatgttggcattagaacttttgccagcataaaatgaaaagtgctggcaaaaatgactttttccagtgcgtaaatgtgctggtaaaagttagattttagccactgcaaatgtacgctagtaaaactttggtctctttgccagtgcagtttgcaaaatgcgctgtgcagtagcgaactgtgctggtaaaagtgagtgacatttcttgtagtgttcctagatgtaacagactcgatgtctcgctatatgcattcaatgatatatggtttttcgttaatatactataaacaacaatttgtatattttttcctcgcataagaccttacagtcagcgagttgtaaatat

SEQ ID NO: 346074 - DNA, 900 bp, Cannabis indica
atcgtgtatcgtagctcaatagctattcctgttcgaacttaattaacgtgatccaatagttaggcataagaatgagcagaaggtgactaattgatctctcgttgaaactagatgctcggagatgcttgattcgtagggctaggagatcggcgaagagagcgagacaaccaagcaaaaagttctttcattacggtgactccaaaggttaagtgatgagaaaaaaatgttaataaataaaatattatttttttaaaaaaaatataaaaaaattaataaattaatatttaagtatctttactacatatatgagtaaaatttaaccaatttcagccgaaagaagatttattttttgctgttaattcagccgaaaagaagttggtaggaaaaaaaaagaagaagatgtgttttttttcctaaaagatttgaaaaagaaaaagaaaagacggctggtcaaggaaaagtgattataataaggaaattttatccgaagtaaaataattgcactgtaactgaactttctcttttgtctccaattaatatcaatcatcatttcttctctgcatatcataaatagaaaaactgctatagaatagtgctattgaatgattcatataattaataaagaagaagatagaacaagatcgaagcatggtttaattaaataattctaccaccaacctttgtcactcttctttatatatatgattataattatatatatttgtccttttatgatgttatattaacaaaatactcaattcaacaagtttatttaagttttctttaaactattaaatatgatcaatatactaatccaatacttaattatttaattatgatatcatccaatctaaattatataaatgttgttttcctcttaatccttttctataggattat

SEQ ID NO: 346075 - DNA, 1155 bp, Cannabis indica
ttcgattcacgtctgggtctgggtcctgctcagggtcctagtcttgttctagggtcctggttcggcgattcttgttaaggttctaattatgggtcctaggtctaggtctgggtttagctttggttcttcgttctagttctggtcctagtctatgtcacaaatctagaccccgactactagtctgttccaggccccattaccgaaatcttgagtcaagatttggatcacagtcacgggtctcggttttgttctggttcaggtccaacgtccaatttctaagtttgggtcgggatcgagactggggtgcggttctagatcccgacccttgttctgtttccctagtgtggttccatgtttgggtttgagttcaggttcatgttcgtgtcccaagtccaggtttgggttaggatccaagttcggctgccaatcaggttacggttctggatctaggtccatattcatttatgattccaagtccgagtcctagttctagtcccggtgaacttcagtttttgttccaattttgggtcacagggtacaggttcgagtccacttttggggttgggacggggttaggtccgggtgagggtttgggtcctcgtctgggttcgggtgcagggcttcgtcctatatccagacaccgactatgggttttgccccaaccctatgtccagatccggatcccaatcatgggtcctagtctggtttcatttctggtgtcgtgtcacgagctgggtcttaggttcaagtttgggtctgggtaaggaactaggtgccggtgctagttctgtttccctggtccctatcctgattctaggtccaggtccaagttattgtgtgggtttggatccttgtctaggtttggtttcgagtcctagtcgcgattcgggtttaggtctctgtctgggtttcgatctgggttcgggtttgggtttaggtcctggtccttgtcctagtcctagttttgttctagttgcatttgcgattttgagtttgagtttgggtttgagttggggtcagtgtttgagtcttggtctaagtttgggttccagtctcgattttagtctaggtccaaatcaggctccgagtgtgggttcacgtcctgggtcttgttctaggttggatccgagtcccaagttccaatcccgatctgag

SEQ ID NO: 346076 - DNA, 732 bp, Cannabis indica
atatacttagctgtaacggagcatgccgtgagtgttatactgatcagagaggaaaacaacatacaacatttggtctattacattagtaaaagactcattgaggccgaaggccgatacccattgatagagaaactcacatactgcttgattctagccataagaaagttaaggccctattttcaatatcatcctctggccggacacctctggccggttactcaagtgggttgggtaagtatgaaattactttccatccctgaacagcaatcaaaggccaggccttagcagacattgtggtagaatgcacaggcaaggaagaaagcatatccgaaggcaacctcgagctagtacaaataccacaaccaagtaatagtgaagacaagccgacttggaaactacatgtggacaggtcggctatagatcaactgtccggcacatgaatcgcccttgtcacacctcgggggcaatacctgcacgctacaatcatgtttggatttaaagcatccaataacgaggctgaatatgaagctttcatcgctggactaaaactagcccgggagatgaaggcctaacatattgaaatctgcagtgattcacaggtggtagtaaatcacgtatttggagaatacgaggctcagagagaaaagatgatagcatatttgagaaaaatacacgatttgcttgcacagttcaaaagctatgctctcagacaaattccaagggaagaaaaca

SEQ ID NO: 346077 - DNA, 582 bp, Cannabis indica
cttgatgacaaaccaatctagccgttggatcctgggaattcgaatcgcgtgccttcccaaccgcacgattggtaggtgatcgcgcctgttccacatgcactttgccctataaaagccaccactcttccttcatttggttactttcagactttcaccaaatttctccaaattttccagagagaaagaaaccctcgaaccagaaaaccagaaaacaccataggttgcttattgaccttccttcgctattgccagtctacgtttcaccgtcgatcaacaacaacccccagttctaaagctttatgtaagtttctcgcatcccgtactttattgtttgtggtcgttgcatgcttcacttgttcatttgctttttctgggtttgatgtttgaattttctgggaaatttcgtcttgagtttctttgtgatacgttagactcctcttttctggtgctttagtcacttttattttgcgtactatatttttcccaaaggcccatcttttctttacgtgatgaccttcaagggttcagagaggactctgtctttctcgtattttttaccctttttttccttttcttttcttt

SEQ ID NO: 346078 - DNA, 897 bp, Cannabis indica
tattttttttatattttattaataaataaataaataaaaatacttaaatttaaataaattttaatgtatcaaacaacttaataaattactaaataaatatgtattttttatttttatatttagacattacaagattaaatataaaaaaattatttttataacactattttaataggtttataaaataatttgtaaataaattaaatagtatatgtaacatcatatgagttacattataaaaaagtaacctcgaggtatttaaacaataaaataacataatatagcctaaaaatataaaaaagaaacaaaaaaaattcttttaatattagtcgtcttattttggagacagaaaaatatatgtttctcacataataaaataattattttattatttatatatgtataaaattctgaaataaaatttttaatggaaaagtaactaattgatatcttattcacatcaaaagcaactaaatagttacttttttcaaaattctcaaaaagcgaaaatttttggaaacgagatttttccagttttttccattttcggtaattgttttgaaattcggtatgtacgctgacgtggcacaacaatatttgcgcaaataattttctgaatggtatttttgtaaataaaattaattttaggtataatattgaaaaaaccccaaaatataatatatactaaactaaaatcaaaaaccaacataaataataatttatactcaaatagctacaaaacaatacctcattttccacattaatatcatcaagtttcacagaatcagatttaccatcatccccatcaccactgtcatcaccgccatcaccgccgtcaccgtcatcacctgttggaatttattttaccaggatcttagatctactcacaagtatgtt

SEQ ID NO: 346079 - DNA, 441 bp, Cannabis indica
atatagacccatggtccccatactaagttgagaccatactgcttgtaagacagttattaaataattggaattggtatttaagtggttaaattggaaaattgacatttttgagaaaatgggatggaaaaatgacaaaatggcaaaattgcaatcaaaatttttatagcacaaccgaaaccacatccctctcttttcttcttaaaatttttataccttgagtgatagagtgagttctcacacacatcaagtggtatctcaatcgtagtgtgaaatattgtgaaaaatccaatcaacaagaaggagaatcgggctcaaggaaggagagaaagagattcaggttcagatcttgataagatgttaataaaacatacatggtagtaaatctagatcctggtaaaaataattccaacaactggcaccagagccatggtaatgatttac

SEQ ID NO: 346080 - DNA, 1254 bp, Cannabis indica
ttagaacttttgccagcatataatgaaaaggcaaaaatgacttttcccaacgcgtaaatgcactgataaaagttagattttagccactgcaaatgtacgctgtaaaattaagttacttttaccagcacagtagagaactgtgctggtaaaagtgacatttcttgtagtgtgttttagtcacaagtaacattttgttgtaattaaaagtcacatttagtcacaaaaaaaattatgttgtgactaaaaagttgtcactaaaaatagcggttttttgtagtgattgaattcgatcagtttttaattagattttgatattagcatccaataaccgatctaatctaattaaaatctaacttttaatccaatccaattgtaataggatatctaatttttttataattgaattggattggattagttccgttcaattggattgtccacgtaggactgcgcatttgatctaatcgaacctttaattctttcctaatgctccaatccaattagttttttaattagatatccaattacacacataatttttaatatcaacttaaaaatatgaacaaaaatacctaaaaactaaatatcaccatttaaattaagtttaatactccataaatataacaatttaatacaacttaaaatttgaaatagctaaaacaataacattgccaaaaaataaaataaaataaaacaacatgaaaatataacacaaaacaaccaagattttcaaattttaaatcaaaaaaaaaatagccactaaaaatatatattttaaattttttaaatatttttataatatataaataaatataaataatgtttttaatatataaatatagtttgattggatcagtttttaattagattttgaaaattacatttaagaggcgattcatggggtgttcacaaagtatccgatccaatccaatccgcacgattcaatccaatccaatccgcaaaatgcggatatccgcacttgtgcggattggattggattgaaaaatctaaaatccgcacttgtgcggattggatgttgtttgaccttaaaaagtaaccgatccaatccaatccacacttaattatatatatttttaaaaaattataatatgcaatatatattaattaaaaaaagacacaaaattctaatttcttaattttttttagtaatatattgagttggtacattttatttattttgtaataaaaaaatacaagaaaaataattcttattcacatagacacatacacata

SEQ ID NO: 346081 - DNA, 1321 bp, Cannabis indica
aatattttcaagtttggcgaccctggagacccgattggaggctaaaaatatcacaatagttttagttagaaatattgataagattattgggataagttgattttaaaaatatcggggtattttaaggtactcgaagttggtcaaataccttaaaaataaagatttcttagtggctaagaaataataagataactattaataataaaatttctatcaatattattatattattattattattattaatatattattataatattatttatatatataagttaacgtattacgttaactttaagtatatatatattaagttatcagtgaacagaacgaacgaacgacaaacgaaaccctcgttctccctccttcgataaaatgttttccctctatatccattttcttcgattttcaatccaaaacttagcgatctaatctccggtagtagcaggatagcaaatccttgaaaagggaaagcttaaggtatggtttaatttcgttttaagtttaaaaatgatgagttttacataaaggctttatgatttaaaaagttgatggagattctgacttcgtagaactgttctttggtaactatgggactagtttatgtgtttacttgttgaatttgaagtgattttgagttagaaatcgagtttggaactttttaaagcttagtccgaacgttaatggcgtttttcatttaaggggtcgatttttatttctgttacgtaaggatggtagtatttatggtatacatgcaccctgtgaagtttggagtgatttggataagttttggtagtgtttcggtgagtgcgaaaattgaaattttcgaattttacagtttatagaaattcctaagagatcagaaatcgtatttttgtcataacttttgactcaggtgtccgttttggacattctatataccgtttcgaagcttgcgacgagctctacaatatggtgtatgttttagagccaaaatataagttttattttagtgtatttataccgcggggtttggtagaaaaccctcgattgtcttatgtgaatataagcagtgttttgggataaacacttattggtttatcgttgttgtgacatagggccgagatcatcggggatagttctccacttgggttggccgaaatgtatgaacctggattaaaggtaagaaaagtatattgtactgcatagtacgttgtatgtaatacaattagtattgttatgaattgattaatattgagatatagttaatattgttatatattgaaaagtatattgtactgcatagtacgttgtatgtaatacaattagtattgttatg

SEQ ID NO: 346082 - DNA, 659 bp, Cannabis indica
aattaaacttgtaaagtaaagagtttagggttagaaattgcaaactctcgatgtttacaaggttcgatagaactatggcacctacgtccttggtctttaaagctatggacctagattcgagttccactatcgagccaagttaatgggcttgactaacccttacaactggggaatttttcaccaagatttttcccaaacatctcacaataatattcttccaaggactatcaacctcaccggattgttgaagtgccaatctcactatcggattgttatagtgacaatctcactcttctcgggctgtttacaaaactagtcaacctcatttacaaccaagttgtttttataccggtgtcaacctaacctctcaatacaatggttatttgtttttgaaatacaaagcaaactctctctgataagataaaatacaatatgaaatcctagagagatttgcaagcacactagaaaataagaacaagtttggctcgagtgtgtgaggttggtgtgtttatgaaagatgataattctttagcttagaacacttagaatgatgttatatgatgaatagaagctcaatcaaccttaatttttgagtgaaaaacaagtttatgtagtgtaggaacaaaaactagccgtttatagccgttagcacgtttttc

SEQ ID NO: 346083 - DNA, 570 bp, Cannabis indica
tttatgaatttgggaatgaaaatttgggcatcagatttttgtttaatgagcttgatccaagtatatcttgaacaatcatcaacaatggtgataaaaaatctatgcccttcatttgtcatggtgttaaaaggtccccaaatatcaacatgaacaaagtcaaaaatattttcagctatgttgtgatgtgagatgaaaggcaatttcttttgtttggcatagtgacaaactaaacaatgaaacaaagattgagaattagaatgaaattgcaaagctttattcaaaggatgagttttgacataagaaggatggcccaatttatagtgccaaacaatttcattgcaaattttcgaatctgaaatacaagtagcagcagaaaaagaatgaacatttttaggtacattgtaattcagataatagaggtcaccatactttctacccatcccaatcaccttgttcttcatagtgtaaagccctgaccctcagggacgccacgtgtgtgcttttataaacttattatgactaatctataaattttggaaaagtgtgctttaatttaaatctttaattaaa

SEQ ID NO: 346084 - DNA, 833 bp, Cannabis indica
atgacaatgatattttgctggcttaattttttaagcaagtttagtgacattgacttatttataaagtggtgtatggttaatttaattggcttatttattaagtatcacggtatcagtgaaattaaagactgataaggacattatgttattttaaattgatcacatgttgaacataatttcttaccacactactagacttattgatcatgtcgatttaatactttgatatttgtgattatgaatgtcttttgtttatttaaaaacaatatgattgtcatagttcaatatcaaaggttaaattagactggtatgttgagatgctacatcaaagaactatcatttttaaagtagccacaaatgtttttctattgttcaaacccttgagtcattttcaaacaatattttctggatatatatatataatatatgtattaaaattaatgtagcccatgtgggagaatgttagacttttatttgggcttacattaatatctattagttttttaaactttggttcattggataattttttatttttttgtccgtgttagcccatattattggtaatcaatagttaatgggcttaacatctgcatgtgtaaagtctatgtgaagcagaagggtaagcttttctagttgactgaaggctttaatgagcaagctcggtccaacaaggattatgtagctaagttagggttatgtagctaagttccattctaactctataaatacatattctctcatcacaattgtatactttttgatgattagataaataaacggcttctgatttagagatctagggaagaagacttagttgatagtattgcact

SEQ ID NO: 346085 - DNA, 1013 bp, Cannabis indica
atattattattttttttgttgctccattgatcttttatctctgtctccacatgaatggacatagattttgaaagcaatcttagaggtcctcctcaggctgacaaggaatttaggaagaatataaaccaacttgggtttgtaaaccaacttgggttttctcttatcttaaatgccttgtactcttttcatttgaacttaatataattgtgtttgcttgcgtttttattcacaatgtaaacaactatattttgatcaaatgtaaagtacttttgggtttttccattgctcgtaatcttcctatttaagtagttagttatctaccaaaatttttgattttcgagcagttgtcaattctgcctcgctatggtagttataatctaccttacgaaaacttgaatatacttttaatgattttatcactttgtatattttagatttgctcgtatgaatagttagtttatctatatattttctaggttcaagtacttttatcaagacgtcttgatgtctcgtttagcactttcctaactcgcatgaactgtcaatatttagctttatacgcgagttataagttatatctcatttataactcttgattttccttttttgttagataggttttgtaataaaaaattatggtcttttgatcccttcttcgtcaaaaatgtttgatcaggatgcggtaattattcgacccctctctcgtcaaaaaggtttgatcaggaagttataacagttcgactcctctttcgtcaaagaggtttagtcgagaacctttaaattttaaattttttttatttttgaaatggtgggtttgcattataccatgtatttcaagatgaattctggttaatcatagataaatgccccttaagtaattttaaatagcaaacaggtcgccaaagtcgaggactttcttgcaggttatggaaattacagaaaatgttcttgacgacaaagttgagaactttcttgcaggttatggaaacgagaggctcggcctcagtccattt

SEQ ID NO: 346086 - DNA, 589 bp, Cannabis indica
aaaattttgcaggatgtcttatataacaaatagggattcatcaatacattcatttaaaaaaagtgcattgtagaattttcctatattattaaagagttagttttcaaatatctattttgtatgtatgaataaactaaattaggattaaaaatataatataacaattgataaatttatagaaaattcatcatatgaatatgattttaaaagaaatacaaaataaaatttattaattaataatgagaaaataaatacaattgtatttaatcaaatttatattcagatatatttttagatcttttaattaaattattaaattttttataatcatctaattaaaacttacactaagaaaaaagttagaaattaaagaattgtcacacaaaataaaaatataaaaattaagaaacataatcgataaatctatagaaaactcaatttcaaaactttaaaaaaatatagtgaaaattttaaacttaattaactaaaaagtataaatattaaaatagaataaaaaaataagaaaaataaatagaatagaataataatttgtagagattttcagtaatggtcaaataataattagaga

SEQ ID NO: 346087 - DNA, 787 bp, Cannabis indica
actcttgagtaagtttttgatttcctatatgcttatttttgcatgtttacatttcgaatgcaccttcaactttgctgtagaaaatatttaggaaaccctaggtccagaaacttctgcgattcttctttgtacatggtttcatgcaattttacagtccataatgcttgttttctgaactgcgtaacatctatctttcatcttgcttattctaagcttcatgaactttttttccctaactcgagaaaattttaaacttcttgagttttgacttctctttgaacattcttgttctttcatctgtttcatctgttgactactcctgcgtcgcaatattttcctgcttatcattcaatattccgaccaaacactcatcttgtgtgttgtcttttgtagatgaacttgggtgagttttgggagaacggacatcggatcgaccaggacctgcttcaacttttacacgaggatcatcctcgtcttcgttctagcccacattcctctagagaagggcattctccaaaccttctacctagccatagaatgatggctcgtacaatgaaaaaaatgcctctagttcacgcatctgatcctcaagtggctcggtacgccactttgcccagtgccgaacaggataatgttgtccaggtggagggggatcatgaaggggacgctaaggtccaggagattgaggagcaggacgatgtacatcttggcagttcctccaaggcagaggaagaggcagaggttgaacccccaaactacggggagtacaatgaggctggggagccag

SEQ ID NO: 346088 - DNA, 593 bp, Cannabis indica
atatcaacaaggtgcatcttgttttctggtagcccatcattaaagaactccacagttaagcgtgcttgacttggggtaatttcaggatgggtgacctcctgtgaagttttctcaggaagtgtgcgagtgaggacaaagcacactgaaaacactcacgttggtttgtagggtcagtcatcagtccatgaagcagccagggtgatgtacttgtgtataagagtcattattccgtgggtgtaacgacccaatggaggctttaagtggggacgttacagatgtgaagctcaaaaaccctaaaaaatctccaccaatctttaaagacttgtcaaagacaacttattgatgaccaagtggagaagccacatgagtaccgacctttttccatggccagtactcgcttatggagctatctctccaagggtggagccccaacaacatgcacggttcgttctctctgagatggagcctatacaagattgttacatgagtaatatgtacttccttgtgccaatgttcacctaagtaatttcttacacgagtacttacaatctctcatggtcaatactcacctatcattgtatcctgtaagggag

SEQ ID NO: 346089 - DNA, 707 bp, Cannabis indica
tgaattgtgtttcaggggtagttttgaccttaaattcaaagttttattttttctgcagagaaaaatggttcatactggttttcccaggaggacccccaaaaaccgtggaccgttttgggctttcggttaaccatattttttagattttagaccctattttttcatgttttatcaatatttagggtattgccacactatctattgacagaaaaacttttagttttgagtttaagtcttcgaaaagtgatttagcatataacttattaattttacgtatgttatgactttgagacctataaatcattgagcagcagttccactcaggttgaccaacatacttgaatttggaatcaaggtaagattaatataataattgtatatgtgcttacatgtttagcgtgcatatttatgaatgcctaatagataacatatcaataatggtggtattagtgtacatagaattgcactgaataccgacgaatatatgtttgacaaagtacggattgtcgctatcacatcgatatgactagagtaccgagtataggctgatattatggtcaattgtactgtcgtacaaacatactagacttagtacgcatgggacacgggataggattgtaatttggtgtatgggtgcctagttataatccaatttatgtttatgttatgattatcttttttttaactgagtctgtcaactcacagat

SEQ ID NO: 346090 - DNA, 944 bp, Cannabis indica
ttagaccctattttttcatgtttcaaatttagggtattgccacactatctattgacagaaaaagatttagttttgagtttaagtctttgaaaagtgatttagcatatcacttattaatttaacgtatgctatgactttgggacctataaatcatcgagcagcaattccattcaggttgattgacacacctaaatttagaatcatggtaagattagtataataattatatatgtgcttacatgtttagcgtgcatatttatgaatgcctaatagataacatatcagtaatggtggtattagtgtacatagattgcactgaataccaatgaatatatgtttgacaaagtgcagattgacgttatcacatcgatatgactagagtaccaagtatagactgatattatggtcaattgtactatcgtacgaacattctagactcagtatgcatgggatgcgggatatgattgtaattgggtgtatgggtgcctagctataatctaatttatgtttatattacgacatacttttcttactgagtcagttgactcacaaatattatttacatgtgtaggtaaaggcaaaactaaggctgaacagtagtgagcatgagcagatgaagattttacatattcgagcggttagacctggagtgttcgatcttcgggacaacaagctttattttattagtcgctagacaacaacttttgtaaccaagtattttgtcaaacaaatattataaattttaaaaggggatcccatattatgtaaagtatttatatatatatatatacttaagtttacacactaaattttttttgaattttagttacaacaaaacttatgactaaaagtaaaaaagttgtgattaattataaattaacattcttatgttgtaactaaaaggtacgtggctaaatgtattagtcacaaaaatcacaatttat

SEQ ID NO: 346091 - DNA, 845 bp, Cannabis indica
ctgacaaaagaaatagttgaaaatgcctccattactcgaccatcacagtcgcgtgctacaaaacccgtacctatctcatttttgtcttcaaaaaccgccccatccacattaatttttaactgaccagcagccggtttggaccagtaatctcttgtgtcagtgcgattggaagccagggacaccgagcccagccgcttagactgagcactcgtccattgtcgaagagtggtacgagccagccaaataacatcagcagcactacaacttctaccattccaaagcatatcattctgagccttccaaattgcccaaccaaccatgacggcttcttccaccaaccccatattgcccactgccaacacttccataaaccagtcaaaaaaattgtttgctgtggaatggccaacacctaacgcagatcggagccaacatgaatgagcaaaggggcattgaaccaaaacatggaaaattgactcgtccccatagctgcacaacacacaatgtaactccaccggaacatgtttactataaagttgagtacgcgtaggcaaacaacccgaaagagctttccaaacaaaatgtaaaaccttaggaggggctttaatcttccacaacatcttccaaacatcatcctccatagaggagttccaactaccattgaccgactgtagatgattataggaacttttgacagtgaaaaaaccagttggatccttgttccaaaaccaactatcactcgcaagattaacactcaaaggcacctgtttgatgagctcaacatcacgggaatcaaacaagtcctcaataagctccaagtcccattgtctactacctggcttcatgag

SEQ ID NO: 346092 - DNA, 1011 bp, Cannabis indica
ctctgaacgtgatgggttgatccattagtaggggcctttgagctacgagttgagtaacttccaaaccttgctatgttttatagcccctacgaacgttttcagttcctttcaggtaatccctccgatatgggggccctccagagaccatagctactcttctgttgggcttggtggcaggccaggaatttgctggggttcccctaggggaatgcctggtgctaatgctccggacgcaccctctggtgctgcttggggcaaaggtcatgttgcctgaactgggtagagatgaggcaaccggttcttaatccatttgtaaagatggcccaattgtatcaagttttcgatctcatctttgaggtttttgcatgcattggtgctgtgtccgatgtcgttatgatactcgcacgttttgttgggatcccttcgggagctatctctatacagaggaggcggtctccggtagtgcgtattttgcttggtagcgaaatacactcgttcctgggagtccgtcagttccgtatactgagtgtattggggagtgtacccccttttttgccgcttgtcctccgttcagttgctaccttttgaggacctcttgctctaagagccttgagaaggacctgctaagtttgcagtaggagcggagtgagacgggacttgtctacttagcccagaaggattcccataatgagaagatgcaggggctaaggcctgaccctgattatatcctgcggtagcagaaaattgtatgtcgctcatcagtggagtagctgctggtaaagttcccaggagttgggttacatgtacataccctgctatcccggtcgggtagtatccccgataggccactatttggcactcttctagattgatgtatttttggacccttttctggaagtattgaaggttggagactccttcttgctgtaactcatttctgaatggagtccctgtatagatccctgcttgaaggagtgctagctgttttccgtcatcaactttcttagtctt

SEQ ID NO: 346093 - DNA, 782 bp, Cannabis indica
attataaggtgctcaaataacatactttaggcatccaaaaccccacaaaaataccacaatttcagattgggaaacacaacaatatcatgctcaaactaagcaaatctcaagctcaagaacaagagctttctcttcaactattcaaacagtttccagccattaaaacattacttacacatgaaattccaacctaagaataccataaaatctcagcccaagctcaacaacaattcaaacaataaatagaagcttaatttcacaagattaacaccaccaaatcacctaacatgcatcaagaacaacctaacacatgcataccaaaattacaattacttaaccaagcatttccaacctaaaattcagcaaaagaattcaccaacaatctttacacaaactcagcaagaaattacctaattccaagctcaagaatccacaatcccaaagcttcaatccacccgcaattcaagcaatttctcaacaattaaattttgaaaatggaaagggttcaagggagagagagggttcgggggtgagagagataataccataaaatataatccatgttctcccaaaacctattaaattcaaaataacacaataatggtcaaatgacctttttgcccttatggctataaaacatacatattcattttcaagggcataaatgccatttcacactcaaatattgccaaataaatttcagattatcacatgtcaaataaaatactaaataatcaattcaatttacattttgggcccgaacccggttcggcccgaaattc

SEQ ID NO: 346094 - DNA, 542 bp, Cannabis indica
tagggcataaatcccaacagtttattcatatcgtataatcttaattctcatgtacatctttacaagattatactttctccatataaataaagaatttttagatatttaataattatacttttataattaatgtatcatttatcttataattgtatttcgtatattctctaatatattatccattaattacttacttttaaaccatattattgcaacgaagctaagaattaagaagatgattaccaacatcaggtcgtggaagagatccatcgatgaaggcgattttgttcttcgcagtcaatgccatagtgatgatgcacttccatgattgataattggcaccattaaagatagtggagacaagaactaggctagggtgatcgtctaaattgaggaagaatggactagagacatcttcattggcattacgatcaagagaagactgagatagttgaatttgagctgctattggttcttcaattcttgcagactggtgatcaagagtctcagagacgctctgagattgcggcttggaagtggtg

SEQ ID NO: 346095 - DNA, 526 bp, Cannabis indica
gtgataaatttaacatgcaacagacatcaaatacagaaaccctataagctatctaaaatatataggtattctcgtcctataacgaaattcagttctattttactatagcataattgacactaacttctcacatatcgcatcaaaatcatagacaactaattggtgatcagacaattaaaaataattaagcatgaatgaaacagaatacatagaaactgggggaaaataaatcatattaataccataaagtaatatcaaaaaatattcatctcaccctaatcaagtgtttagctacacattctcataaatgcaaaatcacacatattaactttagaaaagagaagaaaatggagaataaaaaaatgctaaaaatcctctaaagaatgcctctagtatttcagttgatttctgaaattcgtatctgtattctctatttaattccttctgaattgctttgttgaaatcaactctagttcaccctttatataggcttttagggactaaaaagataaaaataaaaaaaaaa

SEQ ID NO: 346096 - DNA, 555 bp, Cannabis indica
ccctttctagtgatcctcccaaaaactctataaatacccccaagaagacataatgaaaggggatcgttggaagaattattgaatcaaagagagtgaagaagggagagaaagattcacctagaacattctctgtataagaactcttataaatgacaaagaattgtggactacgactcataactattttaaccacgtaaaaactacttgcattaacgctctcatagctctccttattatatcgtttaattggttgccgaaaatctcggtcaacaatagtatttcaaattataaggataataatatcttttaatttaaaatatatctattattaaaatatttaatcttattattaaataatctataaatttaagaaattaataaaattttaaaatctaatcataatttaaacaataacctatttttaaatttaaacttcaaaatatcaaaaattaattataatctattaaataattaaatattattaacttaaaattttgatatttaggtttaaatgttaaaaataatattttatataaatatttagggatttgaaaa

SEQ ID NO: 346097 - DNA, 527 bp, Cannabis indica
aaattagataaaagtgaaaataattttaatagttcagagaaaatttttaacggccaaaaagttcaagggacatgatttagtacatgtcgaaattcggaaagaaaaattgctaattagcatacaatatgtgagtgcatttatcattactcaatatataatatcaaattaagaaatttactttaatctttgtgtagtttaaaacccattacatacttgaaataattttcctgggtttaattcattaaaatctaccccttttttccaccctatgcagcatataaaataaatttgcctgagtataagaaaatagagagagttaacaaagaaaataaaactaaagaaattcgcacaaatgatatatgatgagctataattaaatccaattaacaggtgtaggagtagtggttggataaattgatggtcaacaattataaataatgaacatgcatattataaatataaaatataatatatatacttattttcaaaaaaattatgtatatatataaaatatattaggattttta

SEQ ID NO: 346098 - DNA, 683 bp, Cannabis indica
attttttaaaaaaaaaatttaatatatagaaagataaaatcaaacctttctaaaagtttagtttttaaattatttcataatattgcatttaatatttttaaattatattattattaaattttttttatttgtaaagattatgtataccaacggataattatctctacatcaaaaatagaagaattgataaaaaatgaagacaaaaactataaaatagtcaattttaatgatttggacccctaaatgtcttctaaagaagaaattagtaatttaatatactaataatattttccttctatgcaaagtcctaattaaatctaaaatattttaacattcgaaaagtagatatattagtggtcgcaatacaagtcaagtcaccaaaagatgtaacatatgtggaataaaaagaatttaagaaatatatctgattaataagaggtacgaaaaaacttagttaaaccgaatataatattttttatattattatagtttaagaattagaataacaaccttatgtaatattttttaataattaaacattttatctaaagaaatagaactgaaacttacttaatatgtaatataatattttatgtaagtatatacaataaaacttttaaataatatttatattattatatcaaatgttaaatagaaaaaatacatttacaattgagatgcat

SEQ ID NO: 346099 - DNA, 859 bp, Cannabis indica
aattattcataattatctaattagagttttgctaatccatttcttaaatccagggtattacatattaagtcagcgctcaactccctatcctcaattctgataggcatagacctaatgcacataagagttagtgtccctagagtcaaataacatagagaagtaagagttgttgaccgagagctgacctgttacaactgaggggctagcctctacatctgcctgagttagagaaaacacccttgctggagcgggttttgctgcaatcttctgttcttctttcttaagctgtggacagtctcttttataatgccctggaaaaccacactgaaagcacccttgccctctacactctctcagatgatgcttgttacagctgaggcattctggataagtgtatcgggtttcggaaccaccctgacggttgcctcgaccttggttcccttgaaaacctcttgatcttacttgagccaacggttgcagttggtgtccttcttttctgatcagtggtcgagccactaccacccctaccataaccagaggtaggaggagtaggggccccaccaacaacctgagtccctcgagactcctgagtgcactccactgtgccctcagctcgtagtgccttccccaccatatcagcataggtggtgttgtcatcagtggtgatcataaggtcatgtcttatcttcgaattcaatccatccatgtatttttttttcttactgaaatcgattggcactattcacagggccaatctttccaatcgattaaactgagttatgtattcagtaacactcatattttctttctgggtcagctgagtaaattcctttctttttgcacttctgactacttcatt

SEQ ID NO: 346100 - DNA, 932 bp, Cannabis indica
attttgaaagtgaagatggaatattgtcttcaaatattgatataaaatctcttcattctaaaattaatgatgaggcaatacaaaagattagtatggaacttattactgaatgggaagcttacgatttttataatgcttatgcctataaaataggttttagtattagaagaagtaaaatgcataaagatttagatgatagataacatatataatattttgctgctcatgtgaaggtcatcgagaaaaagataaacgagatgctacagtaaaatcccatcatgctgaaacgagatttggttgtttggcaagaataaaaattaattctcatcaaaatagtagatatcgtgtggttgattttgttatggaacatacacatgttacatcaagtcctagcaaaagtcatttacatagatctcaaagaagattgactctagcccaagcagctgaaattgatggctgacatctcaggaattacacctaaggcgagttatgatttaatggctacgcgagttggtgggtgcgagaaccttggatatactatagttgattattgaaattatttgcagagcaaacgaacaattcaaatgagattgggagataccggtggtattttagaatatcttcaaaggatgcaattagaagaccctgcttttgttagtgccatacaagctaatgaagatgacatgataactaatatcttttgggtagatggaagaatgatggcagattatttatattttggtgatgttgtttcctttgacacaacttacaagaaaaataaagagtgtcgaccgtttgcaatgtttgttggtgtgaatcatcacaagcaatctattatctttggagctgcattgttatatgatgaaactgctgaaacatttgcttggttgtgttagcccaagatatgtttccaagagggggtgaattggaaa

SEQ ID NO: 346101 - DNA, 445 bp, Cannabis indica
ttcatattaggatgttaatgagacatacttgttagtaaatctaaaacctggtaaaatatttccaacaaataaaagctatcttattctatttatagggtagcctttaaggttagatttagagtttataaagaattaaaaaggtaaaaaaaaattatttattaaacatccttggtcgaacccttactgaacctgtaggatttcaattttgctattttatttaactgatctttcttttcacaaatgtcatcttttaattctaactctataagtttcaaatctatctatttaataattataataattatcaaataaaattatcatttaatttatttattacttagaccttacaaaatctcttaattaataaataaaccttaaatcccctcttcttctcaaataagcccttgcttagtgaaaattcacaaacaagacatagttttattta

SEQ ID NO: 346102 - DNA, 726 bp, Cannabis indica
aaaaaaaaaaaactataaagtgcatatttaagtaaaaaaacgttgaacgaaaccttctagggttgatggagggtttaggagaaacatgggaattgagttgcagaaaatgatcatcacaatcattaagagttttctggttctgggtttggtttggtgactccattagcagtacagggtaaataagtgaagaagaagaacatgtaaagctaaacgcttttataggaaaataaaaatggttactttattttccactttacgaaaaggtttttttttttttaagaattttttagggataatttcaataaaacacaaaaataaaaaagaattatttggcttataaatatttaattttaattttcgattgtaaataaatatgtaagtttaattttttgcgcaagttatatttctgacacttggttgttattttttattagtatattttaattatttttttaaaaaaaaataaaaaatttatgatatagaccaattacaaattatcacgtggcaatttacttaagtatttatttgtaagctagagtaaatttaagtatttatgtcgtaaattactcaataaaaaataaaacattataaaaatacggttgtacaaaattttaaatattttttatggtttttaagattttatttacataaaataaagtttttttatatatttttatattgtactcttgttattttattcttgattttttgttatttgtatatatt

SEQ ID NO: 346103 - DNA, 563 bp, Cannabis indica
ctccatgggaagccataccaaactatttctaatgcaccatgacccatttcatcaaatcaagaaagagctcatcgaagtctcatgtaccaataatcatgcagagttcctgaagaaatgtgaccatcctctatgaaaaaatcaacagttcttcataagcctcccttttaagcttaatgaagatataaaccctacaaaggctagtcacccaggcatgaatccagaaaatcaacaaatagcgtcaaatgaatgcaaagagttacaatagtagggtttaatagagtcaacttcctctccatgggcatgtcatgcattttatgtccataatcgatcagagcaagcttgaggacaacaaaagttgctcatcaactacaagcacctaaaagagttcttatcaaatgataaattcccaataccaaataagaattcattgttttccagtttatccaaagcccatatgtttttcaaaatttgacctaaaagcgggattttggcgattaagcatcaaaccagatgactgacctaaaacatccttttgcattccaaatcatcatttccaatggacc

SEQ ID NO: 346104 - DNA, 875 bp, Cannabis indica
aactgaatcgagagtactccaatttcaacattcgagggaatctagtccctctgcactgcccatacttcttccccaaatcttgcatcacctcgaaggcccagtattgcagcgccggggcatatccatagacattgtacttcgcctccggttgagtaatttttttctccttcttccctttcttcttcatcttatctttagtagagaccttatcaatgtaattcttcctcaggtcactcatactcttagttgtggatgacaataacttctgataagaaaggaggccccacggatactcgaagaagttttctacgttttctaccaacttcagcatatccgtccagatataaacaccctcagcccttgataacagaacaccctcaacaaatacgtacaaccccaacttgtacacatcgtccgccacatcgcacgcctcaaaagctagccaaagggttttgaaagtgacccgtttggcattattgaggtagtcccgcattattcgatcagactcacacagtgtactcaaatcttctgttgaggggccaccgctcatctttagtccggtgatcaaaccaaactcagaccgcccaaatctagcttcggtgactttcgttttcctcaaaagcagttgatgcacaataaccccagagaatttcatatcactggcattccaaaaaactccaaagggagtttccttcaccctttcagtcaagttgaaggcttcaaacttagcctttattgaagaaaagtacccatttcctctgtaggtgatacggcctggaaaatgctcagccaagggcagaataagttctcgagccatttgcaatcaaacaaaacaaaaattattatttatcataaatcgcacaaacatcgccaaa

SEQ ID NO: 346105 - DNA, 976 bp, Cannabis indica
tgacattcccaatgtctataaactgccccgctatactaacatgctaagttgtgattctactaagccaaacaccgagttccatgttgccgggcaccggaaatgcaaaattatgaaatttcactatatgacataaaatgcattcagaattcaaataacagcataaataattatttaactatctataaatacttttccataattaactcataaataactgctaatttctaaattaaactaagcggtctttacaggaaatgtcgctccccaatccactgggacgaaattggagaaaggaagtacttgggtccagaatttgtttaaaagaccaatgaagatatagacaagatcaaggctcggatgcttgcttcgcaaagtaggcagaaaagttatgctgatccaaagcgtatagacattacatttcaagaaggggaacatattttcctgcgggtttctctacctggtcactgcgaccccctttgtgaggaggcaccctttctcccgaagttacggggctattttgcagagtttattagagagagttgtctcgcgcccctaggtattctctacgtacctacctgtgttggtttcgggtacaagtacccttttgttgaaggtcgttcgagcttttcttgggagtgtggaagggatgagatcaatttagaagtactatttttttttgaagttaatagaaataattattaaatcaaattaaacagaattcaattggtctaatttgggatcgtaagagaaattttgaccttgtaattgtttctacttcgcggggtataatgacgggcagagaggctcgactagaaggaatcggcggagaaattttgtgctatatatggtaatctttcttttctgatatccaaattatatacagaactttcctatttcatatttgtgaaaaaaaaaagaaatagagaaagggtggttttcaaatattacgcttcccacattagttaatccctcaagt

SEQ ID NO: 346106 - DNA, 865 bp, Cannabis indica
tatactttagtgtgtgtgattttatttagatcacatatataacgtcctacttaaaggaacgacatgtttcgttattacattgtattaatcttgttaatcggaccgattaagccaagtgaataaacataaaatcacttatgtatcaaaacaacttgtaatagtaataataatttttaacttaaagcaaaacaatataattacatatttgggatcccataaattttttttcaaaatattacaagtggtttacatataagccgacttaagcagcaaaatgagatttatatacaatatctcatataggacgcaacccttgtggtctaccttggtcggaacatgtacaatccatcatcaaatcctcgaactcatggttgacccgacactgttttacctttgctgcacattagagtacccatgagctaaggcccaacaaagacaacaataacaaaataatatcaatttataacatacatattacatacaatacatccctgcttaaataattgtgccaccgtactgtataatatgttatctcatatataatgatgtcaccgcatcttatgtctatattatatagacgccacgtgttacattcaggcgtatattttatatacatttaaggttttaataaggtttatctcagttttagttaccgaatctaatctagctatgccttactcgtataacccttatcataaatttacataacttatttaggcatgcctaatcacaaaaactttagagtaataaccttaacacacatttctgttgaaaattattttatcaggatctagatttactaccaagtatgtttcattaacatcctaatatgaattctaaaacaatgaaataaacacataagagt

SEQ ID NO: 346107 - DNA, 1277 bp, Cannabis indica
taccaccacaaagtccatagcaatatcttcccatttccagtctggtatgttcaatggctgcagcaacccagcaggcctctgatgttcagcctttacttgctgacaggtaagacatttagcaacatacttagcaatgtcattcttcatgcctggtcaccagaacatggcctttaggtcttgatacatttttgttgaccctggatgaactgaataaggagtcgtatgagactcatccattatctctcttttgatacaatcatccataggcacacaaacacgatttccgaatcgcaacattcttatttcatccactgaaaaatcactagtctttccagccaaaaccctatctcgggtttttaccaattctggatcttgcatttgcactctttaatttactctaaaagagtagattgcagggtaatattagctaacttccctaaaaccaactcaatcatagctcgggtaatcccatttgctagttgctgggagatttgtttcaccatatttatctaactctgtcccttttggctcaaggcatcagcaaccatgttggctttactagggtgataaaggatctcacaatcataatccttcaccaactctagccagcatctttgtctcatattcatatctctctgcgtgaagaagtattttagacttttatgattagtgtatatcgcacatttctcgccatataggtaatgccgccaaatctttagcacaaaaaccattactgcgtgttctaaatcgtgagtagggtacctctgctcatactcctttaactgccaagaagcataggctattacctttccagcttgcataagcacatagctgagaccttgtctagaggcatcataataaaccacaaacttttccttatctgaaggaagggttagtgtcgaagcggtaatcaagtgctgctttaactctaggaaactttgatcacaccgatctgtccaaacaaacttcaagttctttcgggtcagctccgttaagggtacaaaaatctttgaaaaactcttaagaaaccgacgataatacccagctaatcccagaaagcttctaacctcagtagctgattttggtgttggccaatcccgaacagcttcaattttagctgaatccaccatgatcccatctttatccactatgtgtcccaaaaatgagacacgagataactagaattcacactttttgaatttagcgtaaagcttatgatctcgtaatcgttgcaaaactgctctgagatgcaattcatgctcttcttctgactcaga

SEQ ID NO: 346108 - DNA, 868 bp, Cannabis indica
atgaaaagagcatgttaatgtgttggtcttgagcttgcatgttttgtgatttggggttggttttggtgattttgaatgtaagatttgctagttgttgttatggagtatgttgttatatgttagatgagtttcaaggtatttttcaagtgggaaatacatgttaattagtgtttttgttgctggataatttggggggaaattgttgagttgaagctcaagttcttgagcttgaagttttggagtttgagcatgaatttgagttaatttcacaatttgaaattgtgggtttattaatggtattgatgcacaaaatatgtttatttgagcatctattatttgctagcaatcctatttgttgatttgaaagtttggtgttgaattgggatgatttggtgttaattggaggctgaaaattcgagttttgctagttggtttccgggtttggaacccagatgtcgcggcatgctctgggcatgccgcggcccgcccttgagattttaagtagttttgagttcgaattttgaaaagtcataacttttgattccgaactccgatttgggagttctttatatcgttggaaagctcgttccgagctctgtatgattatctgaattttaaatgccttgattgaattttatgagaatggaatcaggagttaaacctagttgtgaaaatcccagatttgtgtgactaggattaccggcacctgatcaggagcacccggggattcggaatctctgtcgttgcgggacaacaggtaagatagtggttagcatgtagagtatgcgcagtggcgcttatattgaaagtgatatgtatgattgtttagtaaccatgattagggttattaccctaataggaacggtct

SEQ ID NO: 346109 - DNA, 1113 bp, Cannabis indica
aacacatataaagttctagaaaagcttacattggttggaacataatattaatggctcattccgttcagatctctaactcttgttcctttctgtcgtagagtattgtcaagatttaaacctagatctcctttaatgatgtaattctttatactcttccacactatggttgagtattgacttgaattgtgtgaacaagatactcttcactatagggttcaaaattctagaagagaagagaagaagaattcaaaatcaatagaggggctcataacttttcaattatctgacagaatagtctgatgtagcttatcttagttatcaggttatgagcctatctttatctatatatatgatttcatctagggttaggatttcaattatatggaattaaaaaagataaaataatggctaaatagaccccttaagtggccgcccatacaagtggactccacttgtttcaattttgccatttatgtaacaatttatctttttttttttttacaaatgtcatattttaattttaatcctataagtgtcaaatttatttatttaataattatacttaattatcaaataaaattttcatttaacttatttattaattggaccttacaaagtcttttaattaacaaataaaccctaaatcctttctttcttttcaattaagcccttacttagtaaaaattcataaataagacatagtctaatttagaattctaattagttaattaaaactaattaattgagtctacaaactaatattacctcaactagttcggggattatgggcctatataatcaagctcccaataagtagatttgaaatttaccaagtaaatcttctaacttattaattcctattgactccactatagattcggaattgcactcctgattacatagaacgctctatatgttccaaatataaatacgctattaattatccattattataatcaaaataatcaaaaatcctctatagatgatttacatcgagtagggacaaatttacctttccacccttcaatgtatttatcgttaaaacactaagcttcctataaatgatatttctagtaaactaatattattactgaaataagagatcttctattt

SEQ ID NO: 346110 - DNA, 818 bp, Cannabis indica
gtatttgatttctacggtgaaatgatcatggggaagatcgtagtgcgtcgtagtattccgttgtttcctttctttcttttgtcatttgattttgcatacaacttcttcacttagggtctgtcgagagtatgaaacgatgttaatacttatgttcctttttttttccctgctttcactgcttttgggatatttttacccgatgtttgccatggagaatccctggatttcctgtttctagcagacatctggagggggcctctttccagcggttaggggacccccattccctccttttatgttagggtttggtttggggctaactgctggagttctcttttttagatgagtgaggttctccacgaccttcatgagcacggtttctttggttttgattaagaaattttgtcattttaccaatcccaagacatgtctacccctacaaccagagcgaagtcttcaggcaaagggtccacgaccttagccaccctggaagaggtgatgaaaggacccgtggtccaggagaaatacactttcccatctaccagctgggaggcggacgaattgcactcaactttgacttgcgcccaccaactggagaagattgtaacagttgccgagatcaagccttctgggtccagaatctttcaccgtcttcccagagatgaagaaatgctcaaccgtaactacggtggctttggggcctggagttaaactcacctaatttctggggctatgctaccactctaggactacttcatagatttttttgtttttgttggccttgcgccttacaaacttattcgtcaagcttatcgcct

SEQ ID NO: 346111 - DNA, 561 bp, Cannabis indica
aaaaaaataccaaaattttaaataaaactattaacatctacttagtatatatatatatatatatagatgcactcttaatgagtattacccattcatgggtagtactataaaaatttgagtttttatgcttagtttttctatctaattaaaaaaaagctttttacttttacattatatgagttgagactgtttcatcagctgaaaaaaatttgagaaaaaaaagtttttcggcaaaaaaaaaagttgaatttgacttaaatattttatatataaacatatttttgatatagtgtaaaaagtaatatttttagtatattttttttagtttaagtagttaaattaagcatagaaattcaaatttatttttttttaatttaagtgtccatatatatatataactaactagatggatgttatatttaaggtttgtatttgttttttttttttttaaattttttggttaacttattatttgaacgtattatatcaattacaaacacgcgcacaatgtagaccttatttttttttgaaagaaactactacgtgatagaagcactaatg

SEQ ID NO: 346112 - DNA, 1548 bp, Cannabis indica
tttgtgaaattgattgagtttgcagctggaattatgaacttgattagattgaacttcttgtgtttgagcttaaactttgttaagttaaggcatgaattttatgtgtttgaagtaatctgatttaggggtttatagctgggaaattaatgcatggattatgggtttttaaccctttaataattgcttgtaacttgatgttatgatttatgagtttgggtgttaattgaggtgatttagctgaagtttggttgctgacttcgtcatgttcttgctggttttctgggttttcaacccaagtgccgcgacatgggttgagcatgccgcggcccgcctccttttagggaacctgggattttgtcccaggtgccgcgacatggcttgggcatgctgcagcctgccctcgattcccagggcagtttgagtgtaactttggaatctcataattcttgattccgaacttcgatttgagagttatttatattgttggaatgctcgttccgagctctatgtgattatctgaattttaaatgccatgaaaatattttatgagtttgaaatcaggggttaaccctagttgtgaaaatcccagatttgtgtgactaggattaccggcacctgatcaggagcacccgaggattcagaatctctactattgcgggacttatgttgaaaatgatatgtattattatttagtaaccgggattagggttattactctaataggaacagtctggtagcctagggttattaccctagtaataaatgtgtgtagatgccatgccatgttaattgtattgagatttgaggattatgcgctcaaggcatgatcaggttggacttggtaaccataaccgagatgaacattctaaggccttattgtatttagacgtgtgagagcaacacgtaggtctacgccacgtagatataagtagatgtgtgagcgcaacacataggtctacgccatgtagacataaatgggcatgtgagtgcaacatgcaggtctgtgtcacacagacatatttgaatggaattactgtttaaataacatgatgagcttattattgttattacttataccgtcttgctgggcttggctcacgggtgctctactgtgtaggaaagggtaaggctttagctgatcagccatgagttcaggagctgggagaagaatgcacatgtttgagccacatcagatcaagcgggttaaggtctaccagtgatgtattttgaaactctattttgccgcttaggccggctgaaagaaaaagacttgtaataaagtttgtaaatatttttgggatccaaactgttgtaaagtttaaattatcacaagttttattttcattctgtttattataaaagtttaaattctgcactattttgattagtaatcccatttaggggattagtgtttcataagtattttggggtagcgtgcctaattatttagggtgttacaatttggtatcagagcgccaagatttttaaactttctgttgaccggccgaacatgtacattcatcgtcagagataagctcgactcatggt

SEQ ID NO: 346113 - DNA, 530 bp, Cannabis indica
atttggagttgatttgaggtgttaaggtagttttgggtgtttcctgaactgaactagtcgactggtttagtgggacctataggaaccggaattctagttggtccctaggaaaccccacagaactagtccttcgattagggaaccggtctaccggttggggcagttttaggaaccctagtttttcccatttttacaatatttaggatattgccatgttatccatcgctagggaaacttttagtttcaattttaagtccccaaaaagtgattcaacatgtcactcatcagttttatgaagaatgtgatttaggggcctgtaaatcgtcgagcagcaattctactcaggttggatggcacacctgaattcgaaagtgaggtaagattagtataatgatatgcatatgtgtataaatgtttagcgtacatgtttattaagcctattagattacattaatagtgatatcagtatacgtagagttatattggataccgatagatgtatgttggtcatatactgattgacgctataa

SEQ ID NO: 346114 - DNA, 748 bp, Cannabis indica
cccggattaatctcaaatcctatatgattgattatgatgagatggtcttatacgattgaaggctaccacgtttgttctctcgccttattctcacctgctccgatccaagcaggtgagaaattcttgagctaatcaattcctattgggaaaatggaacaatgcttcactcacaacttgtcgggctcttttttgattgaggtgagagaacaaaggttgcatgacgagaatgagcatgttcttcagttcttcacttctcactttgagccctttgatttaacacgatgcatccacgagatatgtttcgcctccgtactaggcaagactaaatcgttcccctataaatatattcgacatacaaaggctactattttattatctctctatatataatcaatttgtgtgttaatttatacaaaaatatgatttacataaaaatacaatgaattttgtttcggaaaaaaacagaatacatgttattatgtactacaacttttgtttttgaataaattttgatcaaagtttgatgtattataaatttagtttgatgtggtttggcttttaagattaaagttctcatggaatgcataccaaaacgaaaatataggtaccctcgtaatatattctactcttagatttattatcaatcataccaattatatttcaaaatttgcactgcccacttcgccttctctgtcttttgatcgatatcaaacctcaaatcgacgtttgatggtggagtgacattgat

SEQ ID NO: 346115 - DNA, 562 bp, Cannabis indica
agaacaatgaaggaggttttaaaatactatagaaggtgtctctcatctactagttgtcagataatgaaaactaggtttgatttggttgaagtgaatagttggatgagatgagagcatcatgttccttatatagtgtttcaactagggcttaggtttgaattatatggattaaaaaacgaataaaatattgggcaaaattagacactaaggccgaccacttagtggaatattctctggttacaattttgccattttatttcaatcacttattcttctttcaataataccatattttccaatttcaatcctataaatgccaaaactatctatttaataattataattaattatcagataaaattattatttatattatttattaatttgaccatacaaggtctcttaagtaacaaatagaccccaaaacttttttcttcttcacaattaagcccttacttagtgaaaattcataaataagacatagtctaattttagaattttaatttattaattaaaaccaattaactgagtctgcaaacagtattatctcaactagtgaggg

SEQ ID NO: 346116 - DNA, 607 bp, Cannabis indica
gaaatttagccttaaagtctattacctatataatttactaaatttatttgttataacttatttttcataatttcatattaaaagataattttaatattttgaattttctacttttttgtagtatacattcttctatttttattttattttattttggtgttttttttttctaagaagagggaatacatttgtattaaaggtttttttaggaccactattaaattgtgtcttttaatttttattttttttaaaagattctctccgaactattcccagtattaaatataaataaattatgttagattttatcgcatatcgttaacaaaatatttttcaatgggaatataaaaggagaattaccatatatactattttttaactatttttttttaaaaaaatttataatttgggttgctctggtagtttttatgtagattactatgaggattttggttgtgatttaagttgctctgttggttgttatgtgggttgttatgtggaattctgtaattgattcaacgacacgatgaggagattcagaggttgaaacaacaaaggtttcctgtactacctttacctcgtatgccaggcattctcaattcggtat

SEQ ID NO: 346117 - DNA, 927 bp, Cannabis indica
agagctcacaaataacttgagcctgttttgcctgaatagccattagctttgtcagggcctctacttgggctgtcaatctggtgatggcgtctacctcgtgcataccagctaccttcttcgtttgacttctttcagttggccattgttgattattcatggctatttcttcaagaaaatcataggcctcgtttgcactttttctcataaattccccacaagctacaacatctataatcgttatgatgttaccaatcatcccgttgtagaagttatgaaccaacatccacttttcaatccatgatgtggacatttcctgatcagatctttgaacctctcccaagcctaatggagagattcattgtccagctgaaaaatattattaatttctcctcgcagcttggcagacatcactggaggaaaaaacttggacaagaacttggttgccaaataagtccatgttgcaatagaattcaatggcaaagagatcaaccaacttttggctcgctctcttagcgagaatggaaatagtctcaagcggatggcatcatcactggctccattaaccttgaaagtctgacataaatccatgaaattagacaagtgcaaattggggtcttcagatggtagtccaccaaactggactgaagactgcaccatctagagtatggctggctttatttcaaagttgttggcctctacggtaggtggtcttatgcaagactggactgttgggttttgtgccctaaataaaacccttttcaatgtaatcagatttactaattaataaagatcataaatctaattttatgttggatggttcacatgatttatttcatgattatttaatgtataaattctattaagtccagaacatatgtatttgttcaggattatagtgttgtcagcacagtggaatataatcatgat

SEQ ID NO: 346118 - DNA, 872 bp, Cannabis indica
aaataattaaaattggcatttaagtggttaaattggaaaaatagcatttctgagaaaataagatgaaaaatgagaaaatggcaaaatggcaaaattgcaaagcgggggcccactatccatggccggccactagggaagcaatttgccactttattttttcattattttaatgctaattaaatctaacctaaccctaagtggtttcctataaataggtagtgatggctaaagggaaaagatgatgcatctcattccttcagtaaaaatttcaagcctccttcactaccctagccgaaaccctatctctctcttcctctcttcaaaactgaagcctcatagtgaaaagagtgagtgcccacacacatcaagtggtactcaatcatagtgtgtaaggctgtgaagaatccagtttcaagagaaggagattcagactcagatcttggtgataccctgctacagaaaggatacaagggttagagatctgagtggaaggagacattatattccgctgcaaccactgtaaggtttctgatactttatatgtgtttatttcatatcgttttagaagttcatatttaggatgttaataacatacttgttagtaaatctagatcctggtaaaataattccaacagttagaacatgctactttccagtttcctatttaacacaatttagaatttttattttaattccatgtgcgtaagtaagcatagtttaattaaacataatataaaacttaattaattaattaatcaaaagagcaagagccacgttatgtacattctttatatttaacaaattagaaaaatacttgatataattatgaggtttttttacttttacactttaaagcatttatttattttttt

SEQ ID NO: 346119 - DNA, 388 bp, Cannabis indica
tgatagacttttcaagagtttttgattatattataaatgattgaagaataaaattttattttattttttgtatattgagaaacattaaatgtatgtagtttgtttattagtatagaagttctaaagtacttcatatgcattaagaattatagatatcaattgatatagaaataaagatcatacaacaaaaatggaacaaatatatggtcttggagtactatcattctcgcaaataaaaaattatattattattaatgtgttgtgttcatattacttaaaattttaaacttttgtatgaacaaagttgtatacacatatgaatgattcaataagttggataattaatgatgttccatgaacccatcatccataattaaaagtccacaca

SEQ ID NO: 346120 - DNA, 1147 bp, Cannabis indica
gagacgaggcatccggaacctcttgatcgaaatcaccatccatgcccgtaaggaccacgacctgtcagccaccactatgaatatcgaaatgtgctgatctaacaaccatattttagggacaaaaatgagggatacccccttttccactactcaatgtaagtaacaatactattgggaaatatggtatcccccttcggaattccataatctcgagataggtacacaaatgaaaaacacaataaacacattccttgctattcaacaacccaagaatgggcacaagcattcaaaaatacatttccctattctttaacattttaccaaatgcccatctaaaattcctagtaagagcccaagcccattaacacaaataaactctcttttcaatagcaaatccggatagaaaagataatttgttagaacacattagcaaaattcatccctcttcaataaatatatatatatatatatataaatatgtcaatacctcacatcacaagcacaagctacatatctttttaaatacttttagaattcttgacaaaaataaatgaatgtcaagagcaaataaaaacaatgctcaaccatttcacataaaccctagaaatatcatcctaaatctattcaagtagttgtcaaataaatttagaaaaaaaaaataccaaagtaagagtaaatgttcatcaagaaatgatattgtcaaggaagtaccaacctaatgcttgagttaatatcgttggaagtcgatgtgggtgaaaaaaaattgaagtgtcgcctacactgaagcttgtgctactgtaagtgaaaaagaagagagtgaatacgatttttattgactcatgaagcgtgtgctactgcccaagattatttgggctgaagtaaaagtccaatgcattgtaatccatgccaagtaacatatgcatatacaaacataatgtatatgtcaaacatattagtgaaaattacatgaaatatgggatttcataacaaagttagaaaaatatggcatttttaagtttgccactcttctatggcatttttttacatttaagattttttatggtatttgatatgccatatttttataaacttattatccaatcccatattttatatttttgtttttagcttaattagttttatttat

SEQ ID NO: 346121 - DNA, 831 bp, Cannabis indica
gtaatctttttggtattttgatctgtgtgatagttttagaatgcataatgtgtgatttattgatgaaagagattcaattttggcctttgttgtgattcttgacactttgagtcatgaagaacacgaagaacacattcgagttttgaaaagcacacatttcaattcaaaactaaccttggctagccctaggggtcttgttttagacatggctggccttatgattcaatcatgggagttggacagctctagggtttcatcctaggaagctagcctgttcatgactgggtttggtaaccatggccagttcgtggttgagtatgggaccctggttgatcctctcaaagcttgggaaccctggccggcctaggccttggtttcgagcgggtggccagttttctgtcctcttttaacctcggcaagaatcttgacatggccttgtaggcatatacaaccatagtctcatatgtggtttccctagaaactctttatgaaacttaatggtgagtctattatagtcgaatactcaacttaagactcaacattcgttcaagttgttacacttgagactgtatttcgctaatacccaaccttgtacaatgacattatctggcaagtacccttgggtaaggttgcccagagttttgtctatggcttggaacctacaaggaactttgccttttggcatgggacctgctaggaactctgccttgtcttagagatttagcatggtacgtggttcctataaaaactttgtcttatgcatttgaaccgattttttatgcatattcgaccttgaggctttcatgttcttgcttttggcctataggcact

SEQ ID NO: 346122 - DNA, 440 bp, Cannabis indica
catacttagcttcatatgttgaccttttcctttgtgcaggccggtttgaagctgggttatgcttactcccgggctaaatctgctgcttccaagagtacggctctgtccgacgccttgagggcggaggcagacttggccaagaaggaagctgaggaggccagggcggaaactgcagctgttcgccatgagttgggtgaggccaacaagaagctttttgctgccaagaagaaggtcaccgtgtggacaaaggacctcaaggctgctaatcgctttgaggaaaccatcgagtcttatctgctgatgttgatcgtcttcaagatgagaggacttctatgcggcaggtcctccttcggctgaaggatgataaggacgctcaggcggtcgaggcgaaccgcttgagggagaaggtagatgctttggagaatgccggcctcgagctc

SEQ ID NO: 346123 - DNA, 530 bp, Cannabis indica
gaaaaatgacaagcttaagctgcccttttatacaaaaagtccagtgacaagaaagctaaagaatgggaaatctaacggttgggagtcggacagaatatgaaatgacgattcataatgaccctcaaaatcgcacaactgccagaatcaaaggatgtgttttttccaagaagggatcttgacaaaaatgccctctgtaattatccaaaagctctttttaccaaaaaagaactttttaaggggcaattgttatacccaaaattcagctgccatctcaatggaggacacgtgttaagataaagggaatgtgaatcgatgcaatcgctttttatggaataactcattaattacgtaagtatcagagtatatttataacccgctggctgtaaggtcttaggcaaggaatcaatgtacaaactgacacttagtatattaacgagaaatcatatgtcgctgaatgcgaatagcgagatagcaaggacaatatgcataggaagatgaaagcgacacatatcaattgcgaaagcccttag

SEQ ID NO: 346124 - DNA, 519 bp, Cannabis indica
gacttcctatagcttcatccagtgaatgttagcgaggcttacattcctcgtgaatcagaagatagcattcaaataagccttgaagaactctttaagaaccacagtcgtcacaagacatgcatcgacgaccttggaagaaaaaatagccccagctcgctattgaggtcactggaaccaagtttctgtcgagacatctctagatacaacaattaaaaacgtgcttaatacatgattattttgacccagtaaaagcgggaaaatcacagctatatgattttcaaatcataacagtgcttataatacgtgatatgtaatcaaatctcatgattttatgggatgatcattgtaagcaaatgacgatcaactttgtaataaactatccactatgtaaatataaatagtgacaaataagatcaaaaaatagggacaaaaaaaaactcataccggagaggccctgaaaaacaattagaaatctgaataagattgactcgtggactatgcaaaattttaactgcaaaa

SEQ ID NO: 346125 - DNA, 698 bp, Cannabis indica
gaaaaacatgactgaacttatataaaagatactattaactttggaagaaaaattagaagatgaagaacaatttaataaaaatgagatatggagatgaaacacaaaagaatcaatatcaataattaaaataagaagtacaaaagctacactctaatctcaccaatattactattctaatacactcatttttgtcactaaaataagtatagataaaatagtaataagagagaaaaatataatgacaaaataattttctactctctttaaaatcggataccccgttttcattaatttttgggtcctatttatagtgaaagcctcctctcaaagttgatattttttgtgtataatgtattgagttagtggcatggatttctcagcaaaaggagaacatggatccgcgcattaacagatggagaatgtgggaatagttagtcacgtttgttgatggagaaaattggtgtgttggactcggtcaacatttggcttcaactcacgtagtcccataaaatatcttaagaaagtgaaacccaactttagattgaaaattaatgggtgtaggtatgtatgtgcatatacatatgtatgtcttcaagtaaaaggccacaaagtcattccttcatgttgggcttttgtacacttggggcttaagaatttattttcgcttatacaatgtactcaaatctgaaaaatatcac

SEQ ID NO: 346126 - DNA, 618 bp, Cannabis indica
taacgtttaatttaaatttaaatcaaaatttatgtaaaaataattattaaattttgttgatcaaatagttatttaaattatattttaataaataaataaattaaatgtagatatttattttgtttttttcttaaaaaaaataagataattaattaattaatttaaaagtgttatttttaactgttaactttaatagaaaaaaaattattaaactaacaatttccgttaaataaccacatttaatatcacacacaacaccaaccactaccatcactccacttcaattctaaaataagaaaagaaaaacaaaatcaccacagctgccaccaccactaccaaaaacaaaatcaaaatcacaaatgaaacctaaatccaacatcacaaacaaaatcaaaatctaaaaccacaaataaaatctaaacccaataatatcacaaacaaaatcaaaattcaaaaccataaaaaatactaaatctattacatgaccaaatcaaaactcagaatcgagagcaaaaagagttgcacctgagcgacgatggacctctgcctgctgctatcaacgacaatagatctctacccttggagagagagagagggagcgagagagagagagagaga

SEQ ID NO: 346127 - DNA, 720 bp, Cannabis indica
agtgtcccaccaaatttagtaggcactgtagaccacactattattttttttttttacttttaatagttatataatattaaaaaaaactaaataataaagaacataatatttggtattaaattattttttaatattgataaaataatagagtaataaagaatataatatttggtgtaatttttagtgttgtggttagaattaaaaaaagaattagtgttaaaatagcagtttcttagtgttgatttaacaccaaatttaagtttctttattggagatgccctaataccctcttttttttttccatcacaaacaaattacctatttattaaattatatgagccaacatgataaataatttattgtagaagaacaaatttataaataaccaaataaatgaaaattaaaatgcctattcaaattctataattaattttatatcttgaaaatgtcatacaaatattataggatttacacaaaaattaaagctatatactttattttattaacattattatttaggacaccagcactgattaacactttaaatatttcactttgcgattaattagtaatattttttaaaaattattatattaaattatatataaaactcaatatttaattagaccaataataataatagtattaagtggtgcctaacaccttttaacatttttattattaattataaattaacaagagcattgctattaggcatca

SEQ ID NO: 346128 - DNA, 611 bp, Cannabis indica
gttaggtccatgcttagtttttcaactctacctacgtccttctggggatatgcaatcagatggcaaccgacattttaaatgttgttccatctaaatcaatccctaagacacccttagaactatggattggtcgtacagtcggagcttctgctgtaagtagagagtcactcattggtagtcgaattgaagaatgcacgagtgaagttgaagttggtaagccaattaaagccccaactgaatggccaacccttcagctagaacaactgaaaagaggcctgtgcgatggtgagtagcagtagcattcaccttgccctgaaagtctcgaatatacaaatatctcttttactcaaaagaaaaatatgcctatacaaatatctctaaaaatcttttttttttttaaatctaactggcctattatatgtgttaatctattttaaattaaattatacctaaaaataactaaaaccataaatttagaacattttagtcatagaataacagtaaatttatgaatattgaatctaatttatccaaaaaaaaaataaaaaacgtataataaccaacattgtaatgaccgctctagtaatgtgaattagaaaaggcaattagca

SEQ ID NO: 346129 - DNA, 737 bp, Cannabis indica
tccatctcactgttcctccagcttaactttcctttacctacacaaggtagcaaactgatgagtcaacagactcagtaagatatgcataacatatatataagcaatgctataccggctttatgttaaagccaccctgaccctgagctcaacaactgagcccaccaaatggttaagaacgttcttaaggaaagtactactactgtaccaaatgcactaaagtaccaactttgtactcgtgttggtagagccattattgtactcccggaagttactaagtgttgtaccacatgcacgacgtaccccctggtactcgtgttggtaacactataactatcctagactcctacactatactaacatccttaaaattcacatctcatttagtgttagtagtgtaaataattaatcttaagcatatattcaaatacatattatttatgctatcttacctcgtttcgcgctcaagtgtggcggtcagcctaagtgaaaacacagcttgacgctttacagggccctaaaccataatgttcaaaactcgatgagagacacgctaaaacacttatcaggaatttaaaattgaaactaaagataaccctatcaatagataggatgctaataccctaaacaacacaaaaacggggaatatagggttctggaaaatggcccaaccgacagaccggttcccaaccggaagttcggttcctgggtaccaaccggtcgaccggttcctacaggtc

SEQ ID NO: 346130 - DNA, 538 bp, Cannabis indica
aaaaaaatacataattagtatacttctaaattatgaataaagtattcttacattcattttaatttgtctaaaaatacatggctgatttattatttaatattgcctaattagttgtaatcttttttattattattttgagtcatcaaatcaactctatatatttatttaatatatttatatactcatttaataaaaaaaatacttaatatatgaatttttaaaataaagaaataatcataaataaaatttgatttttcaataattataatgattctacgaggcacgatataattataatgatcccgcaattgcacaaccaacttcatatggtatttatcattttaattattactaaagagtaagacaaataaatatttccatgtagaagtaattaaccatatgaatcgtgatctacctttttattattcccatttaagacatttttctcatccacataatttattaaatttaatcttcttattaaatattttatatagatcaattttatcattaatatttttatataaattcctcattt

SEQ ID NO: 346131 - DNA, 546 bp, Cannabis indica
actggaactaggacttggacttggaatcgtaactgaaattggacttagaaccataaccgaaaccggaccagtacccagactccaaatccgatctagacccgaattgggagccggacctggatcccaacccaaacctggactgaggacccaaaattgaacctgaactcatacccaaacaaggaaaaagactcaggacagagaaccagggtcgggaactgggaccgcaccccagtctcgatcccgaacccaaattcagaaatgggacctgggacctgaacctgaaccagactgagacccgtgacagtgatcgagatcttgactcgggattcaggtaacggggcctagaacagaccagtagtcggtgtcttgatctgggactcagactaggaccaaaacccagaagaagaaccaaacccgaaccaagacctagccttggaaccaaaaattagaacctaaacaagaattggcaaaccatgaccatagaataagactaggaccatgaccaagacctagaccaaaacctagaaccgaacacagacctagcct

SEQ ID NO: 346132 - DNA, 1398 bp, Cannabis indica
actcaattaatcaaccgaaattaaattcaaacaacaactataactacagaaccaaaattcctaatttaagtctcaaaacctaactttatacctattagaatcaaagagaagaagactaggaatccataccttattcaaattctccttaaagagattagaaagactataaattcagcaactcaaacccttttcttgctggttctctagggtgcacgaaagagagagggaaagaggaatacttccaagcttgatcatctatttctcaccttaatcttctttcctttaatagtcttattattatctaagcataagttaaataaaaggaagcttctattacccactaaaagccaaaacaccaataggtaaaatgacctatttacccatctcttaaaaatcaaaagaaactaacaactcaaggacgatttggtcatttccaaaacccgactattagcatttagcaaaataccccgagcaaataacatacatcaaaatataaggtatgactctctaaaggccccaacgccgctttccacagcttccgaacacaacacagaaattaggtaattaaatataaaatagcataaaaacatatatgatatatgaagtatatttctaaaatatgcatttcataattattaatacataaaccttaaatatttaataatacaaagtattaatcataggcggtctttacacacctggtgtttacaaagtggaaaatccaaaaattattcaaacacatatattttctcacaaaatctcaaatttttcttactaaattatagagagaaactcagatttaatatttcaaaagaactttgtgttgattaaaaaaaatgtgtaatgatttagggtgcattggggaaccacctcggtttccttggtgagaatcaacaaatggattaaaaaagcaaagatgcaaaggttctaaaataaagtgttagctgctgctgtggtagcgctagtttatgaaattaagggtacccgaaacaacatgttttggaactaagtgatggaaactagtgatacccttgtgttgggctttatgccctaaataaaactctatttcaatgtaatctctacaatttaaatatcaataaagaaacagaagtattttcattacttatttaatgtgtcatttggttcatgttatcatttatatgtttatttgatttataaattcatccaaactcttatcacattaatattcttgtttattgtgtcgtcagcacagtggaaagtgatcaagattgtgtgattaaatatatattcctagatttatcaatacacagggtttaactgatatgataatctacaacatagtttacttgcacctttgataagtgttatgtcgtttctagggcattggttaaagtaaagcttgggttggatgcattg

SEQ ID NO: 346133 - DNA, 1243 bp, Cannabis indica
agaatgctggtgcaatttatcagagaatggtgaaccggatgtttaaaggccttctggggcaaaatatggaggtatacgtggacgacatgctggtcaaatcgaaggcatgcgcaagccatgcagatgacctagagaatgcttcgaagtgtccggagatacggaatgaaactcaactcgaagaagtgcatttttggggtcaaatcgggaaagtttctgggcttcatcgtcagccagcgagggatagaggaaatccagagaaaattcaagctctcataagcatggcttcccccaagaaacacaaagatgtgtagagcttaaccggaaaagttgctgccctgagccgttttatctcccgatccacagacaagtgcattcccttcttcaacatcttgaagaaatgcaagaaattttaatggtccgacgagtgtgaggaggcattcaaaaaactaaaagagcgcatggctaaacctccaatcctatcgaaacccgttatcggagaggacttgttcctatacttggttgtctctgagaatgcagttagtgcggccttagtacaggaagaggaaaaaactcagcatcccgtgtagtatgtcagcaagcgcatgaaaggagtggagacgcgatacccggtgatcgagaaactagttttttgcctcctaatggcctcgagaaagctaagaccttactttcaagctcacccaatcaaagtattaaccaatcacccgctccggcaagtcctacaaaagctagaggcgtctagaagacttctcaaatgggaaatgaagctaagccaatttgacctacactacattccacacacttccataaaagggtaggcgctagcagacttcatcacggagtgccacgaagcaaaagctaacgctaacgtacccacagtgccagtcccgacatggaagatatttgtggatggtgcctgcaatgagaatgggtccggagcaggggtcgcgatggtatccccgaatggatttcgactccaagcagccctacggttcggattctcagcttctaacaatgaggccgaatacgaagccctgatagcagggctgagattggcaaaaaccgtaggggctaaaagagtagaagtctacaacaattcgcaactggtagtaaaccaggtgtcgggagaatatcagacgcgcggagaaaagatggctgcatatgtagcaatagtccgagaactactccacgagttcacggagtatagagtagaaagaatccccag

SEQ ID NO: 346134 - DNA, 563 bp, Cannabis indica
aacttgcttctcttatctcacttgcagtacaaaaatttgataacattttcaagttatgtttatttcgttaggatttggttcctttatatatatatatcttattcccttttttaatctttctatttttaatctgatatgcctttttttaggtttgcagtggtagggtggtggtggtgtcattacacgtggtggttgtaacgccctaaataattatgtacgatacccaagttacttacgaacccctaatcccctaaacgggattactaaggtcgagaatgtaaacttttgtaattaacagaatgaaaataaaacttgtaataatttaaactttacaacagttgggatcccaaaaatatttacaaactttattacaagtctttttctttcagctagcctaagcggtaaaatagagtttcaaaatacattaatggtagacccttaacccgcttggtctgatgtggctaagacatgtacattcttcgcccagcttctgaatctcatggttgatcagctaaagccttacgatttcctgcacagtagagcacccgtgagccaagcccagc

SEQ ID NO: 346135 - DNA, 2124 bp, Cannabis indica
ttattggtataattgtaaaaaattattataatggtttaattataaattttacatttaattaattaaaattattattgttatatttattatatttatatataattaatataaattattatttataatatataaaatttgaattaaaaaaattaattattatattttttaaaaaaatatttaatatagtggcacttttggtgtgtcactatatctttaaaaatattaataaaaaaaaggatatagtgacgcgcataaaatgaatgtaaaaggtttcagtgacacgtgtggagtgtcactaaaaactgcttttccagtcagcctcattagtgacgcgcgttgaagtgtcactatacacttttagagttactcaatgtgtgtcactaaaacccaattttctagtagtgcggggattctgtctagacttttcggtgaactttaccttcttcgcgtttccttgcttgtggtttttaccagaacgcttatcacttgaattgatagaataatgaggaagttgggcagatgttccaatggaacgcttaccttcttctgctcggcttttgctcaccttctgctcgctgaatggcttcctcgggcttgatgaaaccttaagcccggtcaaggaaatcactcattgagtcgaccggtccgtttttccttatatccttccacagtttgccaaggacttcaatgccccccagtatcgcggacaactttccatcctcggttacccgcgacaccttggtcgcttccgtgatgtatgcccggagtggctcgcctggtcgctgttttactttgaccaaatctcccagatgccatgggagctgacgtgaggaagagaattgtgcatggaattccgaagagaaggttttccatgaactaaactttcctggagccaacttgaaataccattgttgtgtggattccgacagagtggcggggaagattctgcaacatacgtcccctggcactccttgtaaatccatctgcatctcaaaatacttgagatgggagacaggatattctctccagtgtacatcttccacgttggcattttgaacttgtggggcagtggcagaagatggatctctggtgagaagggagttccgcgtgcacggtctaactcaagatcattgttacgctgtccgaccatgccatgaaacatattcttcaattcgtcgagctgggcctgtacaactgtgctgacttgattggcgtttcggtcaggttggattacgttagcgtctttctgagcggggatttgagtatgggctctgggctgcacgatcattgtagtattttgctcgtctgttccccttcttctgtttagatcgtcccttaggtaatgggtcgttcccagcctatcaaacacagaagaacctggttgcctcaacgattgattcgcttggttgacaggcggaatggctccattattctgagtggatccgtaaggtatggctcctcctgatgaattctcggacaaggtctgcccgcctacctcttggcccacgagtggaacttatgatcggggattggacggctgaccgttggttgtctgggaggcattcatcgtcgggtcatcctctgtttctcctaggggaatgacacttggcgtttgttggcctatagtgtggtaggctcttcgtatcagcacagtagcttgctgactacaatcttcgatctctgcatggtgagcccttaatatctccatctctttttccctccattcggcgaacatacgcctctgttcgtcaaatgcgaggtttactgcggcacgcagttcctcctgatcatgatgtagagtattgctatgaccttgcatgagtctgagcgcaggaaggagattttgcaattcggttgcgtctctaatggtcgtttgagcgttgatgcctggtggaatagttgcgttatgaacgccctggctgtgtgcggaaatgttattcccagtctcttgcacactaggcgcagtttcagtaatagtagttgtcccaccattcaccacgcttcctgtctgtccaggattgacagcaggtggaatccttgaacttcctgggtcctgcagtgtcagatcaatcatttgtgagtttgttgggtcagacaggcctctacgagtttgcaccatcctgt

SEQ ID NO: 346136 - DNA, 721 bp, Cannabis indica
atagtgattcgaattgtgtatcgatttcatagaataatacatatatatatatatacaaagctaggagactaaatatctactaaatatctaattcgtttacagctaatatacatctaatatctaacagaaagaaacaagttcaattaaaccatagaaaagtagttgggaatcactgggggaattccctccccttgaaaaaaacctggctcatgtctagacattctagcactcttggccaagccatctgctaccgagttaaactctctagaaacataaaagatacaactatctgaaaaaaaacattcaacaagtctatggcatgtaaataaacatgtaaaaaaaactccagtggggtgaagaagccttctgcgccaaagcccttacaatgtccttgcaatccgacagaaaatgaattttgctccaggattattggacagccagatccaaggccaaacagatagcctgagtctcagcttccatggaacacgcagctggtccacactccactttgaacatccacgaattcgaaatgcaatcaatggctactaccgcaaagcctcctacaccatccttccaagaagcatcactaaacaaaatgacatcaacatcctcaccatgaaccggctgttccaggtgttggaaattattttaccaggatctagatttactaacaagtatgtttcattaacaccctaatatgagttctaaaacaatgaaataa

SEQ ID NO: 346137 - DNA, 959 bp, Cannabis indica
aaaaaatacttccagtatgaaaataaaatatttttcgtcaaaaattcgtaatttacaaacattcttcaattaagcacataaaccaacatgaacacaaccaaatcataaaaacgtcattttaaatccatatttcatgaaagtaaattatcaccatgattctaaggccagttgttggaagttattttaccagaatctagatttactaacatgtatattgattataattgtataatctaacaccctaaatatgtattttctaatacaatgaaataaacacataagagattataaaattcttacattgatggtagctgaataataatgactccttctgttcagatctctaacccttattcctttatatcgtagagtaataataagatctgaacctggatctccttcaggtgtttgattcttcacaatcttctacactatgattgagtacttgacttgatatgagtaggcatgtactcttcactatggttcaaattgaatgaagaagaagaaggaatgaatttcgaaatagcaatagaaggaggctctcaatttcgagttgtctaataaagaatgaaaactaggttataatagattagaatgagattcatctcattctttttatagtatttcaattagtgtttatgatttaaattatagaaaagataaaataatagcaaaaaatagcttaagtggctggcctacatagtggattccactagttacaattttaccattttattcaataatttatcttttctttcactaatgtcatattttccaatttcaatcctataaatattaaaactatttatttaataattataattaattacgaaataaaatttccatttaacttatttattaattagacttacaaagtctctcaattaacaaataaatcctaaaacctcttttcttcacaactaagcacttgcttagtgaaaattcataaataagacata

SEQ ID NO: 346138 - DNA, 841 bp, Cannabis indica
atataatcgcatatatgaccattagaatactgagacacacccaccatttggaatagcgattgatactctcgcaattcaacccacaacatataaaaatcctaaaagatctagccaacaatcaaaagtaagtgaatcttgtcaatacgcgagtattcgaattgttcatctgaatacccgcgagtattcaaagcgtgaaacagtgcctattcaagtatatcgtatgcggttatgtcaacttacaggtcatattctatgaagttacccaggtttttacctaaaaaacatagcctcatgcatatcatctataaacattcatccttaaacaaccctcatgcacactaaaaacccagaaaatatagtccccactcaaacagaaaacgaagcatggtgaagattcaaaaactaaccttttactttgataaatctgtttccatgaatcgcccttgacagcaatacagaatcaagaagaacccacgaataaaggcgaaaatctgggcaatttacggagatttttcttagaggtttctttgaaaatgaaggaacgaagaagttaagggagttgaaggaaaatgagggaaaatggggatttttggttcgaatcagggggtttaaatacccaaatccctcattcattgggatcgtgacacgtggcagttggaatgcctagagtcgcccaatccaacggccagagatggccacgcctacacagaaaccgaagagttttgtgatgtggcaccataaatgcaataaaagtaataattatagccgtcattttttgaaatcctcgaagggacaaccaaaggtcacctccttgtgacaacctttcacctgtctctcgaat

SEQ ID NO: 346139 - DNA, 709 bp, Cannabis indica
tttttgttgacttgtaatagtggattaccaatatgtaaaaatttcttttttagaattaaattaactttaattaactaattttttaaaatatttaatctttattttaaatatttaataagaccatttttagatattaatattaataactttatttttatattgaagtgttcattataatttttttaaatagttaattaagccatttaattataatgtttacaacaaaactctattattttataaaaattaaacttccaccccttcttactaagtttatcaagagtacatgttcaacatccataaccaataaaaagtaataactttcaaatttttaataatacatattcaacattaataattaataataattattaactttcaaatttttttaataaaacgtattcaagattaataacttatcgataacattaataacttttaaacctttcaataatctatattcaagatcaataatcaataccaattaatgattttcaaacttttgtcaattttttttattgatttcactccgattaagtgatacatattcagtatgtttaaaactgcaaagaaggaagagtaaagcaatttcgcctctttgagaaaatagaattacatgacagtgggtggaatgaagtacagatgtgtcgagtgcgaaaaaaaaaaactaatctttaattttataattattattatatttaaatttttt

SEQ ID NO: 346140 - DNA, 888 bp, Cannabis indica
ctaaatgttaaaatttaggtgtcgtttgttaaggtgccgtttggtaacacttttattttttaattttttaatcacaaaatgaaagtaaaatttttgtttttaaaaaatttgtttttgaaaaacaaaaatgcgttctgtaaccacttttgtttttcaattttaaaaacagaaaacaaaagtgtgttctataaagtttatttttatttttattttttgattttatttaagtcgggtctaggtccggggtcggattcgggttcaagtcaaaagtcgggtttagcgccagggccgtagggaggggatttgggtccgggtctggtcctaatctaaaagattgaattaaaaaaaaaactgtttaaaaaaatattgaaagtgattctttttgtttttaaaattttgatttctaattataaaattgaaaagtaaaaacagtttatagaacatgttttgaaaaatatttcacttttctacttttaaaaacagaaaactgattaaaaagtgttaccaaacgccacctaatatatgtatattttagatttttcaattcacaagatgaaagtaaaattttaatttttaaaactttttgtttttaaaaaacaaaaatacgttctgtaaccacttttatttttcaaatttaaaaacaaaaaacaaaagtgtatctgtaatgttcattttcattttcattttttaattttatttacagtcggatctaggtctggggttagattcggattcagttcagaggctggattcagttccagggttgtagggggatttaggtccgggtctaatcgaagtacaaactattgattaagaaaaaaaaattgtttaaaaaatattgaaaatgacttttcagtttgtttttaaaattttgattctcaataaaaa

SEQ ID NO: 346141 - DNA, 703 bp, Cannabis indica
tgaaaagtgcaaaatacaaaaattacactattgtctctgtcgaagcaaataaagattaacctccacccacgagtatcattagttctcttatctacaatttttagacaaatgttatcttcaattatcaacaatttagagattgatttttaatttttttttttatcttatacacatttaagttatgtttccttaagtattggaccatcaaattttagtttatttttggattaacttaagaacatatgtaaattatcaagctatcttttaaacactaatatattgcattcggtatttaattttaattgtaaaaaattataaattatattatttagatacacataataataatctcacctaataattaataatattttttcttttaattgtataacttataaataacgtagaaaaaacctagcataaaatttaatatacgtgtctcacacgtagttttttgctagtatatatatcatttattcttcacagttgggttcaccacattagttgagttaagatcaagacttctcaacaggtctattctatttattgaaacaattaattttatactcagagctattaaaacaaagttggtaattttttttttttacatatttcatgtcttgagctgctcttaacaacttccacactgcatccaataatggttcaaagaatatcaaagtctcaatttcatcaccaaaaagtg

SEQ ID NO: 346142 - DNA, 768 bp, Cannabis indica
ttctgtccaaacctaacccaaaacaaactcaaaagattcaagcacaaaacttgctcaaaacaacaagaacaacccaacaaacatcaacatgcatctcaagttcatactcacaacccatatcacattttcatgctctttcaataattaaattcagcaataataagaaagattaaagttgtaaaagctacctcaaattcattccaaaggcaatctcaaaattcctcaattacaaagcttcaatccaagccaaatccaagcaatttttaaagtttgaaatgggttagagaaagagagagagggttcgggtatgagggaggaagaaactagaaaaataaacccctttcttgccaaaactccattttactaagaaatcaataattaatgccaaaagacaaaaatgccccgagggccaaaataaagcatacgcatcaacaagggtaaaaatgtcatttcgaacataaatattctcaaataaatttagattattcaccaacggggtcttaacatgacataattcatataaattcacatatattaaattatataataatataattcctcaataatacataattatctagttaggattttgctaatccatttacttaactctagggtattacgcatacgcagtctcagaatcatcacacatgaccttgcccaggcgatgtgggattgcacaacttacctggtatttccccttatcgatcacaggactactgactgtcataatcaccgcccttacggggtccgacgtcctcatcgacc

SEQ ID NO: 346143 - DNA, 630 bp, Cannabis indica
aatattttaaagaatatctcaataactaatttcctagaaaatctcagcttcattatgaatttcaaaaatattcaaattcaagttgatccaaaattagttataaatagctgattttcaacttaaatatattttatgaaatattaaataattaagtatctagaagaatctaattagttataatttttttatttaattaaacataagaaaaatacataaagtttatcttgaataggtttcattaaattaagtgcgtttttcttaaatgaatttcaaaatattcaaatgaaaaaataatttcatatatttcgaaattaattgtgttgctaatcaattaacctattatagtcattcaaatgaggcaaatgggccttcacaattggggttgttcatgtgagggagggctaggttcagtatgtcatacccacttctatggccccctaactctcacacaaggcccaaaagagagaaatttaaccttaaatgaacaactgttattaagttaattggcccaaatactaattgggcctaaataaaatctatcataagtgatcattttagggaaatttacatggtatactaacttttgctaattttttacaaaaatactgctaggcggtatttttacttttt

SEQ ID NO: 346144 - DNA, 524 bp, Cannabis indica
ctttattgatgttgaataaaatagattacattgaaatggagttttatttagggcataaaacccaacacaaacatcttttaccttaaactctatatcatattcataacaccacataatctctatatcacacatattttgattagacatagatataatataataaacgcactagcaaactagtagaacttatttttgatcttttatgtgttccaatctgtatattacaatataaattgatgtcgcagaagtccttagacatagaatcacaataccttatcttagtgggaggatttttccaaccattattattcagatgatactagtgattaacctactatgatatgttcaagaagggaactttaaaataaaaaaaataaaaaaaaagttaatctaaccattcacatggatagtaataacttatcaaaataatgaggataagataagaaatcttgcaaagtctattcgaaagactcaagcacaattcctggtccttatgaaatattttatggtatctctagtgatta

SEQ ID NO: 346145 - DNA, 723 bp, Cannabis indica
atttgtggctcggttattgtgggtgggaatttaacagtccaattcacccaggtagccaccctggtcgagagcccgcaggcgcaccttagtaaccttggaccaagggctcacccacctggcacccaaggtaccttgccttctatgaggaaccacagcagtaagctcctcactgacgtagtccacgccctcaaccaggacgtctccatcaacatcgactggctccctagcctcattgtatcccccatagtttgggggtgcaacctcctcctcttcctccacctcgaagggactgctaggatgtacgtcgtcctgctcttcaatctcctgaacctcagcgtccccatcatgatccccctcctcctggacggctggatcctgttccgcgctaggtaaagcggcgtgccgagccacttgagggtcagacgcgtcggccatacgcgttgtctttttagtatgagccatcattctatggctggacaaaagatttgagggaatatgtctttcaatgaaagaaggtggactagaacagagacgaggatggtcctcgtgcaagagttgaagcaagtcctggtcaattcaatgttcgctctcccaaaactcaccggggcacatacaaaaaagaaaacacacaagatgagtgtttggtcagaatatttgacaataaaacaagaaaatatgccgaccaggagtactcaacagattaaagaataagaatgttcaaag

SEQ ID NO: 346146 - DNA, 914 bp, Cannabis indica
agtctgcatcactgaagcattctattgctgttcttccttgttgttgcttgtatttgagtcctaatttacttgtccaaattaagtaccttagaagccacttcatagcaagccaatgtgtcttaccagggtttgtcatgaatctgctaagtacactaatggcataagcaacgtcaggtcttgtgcttaccattaggtacataacagatccaatggcattagcatagggtatcttactcatttcctcattttctgccttactttctggacattgtttcttagacaatgtgtactgtgtagttataggttggctagcaattttagatcctttcattgagaatttctcaattatcgtgtgaatgtagtcttcctgagttagggtaagtgtcccttctgctctatttcttttaatagtaattcctagtatcttagttgcttctcctaggtccttcatttcaaactcagtcttgagtaagcccttcatagtgtttactctagctctttctttactgattataagcatatcatctacatatagaagtagatatatgactttattaatatcagtccctttatagtacacacagtgatcataaatagctcctagagaaacccaattttagcataaatccatcaaatccttttgttccattgtctcggtgattgtttcaaccaatatagtgactttactagcttgcaaacatagctttccttccccctttctgtataacctttaggttgcctcatgtagatctcttcttcaagttctccatgtagaaaggctgtagtaacatccatctggtctatttccatgttgtattgagtagctagacttagcataatccttatagtcttgtattttgcaacaggtgcaaatcttcattaaaatcaataccttccttctgtgtaaatccttt

SEQ ID NO: 346147 - DNA, 460 bp, Cannabis indica
gaaaggaggtttgcaatatgtcatagtcgtagttgactacttcaccaagtggacagaagttgaacccctagcaacaataacttctaagaaactccttgactttattgtcaagaacatcatatgtcgatttggattgccacaaaacattatgtcaaacaatgggtaacagtttgacagtgacatgtgcaatgacttctacaacagacacgacatcatcaaaagcttctctgtcgttgctcatcctcaaatgaatgggcaggtggaatgtaaagaccgcttagtttaatttggaaattagcagttaatcacgtttaattatgaaattatttatagctatttaaataatttattatactgttattattgaattcaaaaatgcatttttatgtcatgcagtagtttgcataattttgcattccggtgcccagtattttggaacccggtgtttggctcagtagaa

SEQ ID NO: 346148 - DNA, 1029 bp, Cannabis indica
ggccaagactcccttttgttgcccctctgcggagctttccctttcgggaaatctgagcggacttttcgcgaatcctgcacccttttctttttcccaggagtgaaatagggtttttttcctggtttccttcagagggataccttatagggctaggttccctagacttttgcttttgggcacttggtgaggactcccctggtgtttctccaagtccggtgagaatggctttatgatgcacatggattcctgccgcctcaatggctttctgcatggcaagcatcacctcttgcatctttttgttttgttctttttgggctatgatttcagcttcgtgatgagcaaccttttgtctcaagagcactagttctatgtaactaccttcttcataggcgtcttactcatcaaagtttccttcgtattcatcgtcgtgggttccttctccttcctcagagcccacgttccctcttgaggccgcctcctcatcgtcgggatctatggcgtcttgaggaggacggggttgacgcgtgttgcgagtctccaccattattgttttagcttacaatactgctatctacttgtacacgcttcctttagctctcaatgaaagtaccaaaatgttgaccgaggttttcggcaaccaatataataatatttaagaaagctgtaagaagtttaatgcatgagatctttacgtggttggggcattaatgagccttagtccacgagtctttagtatttaagagagtatttatacagagaatgttcttggtgacttttctatttagttcttacgaaacccagaattctcgacccttgccttagtgtgtttggggggtatttatactgttttctctggggtaatccctagaattctcccatatatatttctgtgtaactttagtaggggcatgcattcttagctcatgaaaaataggaaatgtatggtctgtcccctaggtatttcaggggttagatagatatactcctttatcccttcttgactgatgtgatccctcataaagtagttgt

SEQ ID NO: 346149 - DNA, 788 bp, Cannabis indica
gtgccaattttgggataacagtttacaatgtctataattggtaagattacacattacatatatagagtacactgattgaggaatttggacagcttgccatatctctgttatacgatcccagatttatagggattgcttttgtgcttcacgatgcaaatgttaaagttgctaagtgttgatatgttgttcggattgtccactgctcggttgggaggacctcatccgtacaggtatacacggtgctcggctcggaacatccccttcaggcagatatggggaatcacttccacgtgtcaccagcatgaaatgccacgtcagagtgtgaaaattgggataacaatattgatgctgaaatctggacacaaatctctgagctaaacccactcgctagattagcgagaatgaattataagtaaagtatatatatgagagacacaaggaatttatagtagttcactccctgtatcgcgacagcaatggagttacgtgtactttgagttttatttctcacgagatggacaatgaaaaatggtaattttggataccctaatttctagagagagatgctctaaccttatgactattttctgaacttagaaaatgagctagtggagctctcctttataggggaaagaatcctattaatggcaataaataatccaaaaatatggaaaatatattaggtatttcgccatagatggtgatctaacggtggaattaactatagaagtcggtcgtcaatttttagagcttgagtcgcgtctgtgggacccgtcttcgggtaagct

SEQ ID NO: 346150 - DNA, 644 bp, Cannabis indica
acacccggacctgaacgtagtccgaaccaaaagtagacctgaacccgtaccttgtgacctgaaattggaaccaaaacgggaagttgacctggactggaattaggacttggacttcgaatcataactgaaattggacctcaatccagaaccgtaactgcaccaggaaccggactccaaatcagagctagacccgaattggaagctagacccagatcccaactcaaacctggactcaggacccgaaccttaaacccaagcatagaaccagactagggacacaaaacaagggttgggacctagaaccgcaccccagtctcgatcccgaacccaaactcagaaatgggacctgggacatgaaccagaaccagactgagtcccgtgacagtgatccggatcttgactcaggaatcggttaacggggcctggaacagaccagtagtcggtgtctagattttggactcagactaggaccagaaccaagctgaagatccaaacccgaaccaagacctgcacgtgggacccaaaattagaacctgaacaagaatcgccgaactatgaccctagaacaagactcgaaccgtgaccaggacccggacccagacgtagaaccgaacatatacctagcctcaaacccaaattgagac

SEQ ID NO: 346151 - DNA, 637 bp, Cannabis indica
ttggcaaatcggtttaaagaggttttgccagtgatgatctcaaatcatcaaagcgcttttctaccgggccaattaatttcggataacattatggtagcttttgagattatgcattatctgaagcggaagcgagtagggaaggaggggtttatggcgattaaacttgacatgagtaaagcatacgaccgagttgagtggattttcatcgagaacgtgttgattcgtatgggtttcgaccaacattgggttcacttgattatgttctgtgtgactacggtttcgtataatgtaactcatggaggtcatttaacggggcctattaatcctagcaaaaggttgcgtcaaggagatccactatctccttatttgttttttatttgtgcggagggtctctcattattgttaaagcattatgagaggcatcattggttgactggttgtcgagttgcacggggcgctcctatggtgtctcatatgctctttgcggatgacagctatgtcttctgtaaggccaatgagaatgaagctcaaagtgtgttacggcttttgcatacttatgagcttgcttcgggtcagcgggtaagttttgctaagtcctctattttctttagcaagaatatatgttgggttttatgcc

SEQ ID NO: 346152 - DNA, 678 bp, Cannabis indica
ccttgatatcttagaataattatggaaatttatatcctttactaacttttccaaatttttggttcaaattgtatatgatgggtttgtggcttactgttgtcttcttggggttgtgccacttttttaagaaagtaaatgtttttaaaaaagttagatttgaaggtttttgtcaaatttttgtgacagtttatacttttttatttttatttattattttcaaatacaaaaaaagtgttaaatcatttattttatcccactcccccacatatactgttcatcttcttcttcttttagtacatatatgtattttatttctctctctaactctttttgtgggttagtatctcttttatatatgtattctctttacatgtgtttagtttattaatgacttatatcacttttttaataattagttttttacttaaatttgaaagtgggcacaacccacccacgtgatccccattcacaagaatttaaatatgtattttatttctctctctatctctttttgtgggttgatatctatagaaaatttattgagattggtgtttaagataaagaccatcaacaaagactttacataaaatccttctccccactcttcactatttcaaaaacttacaaagctcactcatttcattcatttttttacttgggttttgagagagaaaagca

SEQ ID NO: 346153 - DNA, 589 bp, Cannabis indica
taatcaaattgcgagcgcaattttctgattatacaatcgagagagttaggcttgacaatgctggtatatttacatctcaagcattcaattattattgcatgtcaattggtgtttctattgagcattctgttgctcatgtacatactcaaaacagtttggctgaatcattgatagaaacctacaacttgttgctagaccgctaataatgaggacaaaacttcttgtagaagtatggggtcatgcaatcttacaggctgcaatgttaattcacataagaccaagtgcatatcataagtattccccattacaacttgcacttggtcaagaacctaacatttctcacttaagaatctttggttgtactgtatatgtttccattgctccaccacaacgcacaaagatgggccctcaaaggaggttgggaacatacgttggatttgaatctccttccattatcaaataaccatataaaaattcaagatgagggaaacactctagaacctttaacaggtgatattttcaatgcacgttttgttgattgtcactttaatgatgaacttttcccaacattagggagagaaaagaaaaa

SEQ ID NO: 346154 - DNA, 517 bp, Cannabis indica
taaagcaatttaaagacacaagaattttatagtggttcagccccaagtagttcaataatagcctaatccttgttatttgtattaacttaagaataaggagaaaggttccttttcttatagctcttacaacaggatctctgaatatgaattcttagataaaatctctcgaccataatgtttttgaccctttgcccaatgaatatgcatcactatttatagggcgatgagcttggagaggaagtatttttcttcttgttacaattgatataagaagaaagattgcatagtaaatacagaatacactgattgtgggatttggacagcttgccatatctctgtaatctgatccccaagttttagggatttccttgatgactcacgatgcgaaagctgaattcactaagtgtttatcgttctgcacgagttgcttactgcttcgtctttagtaagcatacgaggtgtccagttcggcctgtatcttgcgagcagatacccggagtcaattccacgtgtcacc

SEQ ID NO: 346155 - DNA, 1019 bp, Cannabis indica
gtagggtgccttagcattagggcgttacaagctaactttaaaagatatgttcacaagtactaaccaaccacaactccccctgaaaaaagggtccagagttgggcaaaaacaaattaaaaataaatatctctccccctttttgtttatcggagtgccaaagcaaaaacaaagaaagaaaaatagagataagttcaatcaaaagcaaagaaaaaacaacttagtctcggtagagtttaaccaaagaagtcaattgcttggacatctcatgctgaacttcttccattgctgcaaggcgattatgcacattctgaacttcggacttgacttccaggagttctgctgcagcagaacttgaacttgcagcagcagtagcagcagcagcaccagcctttggccgtttttgaaacacaccatcaaagtattcagagggttggaatgtaggtccactgataggaggctcaagtgtttcatgtgattgggccacattcttctgagaagataaaaccttatagattagatttggaaacacaagtttaaaggttggctttttacctcttcggaaggagacaatctggttcagaatgtgggaggccaaatcaattgaagttccagaagtgatgcggtataagagtgaagccacatcttgagacactacggtcttgtttgaattaggaacccaattgcttaaagcaaaccgcataagagatgcatgagcaaaagtgaggtgagtgattcgaagactctcccctggtttcaattctgaacgagcacccgtgagttcagagagcatcaactcacgatccatggacatcactgcattggagacattctcgggcaattgcaaagcttgagcaatatccttttcaagaaaaagagaaccaatgacccctaacataaaacctcttcgatatagtctagaattctcatcaaggaaatcatcagtgagattagcataaaaatccttaacaatgtttgcaatgtatccaatgaaaccagtgagagttgtttcttcattgatg

SEQ ID NO: 346156 - DNA, 811 bp, Cannabis indica
ttgttgattatcatgccagtctaaatccagtgaatcaataaacacgggaattaaacttttgaacatataatcatgattatattctactgtgctgacgacactataatcatgaacaaataatatgtatatatttacatatgttctgtactttatagaaaatatgcattaaatataatcatgaagtaaatcatgtgaaccatgcaacatagaatgagttttgatctttattaattagtaatctgattatattgaaatgggttttatttaaggtacaaaacccaacaaacttccacttgcactaatgtaaaataaaaagtgcattttaattgatcttagcaccttgatatcaagatcaagtgtagtatgtagtaatctctcagtaataggatctgacaagttgtatacaatacaacctttcatccaccattacatatccttaatcgaaaatcctttgatattgtgaaattcctttcaatatgtctactcctcttgggatactagattctatactttttggcaactacttcagtgttagtcaggaagtaacactagtagttaataaaatgttggtacaatgcgaaaaactatatagaactttccacaggctgaataagtatctttcatgcaactttaacattcagtctaactggtagagttagagactcggataggtttttacacttctccaaaatcactgctccactcccagagtaatcaccatctcattagtagactttctagcattaatgcaagtttagaaacttgatttggtgtagtctaagagtattaaaataccacacttatcgctaac

SEQ ID NO: 346157 - DNA, 914 bp, Cannabis indica
aaattataattttcgtgactaattaatacttttacctacggaccttttagtcacaagataggaataataatttataattagtcacaattttttttatttttaatcacaaattttgttgtgactaaaaataagattttttgtagtgatcaaatagatacccaactttagccctatgaatagcgtaaatcattgtggcctacttactaattatgtagatgtgggaaaattacaactaaaattttagaatcaaatcaactaaactttaagcaattgaacaattagcaatgacaagatttaacaaatcacaaacaatgatcaaaggaaaaaacagagatgacagaagtatggaaaaccagaaaataattatagcaataaaatgacaattctccagaaatacaagcttctatagagtaagtttgttatctctcaatgataaactttcttaaatattaagtttttcttctatgggtgtttgcggtgcgggtggtgcaatttttgataattttttcaaaccaattcgcacatgcaatttttttaatttcctaaaccgtacctgcaccgcgaaactacaaaattgcgcaaaccgcaccgcaaaaaatagtgcggtgtggtacagtttttgcggtttggactatcaccaataattaaactatcacaaatacaacaaagcttgagctacactaatcaaaaatacaataaggcttgaaaataaatatgaaaaaaaattaagttttaataatacaataattagtaggctttgggttggacattcacatatcggacctaaataaatataaaaattgatatttttataatgtgtggtgcggtgcggtttgaactgcatattaacaattgaaaactacaaaccgcaccacattgcgcgagttaagaaaaattcaaaccgcgagcgcacc

SEQ ID NO: 346158 - DNA, 760 bp, Cannabis indica
ttttttttaattccccaatattaagagggattaaaaataatgtgtttggagggagatcttctccttctatctctcctctcccttctctccctcttgccaaacaataaattttccaatcgctccatccctctccctccacccctccccctccctccttctttcccctctaccaaacatagtgttaatcttaaactctctaaaccaaaactcacaacataaaatttttatgtcaaaccaaacactagatacaaaataattggaatgacatttaaggttacaaatttaaatgcatacgtaggctacgaagaactactttaatatggttcttctttatataaataataaactctttctatatataactcatctcatataaaccattgattcaatttcttaccacttttttttttcagaccggtcactcacttaatataactcatttatttagtaaatttagatttttaggaactaacttatatgtgtgtcgagcaatatattcacacagtgagtaataatttatatccagagtaaatattatatactcacgtgctaatattttataattaagtaagacatcgtcttattatatactatcactacaataaattttatcaatattcgtaatattattagcgatgggcgaaattcgcccttaatagtagtagcattagcggtggaaccagaattcgccgctaattctatttatttattttaaaaaaaaaaaaaagaaaactattagcggtagactccgccgctaata

SEQ ID NO: 346159 - DNA, 919 bp, Cannabis indica
ttttgaattgagatcatagaacatgtagaaggtgatcaagcttacacatggaattaaacacaaatatagataatttcacaatcaagatggaggaatggaaattattcattaactaggcaaaactttaaacaacattcattatcctccctaaatgggaaatttaggtcataaaaataataaaaacatccatgattaattctgaaacaaaactagacataaaagataagtagagggtaaaagaaagaaactagatggagatatcgctcggggtcttcaagatcacttcctctgctctttcattcacttttcaggcctgttcttgcttgctttggccttctgagtcctgttccatatataggaatgaaatgtgtgcctgtaattggaaaaatatgaattaggtcaaaaatctcgatttctgtacctggtcgcgaccaacttaatgggtggtcgcgaccacaggcaaaactcgaaaactggagtttctgccaaatccccctagtcgcgaccatggtcgcgaccagataaaagggtcacgactaggcttccttctggtcgcgactactgactcccttttagcagctttggctgatttttcactagtttgtcctgtcttttcgtcaattgactgaatttgaactttaatgccccgagaacttgaaacaaggaaaatcaagcgtaaaaccgctccaaaagacaccaataactgagaaaattcttaactattagacccgaaacataggctaaatgtaacctaacaacctctataataaagaaaaagtaaaataaaaaatagataattattaatcaacaaaaaccatcaaaaacccatggaaaaagggtcctaaatgttgggattttataccttaaataaaactcatttcaatctaatctaattcgttatcaatgaaagattagaagt

SEQ ID NO: 346160 - DNA, 576 bp, Cannabis indica
accacccgcaccacgaacacccctactttatatactatataaatataccaaaagtatgggtaattaaatttcgataattaaaaatagacatataaaccttctttataataaaagataagcaatattaactacgaggtccccctgttttcaaaaatatttacaaactggtttgatagtgctttacaacataaactttgtattcccaaaatacatttaaaatagagcatcctgtttactgggtcgtgccactgcgactgatatgtacattgctgctacgacctcgaactaatggctactcaacctttgcttgccctttacctgcaccataaagcacccgtgagtcacagagactcagcaagaaaagtgaataaaataataaccagtcatattcagcaattcaatcttaaattaacttgcatacacatttacacaatattataaatataatcctggtactttataaagtacccctttaccactcgtgaaccacgagctgaatatgtcactattgttgcccgatgaagtaaacgataagtaaaaaaactatctgcggtttcaagagtaattacttgtaac

SEQ ID NO: 346161 - DNA, 1015 bp, Cannabis indica
aaaaattgggataacatttggcccccaattctatacgagacttctaaagttgcgtgtagacttcattcaagctacttctacctttgaatggggacacgtgtcaagcgtgactgtccgagactcgatgtgagggtgactgggcaacccttcagtttttggctaataaatgctctgacaattaatatttcgaaatccgattttctctcaccacgactgtcaactacacttgattattttttatttcccattttcacttttaaggagggaaactgaggcgtctgaggttcctttgaaatgatgacctcttttcgtgacttgcctataaataccaaccagcattggcacataaactcattttcactatccttcttatctaagtgagttcagagcgaagtgccttcatcaaaactgcttgttggattgacgttgctcaaacctagatatctgactcttgaataagttttcgatttcctttatgcttatttttgcatgtttgcatttcgaatgtaccttcgactttgttgtagaaaatatttaggaaaccctaggttcagaaactctgcgattcttctttgtcatagcttcatgcgattttacagtccataatgctcgttttctgaagtgcgtaaagtctgtctttcgtctttcttattctatgcttcatgaaattttttgccctaactcaagaaaatttcaaacttcttgtgttttgacttttctttgaaccttcttgttcttgaatctgttgagtactcctggtcggcatatttgcttgtttatcgttcgatattctgaccaaacattcatcttgtgtgttgtcttttgtagatgaactcaggtgagttttgggagaatgaaaatcggatcgaccaggacctgcttcaacttttgcacgaggatcatcctcatctttgttctagcccaccttcctctagtgaaggacattctccaaaccttatacccagccatcgaatgatggctcgtacaagaaaaataacacgtctggctgacgcat

SEQ ID NO: 346162 - DNA, 654 bp, Cannabis indica
aaaataaatgtatagtatatgcctttcaagattaaaatagttatagtttaaattaatgttaaaaaaaatataaattgaataaacattaaagtattaaaaaaaacatttttcaaaaaatacaataaaaatagtatactcatatgtaaattctatatttcaacttcaatattcaaataaaattataattatcaactatgattgaggaccaacttgttacgtgtgggcatgcactcaatcactaatggctgaatatattttgtgaagaaaggcttaggtatttcgaaaattcaagaggaagaagaagaaggaagaggtttcatcagaaagctaggtttttagctttggaggcattagttggatgatgagaccttagctatccttttgtactaatttccataaggttatggttgatttattttggaataacaaattgataaaaatagagtaaaatagcaccatatggccggccacatattgggccccactcaagtttggtttttgccatttttctcaactattttatctacttttcacaaatactactttttgcaacttcaaccctataaatgccaaaactattgatttaataattaaaataattattaaatgaaattttcatttataatatttattaattagactccacaaagtctc

SEQ ID NO: 346163 - DNA, 1324 bp, Cannabis indica
agaattagagaaagagatccaggtttcagatattgataatgctctgctacagaaaggaaatgaagggctagatatctgaacggaaggagtcatattattttgctgcacccaatgtaaggtttactaaactttatatgtgtttatttcatcgttttagaaagttcatattgagggtattaatcaacatacttgtgagtagatctaagatcctggtaaaataatttccaacaataatcagctgcccatacacctaaccataacccaactgaattaggaacgttcttcacaaagtatgactaaccgcgaatctagcgtatactcagtactctaatcgtactaatgtggtagtagttaaatcttactatcttatagcctatcatatatctgatggcatctcggtgcaactctatgtacacctcactgttgccctgatatgataatttgacggctatagatttgcctaacatatatctgatttgtcaatctgacggcaactaacatgcacgctaaacatgtataaacatatgcatgacattatactaatcttaccttgatttcgaattcaagtgtgccggccaatttgagtggaacatctgctcggcgaattacaggctcctaaatcacatcaataacagcactggtaagtgacacgctaaattactttccgaggacttaaacttgaaactaaaagtttccctatcgataaataacatggcaataccctaaataacacaaaaataggaaaaactagggttcccaaaatttccccaaccggaatttcgtttcctacaagcccatctgaatcgaaatttcggttcagtgcaggaataaccaaaaatttccaaactcattcaaatcaaccccaatctctaccaaacactcgagacctactatttagatcataaaaaacatattcaaaacaacaaaacacccctacaagctctgaatcaaaacttgccattaaagctccaagtttgagttctaaactcaaaactttgttaaactactcaacaatcactaaaacatgctcaaatcaacataaccaaacataaacaagcttctaaaaacaaacccacacacaaatagcagctacataactcaattcctaaaaacatgcaaaattcaaaacttcaaactcaagaaaactatgaggagttactagaagctcacttaaagcttgaaaccaccaacaccttgctgaattaagcttgaaatgaagaagaaaattgacaaaccctagctgccgctaggtggattcgaaagagagacagagagagagtttgagaggaaatgtaatttttttgtctaaattttgatttttcat

SEQ ID NO: 346164 - DNA, 1175 bp, Cannabis indica
ttcctactgcatagcatatgtcaagtctagtgcataacattacatacattagactcccaaccgctgaagcataaggaacccttctcatgtcctctatttcttgaggatcactaggagactgttccttagataggcggatacaaaatctacaaggcatatgtgcccctttggcatttgtcatcgagaatctctcgaaaaccttatcaatgtaagttgtttgagagagaaagggatttgttcttccggtttcttataatctgaataccaaaaacataagtagcttcacccaaatctttcatttcgaatttagtgtcaagccattccttgatgtcagtcattttcttgatattgttaccaataatcaaaatgtcatgaacataaaggactaggaatactaccactagattatccttgagttggtaaacacaaggttcatcttcattttggtgaaagccgtaagttttgaatatttcatcaaaccttttattccaagagcgagaagcttgcttaagtccataaatggacctattgagtttataaactttctcttcctgccctggaagaacatagccttctcgttgctccatatagatgcttcctttaagaattccattaaggaaagttgtctcgacatccatttgccaaatttcataattgaaagcggcacctatggagagaagaattctgattgatttgagcatggcgaccagactaaaagtttcctcatagtccacacattctctttgggtataacccttagcgactagtctagctttaaaagtttcgacttcgccaccagtacctcttttcttcttgtagacccacttacatcaaattggacgataatcatcaagtgcgtctacatattcccagactttgttctttttcatggaatccatttttaaatccatgccggctgaccattatttctgttttggacttgccattgcctatttataggttaatggattgtcatcgatatcgtcaccaacgaccatattgatttcaccatccaagccataacgagatggttttgtggaaaccctcccactacgatgaggagtcgtgactttcttaacaagaatattagtggtagttttcttggttgtatctgttggaaattattttaccaagatcttagatctactcacaagtatgttgattaacaccctaaa

SEQ ID NO: 346165 - DNA, 740 bp, Cannabis indica
tcatagatctcaaataaagaattggaggggccgtgtcaatctcttaaaatgataaacatgaattctttttgtaactattattttctattattaaataataataataataataatttttaaaactgggtactttgggaatattgaaattttacataaattgagggtactaaaatagtagtttttgtaaataaagggtactaattgttcattatctaaaacagagagtaccaagtatgtattttaataaaacaaagggtaccatatgagtatttacccttttttatgccatatttttgtaaaaaaaaaaaagtagaatcccatatttgtaaaacaacaataagttttgccgaaaaagttgctgaaaaagtcaccggcaccggaaaagtcgccagaaaaatcacggtcaccggaaaagtcaatgtggctggaaagtcaacggaaaagtcaatgtcgctgaaaaagtcaccaaagtaaatatctcatatataactaaaaatataaccggttatatgaataaaaactaataactcgaaccagttataattgaaatataacaagttctgtaacataataaataaataaatataaataacataaaatacctcaaaccagttctataatagtgttataatgaataaaaataaataacactaaagagctaaaactggttatcactaaaatagaaccagttatataacataatgaatacaaacaagtaacacgcaataactcaaactgat

SEQ ID NO: 346166 - DNA, 1941 bp, Cannabis indica
gtcaatttcatggagaaataacctgcatttacagtattatgtgttggagtttattttaccaggatcttagatatactcacaagtatgttgaacaacatcctaaatatgaactttctaaaacgacaataaacacatataaagtttattggaagaggaaaagagagagaggggggtcgacaatagagagaaagtgagaggctcaattttctgaaaggcaatctcttgaattactgaataattcttattttggtgtgagccatcactttctatttataggcaaccactaggtttaggttagtaataattggcaattaaaataatgaaaatattaattggaaaaaccctcttcaagtggtcggccatggtgttaatgggccccacttggaatttttctgttttaacaattttcatttctattttttcaaaaacgccaatttttcaattctaagcatttaaatgccaaaactaattatttaataactaaaatagattattaaataatattgtcatttaatataactattaattagatatacagagtctcttaattaataaacaaacctagaatctcttttctttacaatttcgcccatgcttagtgaaaattcataaactagacatagtctaatttttgaattataattgattaatcacaaatcaattatctgagtcttacaagaagtatggtctcaactagaatggggaccacgggcctatatttctgagcttccaataagctgatcaagaatttaccaagtaaattcactagcttattaattcctcgttgcatccactcttggaacttagaattgcactcgcagtcatatagaacgctctatatgttccacgatatagatacgctatcacatttaaccatcgttataatctaaataatcaaagatcctctatatagatgatttacacagagtaggaactaatttaccgtttcacccctcaatgtattttgatccttaaaacacttagctacctgtaaatgatatttaagtgaactaaaatataatcacagaaataagagctcttccaaaacactgatgaaacagggacttagccttttgattcatataatcacaatcacattccactgtgttgacaaccctgtaattgtgtatgactacatgttctggatctaacagattttgtgtacataaattaaaccataaacataaaaaatacatgttgacataaatcacttcaaatctcttaaattgataactaatcagattagattgtaataggttttatttagggcacaaaattcaacattatgttaaggccgataacaattagagaggtgataataaccaagacttgctacctccgccggtagtcagacatttgcaagtcatcattgaaggcccgcacataactagagattcaggcaaagatcgggagaggtatgcccaaacagtacagcacgagcaagaagaagtgctattggtcgtagaagaaaggaagcctaaaatcccacggacaggagagcccactataacattcaacgaagaagatgttgtcaagatcagattcccacacaacgacccgctagtcattgaggtccagatagccaacaagatggtggccagaaccatgataaataatggaacctcttccaacatcttattcaagactgcctatggaaagatggggctccagctcaaagatctaaccccctgtctcctacctgtgtatggtttctccggtcaaggagtcgcacctctaggcaaaattcgcctacccctcactgttggaaagctccgactaacataactataatggcacaatttctagtattacgaaattccatcagccttcaacgtcatgcaaggccgaccaccctatatgacttaaaggcagttacgtcgatattccattcatgcctaaagttcccaacaaagaatgcgtagggtgtctgagaggaaacca

SEQ ID NO: 346167 - DNA, 806 bp, Cannabis indica
ataaattgtgatttttgtgactaatatataccttttgctacatatattttattaacaacataaaaataataatttataattagtcacaattttattactttttgtcacaaattttattgtgattaaaagtaagattttttttgtaatatttgtattattctagtcacaatgaataatttatgcacgatacaatatctaaaatattgttaattaacctatcgtacttaagggtctctatcttcataaagtatataatataaatttttttgagagaattactaaaataccattgtaaccaatgatttgcagacaggtctaggaaactacaggagtagtttttgaaagcctagataacaaaaacacattgggccttattaccctaaaaaagtcagagaaaatcatcatcattttgttctgaatatcttgtcacatatgtacatgaatgaagataagaatcataacatcattgttgcaatcagactccccaaagtttcctcttttatatatttgtaccaccacaaggagttgtttggcatttataaagttaggtatggcaatgaagactctgctttttcaccattctcaatttctatatattcaacttaattatatattattgtatatatactatttaaattaattgtcggtccctatatcgaccctaaaaatttaaactactattttcaaacacatacaatttagccatgattcattatttatttatttacttctaattaagaaatgagaggaggggtcttccgaccgctcctctctcgtggtgcaacgatatgagtacgtttccactc

SEQ ID NO: 346168 - DNA, 723 bp, Cannabis indica
tggtttgatatttttaaaattaatatttatagttaaatttatttattacccattaataggtaatatccattaagaagtattcaatatatatatataacatgcaaatttaattgcacacataaacaaaaaaaaaggaaaattttatctacaccccggaaattctaaagacaccctaatttaataatttttattttatataaaaattcatgtgtactaagctttcttaactttttcttccaattcatattcttgaaaaatatacatatcaaataaaaataaattatattttaaatattatgacaaaaaattaaaataaaaaattatatgaaattttcttaggaaaaaataaaaaatatatatgcatcagttagaaaaaattatgaaaatgaaatcaaaataatattgaaattaacataaaataatgtgaaaaaattaaaaaaaaaatattaagagtaatttttaaaaattacttaagtttatattttttttcaataataggatgtatatatcattttatggggtacaaatagaactaaaaaaaaaaccttaaaaatatgagataaaattatcataaataagaagaaataccatagaaaacttaaaaacgcatacataaatttttcttctacataatcaaaactaatttcttgatgaaaaaaccggttcttgatgaagtaaattagtttcttaatcaaaaaacactagcaaaaaaccttattttta

SEQ ID NO: 346169 - DNA, 578 bp, Cannabis indica
tggtacatggattttgtatgctatggtttatatatattctatattactttcagtaattaatgaaatataaagttatatacaaatatttaacaaactgactaattcttttttttatgaacaaatattaaatcctaaaggataacaactatcaatttctaaaaaacaacaatcacaagaaaatgtggctgttgaaaaataggcataacgttgtttcttatgtctaacattttctaaatatgtttaggtctacgatatttttcttcaacgaactaaatttatttcttcatcttattttttcattttttttacagaaaaaaaagtgaaagggatatactcaagaacatgggtacaaaaaggcaagaaaaaagaggacaaccaacaggcaggtcccttgaagagaaagaagaagaattaggatatgatgcctttaatgataataatttgtatttaatatttcatgcgaatttttaaacttttgtaatagatattttaatacttaaatgtgtcaaatatattgtgatatccagattaaaattggtattcaaaatttattgaggtaataatcgtgttaaaataat

SEQ ID NO: 346170 - DNA, 520 bp, Cannabis indica
catatggggttccatatgccttctccgggagctatgtcctggaagctacctttcagcataaagacttagcaaatattttggattgtacattgcttgatccacgtgtccttattcggttggtccacgtatattgggaaaaatcaggggcaacaattatgttacagttgagttattatatatttatttatttattgtaatttagttgtttaagaaaaattaaatatatatatatgtttagtttttaatgaatacatatattaagattgttgttgtgctaagattatttgtgtttttcaagttaacaccacatgttgatgtctaataaatttttatattaaaatagggttgttatctaattgtttgctcgttattatttagttgtttaactatgtaaaaaaattaaatgaatatatgtttacttttctgtgggtatatattttttttaagttaatgtactagtatcttgcagttgcttttactttttgtttttaagattatttatcttgtttttttttttttt

SEQ ID NO: 346171 - DNA, 535 bp, Cannabis indica
tctaaaaataaaccttccaattgcaactcctgcctcttctcattagttggacgaatgttcttaatcttcaactgaaaaatagaaacaaaaaacaaaacatggaacaaaagaaaattaaaaaaacaaagattaataaacttgcaccaaacaataataaaatagtaaagaaactgaaaatcacattgttcaacgactaatcaaaaatcttgcctttcaagtttctaaaagttggatttttggtcccaatatcgttggtccaattaagaattcttggaatcctgaatgaaactcttttacaaaaggtatttaccatcgcatgacaacattcataaaaccaaactatgaacacccaaggacagctcaatgctctataccaccatcataggactgacctcccttctcctcctttttctttttcattttaatcccatgctctcctcccttaaaagaatcaatagtcaattcaaacgactccctacccaacaatactcatcccatcgaccgctgtcaaggacatctagattaaacctagaaa

SEQ ID NO: 346172 - DNA, 1280 bp, Cannabis indica
attattgctttattatatattcattacgacatatcgtttatcgcttatcaaaaagactcattgtcgttggctaaaagcgaagtcaacatatatataaatataaactttcatcaatcagcgtgaaagtaaaaattttaataataataatataatattaataatataataatataatattaataaaaactttattattaatagttatcttattatttcttagtcactaagaaaattctatttttagggtaattagccaactctgagtaccccaaaatactctggtatttctaaagtcaacttatcccaataatctcatcaatatttctaactaaaactgttgtgacatttttggcctccaatcgggtctttagagtcgccgaacgtgaaaatatttttattttacaaataactcatattatatccacgcatttcaaataaatctccgtaattaacaaattacgcttatttatccacttatcagatcttcagggtcaccaaactgaaaatatttttattccacatatagctcatattacattcacacatgctatataaatctccgtaattaataaattacgcttatttactcacttatagcaaaatttaaattttatgctgaaatagattagtggattatttattacctaattaacccataatataaatataaaccctaattattaactatttggcttatcgagatattacagtttcatcctaggaagctagccagttcatgactgggtttagtaaccctgacaagttcttggttgagtcatgggaccctggccaaccttctcaaggcttgggaaccttggtcggcctaggccttggttccaagcgggtggcaagttttttgtcctcttttgacctcaacaagaattctgtcatggccttgtaggcatatacaaccgtagtcttatacattgtttccttagaaactttgtatgaaacttaatggtgagtctattaaagtcgaatgctcaactaaagaatcaacatttgtctaagttgttacacttggaaccgtacttcgctgatacccagccttgtacaatgacattatctactaagtacttttgggtacgggtgcccagagttttgtctatggtttagaacctgccagaactctaccttgccttagagatttaacccggtaagaggttcctataggaactctatccagttcttctctggctgtacgattcttgcggggccttggccttatgcatttgaactgattttttattcatattaagccttgaggctttcatgttctt

SEQ ID NO: 346173 - DNA, 720 bp, Cannabis indica
cggtcgtcgatggctgcctgttgagccttcaacgatcctatctctctatccctccattcggcgaactggcgcctttgctcttcgaacgcaaggttcactgcaacacagagctcttcctaatcatgatgcaaggtgatagtatgaccttgcatgagcccaagagcattacagaggttctagatcttagtgtcatctccaatagttgtctagacatttgtgtctgaagggatcccagtgctgggagtacccaattcggctactgaactagtgtttcaagtcccttgcacaccgagtgtgattcaagataaaggagatgtcacaccttcacccgtggtaggtagttgggtgtttggttgttcaagatttgtggctagtgggacccttgcattctctgaagtctacagtgtgggatctgacaccagtggatccacctgatcgactacgcctctacgagtttgtaccaccatagtgtttctaatcaaactataagcaaagagccaacttagattattgctctcaattagagcacaaaaatgttgacctcgcttttagccaacgacaatgagtcaaatagtaagcgatagaaaatgtaattaacatatagtacaagcgaataaataataaagaacacaaggttttaaacagtttcagccccgtcagttcggtaatagcctactccccttgatttttattaacccaagaacaaagaacacaatgttt

SEQ ID NO: 346174 - DNA, 468 bp, Cannabis indica
tactaatttaatttaacctttctttctactgcccaattttttattattttcttctgagtaaggcacgagatatagccatggaaacactcagcatttctgcatttcatatgggtgtttgcgtgtaaatcgtttatgtcttaatgacttaatctaataattttcgtctccaattcactattcactcttaatacgtaaacttgttcagcaaacggaagaaatcaatggtcaactaaatatgtttgaccatggactacagcaaatttctctgccagttaccatttacaactcaaaaggttaaagtcgaatgttaataatccttgactagggagaattatcgttttcatttttggcccttcaataagatactaattaagctatcaatcacgattattcacaaatggcaagtacagcgtgtgcaaatgcacaaaataaccactctttggacctgtatgaactaggaatacaatg

SEQ ID NO: 346175 - DNA, 727 bp, Cannabis indica
atattgaaatattattccaatgaaattaattttttatcattttggtaaattgtcacgtggcaaatcttaattggtcatgtcattaaatttttatttttttttaaaaaaattaatttaaatataataagaaaataactagttaggtacctacaagagttccaaacttaagtattattacaaacaaaaattaaacttaagtatttatttataaccggaagttaaacttaagtatttataccgtaaattattctatattttatttataatattgccattaacaatttttcaaattaaaacccaattacaaatgttgtgttaaatataacatttgttcattttttttaccaaatttagtacaatatttatattttgccttagattagatggagatggtctactgtttccccatacacatcaactctcacaaagtactccaatactcttacacactctaacgaatatctctcttattttattacaagcctctttctctcaatatggtactgatcataaaaatgaattctaatatttaaccttacatatgaactaattaatgaaacacttataataatggcggtttagaatttgaggaataaggtgaatggggttccatctcaaaccaattgacaatgggaggagtagtccattcctcttatatattctattatctttccacacattggcaatgtaggactctctaacatcccccctcaagatggtagctatt

SEQ ID NO: 346176 - DNA, 925 bp, Cannabis indica
tctttgtccaatagccttcgtttttgttgaactggccggaagttgggatcgatattcagaacatgtgaaataatagaaggatcaattctgaccatattcgcatgtgactaggcaaaaacgtccaggtttgctctcagaaattttatcaattctgattttacttcgagcaacaaaccttttctgatctttagctttctagtcgggatagctggatcgatctcgatctcttcctaattcctctgtaggtccaacatgctgcttggatccccaagtcgaggatccacatcttcatccccgccttgggaagttccctacttgggaatgtgttttcccttgtctgtgctctgggtggaggatacttcctttttagccttggccactgcaaggttataacattcccgtgcaaactgctggtttactctcaaacaccctaccccattctttgttgggaactgcagacacgagtgaaatattgatgtgacagccttttaagtcatacaaggcccgccgaccaagcattacgttaaaatctgaaggaacaaccaatattaggaactgtgccataatagtcatgctcgtcggagcttgtccaacagtgaggggtagacgaatttgtcctagaggtgcaactccttgacaggagaaaccatagacaagctggaggcatggggttagatctttgagttggagtcccatcttttcataagcagtgttgaaccaaatgttggaagaagctccattttcgatcatggttctagccaccatttgattggctatctagacttcctatgaccagcctgtcgttgtgcataaatttaattttgacagtgtcttcatcattgaaggatatggtcagctctcctgctcgtggaactttgggcttcctttcttccacgaccaagataacttctgttggaaattattt

SEQ ID NO: 346177 - DNA, 504 bp, Cannabis indica
actttaaatcatgttaacatacttatactttatgaagcaagcagagaatgtgtgggagtgagatcattgacatagtatatttagaaaacatatggattgcactctataacgaagtatcaacacaaacaatactctataaagataataccgcttgcatcgctcaactaaaaacagagtacattaaatgagatagaattaagacacatttcaccaaattcttttttatacatttcaagagaatacatattggtgttcaacatattcaattaagtgtcaatcttgcagacttattcacaaagttattaccagcatcaacatttgagaagacgacatacaagattaaaattcttcgattagaaaatctccatgaatgcctgaatgatggggagttaatttatactgcactctttttctttttaccaaatttttttagcaagatttttaataataaagtttttatggacatccaaggaagaatgttatgaaatattatatatggatgtc

SEQ ID NO: 346178 - DNA, 527 bp, Cannabis indica
atctcgggtcaggtcctacgtccaagtcccagttcgaatccaggtctggtcttgcatcctggttcgggtccatgtccaagtctagtcccggctctcagtccggttcgggtatcgtgaaccaggttcgagattggggttgatcgcggatcttttgtaaatgttattctacaaattaatacgaactatttgttatgtattaaataataaaacttacattgtattcaaattttggttcgtagtaatagaactatttgttcgtattatttgtatataatacaatacggcccttatacgtcttaccaaacgagccctatatatattttcacataaagtataaagagacctgatttgctaacaggaatcagtgcatgatataaatatgaattaaaaatctatcgagtaagatgtaaaagagtagctatgtatggatttaattagatccttttatctctgtaagttattcttatcttgtaaatatttaatatgaatatgaaccagaaaaggttatggttgtaagctgattaata

SEQ ID NO: 346179 - DNA, 853 bp, Cannabis indica
tagaacctctattcaagaatatacttaggactaagcaaattatattctaattgagaggttataactaaataaaattgcactagaaaaaaattcaaaatataaaaaaatatcaatgtaacaacaatgacataaaacaatcattaatattatatcataatagaattatttttgagtaaatataatatttatacatgtattacaatttggaataaaattactaattctacataaataattttataaaatatatgtatatattttataaagatgtaattattcgtatatagaggtatactttgttaatacgggacttagaaattgtataactaattacaatttagaggttaattttatttataatatgtccaaattggagcttaatttttttataacaaattaaaggttattcttgaatagagtattcttaaatagagattctactctacgaaataaatagataattaggtcccataccatcaacaatataattatattctttcataattatcaagtatatatgaaagtacaagcatatataacttgttaatatgtatatctcatcttattaactaaagaaaatatatatatatattaattattctaacatatatttttgtttttttagtacaaatattcatagtcgaaaccaagggtattgagggaggattaaagcccaccctgagatttaaaaatatattaatatacaattgttattttcatatatacatagtaattaaatagaacaattggtttaaattcacatgagagatcatattttgaattttcttgtccctttttttacgtgtatttacattttatttattaaaaataacaaataaagtataaggttcaa

SEQ ID NO: 346180 - DNA, 1594 bp, Cannabis indica
ctgacaaagaatacacttgtgattacaagattcccaagtatacttcttggcagcaaataattgttccacccgaagaccaggcctggaatcgcttggcccaagcacaataccttcaaagccctgcccctcaggaatccagtgcaggaacatcctgaggtaatcaatgtggctagtcacctactgtacttagggttgagtgtgatacattacttacctttcaacactctcgtcttaatttttatacttggaattccattctcgtggaccgcattgctcataagtttgacagtttgtatcctagattctatgtccagatcaactgtcacgagtcattttatggtatagccgagcaatatggtaccatggaagatagggcaggtcacatagatgcgagttgggatttagaaccaatcgagccttttgataaattcaaaattacaggttgtagggattttagcgaatattatggtccttctaccccctcatctagtgatagctcgccttctagtgattttggtaaatcccttcggtggaaatttacagtcctcccttttttaaacatcttttataatgattgtaacacctcatctcgttttgcaaacatgggttacgaagacatcttggattgtaaggggaagaaaaggtcatccaaccctggaggccccattgccgctgaggtggttcctcccaagaaggaaagggaaaccaccgcttaaaagaagaagttaccggccgagcctattgatctcaaggttttggacaacgagattaaacaggaagttcctcctcccgtcattcctaaggctaatgcccttcatctcgaggtgactcccgctaccgcttctccgaatcaggccgtcgagaccctatcggtcgcagttggagaagctggctctgagtttgcccaggcatacggggtcgcttgttggcgcaaacttcaaactctcctacccccagattgggattttctcaatcttagggatccagaggagatgctttccaggaccttggattgtcacttcatggtatgtcggctttgttaatataattatactatctttttatacctcttttatactcatctatttgcaattctccaggcttcatttgcttccaatcgactactctctcagcgacttgagtatttgaagggcgagactcacaaattaatatcccaatgcaaggatgtgtgtgagcaacgacacaacgcccagcaggagattactcgccttaagtaggaagctgggaaagcgaaggagaaagcagagacagcaaggaaagaagccgagaaggtaaaagaggaggccgagaaggccctcaaagtccaagctgatgagtttaaggagaagcttgctgagaaacttttcgagaaagaaattgagatcgtagaacggtgcgataaagttggttttcgcactgtataccgagtctggctttggaaccctaacatggataccaacttcttggaggagaaggaagaggagactttagctctctgcgagaagaccaagatggaagaagacgacgacgaagttgaggaagaagaagaaattatgtccaagtctcccagcatgtagacttggtttatttatct

SEQ ID NO: 346181 - DNA, 523 bp, Cannabis indica
aaaaattggacagcatttcccctgtaatattaacctaaccatctgttatagcaaacaaataattcaaacaattcaaccaacacgcaataagttctcatccttatattaccgcaacacaatcaaattttcgcagaacctacttcactaaggcacacaagttagaaaccttccgttatcaccgcaacacacaattaatatcaaaacttacttcgctatggatgaatatttaggatattcaaactcctctaacatttgtataatattaattaacagaaaaaaattaatatgcacacgtacctcttctaaattaaaatgaccacgttaagtttgtaacgattcttgctagtaaccaaaacactaataataacattgaaaaaaacttattaaaataggtagtagaaatgacaatcatcatgatcaagctaatatcaataataataataataataataataatattaataataataataaaaagtatagtttactttgcttattatttctctttcttatgtttgagatt

SEQ ID NO: 346182 - DNA, 918 bp, Cannabis indica
gttgatctgtgtgttatatgatgattgattgatgcttgtgaaattttatgaaaaataattgaattttcgtttctggaattatttttattggatagtttggaaaaaattaagcaattcacttttttacagaacttaatttcgattttatttgaattagttatgattttttgaagttttgaaaaatcgggggtggtgacacacccttgtgcgcgcgggttgctgctgacagcaccctttgtgcgcccaagcagccccttgcgcccaaggatgtgcacctggatggtgtgctttgcatgccatccgtacaactcacaattttttcgtttttcttcgatttttcatgctatttcatggaattaacttccgattttttgtgtagttttgtatttagatatttactattcctatttcaattctaattatcagaattaaattaattattttttttaaaaaaattaatttatgatattagtgtaatttgaacttgaaaataggtaaatatctaatttttggcttaattatctatcttatttttaaatttgattattttatcttattttttaaatttaaggtcagatattaatatttttttaaattattttgaccttatttaaatttaaaataagataactataatcatgttaaaacgaaagttttattttctctctctctttttaaataatttagaatctaaacaaaacctaataatcaatttatagtcattcctcatcacatttcttggttatgtaatgtttaaaagatctcatattactaacatgtaaaaattaaaaatccatctactactttttttttagggtaaattttacatggtatactaacttttgctattttttctaaaaaaatctgtcagcggaattttttactttttaacttgtatttttttattaaagttttcat

SEQ ID NO: 346183 - DNA, 503 bp, Cannabis indica
atagtattaaaaaaaagtttcatctaaactttgactataaaaaaatatcaaaactttattagcttttctctaaaaattgataatttcattaccattttggaatagtattaataggtacattctcctctcttatgatatgaaaatcattgatatttaattttcttttcctataaacttagttgtattattattctaaaaaaatgttagttttctattattgtattaaaactaaaattataatttatattatttgtttcttaaaagatttttatcatgctaaaaaatattttaatttttatatttagattaaatctctaaatacaaaatagagtatatgttagggtttataaaacacttaagaaatatataaatcaaagatatgaacatattcctaaaagtgctttaatatagaaaaccctaaatcataaatttagagaaccttgctaaattaaagaagaagatgataaaagatgagcggaagcactaacctgaagccattgttg

SEQ ID NO: 346184 - DNA, 693 bp, Cannabis indica
aagattcaaaattgatactataataattaataacataacacaacatgaaggttcaatataaattcatacacattcagaaattattaagcatttatcaagtcacgaagatatgtaaaaatagaaaataaacacatcttaaataatttccaaggtttccaactagatgatatacagtgttccgctaggcgagagtcaaagataccatcaattgaatagagtagtttgctcatctaaaatagacactattttagcaatcttttattcgatcaaaataagaatatatcgttgttccggcaggtgagagtcaatgttattcttattctatgagcttccactattttttcatacttgtaaatttatttctaagcagtcatcgtatggaagagtctaataaaaaagaaaacttacaaaatacttatctatcgagatctttacagtgttaaatgttgaatgtaagaccatccatatggaggacgaagtctagcgtctagagatcccattgaaatattaaccatgtaaaaccaataatggagatcgaatatccttaaaattaaagctcattattttaaaagaaattgtattttcatttgatacttattttaatattaatatatttattttaatattaatatatttatttaattaaaattactaatttagataactctaaatataaattttaatttaatattt

SEQ ID NO: 346185 - DNA, 628 bp, Cannabis indica
ggggtggaggaattattctagagggatgtaaaaacctatctataataatttagttccactagtgaagctaaataacttagttgttttcgaaagcactagaaaagttattcaaactgaagaaagttcttaactggttttatctctattccattttggatagaattagagatatatcttttgtttattcaaatgcacttaataatactaaagatttcagtatccctaaaggagtaatgcatataggaaatgatgttgcataatgttttatgagtagaaaggaagtaatggtgaagaaagcagtgacttaccacagtcttataattcctgtaatttgagtttagtcaaatacactacacttgatctggatatcaagataatagattgattaaaatgcacttcttattttatgttagtgcaagtgggagtttgttgggattttacgccctaaataaaaccaatttcaatactatcctatttgtaaccaatagaagattagaaatcaattatatttacatgtagttttcatgtttatagtttaatgtacacaatttctgttaaatctaaaacatatagttattcataattacagtgataacaacacaatagaacataattgtgattatatgct

SEQ ID NO: 346186 - DNA, 586 bp, Cannabis indica
aaataaaactatagtgatcgctggacttgtcactcgtgccgtaaaagtcaccggagttcgctgtcggtaccagaaaagtcgtcagagtagttgctggtgctggaaaagtcgccgaagtagctgtcggcgccgaaaaagtcgtcaaaattagcattatcgccagaaaaatcataggaaaaatcaccaagaaattggtttcttgatgaaaaaaccgatttcttaatgaagaaaccggtttcttggtgatttttccggtaattttaccggtgacaatgcaaattccgacgactattctggagtttgatgtcggtgccggaaaagtcgtcggagtagttgccgatgtcgaaaaaatcgctggagttattgccggcataaaaaaaatcgtcagaattggtattgtcgccagcaaaatcactagaaaaatcaccaagaaagtggtttcttcatcaatgatctaatttcgttacataacaataataaagattatgaaaacaaaacaaaaatgatatacactgaaaataattaaaaccagtttcattaatcaaccaaatagggaaaaaaaacacaaaaaataactcaaaatata

SEQ ID NO: 346187 - DNA, 730 bp, Cannabis indica
agattgaaccccctaacttcggggagtacaatgaggctgggcagtcagtcaatgctgacggagacatcctggttgagggcgtggactacgtcagtgaggagcttgctgaggcggttcctcatagaaggcagggtgccttgggcgccaggtgggtaagtcctccgtccaagatttcgaaggcacgcctccgaactctcgaccaagacgggtacctgggcgagcaggactgctatattctcgcccacgatcgcgccacaaatcctgataagggaatgtgcgcttggtcgggggctcacggccagtaaggggcgctgatgcccttgcataagtacttcagggatgtggcagacctctttggcctttgcccggcccaaattactccaaagggcattaagtatttgtctgctctcttcgtcctctacgcttcccaaggatcggatgctccttctccccacgaggtcgcgtggttcttcgaccagaagtctgcccccaagcaaggcaggtcggggtatttctacttctcttagccaagcttcaagtggttgagcggcacggacgacaaggccatcaacaaaatagggcgttttgttgatgagtacttcatggtgaaggatctgagcatcacctggactcggtttcaatagagtctgacatatcaccgtcctcccctcacccttgctcttagggatagagctcaaaaacttgcgcggttgctggaggaagacaggaa

SEQ ID NO: 346188 - DNA, 837 bp, Cannabis indica
aacccttttcatttgagaaattaagagataaagaagaaaaattggaaatttgagttatctcttgaactctctctttccttctttcgactgggacaaagctagggcaaggagcagatttttccttccatttcattgggatttagcaaggaatcaaggaggatttaaccaaggtaaccttagttattctctagttatgttttttctcaagttttgcttagtttcaagaggtgattttttaggttagtggctgttaggtttagaaatgatttgggtttagttgttatgctcaatattgattgatttaaggttctagctgctagttttgctgcttggtgttagttctaagcaagcttgagttttgaaactcaagccttgagctttaatggaaagttggaatttattggtttgttctgtgattttctggttgatttaggttgtaaatgcactatacaggtatactggagagtttggtaaggtttagaattgaattgagtcaaggggagaatttttcgggttcccagcacagaaccagaattccggttctgggggacctgtaccaaccggtcgaccggatggtgacccagaactggatttccggttgggaaccggtctgcctgttgggggaatttccagaaccctagttttggccacttttgagatatttagggtattgccatgaggtttatcgatagggaaacttttagtttcaagtttaaatcccggaaagtgatttagcgagtcactcatctgtgttataattattgtgattagggcatccatctagcacgtgatttccgttcaggtcggccagcacacttgaattcggaaaacaggtaa

SEQ ID NO: 346189 - DNA, 629 bp, Cannabis indica
tatagaagaaactccctatatgacagcaaacatgtaaaaatacataaagatctgtatttatgtaagaaccctaaaaatatatatgggtttgagtactatgaaaaatatggattaagcacaacatgacacgaaaaatccgtaaagtacgacacgtaagcacgaataatctagtctgatagcttaacacattaaaaatcttataatttgatcatagtaataataataataataataataatttaagtatttattagtaaatatttaaattttaataattttaataatttttttatatgatttttttagataatattgttaagaaattatataaaaataattgaattataaaaaaataaatacagtttaataattatttcattaattataaaaataaaatgtaaaaaaataaagcacgaatttaagtcagtataagaaaaccgatcagcaccacacagccatatttataacacaactcaactcgtgtttttttatatcatgacatgatacaactcatatttataacacgatatgtatttacagctcagactagtaacattagcatatatatataggaacatgattttgtcccgtgatgtactttcacgaaatgtattccatgatgtacgaca

SEQ ID NO: 346190 - DNA, 1421 bp, Cannabis indica
ttaatgaaaatcgtgattaattaaaatttgcttatttaattaaatacttatagtattacatacaaatatttcgggatcccattgacaaaacactttacaaaagtttgctattcatttacaaaatatttgtcgcccagcgattaacagcaaaagccctgatgtcccgaggatcgtacgctccaagcctaaccgccccgacaatacaatcttcatctgcccgtcctcacggttcctcaactttagccttgcccttacctcaattctgaattcaggtgtgccggtcaacctgagtggaacaatctgctcggcgaattacaggctcctagagcttaagatctcctaatccctgctggaacaagcttgaaatgcaaaaaaataatcccaaccctagcagcctctaggtggattcgaaagagagagagaaacttgagagaaaatgcaatttttgtctatcttttgatttttcaataaaatgagcaaataatagattttccttgcttaatattgagcataacttaactaaaaatcaggttaataaacttttaaataaaatccacaaaagacaaagtacatatgggcaaaatgaccttgttgccctctcacattaaaatgacataaaagagtacaaagggcatcttaggaaattctaaattcccaactaaactcgacatttctaatgtctaacaataccgccccgctatactaaaataccaagatgtgattctactgagccatacacctcgttccaatgttgtcgggcactgaacatgcaaaaatatgaaatttctatatatgacatataaaatgcattctgaattcaaataaatcatcataaattaataattgagaattaataactaatttcataattaaaccctaattatctgctaatttccaaattaaagctaagcggtctttacgaaaaatccattcgaggattatatcaaaatcatacatttgcaattctattagattggcggttcattcacaaccgtcaatccaaaaagacaaggatcgaatccacctagttgatactataaggtctcctcaaggtagcagcgtaccaaaccccgaagcatatatatcacatggtttatggaaactttcaattactctactcgacacgtaagaatgagtagctcccgaagcatttatagataactgacctgtcaccactgacgtactagcatctgcgtcagtctaagtaatggtaaaaagtcatcccgagttcttagtagtatttttcttaggctcctccttcttggcttgaggacaatctctgatgggcccaccatgccacactagaaacaagtcttggtccgacattcaccctgatggtgtttattgcatttcggacaattaggataagatcggaataaagatccgcagccctgacgaccacctctgtttcctcgaaactt

SEQ ID NO: 346191 - DNA, 883 bp, Cannabis indica
tatagtaactttgatgggtgtcaagaaaaactaggcttttggctcaattcggggttactattgacaattaaatattctcgggttcgcttgaaaggctcaatcgtccaaaaatggcctaaatcatttccaagttataaagctcgctaggatttcgcctcaaggactacactaaccaattcttgatgcttaaacattctcaaggtgttagctattctagaaactcaaagtatggtgggataacacaagcacacaattgttgaaagcattcctcataggctagcactaagacaagaatagcatttgaaagtagcattttcaacacacaaaccaaggcactccacaaatggaggaaaatggatatttttcatcatcgagcgctaccctaaaccaagctgaaaatacaagtactgcttttctcatttgcaagctaaaacagaacataaaaaaataatgacaaatcaacatgattaatacacatctaatcgccataatacttattacatacaatactatattcaacaacaaagtagacacacaaagcaacaaacacaacaatagcaacacttaactagcacacttatttcagcaaacacaaacacaataacagttaaactaggttaattaattaaggaaaaaaatactccctcaaagattcagactcttccccgcttgagtccctgcttcaaaatgctgaagcgatgctgatacaatgctgtaacaactgggacttattgcttcagcacaaatctgcttcacaccatattgcagcaacctatttttctgtcattccctgctttgcaccagcaataagagatcaccacactacagcaaaatcattagtaaatgtaggaaattgaaagttatatatatatgtaattatata

SEQ ID NO: 346192 - DNA, 460 bp, Cannabis indica
tccactgtgctgacgacacaataaacaagaacataaatgtgataaggatttggatgaatttataaatcaaataaataaattaatgataacatgaaccaaatgacacaataaataagtgatgaaaatacttctgtttctttattgatatttaaatgatagagattacattgaaataaagttttatttagggcataaaacccaacagatcccaactgcgatgagtgccaatgaacaacccactaggtttgtgcaccaagtgaagttctctggttcttgtccagagattgttctcctcgagccccctgtcccctacccctcgaggctgggactgaagcttgcaactctgctcgctgcaggaccaacagttggcgcaacttcctgactcttgggtctggcgactgggagcttctcacgtgaggcagctttgaggatcttcccaaaaggagttactgttgggttt

SEQ ID NO: 346193 - DNA, 598 bp, Cannabis indica
atttccgagccttcacttgtttagtgaaataccgagctgctttttgttgatgggctatcaactttaagtttgtcgtggttcgcttctctttgaatttatcaagtgattcgcccaggagtacgtgattgatatcttggttgtatgccagtctcctgtgggaaggtggctcgagttctacaggcaacatagcttcatatccatatgccatggcaaatggagtctgtccagttgccgttttctaagttgttcgatatgactataaaacttcaagaagttcttccggccaatttcctttggcatctttgagtctattctttagtgtatccttcaaggtcttattgactgcttcaacttaagcattcgcttgaggatgtgccactgcggagaaacttttgatgatactgttgggttttatgccctaaataaaacccatttcaatataatcagatttacttattaataaagatcagaaataaaatttaatgttgcatggttcacatgatttatttcatgattatacatacataatgtatgaattctatttatgtccagaacatatgtatttgttaatgattataatgttgtcagcacagtggaa

SEQ ID NO: 346194 - DNA, 756 bp, Cannabis indica
gagtatacattggaatggaccgatgttgatcttggtaaagattttataaacttaccgttgtatctttttaagtcaatatcaccaagtttatcttagatcaaaagaacttaattatgatatggttaggttcgatctcaagagtgttatttatgttcttagaggtgttcgctaaagcttaccaattggttcgggcaatgacatacatcttgggaacatgatagtacaattgagagggagcgctaattatagatacagaatctatagtttctatctagacatagaagtgaaatgatgatttccttcgagcttggcttattagagataaatggaagagctcttattttagtaattatattagtttactgaaatatcatttataggaagctaagtgttctaaggataaaatacattgagggtagaacaattaatttgtccctactcaatgtaaaccatcgatagaagatcattgattatttggattagaacgatggataattcatagcgtatctatatcttagaacatatagagtgtcctatataattaagaatacaattccgaatctatagtggcgcaaggaggaattaataagctagagaatttacttggtaaattctagatttgcttattggaagcttgattatataggcccatggtccccacactagttgagataatactgcttataaagttattaaattagttttaattaatcaatgaaaattctaaaattagactatgtcttatttatgaaattt

SEQ ID NO: 346195 - DNA, 842 bp, Cannabis indica
tagatgtccataaaagttaatatacatataaaaatattacataaaatacaattcaataaaatataataaaatacgacataatatagcgttccaaacgagtcttaatattcttaagggttattttaaaaaatatggaaaaaaatattaaggttatgataaatatgacataaaaagtaaatgccactaaatataagattatctaaccaatcaaattaaaaatataattttttttaaccatatgaaatattaaaaagaaatctgaatttaaaattcataaaaaataaaaacttaattaaattaccataaaaatattaaaattcccttcatatttattttattaaaaaaatcaaataaataaaactatagtgatcgccgaagttgtcactcgtgccggaaaagtcattggagtttactgtcggcactggaaaagtcgtcggagtagccgctggtgctggaaaactcgccggagttgttgccgacgctgaaaaagtcgtcaaaattaacattgtcgctggaaaagttactaagaaactggtttcttgatgaagttgatgaagaaaccggtatcttggaaactagtttcttggtgatttttccagtattttttaccggtgacaatgccaagtccgacgactattttggagtttgatgtcagtgccggaaaagtcgtcggagtagttgtcgttgtcagaaaaaattccagagtaattgtcggcataaaaaagaagtcagaattggcattgtcgtcacacaaatcactaaaaaaatcaccagaaagtggttttttccatcaaaaaaaaaaatgaatatacactgaaaaataattgaaaccagtttcatca

SEQ ID NO: 346196 - DNA, 574 bp, Cannabis indica
aaacccatttctattaagtcagcactcaactccctatcctcaattctgatcggcataagcctaataaacattttggagatgactaattcttcaccaggtagtagagttacaaaccctttgtcataactatcatgcagtctatacaatttattaaaaattctagctggcacataagagtgagtggcctaagagttaaataacacagagaagtaagagttattgaccgagagctgacctgttacaactgaggggctagcctctgcatctgcccgagttagagtaaacaccctagctggagtgggttttgctacagtcttttgttcttctttcttaagctgtggatagtctcttttatagtgccctagcatgccacactagaagcatccttgctctctacactctcccagatgatgctttttacaactggggcattctgggcaagtgtatcgggtttcgaaaccaccctcacagttgcctcaaccctggttccctcggaacttcttgttctgacttgagccactgttggtgccattctattcttatcagtggttgagccactaccacccctactata

SEQ ID NO: 346197 - DNA, 511 bp, Cannabis indica
gagtactgacttgatatgagtggacaaggtactcttcactatagggactttgaaattatgaagagataagagagagagaattcgttatagagaggagcctcttttttttcaattacctgacagaatagactaatgaatgggtatcaggttataagcctatcattatctatttatagaattccttcaagggttaggatttaaattatatggaatgaaaaaaagataaaataatggctaaaaactcccgtaagtggtcgaccatgtaatgggccccactagtttcaattttgccatttatttaagacctatatgccatattttaattttaatcctataaatatcaaatctatttatttaataattataattaattatcaaataaaattatcatttaccatttaacttatttattaattagaccttataaagtcacttaattaacaaataaaatctaaaacctcttttcttctcattaagcccttacttagtgaaaattcataaataagacata

SEQ ID NO: 346198 - DNA, 1390 bp, Cannabis indica
tcttcaagacaatcattcttatgtcttaacaaaaacacccaaactttcctactaaaatcatctacaatggatagaaaatattgtttaccaccttgagctttcaccctgctggctccccacagatcagcatgaatgtattcaagaattgattttgctctgtaattgctattagaaaacttgatcttatgttgctttccctgcacacatatttccctgttttgatagttcgactaaaccttgttcaccaatgtggcctaatctagtatgccacattttagattctgagttgcacttctcaacagcagcagcatgtgttggtgtgacagtttttacatcaaggtaatagagaccatgtcttttaattccttttagcactagcaatgaccctttagtgattttgattactcatttgcttgtcttgtaatcatatccttcatcatctaaggttcccaaagaaattagatttcttttcaaatctggaatatgcctgactttgtgtaatgttttgaaagtcccatcaaaaagttttaatgacaatagaaccaattccaattacactgcgtctgtgatcattccccattacaacactaccaccatctatggttgtgtaatccatgaactagtccctatttggactcatgtgatatgtgcacccactgtccatgatccaatatcgattgagacaagaactggtgcaagcatcaccatctgttgagttttcaaccttagtttcagtattggtaattgtaagaacatctccatcagaatcttcaattactgcattagaatcattgttgctgtcctcatcttctttatccttcttcttctttcttttgtctcttaagtcccaacagtttctaatcaagtgtccaactttgccacaatgatgacacttccttgtttccctaggtcttgatttcgatcttgaattagaccttgagtttcctctgaattttgagttgcctcttctaggtactctgcctcgaaccattagtgcatcatcagttcttgattcttgcttagcagctctttgccaattcaactcagcatcccttgatctgagtgtactcataacatcatctaatgttaatgtatccctgctgtacatgataactgttctcatttccttaaactgatcaggcaaagcattgagcaagatcactgcttgatcttcttcttttatagtttcacccatattagtaagagccaacacaatcttgttaagttcatcaagattctgatccaatgtaacagtagcattcattttaaacccataaaacttttctttcaagaaaatcttggttgcagtagatcgagccatgtacaattgattgagtttactccaaattccaagagctgtcttctcaccaatcacctgcctcagtacatt

SEQ ID NO: 346199 - DNA, 784 bp, Cannabis indica
atttttttagtaaatgatttttttgtacttgttattggtatatgtgctcaataacatactattgtgttactcaataatccattaatatatatttttattttagtctttttttgtcgttctttttttgtctttttatatatatatataaatgatctttgtataattttttttggataaataatttttgtagttatgttgcactttaagaaactcaatatcatactaatttgatacataataattggttaacagtttctaaatcatttattaaactaaaatgtgagaactaatattaaaatacacttataactaggatactatttttttgtaatacacttataaccaggatactatttttttttaatgcttgtcaccttaatatgtcttttaatattttcattattaatatatatattttttcattagctttaattatattttttatataaataatttttgtattatttttttataaataagtttttgtactattgttatgtcgcactttaaggtgctcaatattatactaatattgtactaatgatttggccagtagttatttaaatcatttattaaattaaaatttgtgatagttaatattgaaatgcaccaataatagtatgttaccttttgtgatgcttgacaccttaatgtgaatattttttgttattaatatgcatatataactctgaataaaatgttttttaattatatatgagtttgcaagaatatttccaatgagagatgtaaaatttgtattatatttgaaaaaaaaagactttat

SEQ ID NO: 346200 - DNA, 604 bp, Cannabis indica
tcatacctaccaacaaagtttgataatgtaaaggcacaaattgcccacttttgatgtaataaggcatatttgcccaatttcatataacgacacagcttgtatgattgttattgaatcaaattgcaagcctaaataagatcaatagtgtatgaaattatagtggcaaacccatgacaataacagttcctatgtgaaagccctgattacttaacaagtgatcaagaggtgaacctacttagtcacttggggggcaaccatgctcatacatggactagtaagcataaaacacactcacttaaatagattttacaattttgaaactttcttttcaaattctaaagtgtttgtgcattgctcaatgtcttgagcaacctatatgttgtacatggttaactataaaaaaatgcttacgcatagtgtggtacatgccagacaagttaacacatagtagcatatagtaatagagtcacatagctccaaagtaaaaaagaaggcatacatctatgacattcatagacccttaagggtccaagctaggggtaccaccccgaccctcaagggtccaggctaggggtacccccagaccctcaagggtccaagctag

SEQ ID NO: 346201 - DNA, 1027 bp, Cannabis indica
acgcgtgggtatgaaaatttaaggagatctccctcaatcgttataatcgttgactccaatagatctccccctcgattgttgatcatttctcgctggtttcatggagatctccccaaggtgatccagttaccatggcagaatatcgatgcaaaattctcactgacgttaatggagatcaggctaaagttcctagtcggtgttcatagagatcgcaaaaagcttatacaccgttggtggttgttgattctggatctccatcacttgattgtgttgatgaagtgttgtcgacaatgaagaacaactcacttattttgctttgtcaagaaggacaagttctttatggaagaagcctcctctaccgtatttttcgaaaagaaaaacttcaattttttaattttgtttattttctcataaaagagaaatttacggaccaaaattctattttaatacaatatccaaacaacataaaattaatattcaaataataaaaaacccaaaaagaaaaattacgagaacaacataaaaaaaaacacgatatcatcaaaagattatatttcctataaataaaatcttaaaaattataaaatatttaaaattatgtgcaatcgttagtttttatttttttttttttttttgagaaataatctccatcattttttgttaattttgttttcactttggtgtgggtgagtgaggaagtacttgtgggccttttgactgttgaggcccatcaaatcaatcaactaacccaatatagtcccttcggctcacccgaaaacgagcctacgcaggggctcgtgtattggatcacagctaaaattggcgggagagaactcttacctccatagatttggcgggaagctccccactaaattaggacgatcggcgcgggaaagtttcaccccacaacacactgcccgagtcacagagaagagagagaaacaaagaaacagaggaagaggaacaaaaattatggtgggaatggcctacgattgctttgccaaccctcttggggccgttcgatcga

SEQ ID NO: 346202 - DNA, 651 bp, Cannabis indica
atgaaaaaatgaagaaaatcgaaaaaattgcaagttgtacgaatgcataccatccgcgcgcatccaaagagtgcacgaccaaggtttctcggcactagaggctgcaagcagccattccgcgcacgcagaggtgggattctgacaatcccacctgtcctaaccgagaagccacagacagatcttgtctgaatgcgcgtgaacccctgaaatcgaggggttccgcgcgagcacgtggggtgacaccaccccttattttttttcaaaacttcaaaaaaatcataactaagtcaaataaaatcgaaatcaagttctgtaaaaaattgaattgcttaattttttccaaactatccaacaaaataattcttgaacaaaaaaaaaacaattattttcacaaatttcacaaacatcaatcaatcatcaaataacacacaaatcaacatgaaaccatccaaatcacacacaaatcgttttaagtccaaatttcttgaaagtaaatcaattaccatggctctgataccaattgttggaattattttaccaggatcttagatttacctaacaagtatgttatttaacatcctaaatatgaacttctaaaacaatatgaaataaagacatataaagtataagaaaccttaacagtaggttgca

SEQ ID NO: 346203 - DNA, 682 bp, Cannabis indica
acctcttgctctaaccattcagccgcacgaaccaccttctttaacagcgacatcttccactaataaactagcaggccaactgaaaaaaactaagcgagacggagaatcaccacaaattctagcgacttcacatgacaaaaatactgtaagaaatccaagcacctacaatttagatttatacaaaatcgggcagaaaagctggttcgaaactaaattcaaccctagattatgattaaaatcgtaaaaaactaatcctcataatatcaattttcagattcaaaaaatatagggctgagcatcggtcggtttggtcagtttttttctatataaaaatccagaattcggttttcggtctagattggtgcaatccaaaaaacgaccgaccaatccagacctgtcttaaaatcgaacgttttgaacatcgggttggtcagtttaaactgcccaaaccgaacttcttttctttaaaatatgatccaatttattctataagcacattattctacattctacaactacaatcacacaaactaattattcaaaaattaattgtctaattcttttaattttaatattaatagaataataatatattattatatattacgagtaagtacaaaacataaagcaaacaaaaaaacttaataaattaatatatatatatatgtataacgattggttt

SEQ ID NO: 346204 - DNA, 1496 bp, Cannabis indica
ctcagttaactgatccagaattagtgaagattagggaagaggtttcaactggtcaagccagagattttacagtgtcagatagtgggatgttgttgtttaaaactagagtttgtgttccaagtagtgcggaacttagaaataaaattcttgaagaggctcataccactccatactccttgcatcctggcaccaccaaaatgtaccaagatcttaaaccctatttctggtggaactagatatagaagaatgtggtagaattcgtatcatgatgcctaacctataaacagaagtgggaagatatcacaatggactttgtggttggattacctagaaccacaggtttatttgattcaatttgggttgtggtagatcgttcatgaagtttgcacatattctacaagttaaaacaacctttatagtggatcaatatgcaaatttgtacgtcaatgagatagtaaaattacattgtgttccaaagtctataatttcggatagggatccgaagtttatttctaaattttggcaaagtctacagcgggctatgggatcaaactaaaattcagtacagctttccatcctcagactaatggacagtctaaaaggaaaattcaaatactggaagatatgttacgagcctgtgttatggatttcgagggttccaggagtaagtatctacctgttaacgcagattcttgttaaccaaatttgagcctcacaatgataattcaacacataaataataaaagctatagaaaaacaaaatatgaacatcggatttaatacgtggttttgcagttaaaattctgcatagtctacgagtcaatcttattcaaattgttgagtattgttttagggcctctttcataagagtttttcgtccctttattgagattgtttgccactatttataattgcatagtggtagttaattacaaggctgaacaaaatgtaattacagtcattatcccttatatcgtggggtctgattacattccatgaaatgtaaatgcggtgtatgattttgaaaatcatttagttgtgattttcccgcttttactgggtcaacaatatcatgtattaaacacatctttaattgttgaatctcgagatgtctccacaaaaacttgattgtagtgatcccaatggcgagctggaaccattcttctttctgaggtcgacatgatatgttttacgtcaattgcgggtatatggaaatcttctgacttgtcaggattatgagtctcgcattcgttagttggatgaaactataggaagtttccttgtagcgagatggtaatctcacattcttgttctttgagtcgatccgacttttacacttagtttgcttattgtaagctaaggtatgtgttactcttcttcggtgcctcgctattctcctttagcgatatatggtttctcgttaatacactaagtaccagttggtacattgattcctcgcctaaaaccttacagtcagcgggttacaaatatactct

SEQ ID NO: 346205 - DNA, 754 bp, Cannabis indica
aaggaaggctgaagttgtataaaaattcaagcttagacttcgcttgaaaaagatcaaagggaaagcgtcacggagggtagggcagacttcaagcagtccttccaatccgggaaggagagttgaagacgtatcgtactcccagtgatgcttcttgcaagaaagacgacgtgcatgagagagtcatgttgaatttctatgtaacaagcttcggcttccgggaaggaaggctgaagttgtataaaaattcaagcttagactttgcttgaaaagatcaatgggaaagcatcacgaggggtaggatagactttaagcagtccttccaatatccgagaaggagggttgaagacgtatcgtatccccattgatctttcttgcactaaagacaacgtgcatgcgagagtcatattggatttttatgtaacaagcttcggcttccgggaaggaaggttgaagttgtataaaaattcaagcttaaacttcgcttgaaaagatgaaaggaaaagcatcacggagggtaagatagacttcaagcagtcctttcaatccaggatattttatagtattttttttaaaaaaaattgtaatttatagtagatatttttatagaaaaattatgaaaataatagtaaaatgttaatttatagattttatgttctaataaaatattaaaattgagagaaataaggagagaagagaaaaatattaatctgtagatttactttaaaataataataaaatattaatttgtaaattt

SEQ ID NO: 346206 - DNA, 1289 bp, Cannabis indica
tatacacattattccacttaagtttattgttttactaagttttttgattatttttttttaattctctttaagacatcatttttttttcaaaaatatatatgtaatgggtacccgatggggatccttcccctcgtcgggtaatacccgccctgcccccgctttaatttaaacgggtattgggacgggtatgggggagaatttaagaagcgggtatgggggtgggggagcgatccccgtacccgtcccgccccgtttacatccctactggcattgggatccatcattttagggttggagtcaccaatactctccttattgcccaaactcatcccaaccatttcaggaagaaaagaatatgccatcacttgcagaagaaattaaccacttggtagacatggtaagatctctatgtaataatctaatggtgcataatttggagtgttttaacgacaataactcaaataacaaaagttatgagagttgtttgaataatgaagaagtgccattagttgaatacatggaaaagattgagcctagaattgaatagaaagaatcctttgaagtaaatacaaatttgggtatattggatgatatataaaatagaagaagattagaaaatatcgaaggaataagatgaaaaaaaaaaaatctcacaaaaagatgatatataaaatagaaaaaattgtgcaagaaaataaaactaaaatttcaagtctgaattggactatcttctgattagattttggaaaaagtcaaaacataaaagttctagatctctcttttatcttttcggaagatcttgaatcatccaattctaaataatatcgagagagttatggccaaaatactatcagtcaacgcagtagaaaaatcaccacctacttaaagaaacgaaaccatgtagtgaaactccaacacgggtcacagcccagcccttgtggggccgcggcccgccccttaaactacacaaaaattgtctttttctctcacgtgggttttggtagtttcccaattcgaataggaatttaacatgtgcattttcttatatctttttagtccctgaaagcttatataaagggtgaactggaatcgatttcagtcaggcaattcagagggaaataaacagctaaatatagagcacgagtttcaaagatcaactgcaatactgaaggcattcttcagagggttttcagcattcttttcttctcttttcttaagttaatatgtgtgattttgcttccgtgaacatgagtagctaaacacttgattagggttagatggatattgtt

SEQ ID NO: 346207 - DNA, 561 bp, Cannabis indica
gtttttagctttgtgaataaaagtagaatacagctaaacaagatatatgtgctcgataaaatgtttaaattaaacttagttttatttatataaaaacgaaaaatctaataccatgaaaattaagaaagataattaagatgagattatggagcttacactgaggaaaggccatggagttagttatattagattgagttgtctcctgtattttggtctccaggctgatctggtttgttaaatcaattttatatatattagttgtttttgttttaaagagagtaatctcatacgaccagagatagagacacgtaaacattaagaatattctttaagtagatcctagattgactattttaaaattttaaattgtatatttctttggttgaaattacaaatttaagaataatatttggagttatagaattttatttttgttacttttttatactacttttatgtcatatttttattaaaaaaattaaaagtaccatatttatgtttttgtattattttttatactatattaaataaatgtataaaatgatgcattattagttaaaa

SEQ ID NO: 346208 - DNA, 439 bp, Cannabis indica
taagtacttaatgtttgtaaaatattataattttctccaattttgttagtatagacttcgttttaaatttattattttattcatatcgtataatcttaattttcttgtacatctttaatattatactttctccatatgcataaagaattttcagatatttaataattatattattataattaatgtatcatttatcttataattgtatatcatatattcctcttctctcgtatatcatatattctgtaatatattattcattaattacttgctttagggcataaattctaataagtttgtatgtcatgcgagagaaagaaaagtgaggagagagagaaagagatacacgggagagagaaaagactgaagaaaatgatttttttaaagtaggtctcaccataaatttgaatataatgtatatttatttttggctaattag

SEQ ID NO: 346209 - DNA, 974 bp, Cannabis indica
attcttgggagaccattcttggcaactagccaagctttgattgatgttcagaagggtgaattgaagctgcgagtacaaggagaagaagtggttttcaatgtgttaaaggcgatgactttcccaaaggcaagtgataactgtttctttgttgatctgattgataccattgtgaatgagaaaaagttgatagatgatcctctagaattgagcttaattgaagatgacttgactgagcaagaagggaaggaggcaatggagtatgtcaaatggcttgattcctatgggccattgaacaggaagtattatgaagagttgggggtagtaccaaaagagcttgtaccatctacagagaaacctccagagttagagctgaaagtgcttcctaatcatctacgatatgaattcttgggagaagataaaaagcttccagtgatagtgtcagcttcactttcagatgtggagactaataagttgcttagagtactctggacacataataaggccattgcatggacattgggtgatgttaagggaatcagtccctctacagttatgcatcgaattttaatggaggagggcgccaaaccgactattgatgcacaacggagacttaatccaccaatgaaagaagtggtcaaaaaagaggtggtaaagtggttagatgctggtgtggcttatctaatttcagatagcaagtgggtcagcccagtacaagtcgtacccaagaaaggagggatgactgtgataaagaatgagaagaatgaattaatccctactagaacagttattggttggaggatctgcattgactacagaaagctcaacatggcaacccggaaagaccattttcccttgcccttcattgatcagatgttagaccggttggcggggcaagaatattactgcttcttagatggctactctgggtatcatcaaatagccatagcacatgaggatcaagagaagactacttt

SEQ ID NO: 346210 - DNA, 1097 bp, Cannabis indica
attaaataaaaatataatttaatttgttatataattaatcaaaaaaacataatttaaataatgttatacataattaataaacaaatacacaatttgaaaaatttactaatttatatagagctattttttaatctattctatataaaatgtggctatgtttttggtttaaagatatatttttaggtttccacgttaactttaacaacatatcctattacttaacaaaatattttttttattaattttataatattattatataaatatttaaaaataaaaattatgtagatattttataaaaaaattattttaattatatctttaaaaataaaaattatatctatatataatcacatttatctatataaaaaatatatttaaatcttaatttcacgataattttttgttttaaaaatgattaacgatatatatgcttctaattatttgtacattttattataattacattctcctaattacaaattaagaatattgtatctatcactattattattttcttaaaatatatgtttagacataatatataaaatgtattttgaaagtaattgattatttaatcaaactcaaattttattaaaatattttctaatataatcattatatatagagagatcaatataaaatacgcatgacaatgaaatttattcttttagtgtatatataaaatacgtatatatatataatcgcatttaaaaagcacacactaatatagccgtaatagctaaaaacttctcaaatatcaacattttaaactctatttcaaaattaaaaataaaaatatattacttaattgaaaaattaaacatatatgtaaattatacttaacaccatttaattaaacctaattaaagtgaaagctaattattgtgaatttatatttttcttaggagaaggaaaaaattagcaaggcttagaggaagttatagtagatcatttcacatggaccaaacgatatttggcattccactatttgcccctcacattaccaaaattcaaagtacaagtgtgggtgagctttttaagtgtcgagagagatgatgactttgcttgctctcgaggctaacgctatgaaaaac

SEQ ID NO: 346211 - DNA, 947 bp, Cannabis indica
tgaaatttttgggtttagggttatatctcacgaagctttgaatgagcaatgaaagacgaacaacgcgcgatcaaaggcaaacgtggtaaactacgaagctatacagattattaccgagaaaatcacaaagttttaaacctagattttctatctatcttctacaacaagtcaaaaatgcatgtataaaacctagaaattaaacatgtaaagtaaaaagagaagaagattgaaaacttactcactatttggcgtctaagttcagtccaaatgaagctgtttgggtgctatagtggaaatctcatggtagacttgaagtaaaaaccttttttgctctgagttttgtttagtgaagaaattagtaaaagtaaagttatgaggaaaactcatccctatttataggtagagagctgaaaaaaggcaatcttttcaaatgcctttagacccatcggttccctcccaaaagtaaatattgggaaatcaaatgtaatcaagtgtaactgtcaaacgtgatgagaaaaaacagggtttcgaggcactaattaagtaagagcattaatgttgacctcgcttttagccaacgacaacgagtctatttttataagcgataagtgatttatagcaacaaatatatgataaagtaatataaagacacaggaattttatagaggttcagccctgagcagttcggtaataacctaatcctcgttacttgtattgacttaagatcaagtagaaagattccttttcttatagctcttacaacagtatctctgaatgaataattcttagattatatatttagggtatagtcttagctcaactgctcttcgacttcttgcctagtgaatatgcatcactatttatagggctaataagcttggaagggaagagtttcccctctcgttacaatgcatataaacagaaagatcgtgggattaatgctgaat

SEQ ID NO: 346212 - DNA, 512 bp, Cannabis indica
gctaagtcagcagaaaggctataaaataaggtagatcgctagagaacagaatgccacagcagatgcacttactcgtctagcaagcatcaccattgctgacaaggctaacctggtgtcaatgtagttcctaatggaacgaagcattaccatcattgaagaagtcgacatgttggattacagtccaaattgaatgatacctattgtagattacctctaaattggagtcttgccttaaaacaagaatgaggcaaaaaagatgagaagaaaggttgctaggtatctagtccaagatggagtaatgtacatacgaagcttttcaatgtcgctcttaaggtgtgtcaccaagactaaagctgagcgattgatgatagaagtgcataaaagcttctatggtaaccatgccaagggacaaagcctatccaaaaagatactttgataggagtacttttggccgataatgatcgaggattcaatggaccatgtcaaaaaatatgacaagtgctagagattct

SEQ ID NO: 346213 - DNA, 548 bp, Cannabis indica
cttgattttgttgtcaagaacatcatatgtcgatttggacttctacagaagattgtgtcagacaatggaaagtagtttggtagtgacatgttcactgatttctacaactgacatggcatcatcaaagcttctctgtcgtggcccatcctcaagcaaatgggtaggaagaagctatcaacaagaccctcaaggacaccttgaaaaagaaccttgaagaggcaaaaggaaattggcctgaattgctcctagaggtcctatggtcaagcaggactatagagaagatggccactaggaaaattccattcgctctagcttatggctacgaggcaatgtttcctgtagagctagtgccaccgtctcaaaggaggacaaactatgacgagcatacaaataatatcctactggctgaatatcttagaagaaagaagagatcaagccaatgtaaagctgtaagcctaccaacaaaaggttacaaggcactttaacaaacaagtcaaggacaagaaattcttcataggagacctggtgtaatgccctaacaataggaa

SEQ ID NO: 346214 - DNA, 898 bp, Cannabis indica
cgaacttcatagcatgggcacatctcaaagccgtctagcaaaaatagaagtacgtatgagtaatagtaagtaaagcaaaaactaaaacggatcgaggcacatgcaaagagtaaaatacctttattcccgagatggcagtatcctttaaaatagaatcacgcccgtgggagatgtagaagtcatcatcaggttttctgacggcgtccaggagagttttgaaataattctcagccgattcttcgaacggaacatcctttttgatccggaaggcaggaatctcgtcccattcagccaacacccgcgggggatgactgggtagaggcggggagcctcggccggaggaaaaggatgtagggtgagctaaagcaggagaaagggcaagctgggaagtcgacggcacgccgaggagagaggcagaggtccgagcaggagaagaggatggaagccccgaattaagacccagcgtagccgtcgggagggtctcaggctgagagaaaccttcccgatcaggaggccctagattggaggctcccgttggggccagcccccgaaattgccttcaccttcgcccacgcccgacgagacctcgggaagagcactaagtagggccccaatggcatcctcagtggctgagtcatgctgagatgacatgcagagatttgatggggcattttcctcaacccttactcccttacttttctttgccctgctttttcgtttgggggacttcgacatcatcctcttccgacgggccgcgttctgagcctcaatctcctcaatggtcaactcggacagcctcattttaggaaggtgacgggggtaagtctctgcaaggcgggagtgatcctcagaaaactctatcaaaaagtggctcaggtgtttgatttaagtgtcttaa

SEQ ID NO: 346215 - DNA, 696 bp, Cannabis indica
agatgaacccaggtgagtcttgggagcccgagcatcaaatcgaccaggaactgcttcaacttctgcacgaagtccatcctcgtcttcgtgctaatcctccttctgattctatacccagccatagaacgatggctggtatgaagaaaacaacgcgtctggctgacgcttctaacccccaggtggctcggcttgccaccctgcccgatgccgaataggatttggcagtcccaatggaggaggaccgtgagggagacgctgaagtccaggatgttgaggaattggatgaggcgagtccgggcagcgctcccactgctgagggagaggatgagattgaaccccctaactatggggagtacaacgaggctgggcaaccagttgatgctgacggggacgtcctggttgcgggcgttgattacgtcactaaggagcttgctgaggcagtacctcataggaggcagggtgccttgggtgccaggtgggtgagtcctccgtctaagatttcggaggcacgcctccgcactctcgaccaggacgaatacctgggctagctggactgctacattcccgcccacgacaatcgcgcctcaaaccctgataaacgggatgtgcgcctggtcgggggctcacggccagcaagggcgttgatgcccttgcataagtctttcgtgctgtggaggacttcttcggcctttgccc

SEQ ID NO: 346216 - DNA, 709 bp, Cannabis indica
attaagcacaacttcagccttccgtcatggaagccaaagtttgttgtatagttcaaaacggttctcacgagcacacgtgtttcttccgtgtggatgattattggaggttcgatacatcttcaaccttcattcctgaagggaaggattgcttgaagtctattgaacgcccatcttggttctcaccttcagtgcttgaaagtgaaatcgttgcttgaagttaagcgtaactccagccttcccttgcagaagccaaagttcgctgcataattcaacatgatttttacaagcatgtgtgctctagtcgtgcagttttcatttcactggcagacaatctttggcacctataaagaaaggtgaacgattatatttgcctcttgcttgtttcactttgtccaaaagggaaatactaatggtttgcgaatcattttcaaatatgaaagtacttgatggttactcgtctaacattaaaaacttggtaaatacgactgaactaaaactaatgggtatgaaatcacatgattatcacgcattaaggcaacacctgcttccaatcactattagatcagtcttgccaaaaaatatttgagattgtttgacacatgtttgcattttatttaataagttatgcattttattagatcaagctcattcttgctcttgctgctattcaaggttggtgtttacatcaacttgatgtcaacaatgcttt

SEQ ID NO: 346217 - DNA, 618 bp, Cannabis indica
tataactccggccaccgattttagcagagaaaacattgaatctcaacatccattaaggtataaatatgctttaattcattttatttatgtacattagtattatttcgtttttgtaaatttttttaggattttttcattttattaatattatattgtgtgtgtgctataggtagtcgggtttttatcgtaatttatcgccaaattgcatttataaggtagatatttattaacttgatatataatatatatgtatatattttgtgttttattattgaatatgtgtttatgtatattgtgtatatactatctgtgtattttgtataattattttgtgtatatatttgttgtgaatgagaatgaggtagtagggatttaattagttttgaattaaattttttaaaattatgttagtgtgatatataattcattatatatgtatatgtgtatacctttttttaaaaaattaactatagaatttagtaactagtaacttgttacatttttaataactagtaagtaatttaataattaaaattctaattttagttatatattgcattatattataggttgtgtggtaatatttgagggtcggcatatttcagtgttgatcagatt

SEQ ID NO: 346218 - DNA, 646 bp, Cannabis indica
aaagtaatgacttatgaaggtatcttgaacaccaagagataagtagagcatcaacaaatattagattacagaaggaaaattgtaatcttcaaactcaaggtcagctactttgtgaggggacaataaagtaaaatgcacatggtttcgataaagacaatttcaaagaaggaagaaaaatcctataccctacaagttattcatctcgctatctatcaatgatttattattttccttcttgtttcgttctcttcgctaaacaacactcatgattttcaacataagattgagatcattatcaccattctaattatttgagatttcaagatctaggactgattaagaagagtcatcaagaggtaagagagttcttccacttattgtttgtcaatttttaggttaaactataaatctcgtttttatttttctgaaagttattgtcttagtaaaatagtcgtatctctctcaatactcatccgattccagagatcttggtaccattgcaaagataatttgataatctaaaatttttatgaagaaaccattcaccaattcgatgttattctgtgtctaaaattatcatctttatactgctattgtaattcgttattctagaaaagtactttcacttaaaatataataactctct

SEQ ID NO: 346219 - DNA, 977 bp, Cannabis indica
ttttaaacatttttttttaaaaaatactgtattctaagaaattattatttacacatcaagatatctagactaacgtactagaactaataataaatactttggtatattataacactgaaaaaatttcttggataggaataaagatagctggagttgactacccaaaacttccttctaggatggaacaactagctatttggaacaccttttcgaagatagactagcttccctggagactccttctggatgaacaagttagaatatgggagcgcccctccggatgacatctaactttctataagatgaacatcttttggagatcttttcatttagaggaactatactgaaaattccacctagttcctttaaattaaaagtgatggtgatgaagaaagtatgcaatcatcatggtgggtgttctaggtatcaaaatatgctaatttttgagattgatcaagtccaagaaatgcttgaaattattgactgttaagaccttatccccaacattagcaggattatcttctgtcttgaccttttctaattcaaccaggccttctttgatcttttatctaatccagtagagtcttatatctatgtgtttgtgcttttcatgataaactgggttcttgcaaagatggatggatgactggttatccaagtacatagtcactcctccttttatctattttagttcctgcaaaatcccttagagccataaagcttccttgaacgcttttatgctagccataaattttgcttcagtgacggaaaaagcaaccacagactgtaactgggctttccaagatatacagattcagtttgtcatgaacatgtaagttgtgggttatcttctggtatctctgttaagaagtataatgaacatccacaaactctttcaattcaagttctccttttgctttctcataggtcagaccataatcacaagtgccctttaagtaccttaataactatttgag

SEQ ID NO: 346220 - DNA, 691 bp, Cannabis indica
gtcatatttatctaaacttttttgtaaatataataatttttcaaattcaattatgattaaattgatcgataaaaagaaaaaaaaaattgattagatcgaatacccagcttacttttcattagtagtcattggatttacatctatgggtccttattttatttataattaatatgtaatatttttaaaatttaaaatttcttttccaaggattatctaatgacatcagtcatttatttattaaaaaataccttatttaaaatttactaggagattctatctttatttgattcattcttttatacatatatataactagtaagtgtaattgtactttgcgtagttatgtaataaactaaatataaaatttgattctttattttaaaaattattggtcattctccttatttagttaaattatatttaaatagagttatttgcggcataacctcctaaagtgatgaggtttttacaactaaccccaaattctaaaattttggtggtaaaacctcctaaacccaagttctgttagcagttagccatttccatccatttttaggtgttaactgccaggttagaatgcctacatgtacacagtgtacacgtgtcacaattttattgatccacgtaattattatttaaaattaaaataaaaaaattaattaattaaaattaaaataaaaaattaattatt

SEQ ID NO: 346221 - DNA, 512 bp, Cannabis indica
catactaaagcctccaacaggtttggatgaagcctatcacgacaaggagtcacatgtcttccactagtactgaaagcagactcagaagcaactgtagacactgggataggcaaaacatctctagcaacttgttgtaatattggatgcacgacgagttccggtttgggtacacgaccgtgttcgggcaggagttctagtttcagttttggtcagaggctaggtttgtgttgagttctaggtctgggtccgggtcttggtcatggtcctagtcttgttctagggtcctggttcggtgattatttgttcaccttctaatttttggtcacaggtctaggtctgggttttggtttggttcttcgtcggggtttctggtcctagtcagagtcctagatctagacaccgactactggtctgttccagacccggttacccgaatcccaagtaatgatctaaatcactttcacgggtctcggtctagttctagttcaggtcccaagtcccatttctgagtt

SEQ ID NO: 346222 - DNA, 849 bp, Cannabis indica
ttttatgaacttgtgtcctccccaagaagggggataagttgaagaacgattttttcacactccgggcccatcctactaatgagggcccggtcccttataattttcagaagaatgttaaggagtaccgacaccgtttcttcttctcttccagctttcaggccatggatcgccccgaagttctcatggagtggatcaggatccctccactgcattgcactgctcctacctatcttttcctccaacacgctaaggtattttccacttacgacgaaaatggccttaacgtgggagacttggtcacaatggagaactaccagaagtccaagcttatctcagggagccattccgtggataacttcaacctctctaaggtcctctgcccaaacattcgtacccgagactctgaaaaggcactccgggcagacattgcctcagcggaggaccagtatcagaagtacctcttcaggagggaacaggagttagcctatattaaggctcaagctgctgctgggaggaccctccggatagaagcgggtaaagaacgggtgccttctcgacctaagttgctactgccggtccccaatactggcgctccttatgccagcacgcctggatccgataagtctcccttaacggttcatcatgttccatccgctcaagattattcttggtgtaggcctataaggtttttatttttccaacttaggtcattttttaggccggtcctggatggggtctgggcctcccgcacctattcctttggatcattcagcttatctgtcttccagctagtttcttctctcggacaactttcttggggatgacaaagccagtattatagtacaggac

SEQ ID NO: 346223 - DNA, 850 bp, Cannabis indica
tcgtatgccttcttcagctcgacatgagcagcatacagaccctgagtgtcagcctcgatcctatccaaccgagccactaaatcagtgtactcggcaccccgaacgcctgatgaagatggtgcactgggctgaggttctgaaccagtggcctgaaaaaatatatatcaaaaaaatacggtaagcatacgataattccacaatgtaacaaatatcacaaaacaaaaacaataaaaaataaaagtcataaaatatgcatatcttgactttttaatttcttgattatataaatatattatatttatattcgttgtttgcattaaagtcctattaaagctttattaattaattataattaagctccatgcaaattaatttatatttatgttatggttagcaattacaacttcgaaagcaaagttcaacctaataattaaataaataaataataaactatatagaagggactttcttaataatgatgtgcttaatcatataattaaattaataaaactcataattcaagccaacaaattaacaaggataataggctgaaaatcattatttaatcaatttctacagctatattaattagtaatttaatttcttgaatctatatatttatatattagagttgctaaaaagtattattactgtctagcaccctcttcgtattatactctattattgtaattaaatattatgtctcataacttaaataaataatttttaaagaatatcgctaaccattagggtaccacttataaaaagtgttgagcatcattagtacctatattagcaaccctctctttgtatatatatattttttctctttctaaaaatatatatatat

SEQ ID NO: 346224 - DNA, 530 bp, Cannabis indica
aagttgggtttcactttcttaagatattttatgggaccacgtgagttgaagccaaatgttgaccgagtccaacacaccaattttctccatcaacaaatggtgcctcttaccatgaatgtggtatttaaacgtgaccaactattcccacattctccatctgttaatgcgcggatccatgttctccttttgccaagaaatccatgccactaactcaatacattatacacaaaaaatatcaactttgagaggaggctttcactataaataggacccaaaaattaatgaaaaagggcatcagattttagagtgaaaaatacactttgtcattttgttacttttcttttattattttagtttacttattttagtgacaaaaatgagtaaactagagtagtaatattggtgaggttagagtgtagcgtttgtacttcttatttctattattgatattgattctttttgtgcttcatctccatatctcatttattaaattgttcttcatcttctaatttttcttccaaagttaatag

SEQ ID NO: 346225 - DNA, 899 bp, Cannabis indica
acgtgataatcagcgataaaatttacttacacattgatatgtggtatgtcatttccagggtattagtaaaagatactagtatcgaatgtatggagtatacattggactgtaccaatattgacaatagaaaagatatcataaacttaccgttatatctttctatgtcaatatcacttagttaatcttaggtccatagatcttaatcctgagataattaggtttttgtttaaatgtattattcgtgttctttgacttgttcattaaagttgactgagtggatcttcccaatacttacatcttgggaacatgatagtgcaattgagtgaacgctaatcatagatatagaatctatatcttctataactattagaagtgaaacgatatttccttctagcttggcttaacgtgataaattactgagcactcatttcagtaattatattagtttactgaaatatcatttacaagtagctaagtattttaaggataaaatacattaaagggtaaaacggtaaatttgtccctattagatgtaaatcatctatagaggatctttaatatttggattgaaataatagataatttaaagtacatctagttttggtacataaagtgttctatgtaatcagagtgcaattctgaatctatagtggagtaaggaggaattaataagttaggaaatttacttggtaaattttggatctacttattgggagcttggttacatagggccatggttgccacattaattgggataatatttttttgtagtctcaagtaattagttttaattaatcaattagaattctaaataagactgtgtcttgtatgtgaattttcactaagcaaggacttatttgagaagaaaagagaatttagagtttatttattaattaaga

SEQ ID NO: 346226 - DNA, 658 bp, Cannabis indica
ttaatgaaagatgttattacataccggtccaatcatgcataatcaaattatacacaacccatttactacatatctattcacatatgtgatacgaattaaaatcacacacactagaatatcgtgtataataaactgtacttagtagtttcatattaaagattttttttactttaatatactacggacttgttttatttattttgtataatcttagttctcttgtacatccttacaagattataccttctccatataaataaagaattttcaaatatatttattaattatgcttctataattaatgtattcatttatgttataattgtatttaatatattctgtaatatattatctattaataacttgcttttggggcataaatcctagcaatctcccacttgcactaaaagtaagtgttgcacattctataactcttatagatgttgtatctcattcaactatttaggatacaagtcttgtgaacgaaaccctctacataatgtagtttcaaatcctggagaccagcacattatcattggacaaataaacagaattagattctcgtatatttagtttattcaatcttttatttctttcgggttcatgttattttattaatcatttaatattctcaatattaaatatttatttattcaaa

SEQ ID NO: 346227 - DNA, 612 bp, Cannabis indica
aaacaaattcttaacaattgaattgttttggaattaacaattattcataaacatagaagagtaattcgaagtgtttatgtagttttaactctttgaagagtttaagatactatagaatttgtatcaataataaaaacacatacacatacaattattaaaacatataaatataattggtattggttgcacaagataaagtaaatgaagctcaaatcataaattgaaatttgttttcaaaatagaaaactttattataaaaaaatttcaaaattaaaggaattatttgcaacaatatgaaaaaaaaatgttttaaaattccaaactaataattgaaatccaaattgttctgaaactaaaacaatgaattaaaaaataaaaaaagagcttcatctttatcttggacgaactcaactcctttgtccaactttctgattcaactcgctaagataccatccgagttcaagcagcttgggctgtaataagaagaaaaacaaataaacatggttagtaggtccagaattaataatccaaatggataatatttcactaaaattcatcagtttataggaaaagaaagaccttgtttctttgcaagaagtttaggacattggg

SEQ ID NO: 346228 - DNA, 555 bp, Cannabis indica
ttttttttttgaaatatcaacttcattgaaataattaacattcagaatacataagggaagatagctaatataaaaagaagaatatgaatacagataaacgaaagcactaatctgaagctatattgttggagattgctcagaaagttatatgattttctaagaatacattgtttctctaaagtattttctttaatagggattgagagaatataaaaaaatcctaatattttttggggaccactacctatttatagactcatcttaaaatgagttttgagtatttataatttggccctcaacaaattatatattaacttaacttatggtatctacacattatctccatgataatttaataccctttttgatacccataacataattgatcatttaattttgtatcttactttatatataatagcatatacattgtacatatgtgctcacaataggatttttaaccaacaccacttggacaacatatgttaccttataaacgtataataaccttatgagcttaaaatttgctatttgtaaaggtattcacaataatct

SEQ ID NO: 346229 - DNA, 534 bp, Cannabis indica
cacatatatatatatatatcgtatatataattctttatatattaatatataaaactttcctatctcagtaaaaaaaaaatatactaatacatagattactattttttaaaatcgtaaaacacaaaatcaaaaaccaccatgctcatctatggatgattttcacataaaatatattattcttgcattcttaaaatcttgatttatctcctctttcattgaaaagggatacgtttttgattgttagagattttattacaatggaagaaaatcaagacattacaactctattgcaatataatacaaggaccaacaaagaaattaaataaatattacaacacataatatacaatatatatacaccatatatattttatataagaaaggtagaagaagatatatatatatatatatataatatatgtatacattcactcacaattttaagtatagaatagtggggatcacaatgactgaataaggtgttacacctttatccaaaagcttatttctccctatctctaagcactaagggaa

SEQ ID NO: 346230 - DNA, 570 bp, Cannabis indica
cccgaacccaaactcagaccaggactcgaactccgatccgaactcgaacccaaactcgaactcagaattatatatgctcggggaggctcgcctggtctttgcttaactttgacaaagtctcctagatgcaatggaagttggcgtgaggaggagaattgtgcatggaaatccgaagagaagtttttccatgaactaaattttcgaggggccaacttgaaataccattgctcagcaaatcagccgctcagcaatggtatggtcagaatcaaaccgagacgttttttcgtggtcacatgcggatatggtcagaattgatgcttgtatcatctcacacgttctgaatatcgatcttaactttcggtcagttcaacaaaaacaaaggttgttggacaaagaacgagcagtagccctgaaggatgaagttgaaaagccgcacagcaacaacttcataattgaagctttctacccagcttggtcgcgaatcccgtactagtatccaagccgaacaagaaatggcgagtctgtattgatttcacaaacctcaacaaagcatgctctaatgactgtttt

SEQ ID NO: 346231 - DNA, 627 bp, Cannabis indica
actcaatagaattggaaatactatctttattcttttattaatcgaaaatgtttttgttatcgtagtaacttacatcagagctagtgatctaatctgatctcttagcttaacatgacataaaacaaataagaaatagtactttaatgtggtctacccgcactgagtactttgaagtggtctaacaaacttgagtactttgaagtggtctacccgacctgagtactctattggtagtgtttccttaaatgttctccattccagtaccgtggtactagaatgagttgcatcttttcgtcatacttacctagtttgtatgctccagagtcgagaactttgaccacctggtatggtccttccagttgggtcctagtacacctgacgtgctatcttttgtgtttaggaatacccttcttaggaccatatctcctacgaagaatttctgagctttcacttgtttgttgaaagaccgagctagtttttgttgatgaactaccaactttaagtttgcagttgctcgtttttcttcgatttcatcaagtgattctgtaagaagtatgtgattggtacctttatcgtacgtcaaccttctgtgtgacggtagctggagttcgacgggcagcatagctt

SEQ ID NO: 346232 - DNA, 525 bp, Cannabis indica
gttccaccacctcccaccagatacgagcatcttttctcagcatgtatgatgcacacttcactcggtcattcccatcgacccttagcatctgcaaaatgctttctatgcgacttatccactcttcagccatcactgggtctatgcctctctcaaactcaggtgggtgttgttttcgaaatctctttgctaacgtctcatgtctagcctttgtagcaggatataccaccgcagttggtgggtctctattttctgcatcctaccttatttggactggcagctccggttgacgtctcagctgacgaagttcttcatcctgcctgtgaatgattccttccagtgctgcaaggcgctcttcccatccctgtggtgcttgaggtggttcattgatccctccatcatctcggccttggccttggcctcgaccttgacctcgacctcgacccaatctaactgaccttctatgaggcatttctaaactcctgaaccacacaaaccaaaacacatcaagatcattttgatcatcaa

SEQ ID NO: 346233 - DNA, 630 bp, Cannabis indica
aagacttgtagaaaacagaagaaacaagaggcaaaaaagggtttcagcaactgctaaaacataagaaatcatggctgagaatgctaatggcggtaacaatggaggcaacaacagtaataatggaggtgacgttgaagatcaagcaaatggccgcagtctgaaagattacattctcccaactcttacgggggttcaatcttgtataagaccacccgccgttgatgctaataccttcgaaataaagtctgccatactccaaatggtgcagtcttcagtccagtttggtgaactcccatctgaagaccccaatctgcacttgtcaagctttatggagttatgtcagactttcaaagtcaatggagttagtgatgatgtcatccgtttgagactttttccattctcgctgagagagcgagctaagagctggttgatctccctgccaccgaactctatagcaacatggactgatttggcaacgaagtttctgtctaagttctttcctccagcaaagtctgctaagcttcgaggagaaattaataatttctgtcagctggataatgaatctctccatgaggcttgggagaggttcaaggatctcatcaggaagtgtcctcatcatggtattgagaa

SEQ ID NO: 346234 - DNA, 1003 bp, Cannabis indica
tagtttaattaacctattacagttattcaaatcaggcaaatggtggccttcacaattagggttgttcatgtgagggagggttggattcagtatgtcgtacccactactaatggctccctaactctcacacaaggcccaaaagaaaggaatttaaacttaatttaaacaacaattattaggctccatatatgcatctaagcccaaagcaaacatataggctcacacaggcacactaatttggatggatcctatcatgttactaggtttatacacaaatgaaagaagattgcaaaattgacctgttacaaattatttatttgacctattgacaattaaactattggttaaaatcagatcattggatctatcaacaagttaaccatggcaatagttggatataggatttatttaatttaaattaattaattttcacaaattttaaataataaaatattattttcaaaaatattcaaattaaattaaaaaattaatttcaaaattaaacctatatatttaaaaaattaggttttctacaaacctaaatatctattcaaaagatgctaacaacttttcaaatttaatgttattttaaaaataaaattaaatatccaataaaatcaaatgataaataaatatcatttatctaaatttataatttaatttaaataaaataataaaattttgaaagttagggaaaactcttgttacaatttaaaatttattgcttaaaataatcttattttaaatttcaaataaggtcattttataaaattaattaaataatttaaaatataatacatgtgacctaaaatttaaaaataagataaaataatcaaattttaaaaaaataagataaccaactaagaaaaagatagatttttacctattttgaaggttcaaaaactactaatacctaaaattaattaatttaaatctgataattagatttgaaaaataaaaattaaaatacaaaactacagaaaaaattcgaaattaattccat

SEQ ID NO: 346235 - DNA, 1366 bp, Cannabis indica
ttgcaatccctgtggagacgatcttacttatcattttattacttgtgtgactgtgtatacttgcgtatataattttcacaacagttctataatataatgaacaaaaataaaaaaaaaatacagaataactcaaacaggtcattattaaaatagaaccgattctataatataatgaatgcaaacaaataatatagaataactcaaatcggttataattaaaaaaaatcaatttcaacaacatgaggcataaattaaaaagaacaagttttacaaaaaaaaatgaataaaaacatacaacaaacaactactcataaacaaattataatttttttttaaaaaaaataagtaatataaatcataccacatcacaataaatagcgcattttttaggagatagttacaaaataacaccaataaaatgttgttaacgcatattttcgttaactaaatttgagcctcacagtagtaatttcacacagaaaaataaaagctatagaaataaagatatgaacacagagttttttacgtggttttgcagttaaaattattcatagtccacgagtcaattttattcagatttctgattattatttctttaggaaccctctcgtatgagtcccccttttttgtcttgcctgccactatttataattacatagtgggtagtaaattacagaagttcacaataatctttacagcaattattccctcaaatcagggattttgattacaaattatgctaagtaaatccggttttttatttagaatccacacagctgtgagtatcccgcttttgttgggccgagatgaacgcatattttaaaggtatacggtaagccttatctcatggggatgtgtcgctaggaatggagccgagttaccgttgatggcgagccggtgcttgtcatatgactttccgagattgatattgctttaattctgataactacattttctggtgtcgagataatctttctcgtatgcatgccatcttacaacgagatagacatctcgctgtctgtcatctcgattcaccgaactatgtatacttagtttgtataccgtgtaatatacgctaagtgtttttatcattatcgtctctttttcatgcgacgaggcttcatgcacactttcattctcatggtttcttgtcaacacataagttagcagtttgtacgattctgtctcgtagaagactgttcagccagctgagttataagcatactctgcaaattgtgtctctaatgagttgttccatgccaggtgtacttaagattgcgtgtttgagttcttcgttcttcccagctcgacacgtgtcctcttccaatattcttactgaattttaggtataacaattgccccttaa

SEQ ID NO: 346236 - DNA, 741 bp, Cannabis indica
atataatgataattatattattaaatgcaaaatagaacaactcattaaatataaaataaatagagtatgtccgtaactcgctagctgaatagtattaagcaagatagggatatacaaactatcaattcatgtattgatgagaaaccatcttgcctcggaaggcataataccgagagagctataaacaacgcatagcgaggcatctacctccctgtatgtaaagaagtatcgacgaggcgaattcactaataaaacacttagcatataacccacgttataacaactaagtgtaataacttgaaggacatgattgtccagtctgtaagaccttatggtcaaagagcagttcttaaattttcttagtacactggtgctcatgccattgctgaaatacgagtaatccaaagtcatccatctatgtacaaggagagatacctccagcgaggtaccttttgaaggaagtttctattcctgccagcgttgaccgccttaaagatagtttaagtcacagctgtgtgattttcaaatataatttacacgtatttaaatggagcgtatttaaagcctacaatttcggggaatattgttaatttaaatgtaattagtagctgcctacctatattgctataaataggagcagattatacagaaaagggaggacgaaaatcttagagagaaaaagagaagtttactgattttaaaaccctaattctgtatccagaaatatctgaataagataga

SEQ ID NO: 346237 - DNA, 679 bp, Cannabis indica
aaaaaaaatacttttgccaacaattgtaaacaatcatttaaagtaatttttctcaacagttataaaccgtcatttaaaattactttttccaacagttataaaccgtcttttaaagttcaacatttttatgacacccacatagccaacaattttaggaaccgttgggaataatatgaatgacagttttaatctattgggaaaagctaattttgtagtagtgtaagttctgcgaatacatgtgttgtggtcggatttatgaataaacaactattttatctttttggtttgttattaggcatgtttaaaatttttgggggcattcagttacagcctttatgctgccaaaaattcaagagaattaggtttaaatttaatatattatatggtgttttgtataggggccactagctaaacaaccatcaagatgtgatgtgtcgaaggagaaagatcccatgccttctcaaaaaggtggtgttgatcgagaggattaatcttcacactagagatcatggctttaatccctaactcactaaaatagatagttgatgaatttttaaaagtcaaagataaacgtgatataatcacaattggataccccgaggattcatagtacctcatacccaaatcatgttatttggagaggatttgcaacaggtggcattgtgtgacttcatcggca

SEQ ID NO: 346238 - DNA, 637 bp, Cannabis indica
ttatttacataaaatacggtatttttatctatttttatgttatactcttgatattttgttataattttttttttattatttgtgtatattattttgatgttgttttcgttttactttcatatagttatttttttttgtaattttatgaaatagtgtaaaaaatatataataaaaaaactttgaacttaaaattataaaaaatttataaaagttagtctttgatgtaattattcctttatttttaactcgtccacacataatattaaaaaacaaaaaaaaatgttttttttattaatatttaattaactaatggaaagaaaagttaattcccccaatatttattctagtaaaccagtgtcattactattgttccactagaccaaacatgactcatgaggtttaattaattttttattcattgatgaattattaaattatgttatcaaagcatgtcgtgacattgacatgcatgggatgggtttgcacagagtagtatgaacctgtataaaatattgttttatcaaaatactataaaaaaaattgatattttagtgacaattttttagttataatataaattttttgtgactaaatgtaattttagtcacaacaaaaaattatttgtaactaaaacata

SEQ ID NO: 346239 - DNA, 497 bp, Cannabis indica
aataaaaaaaaaacaaaaaaaaaattaatcattgtaaatatatcccacgcccgcttttttttttttttgaatagcacaccacctctttcttaaccaattaaaatctaatataaaaattaaataataaaatataaaataaatataataataaaataaatttattttgttgagaaaagctaatatggcagcaagttcttatttaatatatacacaaaacatggcagacttttaagaaaaacatttactctcaaatagaaccctagcagctcctctttctccagccgcctcacccaattttctctctgcatctctctcgtccaggttaacgaaggtggacggccaggcggatctctctctcgtccaaatgaacggtggcagacagctctctctctctcggctaggtgaacggagcggacgactcttcctccttggtccgtatagatctgggaccgatttttttgaaaccaggagagtccatgatcttcgctatggtgatt

SEQ ID NO: 346240 - DNA, 678 bp, Cannabis indica
tatggggtctttgagaatccattagttctttcccaaggtgaagtgtagtttcctcaggacgacttccattgttttgattgttatcagccatggatagatttttgtttgtaaggagggatttttttgagttttatcacgtaggctctcaatgaaaccactaaactgttaatgtatatttttattaaccaataataagtcttttcgtaataaatatatcacagaaataataagaaattaataatgtataaataacactagatattttttacgtagttttgcaattaaatatgcatactccacaagtctatcttatttaagatattttctgaatataagatacaatatacaattgatcatatatattttctctctcaaattctccgtccttttttctgtggaatctgcccctatatatttataagaatataggttggcaattatttacattcaattcaaaatataaccattgatgaaacataatcaattcccatgtttcatttaaattgcatgtggataatacttgataaccgcttaactgcttgttattctcatccttaaagatgatcaatgctaatttggacaactgtatcttgcttatctctaagttactatccttagctattataatgagaaaaaacactaagtgttagcgcaaatgattcgtctcgccaagtttct

SEQ ID NO: 346241 - DNA, 648 bp, Cannabis indica
tatttggttggaactattttacagaaataagatatatatatatgtatgttatatatatatatatataaatatatatatttatattaattttattctcttattgtaattttattaattttctactttcacattactcgaaattcatacccatacaaaaatttcatcactactattttaagtttttttttggctgaatcaattaagttatatatgtacttagatacatatatattttgtttcatgtaaaaacataattttttcacttaattatatattattttttattatttatcgtattaaattatatgcatatatatgtatgaggagtagaattttggaggggtaaaacttcaagttggtgttaaatataatactcttctcaaagaaattaaaaagaatatatacactactacaaaaaccccctttagagacggttttttaaccttttcagcgtcggttttgcaaaattcgctagcgacactgatcagagcgaagctaaagggttttaaaaaactgacgccgtacataccctatgacgtcggttcctaggtaaaaaccgacgccttatgtggcgtaagaactgacgccatacatgagcgtgttttttagtttttttaaatttatataatttatttaaattatatattt

SEQ ID NO: 346242 - DNA, 679 bp, Cannabis indica
tttttaaatattaaaaaaattaattttatttttaattaattttttacatgtaattttaaaatatttaaaaaaatttgggggtgggggatgacaccctccgagactcccttcacttcgtatcaggtcttagataaatataatatacacgattataaaagaaaaaaaaatagactaaaagcttttataaataccaaaactaataagaggtgtacttaaacaaccattttagaggatatactatatgattacgcgtatagtatatatatcaactttcttttaatgtttttttaccttatttaaatattaaatcttcaaaaacattattaattaaaataaaaattttaaataaataatacaaaaataataaaatagtgatactcttaagaagagaaaagtaatatgttattaaaaataaacctaatgcattgtacattttggacaaaactagtatagtagagatatctatatgacagtttatattataattatagtaggtatttcatttatttttgaatagtttacaatgtcgaaaatatagttcaaaaatgatggaagatgatccaatcaacttacatcaggccataaaaatttctaactctaaaaaatggaatgattcattcatgaatgaagagaataagtttatgcaagacaataaggtttgagaagttgtcctattacc

SEQ ID NO: 346243 - DNA, 972 bp, Cannabis indica
atggggactaagaaatagtagttatacatagtaagttttgtgcaaatagttgcatattaattttatagtgaaataacatatgcaagtagcaaaactataataaaactacaaaacaactgtatacaaactaaaatacaggaaaaactctttgaacatcaacatccatgataaatctcattgttacccattgatgatataaaaatgggactgaccaggttaatctaatctattagctttgccaccttcactcataaatcttaatcatgtttgtcctaatacttttctaatataaaacatgctgcatgcaaaatatgaagcttgatctggtgattttctttagtaggatatgtattcaatttagtgagttttcattaggacatgtacacttttttgttatgttattttcattttcactttcatttgctatttgtttttgttattattatgattctttccatgataatgatatatagccagatatcctttatgctcgaactaaatcgataataacatgttaaataaaattaaataatgattttctaataaactgggttattattaaaatattttcttccaattgaaataaagttttgtaattttctagaataattaggatataattatcagccaaaataataaatataataacaaattaaacatcagtaataatcaaataataatcataataaatgacaaattaaacattttgcaatgtatgcatcgggcctttcctggaaactaacttatttaaagctgagccaattgtttatttgtttttttctttttaaatttccaatattttgattgctacaaaatgatcagtataagacaagcaccgacagacaaagttgatatggcttgacgcgtaaggaacagtgtccaacaaagttcatacaaaatatgattattaaaaaactgaaaataaaatttaaaataaaaaattaaaaactgaaataaaattaaaaataaaaa

SEQ ID NO: 346244 - DNA, 589 bp, Cannabis indica
tcctcctatgctggtttttttttcccagttgctacagcattaccttagcattcctgccagagaataaaaaatttcctatgtgtttgtgagaattttccaaaactcacaatttaagttctaacacctagtttcatatattcctatctcaaaccagattagagaacactatttatgcatcaatttttaagttatgcaaggtaaatgaaatattcctatttcacttacaaagaaaaacctaaatctaggttttcacttactccattcaagttgaactactagatctagcccttccggaacaagatctagataatcaaattgttattaatggccaagaaacaacaattaattaaaaattagaactcacttgaatgaacaaaggcaaaaatactaacataagctttaaaattaaccatacccaacataggagttcatagctactcaagccttaagaaaattagctcatgttcaacacaaaaattacaatccaaattcgaaatttctcatccatggctgctgccctttttacaacgtaacaagtttttgatattcaaagataagaaagaaatgaacaaaatataaaaggaaaggg

SEQ ID NO: 346245 - DNA, 926 bp, Cannabis indica
tctaggctctttcccagccggagtactttggtggagtcgaggtcgcacactgatatttcctcgacatcctccattggttccacaattttttcggaccccactcggggatccaactcatcttcttcagccatttctggctcaatggtttcccggaccatcagcacgggcaggtgggttgcaacattgtaacattgccttgcttccccctggtttcctctcaccgtcccgattccagcttcctgggtagggaactttaagcacaggtgccgaatggacgtgactgcgccaaaatctaccaaggccggtcggccgaggatcgcgttgtaagcggtcgggcagtccaccaccacaaaagtgcagtacttgaatgtgctctggggggtgtccggacacaaggtgactggaagtctcacttttcccattgggataagcgtcgttccattaaaccctgtgagttgggaaccactggtgagaggtctcggtccgtcaggcctattgcagtgaaggcctccttgaagagtagattcacggagcttccgttgtcaatcaagactctggccaccaccttattagcgatgggggtctcgataaccagcggatcatggtgagggaagcgcaccgtcttggcgtcttcttccgtgaacgtgatgggttgatccatcagccggggcctttgagctgggagttgagtaacctcccaaacctcattgtgctttacggccccagcgtaccgctttagctctttgcgggtagttcctccaatatggggacctccggagatcatggctaccctcccgttgggtctgggcggcagaccggggatgtgctgggcatcgcccgcgggagcaactggagccaatactcctgctgcacccccccggtgctccctggggcacaacccctgtcgcctggcccggatcgaggtg

SEQ ID NO: 346246 - DNA, 635 bp, Cannabis indica
ttgaaaagattacaaccgtatacaaaatatatttttaccaaaagtgttgcctaacgactaaaaaataaaagcccatacgtcccgagaccgaacactccaggcctaaccctacacatgcaaacatatctatgagtcgacatgctacattaagaaaaaacataaaaacaatataaacatacaatcgacttgcatctaggcacccatacacctatctacaagacttcagatgaatcaagaacgttcttaacagaagtacgacctttgtaccatatgcactaaatactcgtcctatattaattttggtagggctgaaccgcaccttgagtactactgagtgtcgtacaacgtgcacttcatactcattcgtactaaggttggtaacactgtgtcataccctttaaacatcatatattgtaccaatgtacattgtaccgcaaccgtactagtgttggtagtatacaaatcacataatacataaagcatataacacacatacacatacacgtatatacattttatactaatcttacctcgtttctaggttcaagtgtgatggtcaacctaaataaaaatttcactcgatgaacagaggccctgtgtcacatacacgcaaaataggtaaacaacttgctaaa

SEQ ID NO: 346247 - DNA, 806 bp, Cannabis indica
ttgtatgctcacctaaaaatttaacttgatgatgcggacactgttttcaacatgtggcacgaaaaaaacaaatcaaggctccacttcccaagatagaacagtgtcacctacacattgggggcgcctaggaagaggcttagatcccacaaaatctttctaagcttcatccttcaatagtccaagtaaacaactcaataactaagacaaagaacatgaagacatgtcacaatcaagccccgaaccctgaaaccaatttcgagacaaaccttaccaaggagacacccaggtaggtaccaacacccttgggcacacaatggctagggtttaggttttcgagaacttctttggacctcaatttcttaaatctaacaaggaatgatgtgagcacttgaggctttacaaattgtgcccaggaggggcacaaaacctagaccagcccccagcttgactatgtgcagctcccgatgccaagtcacccaactcaagttcactaagtaagactcaactgaattagacgaaactagattagtgtgagtactttttagcagaaagaatattgaagataaaaaagacagattacatgtagttctaacccagactcagggcccacgttggcatcttcgctagctataggttcctagttcgacatatgtcagcctggggcgctttccaacatgcaaattgaatatgttttccgagcatttatttgttttcatcaaatcgaagatacaaatgctctcggacagcaaacgaagcaatctggaggggcgcccaagttgacaccccccattaacataggcacccaa

SEQ ID NO: 346248 - DNA, 863 bp, Cannabis indica
gggcacaaaacccaacataaacactttgagagctgtatctagaattcactctgtctaccttagtgatctgcacgatattatttcacaatcaatacaactaaaaagagagtaggtcattacccatatacaaggaggccgaacctctataattcttatgtattctttttatttattatttttaactccttattggtgattaattagtgagtatttgactccgagtcatctgactatttttctagtgaacaataccaattaaattatgagcaaaagtccaattgaccatcatatgtactacaaaattacaaagtctagagataaaataaaaattagagaatctattacactgatgcatatagtcacatactaatactccaaacgaataggtcatcttcaaagttttaataagtgtctaagaataactctcaactatcacaaaatggtgttctaaaacatcaccgactcaatggctagtagacaaactgcaattttgccaataaaaggataggagaagttgagcttgtccataacaatctacaaaactattcccaagtaatctctagtcaatgctgctagacacattgcccaattactgtgtgtattatagaaatactctataatttattcagtattgctatgggatactaaattgcttaacacttatataacatgatatcttataattaattatcaattctgaaaaaccgtatttttgcaaatgtcaattacatatacgaaaatataaaactggatgcgtctgcagaagcagaaagtaattctgttactgcagaaactagttttgcagtgacaaaacagaacaggcaaaataaaaatatctgcagaaaaataaataacttgacaca

SEQ ID NO: 346249 - DNA, 858 bp, Cannabis indica
atgaagaggaggagggtagtgacggagaggagaaggatgaggatgataatgaagattcagagtccaaaggaaaaaatggtaagggtagtgattatgaatgcgttgatagtgagaaaaaagtagataattagacaatgtaactaagttttagttactttctatgttttactttattgtaagtccatttagttgatggattagtatttttatgttgttgttatgttattttatattttgtcgtcttttttctgtattaatttgccactaatagtcatactcttaatttgtatttcttatgtttttgtaatagttatattatagattatggtgtttgcatttgatcatgatctttttatttttttcttatttttttgttggtttttagtttatttgaagttgtttttaagttttttcaaaaagaataactttattttttttccctttttttgtttgtatttttttattatcaagaattttgttgctttcaatgatggagccactcaaattgatgttgaggctactgttcagtcgggtgtgaaagcagttgagaattgagattatgacaatgctatttgtttgatgttttttggttgtttaatggttgtgattgtttagattttttttttctaatatttttttataagaaaaaaatagatgtcttcaagtgggtttggtggtgattctggtaattaggttccacattttgaaatttttgagattaaggagggtcatggtcttggtgttgaggtatggttgtgttgcccttattttctcccaaaatacgtggacttggataaggctgacatctggatctgtgaggattaacacataaaaaatcgactaagtcctaggcgaaag

SEQ ID NO: 346250 - DNA, 801 bp, Cannabis indica
attgataacaaatcagattaaattgaaatgggttttatttagggcataaaatcgtaacaatatcttggtatgtgcgagtcttaaacccgaccttcgtggtcctgcatcgtgcgagacgtaataatgcgactagactctgttagggtcacataatctcgctaagtctagttcaggtgaggtttatactcaagtggtatcattttgacagctcagcactcctcgaggagagtgagtctatgtgtcatctttatgggagcagggtctcaagtttctagatgaaaaattcataatgtaatactctatacgttctacgatatagatacgctatgaaattatccatttgttattatcctaataatcaatgatcctctatagaagatctacactgaaagggactaatataccgttacacccttcaatgtattttatccttaatacacttagctacgtataaatgatattccagtgaactaatataattactgaaatgagtactcaaccatattatctctgttaagccaagcttgaaggaaattatcgtttgacttctatatccagatagaagctatagttttcatatctatgattagcgctcccactcaattgaactaccatgtccttggcctatatgtcacgagaagaaccatttggtcgactttaacgaacatattcaataacacagatagtgcaactgaactagaacttaatcatcttaggattgagatcacttgatctaggattaactaggtgacattgaattgaatagatattatggtaagtttatcatatctagttcaagtt

SEQ ID NO: 346251 - DNA, 1136 bp, Cannabis indica
tattctattagtattaaactagttaataaatcacacacgtggcgtccctatagattagggcgttacaactaggtatcagagcagccatggttttaaaggtcctgaagactggtcgaatatgtacatttgctgcgaggacatgtcgactcatggtatatagtaagtatttatattatttgctattggattccctgcctaggctattacaaagtatgttggaagagtagcatagtgaaaattttgataagaatatgtgtatggtgtatgcatattgatattgatatccgtttgagttgtaaatggttagaagatgtggactaaatgtgtgatatgttaagcagtaagggcaatcacatagtctgattagcgagctatctgggctcagggaaaacggtaaggaagagaattcttcattgctataatgctgggaacatgtaaattctgttatgcaggatatgattagacaataagggaaaacagatctgagatctgaaagaacaataggctcatcttgtgtctattcttatattactgacacttcctgttgtaccactagatgtggtggaatatatgaagtcaacttattagtaaatcaggaagaaaaaattaaatgaaccaccaattatgagacagaacaaaaaggttctagggtgaccatgatagcggtcaaagtgagaataagaaatggtgaccttatcctgagtgttcaagatgcaaaaaggcgccatttgggctaatgtagagccatatcttgttattgtgggcaatattataattgctattgatattaaacattgtacatttagttagagatatcaagaaatctgaatggactatgcatgtatgttagttagtggtaatccatttgaccggatggacaaattagagaaatgacaaaatgagttaaattgctggtattcccaagtggactatagaacacgagcagctaatggatgcattgatctaattgattcaaataacaaaatcttttatttaaaagtgatctagcattagcaaaggtgggacaatttatgagtattgtctggaatactaggtgaattgaaggcgacgattgtgtagtaattttaagattatgtaggcgtgagactacctatgttagcaagaagcatcatgtt

SEQ ID NO: 346252 - DNA, 541 bp, Cannabis indica
agttaataatctactatgtatgcgagcagttgtcatctgctatgctttctattcgcaagcagtttatcagttctactttgcgtaaacagtcataatctgatttaagcaaacttaaacatactttgaataactcatctcgtgaattactttgtatatttttgattgcacgtgtgaatagttaggctttctattcacaccttaggttaagtattttttcaaggcaatcttggtacctcatttaatacattcctataaaatgtgagtcgttagatattcagcttcgcatgcagcttaatgttatttttatgagttaagtctcatttacaactgctacattttgattttccttttgactttatattgtccataaataactttaatcaatttggaaattttttttaaagtggagtgggtttgcaatatatcatgtaatttcagatggattttagttaatcatacacatatatatgccccctcaagtaatttaaaagaataaaactttgtaattacttgaatagtacttcaactttattattaataa

SEQ ID NO: 346253 - DNA, 569 bp, Cannabis indica
taatgtaagttccactcaatagttaattgtgggcattcttttagacaaccaaataaaaaaaaaatgtaaaataaaaataaaacatatacataacaatttttatattacttcatcacaaaataatatgtgtagacatttatagtaaataatgataaagagtagagaagaagcaataggagtttatgatcacttattctaattttataaataaaattatgcaccactaattgatgcaattatcattataggaaaacaggatgactgaaccaataaattaaaattctgtatcattagtagataccattctaaaggaatagatatatttagagtttgtacaaattgatctaatttattgatcgatctaattataattgactgtcaaatataggttattcaattgtgatcagatcagattagatgttatttttgaatgtccaattagatcggatcggatgttagatagggtgtctaaaaatttaatacatttaatatctaatcgaactaattagtattttcatttagttttgatgagtaattagattttacattgctatacgtaaaatacatat

SEQ ID NO: 346254 - DNA, 1195 bp, Cannabis indica
tttagtaaaaaaattctaacacggataaaagttcagagggcatgatttaatacatatcaaaatttaaaagaaatgatttggtagatatcaaagtctgaggagtatggtttagtacataaacaatcactgaaacaataaaattgaatgaaattagacaaaagtctttaaatttaacaatctcaatagttcagagagaatttttaacgataaaaaaaattcaagaaacataatttagtatatgtcaaaattcggaaggaaaaattgctaattagcctaatatatatggatagaatggccagaaaattaagaggggtggagctcggctcgacctgacataactatataactttctctttgttgtttattaaatacttcaaaaaatttacattatgctttccatgccattttgagctctcatcactatcaatagttagatttgactagttagtgttcatatattaattacctaaaaatattcaaggggcaactaaaaatacattttctcggactaccttggccacacgctatagaaatgaggcaagacttagttacatctctttgtggagagagatagacaaactacttgagtttgaacaagactaagtagacaacatggggtttggccacttaagaggaaggaataagaacccacacaattgatgcattaattcaatagctttatggaagtgtagaattcagtcgaattcttgtatgttaaattgaggatatatattgatggtagaaaaatgttaaaatttttaacaatattttagaagattagctgaaccatgttaagattgataaatatattgctgtaataatgttatattaatgctaggatgattgtacatttttaaaattaagttcactacattatgtatgtgggaaaggggagccacaaccttaggaggggcaagccgtgtacgtggacgtcttatgcatttgggacgtgtgaactaagttatgcatgcattcttgctgcttgttggttctatgattttttttttgaatgcaaaataaaattttattaatttgctaaattagtcaaaagacaagattacaattcagtaggaacaacattcctactgaaaactcgatctaaaaaagaatatgactctctagcaaagctgtgcgtagtcatattagcagatcgtttaataaaaaacaaagaaattatttaaaatagatagaagtt

SEQ ID NO: 346255 - DNA, 580 bp, Cannabis indica
ggaatatatatttaatcacataatcttgattactttccactatgttgacaacataataaacaagaacataaatgtgataagggtttggatgaatttataattcaaataaccaaataaatgataacatgaaccgaatgacacaataaataatgaaaatacttctgtctctttattgataattgaataataaagattataatgaaatagagttttatttagggcataaaacccaacaaactcccacttgcactaatataaaacaatcagtacatatcaattaatcttaaactctgaaggtgctttttaaatgcagttcctgcagatgatgtggtatttcctttctatgtgtttgcttctcttgtcggttcgaggatctttactgttggcaatggctccagtgttgtcacaaagcaaaaccagtggtttttccattccacgaacaacaccgagtcctgtgaagaattttataagcaagacaagttctttagcagcctttaccgcagctatgtattctgcctccatggtagagtctgaaattgcggtttttatagcacttctccaaaccactactccaccccca

SEQ ID NO: 346256 - DNA, 1101 bp, Cannabis indica
aaaattttattaatacaatcaaagtactgtttaaaattttatgaaatctgaatttaaatttaattatttgattacatataactgagatctgtttggttaaattaataaaattgtattgattaaatcttactttagggtaccaaatatgtacaatttgaaaatatgaggtaccgattaagtattattgaaaacacaaggtaccgaatgtgtttttcatgaaaacacaaagtaaggtactaaatgagtatattccctaaatttaatcctcttatctaaacatttcatataataaaattctatcactaatatttttatataaattcttcatttcagtcttcaaatacacataatgttgtgcaacgtactctttttacaacaccataaaacaaaatgtccaaaatttttattaatagttgttaaattagtttcgtaattgtttcttttctttttcttgaaatttagctgaattgttctctctttcttctatttaattttaaataatattgattccatcattttttttttaatttttcaaaaaaataaccacaccaatcttcatattttcaaaaaatatcaaaatttatttttataattctatttcctactttttttttataatccaaataacacaatattatattctatattatagcactcaattaatataaatatatataaaaagataacaaatattagtaacaacgcgcgaagcgcagcttaatactattagttttaggtaattaattcatttcaaattcatgtctaaccttaatactattagctctttaattattatgtatactattcttaattacatgtgttatttgaaaagactacctatcattaattatgtaaatattattttttttccaattatatattattgataatttcacactaatgtctatataagtattctttatttttcttcatttttttttaactttttttaatttatttattaaataattaaatataaaagagaatcaaaatatatatatatatatatgagaattttaaggaaagtgatgtgacatcatatatgagagttttttcattttttaatttttttcaaaacttttaatttttcttatatattta

SEQ ID NO: 346257 - DNA, 513 bp, Cannabis indica
ttgacgttttgaggagaccatcgagaccttatctgctgaggtgaatagtcttcaggaggagaggacttcctttcgagaagttcttcatcagatgaaggaggaaaaggaagacaaggaggaggagctttcggctgaggtggacaggttgaaggagaaggtcaatgccttggagacagtccgtctcaagctcttctttgatttttggaaggctaatcctcatgccaatttcgactacttgggcgatgctaaggacatataccttgagctcttcgcgtcccaagtggcctatggtgaaactgaggcggctgcttcaacctctggtcaggctgctgatgcacctcctgttcaaacagatcctcctgtctggttggcccagaagaaccgaaccaagagcctgtgactccagctacttaaacacttctcttattatctttttatttgacatgtcttattcggcctcagggccttttctaagacatcatgaccgactaagtggtctttaaacttggaatt

SEQ ID NO: 346258 - DNA, 839 bp, Cannabis indica
atcatcaaattgtccattgtaaagactaggaatggaatgtcttctttttcctgtgattttgaaattattattagcgtaaggcaacgattttgaaactgttttgattttgttattgctaatgttagtactgttttggtatccttttctctgttcaagtcttatatttctaattctgaaccctgtttttgtcattttttgttttattgctgttattaaacgataataaaagtgaaatgcaactattacgaaacgtttaaatttattacacaaactaaccatttgtccaagtgttttctctttgtctaatgtccaaaataagttcatgcaaaattgaattaaactattatgaaatgatgatgcaactctaaatcaacttaaaaaaatatggtacttaactccaattaacattgttgttgcttgattttattttgaaatcataacaaaatgactatgcaacagaatataacttatatgtattggttatacctgatttggattgattgggagctcctgatcttttcgttatttcaggtaagttcttactaattgtgaaccctgtgcttttaatcagatttatttgaatcagatcattttccaactattataaaactaatttataactatttgcataaaacttaccatgtataaatattatttgttggtacccgtcaactaaaattcctgcataatttataaactattataaaacgataatggaactataaggcaaccacaaaatataataaatggacttatacgtaacatgttgtcccttaattcgaatttgatctccttattgtgtttttaaaaaactgaattgcacattgtaaaccagcaat

SEQ ID NO: 346259 - DNA, 1158 bp, Cannabis indica
ttctcgaattctcaactgatgatagcccgatcggagatcaatctttgaaaagactgtcttacccaaaagttgatcaaaaagatcatcgatcctagataaaggatatttattcttgattgttagcgtattcaattccagtagtcaatacacattcatagagactgatctttcttcttgaaaaacagtactagagctccccaggtgacactctaggccgcgtaaaccctatgtcaagcaacccctgaagttaaattttcaattctttaagttctgctggagccattctataaggggccttagaaataggtctggtgccaaatcaatgacaaaatcaatttctttctgaggtggtaaacctggaagttcatcaggaaaaacatatagaaattccagaaccaccctgatgtttcaccctgatgttttctggctgaatagagtcaggccgagtggtatccaataccacggccgaaaaccctaaacatccatcacgtaaaagttctttagctgttagtaccgaaattactgggatctgagatccctgaaccgaaccgacaaacacaaacggttcttcaccttctggttggaagattaccatcttcctcttacagtcaatacttcctgagtacttggacaagaaatccattcccagtataatataaaaatctgctaaactaatttttatttagtcagcactcaattccctatcttcaatcctgatcggcatagacctaatccaccttttggagataactaactcaccgccaggtaatagggttccaaaccgtgattcataactatcatgcggtctatccaatttactaaaaattctagctgcgacataagaatgagtggccccagagtcaaacagcacagagaaataagagttatcgaccgagagctgacctgttaccactgaagggctggcttctgcatcagcctgagttattgcgaacaccttggctggagtaggtttcgctgcagtcttcggtgcttcagttctgtgttggggacaatttcttttgtaatgccctggcatgccacaccaaaagcacccctaccctctacactgccccagatggtgccttttaccattggggcactctgggtaagtgtatcgggtctcgtaattaccctgccgattgcctcgaccttggttcc

SEQ ID NO: 346260 - DNA, 822 bp, Cannabis indica
gaaaaataattccaagtttaaagaccgcttggccggtcatgatgtcttagaaaaggctctgaggccgaataagatatatcaaataaggagataaaaaaagaagtgtttaagcagctggggtcccaagctcttggttcggttcttctgggccaaccagagcaggaggatctgttgtttgaacgagaggtgcatccgcagtctgaccgaaggttgaagcagccgcctcagtttttccataggccacttgggacgcgtagaactcaaggtacatgtccttagcatcgctcaagtagtcgaaattggcctgaggattaggcttccaaaaatcaaagaagagctcgagaccggttgtctccaaggcattgaccttctccttcaacctgtacacctcagccaaaagctcctcctccttggcttccttttcctccatccgatgaagaactgctcaaagggaagtcctctcgtcctgaagactatttacctcagcagataaggtctcgatggtctcctcaaagtggtcagcaacctcgagatccttagtcagcacagtgattttcctctgagcggcaaacaacttcttgttggcttcacccaattccaaccgaacagctccgacttctgccctggcttcttcagcatccttcctggccaagtccgcctccgccctcagggtgtcagacagagccgtgttcttgcaagcagcagacttagcccgggagtaagtgtaggccaacttcagaccggcctgcacaaggaaaaaactttagcatttgagctaagtatggaagatgaaagagaagtattaagaaagacttaccctgg

SEQ ID NO: 346261 - DNA, 406 bp, Cannabis indica
aaagaaaaaaaaattaatctataaatttctatctagtaaagatattagaaatttaatattagtagagatagaatttggataagtttagggagaggatttatataagtttagggttataataagtaataaatattagaattgttttctttaaattttagaattgttatggtgagagggagatgattatgtatttatagaagtttatagggttatacggtttatggttagatttagttttaattttttttttaaaaattgtatataaatatattttttaattaataattatatagcatacataaaaccaaagacgcgtgatgataattttggaattagaaaaaataaattattaattaatataattaataataataaaatgataaaaaaaatatgagaaaataaataa

SEQ ID NO: 346262 - DNA, 617 bp, Cannabis indica
gtacatcccactcctccgttgattgtgtcgacaggtgttgtcccattacctaggagtggaacattcattattctaacattgaaagaacctgtgttgctatctccatttgtctagtttccagccattatgattttcctccgaaatcaacagtaaaattcttcccatagacggcgccaaatattgttggaggaatttagagaacaccaaataaaatagtatgatttaaatatggataagattatacgattactctacccagaatggcgagtattcaaactatggacacacagacgtattgaaaatataaataacacaaagagaatatagtggttcagtcagatcacagtttgcttagtaaactattgcaagtcttgttcatttcatgttggatcactcctttatatacaaagcaagtgtcctttgattacacagagattgatttaattctcaatccgtttgtacattgaatataaaaatttaaatcaattagaacgtaaatacaaatgaagaacaatttcggcctaattcactaactacaacaacgtacgcgacacttttgttatgccatcttttagatggaatttagtttctgtttctttgttggacaaatttggata

SEQ ID NO: 346263 - DNA, 828 bp, Cannabis indica
tccattcttttctttccctaagtagtgcttgtttggtttgttttgtttgtaatatttagttttgatttcaaatcctaaatttttttgttcttggaaaatactgggttcgtttaggttcgatggatgtattaaacaaattttatatagtttatgaatattttcggtagaagaatttggatttgttttgggttaatatttgaaaatataattcacttttgattttagtttgttcaatatcttaatttaatttgtttaattggtttcaattcctgagttttagtttgtttatcaattcaaagaaaaaaatgaaaagaaatcaaggtaaaaaataaataatctaattatatatatatattttcaaattgtaacaccctaactagcataggcgtgttagtgtgatttttaacgtattgtgcagctcgttgctaatcaacgaggttatttgaaaaacgtgaataattaaaattttgctttttaattaaacaaatcatattatacttataaaattctgggatctcgtttaaaaaatacaattacaaaagtttgctattcatttacaaaagattcgttgcccaacgactaaacaacagaagccctgatgtcccgaggatcgtacgctgcaggcctaaccgccccgacatgtacaatcttcacccgatcgctctcacgactcctcagctttagccttgtcgttacctacacatagcaatagcactgtgagtcgacagactcagtaagaaaagcataacataataaacatactaaaaatctcgggttataatcaggcgcccatacacctaaccataaccctaactaaatcaggaacgt

SEQ ID NO: 346264 - DNA, 540 bp, Cannabis indica
cctttgagttcaccgctcctaaggaaacactttgaccactgtaaatggccctgaccaccatgactttagcttaccaggaaacaacttcaatcttgaattgaaaagtaaaacttgctgcctaggttgaaactccttcctgacttttcttcggtgatgccactttttggttctctccttgtagatcttagcgttctgataagcctcatttctgaactcctccaattcatccaattgcaataatcttttctcttctgcagcttttaaatccatgttgagagccttcatagcccaatagacattgtgttctaattccaccggtagatgacaaggctttccaaacaccaacctatatggtgacatcccgattggcgtcttgaatacttttctataggcccacagtgcatcatctaactttcttgaccattactttctctagaatcatctttatctcccggttagaaattttagcttggccattactttgcggatgacacggtagagcagttctatgacagacaccatatcttgaaaggagtgctt

SEQ ID NO: 346265 - DNA, 733 bp, Cannabis indica
tcactaactcgatctttcttggatctaccataacctcatctttattgataatatgacctaagaagaatacttgcgataactcgaacttgcacttcttaaaattggcataaagtttatgttcccgtagtctttgcaaaatcatccgtaatgttactcatgctctgcttctgacaaggatatcatcggtaaagactataacacaaacatcgaggagatctttgaatacttgattcatcagattcatgaaagccactggagcattggttagcccgaaagacataaccaaaaatttataattgccatgcgcctggtgcgagatccagctttttaggattagtgtctttgattcactcgttaaaattctcagagaatatgatttttacaatttctctttttgggattataataaggtggatggctgggaacatgatctacaattatgaaattcccgactttcctaatagattgattttctttaagtattaattctagaactgaaaagttgcgcgtaaatttatatggtatctaaattatattttctactagtgaattaagggcttgtttggtacgccgtattgtaatgtattgtattgtgtttgtcttggattgtgttgtattgtattgtattagtattatttaatacaatacaatgtttagtattgacttgtattaattgattgtgtaaagttataatatatttttaatacactcgatcccaacaccaactacgggt

SEQ ID NO: 346266 - DNA, 842 bp, Cannabis indica
gtaataacctaattaatacggtttggctccgccggtattaattccgccggtattgctatattttcttgtagtgattattagcagatcagtttgaatcctgagtatacatgaactcttatttgcgttcattaagttctttgattcactcgttaaaaattttcgagaagatattcttacaacttcttgtaggaaatttatacgtaaaataaccctacacaactcacacacaaaagtcaattcacaaggtcaataatgacctttcttgtctaaattaaaacaaaccacacaaaaattgacacatttactctcttaaaaaatctaattttactttaccaatttatctaatatggccaatttattgatttgtagagttgaacaaaacccttcgaagattcaacaaaatcaaatgagatgataaagatccaaacacaaatcagtaccagagaagcatgtacaaacacaaatcaagctaatggagataagatgagagaagagaagaacaaacacagtgttttacgaggttcaccccaaagattgggttactttcacggtgagctgcctcagagaagctcgagccaaatctaatacgatcaaccttcgattacaataatttgtgacgattccagtcacaacacgatttggtaatctttccaagaacaattagctaaagttactgactttctttgttttacagatttagcaaatctctctttattttctctcttcacactctttttcactctcttctttctttctgagagtcactctctctaggttctcaatctcactttgcatttggtgtagaggactccttatatcgaggttctggtaagatctcttag

SEQ ID NO: 346267 - DNA, 1649 bp, Cannabis indica
ttgattgcgtacacttgcgtaataaccataaaattcgtaacagtacatgagaattaagattatacaatatgaataaagtaagtcagtagtgtattaaagtaatagaaaactttaatatggaacttctaagtacagtttactatacactatacttctagtgtgtgtgattttaattcggatcacatatatagatggacatgtagtaaagatatagtgtataattagattattcatgactggaccaatatgtaataaatatatttcattaacttattgtttaccatgatagagttattcatatcgcaataatgatcattagtagatccgcctgaatcctgagtatacatgaactcctatttgtgttcattgagttctttaattcactcattaaagtttctcaaagaatatgattcttaaaatttctactttaggagcttaataacatgagtggctatgaacatgttatacaaaagtggaatctaagctattttaatgaatcgaatattagttctcctatagtgttaattatgagagtactaatagttggatccaaatctataataagtcatagattaactgttcaaattgaattaatggtacataagaaataaagaaataattagaagggtaaaacagtattttgaccaactctaattatgaactaatagttagagggcgaactacttatattgattacattaatggactacaagtaagaattttgtaaatataattttatattatcaaagagtgtaattctatatttatagtggagtaataacaaaattaataaactggattattctattaatgagatcgataataatttattagagcttcaaaatataggtccattgtcctaagtcgcctttatacaacactatacattggatgcttttatttgatgaatgaatttcgagtgaaaattaatttctatgagaaataaattcttaagggaaaaatagtaattcgtgaaattattattttgattaattatggcaattatgaattgtatatttaatagtatttaactatttagttttattagataaaactatcttatttaattaaatataatattattattaaataatattaaagaggaaaatatattattttaaaaaaaataatatttatttcaatccttgtgaaataagatattaatgagaattaatcacttattattaattggcagaataaataataaatctcattaatggcaaataaaataaattgatcttaaaatatgacccacacgtgtaggccaaatctacacgtgtagggtgacatataaatgcctatgattaaattagttctatcatgttattagttaaaataatttagattaaattaagctaattatcttttagctatcaattaaataaattattggataattgtttaattaaaagataataattaaaataaaagatctaactgatatttgttattcagttatttagattctaattcaaattaaattagatatttacttttattttaaataaagaattaaaatggtttatttataatactatatataggatatatagtatcattaatttacagacaatcagaagtctaaaaacagaaagtaagcaattgaaagtagaaaaaattaggaattgattttctcactcctactctct

SEQ ID NO: 346268 - DNA, 983 bp, Cannabis indica
ttttgccccatatgtattttgtcccttagtggacttagttgcattttataatcagcttttattaactatctttggctgataataatccaagtaaaatcattttgttaatcattttacaaaaatacggaaaagaagcaaaaattgtatttctctcaaagctctctctctcgaaaactcctagaggcagctagggttctgcatttcttcaacaattcaagtaacttctcagcaaagtttagtgatttctagttgttggtaagcttccatcaaccctctctttagtttttgaagtttatggaagtgaatttatgcatcttgtgattttgagtgatgtagttgctgatagggtttgaggaggttttctggatgttagatatgttgtttaatgttgatttaagatagtagtagtggttggttgttgtgttagccaagctttgagctttgaagctcaaacttggagcttccatggtggtttttgttacttatcatgttgtgatgttttgttgcttttgaaatgttctttaggatgtttggagcaggtctggagagttttatgtggattggggttgatttggttgagttgtgaattttttagtgtttcctgcactgaaccgaaattccagtttagagaggcctgtaggaaccggaatttcgattggcttccaggatttttttcccagaatcggaattctggtggggaaccagtctaccggttgaggaagttttgggaaccctagtttttcccattttcgtgatatttagggtattgccatgttattcatcgatagggaacttttagtttcaagtttaagtcctcgggaagtgatttagcgtgtctcttatcagtgttgtgattgatgtgatttaggagcctgtaattcatcgagcagattgttccactcaggttgaccggcacacctgaatttggaatcgaggtaagattagtataacaatatgcatatgtatttacatgtttagcgtgc

SEQ ID NO: 346269 - DNA, 645 bp, Cannabis indica
ggccataatctccatgaaaatagaaaaacgtggacatgtccctcttacttatgtcggttttcatgggagtatgctttttgcacgaacctactgactgagtagccatgtagatggtctccaaatcgtcagtcaagacaaagaaagcagtgaatttggaaggattttctctacaggcctatttggctttgccagcgaactttccctttttcccattgccttgcctgttgttgttgttagaccttttaccacccgagcatgaatttcttgggtactgggggtggtgaaccgatgttccagtagaaggagcttgtgattagttcggtttaagctccacttctactcgcataatggcctctttgagcttgatgaaaccatctgtgcgatcgaggaagtcattcatagagtctactggtccatctctcttgatgtccttccaaagctctctgagaacttccatgccccctaatattgcggttaatttcccttcttcggttaatcgtgccaccttcgtcgcctctatcatgaatctactgatgtaagctcagagaggttcccatggccttttgttaggctattttttggcctacgttttggatctattctatgtgtgtttttcactgtattgggacggaattacgcttgttt

SEQ ID NO: 346270 - DNA, 529 bp, Cannabis indica
ctcagtatatcacctgtgtagcctgagatagtttacacattcgattatattaactcggcctcaaaggtgacgttaggatcctagggagtctttgatgtacgtggcttgggagaaattatttcaaagtccaagtcacttggttcaaaaagcaatcgtgactttgggtaaaaacaaaggcttagccaaaggaatagaggacacactgggaggttctggccaagctgcatctcgcaagaaacggcatttgccttcgatgatttcttgcaagaagcgcctgtggcgactaacattatcttcctgatgaactttcactaagtgttccctaaccctaccatcgtttaaccctaatttggatgtgggttttaaatggttagatttataagggacgtttgattatgtaggaagttcaagttctaaatcttctggacgataaatttctgaaccagattgggacattgctgcaagaagaaagcaatcccaatccctggaaagaattttatcaaacctgaaggtggtgagttgaaggttc

SEQ ID NO: 346271 - DNA, 544 bp, Cannabis indica
ttctaaatattggggtccacaattaaattaattcacatataataataaaataataaaaattagtgctaattgcctttactaatcaaaattactagagcggtcattacacattcattgccccaagccctgacttcaaacagtaagttgctttcctcctttacatgcttgttacattgtgtttagttcctgcttaatttgtttgtatcgtttccatctcatttggttttggtagtttttagggttgaactgtatttaggtcggtagtaggattcaagcaatacgtaggttttctcagaatctccaactcatcaccttcgggtttgataaaattctctttagggattgggactgctttctgtttgcagcaatgtgccactctgattcaggaatttatcgtttagaagatttaaaacttgagtttcctacagaatcagccatcccgtagaaacccaatccttcaaacccacctccaaattagaattgaacgatgctagggttagggaacatgtagtgagtgttgggttttattgttgggttttatgcc

SEQ ID NO: 346272 - DNA, 698 bp, Cannabis indica
gttggtctgtagggtcagacatcattccaggaagcagccaaagtggcgtactcgtgtataagagccaattattccgtgggtgtaagggcccaatggagacatgaagcggggacgttacatttcaactcgtggaaagctttctcctcagagttccatgcatttaggagatctggtcgaggtaaaggaaagaccaggagagcctcttcgagcctacaccagcacattcatgtcggaggcgagtaaggtttcacgggtaaccgaagacgaaaagttgtctacgatcctggggggcattgaagtccctggtgagctttggaaggacataagaaagaactgtccagtagactcgatgagtgattttcttgaccgtgcagaaggatttatcaaactcgaacaggccattcagtgagcagaaggcgaacaaaaacctagcaagttaaaagctccttctattgggaaatctttcaagctcccccattacccgagcaattcaagttcaaatggtaaacggtccaacaacaataatatgcaagggaatgcgaaaataggaaagttcacttgaaaaaccgaacaagctcctcgggagaatcctaccaagtatactagatttaccatcctaatggaggacatagaaagtgtttacatggccactcagtcactagccccgtacaagaggcccgcacccatgaaaaaagatg

SEQ ID NO: 346273 - DNA, 1395 bp, Cannabis indica
ttttcccaggaagcgtgtgagtgaggacaaagcacgctggaaacactcgtgttggtctatagggtcagtcatcagtccatgaagtagccagagtgacgtactcgtgtataagagccattcatttcgtgggtgtaaggacccaatggaggcttgaagcggggacgttacaaatttcacctccatgggtgatctacgaccaattgccctttgtaatgttgcttataaggtgctctcaaaagttgttgctaaccatatgaaaagccttatagacattgttatttttgatacccaaagcgctttcatccctggacgtctcattttcagataatgctatggtggcgtttgaagtaatgcattatcttaagaggaagactaaaggcaaaaaaggttttatggctctcaagtagatatgagcaaggcctatgaccgtgtggagtgggattatcttaggctcgttatggctcgtatgggtttcgctgagagatggattaatctaattatggcatgtgtctctttggttagttatactgttattcatggaagccatactatgggtccaatcattccttcgagaggtattcggcagggtgaccctctttcgacatatcttttcatcatctgtgtcgaaggtctttcttcacttatcaagaagtttgaatctcaacgacttttacaaggatgcaaggtggctcatggggcaccacctatcactcatatgttctttgcaaacgatagctatttgttttgtcaatcaactactagtgctgccggcagtgtctcaaacttgctcaataaatttgaaactgcatctggacaaaaggtgaacttttcttagtctactgtgttcttcagtcctaatatgtgtcctgcaactcgtgcctagatttgtgatattctccaaatgcctatctgggactcccaaacattattgggagaaacaaaaatgttgtactataatttctaaaaaccaaggtaattgcaagaattaataattgggatgtaaaacttctttctcgtgccggcaaagaaattctcttgaaaactgttgtccaatcgctccccacatatgctatgagtgttttcctccttccacttggcatatgtaatgaaattgaaaaacttatggcccggttttggtggaagacatcttctagtaaagggaaaggtattatttggaggtcttggatcgtatggctgctcataaatatgatgatggcatgtgttttcagcacttgcatgatttaaacattgccatgctcgctaaacaaggttggcgtctactttgcaatccatatactcttgttggaaaagtctataaagctagatactttccccactctgatttcttgtcagcagagctaggaagtaacccaagctttgtctggagaggtattt

SEQ ID NO: 346274 - DNA, 1266 bp, Cannabis indica
ctttttcagcaaggattaattaacttaatccttaattcatttagagaaaaatcaagaaaaagccaaaaaaatagaacaacctctctttcccttctctctctcttcgaaccagccaaaagcaaggggtttgctgctgatctttgctgttttcagcaaggaattcaaagggaattcaagttgaggtaatccctaggtcaattgttcttagtttttcaagctttggtgtttgtttgagtttgtgattttgagttataggggctgttagggtttaatttgtttttggttcgaattgtgagctttatttttgttgattttaagctctggatgttagtttttatgtatggtgatggaattacacaagtttgagatttgaaactcaaacataggtctttaatggcatattgtgatttagtgtgttaatctgagttttactggttggaatatgttgtgtatgccctgtttaggtactctagaaagtttagtggcaattggttgagttttgagcaagttggaggttgtttggggaaacctggtgcaaaccagttaaccggtttgccacgtcctgtaaaaccagttaaccgattttgacagattctccgaaaaactctttttctcaattcttgtccaatttctgtgtcttagttgggtgtttccctgtttcctaggttagtgtaattcctagtgataatacagaaccttgagttgtaggttcgggtttcacggattagggttttggacatgtgatttacccaattttattatgtgattagggcatccatccagcatgagactttccgttcaaatcggccaactcacttgaatcaagaaagaaggtaagaactgtgtataatgtgtaatatgaatatgcgaatatgtgtatatgttaagtgtatatgcattcttatatgtttgttacactaccaacacttgtatgggtatggtacagagtgcattggtatagtgtatattgttaaggagtacattacggtgatacaagcacaagtacggcaaagtagagggtgtgtggtatatcactcagtggtactcagggtatggatcaaaccctaacaacactcgtgcaatgaggtacaagtgtatgtggtatagtggttgtaccctagtatggaacattcctacatatctgataagccttgtaaataggtgttatgggcgcctagatacaagtcggtattatatgatatgttatattcttttcttactgagtccgttgactcacaattctacttccatgtgtaggtaaagaaa

SEQ ID NO: 346275 - DNA, 1089 bp, Cannabis indica
tatgtaacatgtattatctatggtttagaatagatttatgttggacttatgttgcaatttaggttggatttatgttggacttatgttataattaggttggatttatgttgggttgtaatattttgaactaatatattagtcttttaggtgaaatatcaggttttactcttggattggattggatggatccaatcaatccaattaatattggattaaaaatattggatggatccaatccagtataaaaaatattggatcaaaagtattggatggatccgatccaatacatggattcatccattggatggaaccgatccaatccaatgtttcattggatcggttcggttcggttgacctctggtattggattggatcggttggaggaatccaacatccaatgtgtaattggattggatctggatgagtccaaaaacattggatgtgatccaatgaacagccctatggatatccgcactttccaaatttaattgaatgggatcgtgcggattaaattagattaagtattttataaacacccttaaatttttatgccctaaatccagggtctaagtccagggtctagagtctaagtctgggattcagtgttgggattttatgccctaaataaaacccgatttcattataatcatatttactttcaataaagatcaaaaaaatcatatcatgactgagccatgagctttgttcacatgttttacacattattataggtttaatatataagttctatttaatcctgaacatatagttaaattgttgtgatgtcatcacaataaaaagtaattgtgattatatgctgtaaaattatttagtcccacgatttatcagtgcactagatttattctgacgtgataatcagtgatggggtttacttacacttggataaggggaatgtattttccaggacattagtaaagtaaaatagcatcagatgtattggctatacatcggactagaccgatattcacaggggaaaagatattgtaaacttaccataatacttttctaggtaaatatctaaaagttgatcttagatcaatgatcccaatcttgagatgattaggttct

SEQ ID NO: 346276 - DNA, 572 bp, Cannabis indica
tcattgcctaatcaggcaatctttttattacataacaataataaccatatcttaatcccaatatcaatcaattctcaacaatattgattgtattgcaatataacatgctatgcagtacaatatacttttcttaccattaatccagattcatgcatgtcagccaacccaagtggagaaatatccccgatgatcttggccctatgtcacaacgacaataaacaaataagtatttatcctaaaacactgcttaacacttacgtaagacaatctagggttcttttaccaaacctcgatgtataaatacactaaaaataaaacttatattttggctctaaaacatacaccatattgtagagctcgtcgaaagctttgaaatggtatatagaatgtccaaaacggacaccccagtgaaaagttataagaatttccaaaaacagtttggcacgaaaatctcaaattttgcactcaccgaaacttatcgaaatcattctaaacttcacagggaacatatataccataaatacaacaattcttacgtaacaaaaattaaaatcaagcccttaaatggaaaa

SEQ ID NO: 346277 - DNA, 1239 bp, Cannabis indica
ctgctggaaattaattgagatggttggttttaaagctcaagttcatgagcttgaactttgttaagttaaagcatgattttgtgttgattgtgcaatctgaattttagggtttattgttggaattgaggcatgaaatatgtttttttaactctctaatatttggtagcaactttactttgtgatttgagagtttggatgtatattgggatgatttgggtgtgtttagttgttgaaattcgtatgaattcttggtggtttctgggtttggaacccaggtaccgcggcatggtctttagcatgtcgcggcccgccccttttgttggaacctgggaattggtcccaggtgtcgcggcatgacttttgcatgccgcgacccacccttgagtttttgggcagatttgagtaccgactttgaaaatgcatatctttgtgatccaaactccattttaggagttcgatatatcgtaaaagctcgttctgagatgtatgtgattatctgaattttgaatgccatgtatatatttatgaatgtggaatcaggggttaaccttattcgtgtaaatcctggtattgtgactaggattaccggcacctggtccggagcacctgggggtttggaatctctgctattgcgggacatcaaataagatagtagttagcacgtagagttatgcacggtggtgcttatattggaaatgatatatgtcagtaattagtaaccaggattagggttattacactaacatgagcggtttaatagcctagggttattaccctagtgatatatattgtgtaaatgctatgccatgtcgtgtatatgagtatattgagatttagggttatgtgttcaaggcataaccaggttggactcggtaacaagaaccgagaggaactgttctaaggccttattgtatttagacgtgtgagcgcaacacgtaggtctacgctacgtagacattaataggcatgtgagcgtaacatgcaggtgtgtattatacaggcatatgagaatggcattactgtttatatagtgggataaacatgttattgatattttatactgtcttgttgggcttagctgacgggtgctctactgtgcaggaaaggtaaagctgtttttgatcagccatgagtataggagctgaactgggaatgtacatgttcgggccacactagaccaagcgagttggggtctaccagtgatgtgttttgtactctgtgttggattttgtgccctaa

SEQ ID NO: 346278 - DNA, 663 bp, Cannabis indica
aaaaaataattctaagtttaaaaactgcttggccgatcactttgtcttaaaaagggccttatggccagacagatataaaaaagaaaaaggtaaaaaagcgaagtatttaaatagttggagtcacaggctctttatacgggtcttctaggccgataggagcttaaggatctgttgtttgggcagagggcatgtcaatgtcctagccatgggtagaagtggtcgcctcggattctccataagccacctgagaagtgcaatactcgagaaacatgtctttagaatcgcccaagtaatcaaagtttgccttgggattagccttctagaagtcataaaaaatctcgagacccgctatctctaaggcattcaccttccctccgagccgagcctccttagccctctgctgctcggcctctgccttgtgctcctcagccttcgctctccgttgctcggcctcagccttgtacttctcaactttagctacaagacggtccgaagaacctcccttttttcctggaggttattcacttctttggacaagtaggtcatggcagcctcaagttgatcagaagcctctaaatatttggtcagctcagccaccttcttctcggcagcaagaagttttttgttgacttcacccagttccattcggacagctccaagttg

SEQ ID NO: 346279 - DNA, 723 bp, Cannabis indica
ttatagtcggtggtacaacttttttataagagatcagtggtataactttttattacaacctcttataaaacaaataataaatatgcatgttatatttattaaattatatattaaattttaataaactatcacaaacataataataataaatatattaaattaataatttataagcattctcaataataatataaacatagcagttatacatgatgtcacgtttaattacagtttatttatttttctaaatacatttctaaatagcttataacataagtatttattaaaaaaaaaaacataaatattttatttttgaatttatttataaaattttaataaaaaaaatatatactaattcttttgaaaaattatcaaaatgaacatattagattaatagtaacattataaacattaataataattataataattaaaattaaatatttaataaatatacatacatttatttataaaatataaataaaatttttgtacagcatatattttttaattttatattaaattttaagaatatatcaaaatatagatattgccttatatatttatatagttaacttgacgcattgattttttaaaaaaaattaattgaaaataattaacatgttaaattaaacatttatctttttttattatataatgtaattatattatttgcataattttttttttttacaaagtgattaaatcactcatgaatttacg

SEQ ID NO: 346280 - DNA, 781 bp, Cannabis indica
tcgaactgagttctgttatcggacactattttcattggaattctaaacctgcaaataatgtttttgacaacaaaattgaggactttcttgcaggttatggagacaagaggttcaacctcagtccatttagtgaagaaatcaactgctaccaccgcgtacttggctccccctcgccctatgggaagtgccccaattagatcaatccccaatatagcaaatgggtaaggcgaggtcatcatcctcagttctattagtggtacacaaggtatatgtgaaaatctttgacacttatcacattttttgacaaactcatgggtgtccttgttgattgttggctagtaatatccttgtctaatgatcttttttgatagactctgccatcctgcatgatccccacaaaagccttcatgaatttctctgatgatcttgtttgcttctgtagaaagaacacatcgaagtggaggcattgaataacctcttttgtatagttttccttcaactatcgtgtagggaggcactagatacaagagttttcgtgcctcgtttttgttagttggaagttgcccgtcgagtagatagttgattatgggagtcatccatgtaggtgagctatctatcatcttgatgtcttccttttcacatatacttggctcatttagcatctccactggaaccaactttagttcatccaaatcattctgcgaggccagttttgctaaggcatcaacgttagagttttgttctcttgggatttgctcgattttaaaataattgaatcttt

SEQ ID NO: 346281 - DNA, 1171 bp, Cannabis indica
ttattttatttattttttattttttagtagttattttataataatattatgatgatttcattttttatgaattaattattgtaaattggtgtaattttgcgtcaattatttataattatttttttttcaattggggatttatatttaatattttcaaatatagttttaatttggtggttggatagaggataaaatttatttacttgcctaagattttaatgtaaggttatataggatcccactatatatgattggtgtttatatctgtattttttagaataattttatatgttggtagatttttatgagataagtattggtagttattaaggtaaatatattattttaggtaccatttcttatttcttattgatttattattttaacatattgttatctattttttttttttaattattagattattttagttttcgttttcttattagactttttaaatttttcatttatgtcgttaagttttatccaatatgcttttaataagttattttatttgccttaacatcgctagtattttttatctattgttgtgttattttgtacggtgatattattatattatgttaatgttcattagtttattatgtaaaattttattatttggagttgacaaaaatataacgagtttgaacaagatctttcttcaagtattcgagttggagataagtttctatctttttcttattttatcttttacattattgttattattattatttattattattattattattattattattattattttcattggtataatatgttctaattattattatttttttctttggttttgtagggaggttcacagattagcagaagctaaacttatgtagctttagtggttgcactggattggtctcttgcattgggatacctaataaatcttttgagtctagttgattattttcaattactgtattttctaggagattcttcttccttgttttaaagtaggatctttcctagatttttttgctagtttgctatccagttttcctgaggcatctctgatttatgtttattgtacacatgaattagcaattcgtgcactcagggtggatgataaactagtttggatagatgatttttcatcttttctctatgtataaacttttaagtatttccaataaaagttcattgt

SEQ ID NO: 346282 - DNA, 648 bp, Cannabis indica
ggatccccataatgattttgcagtacaatagacttgatgatgcaaaccattttatacatggaagcatcaaaggaaagttggcgcttttgatccttcttatatcttttgacaaaggatttaaactcagaaaacatttgcacctgccagctagagtccgataaccctttgaacagaggagacttgcctttactcatctttgaagtagaaggagtgttcgacgagggctacctgttaacaaatgatagaaaaatcttactgagaacgggattttgaacttgatagtcatgtgtttgtaagaggtgggtgagcagccacgagcactcgttgaattaggcttggaaaggggagttttttacgagtgccagtttttctgaggcttcgagaatcctttcaaagataagagatggcagatcaatagagacatgagttcccacagcatacaagaactttccaatttcaagtgtgactaaggacaaatgggaattaggaaactaattgtacaaagcaacctgatgaagaaccctatggaaaggagttagatgagaagctaaaattttctgcttgtcccaaagatagtcatccctaccagttagcactctacccatcatagtttgatatggattgaactgtttcccatatgttggattt

SEQ ID NO: 346283 - DNA, 966 bp, Cannabis indica
cattggcaaagtatgctaggatcggatgtatggagtatacatcagactggaccgatattgaacttaaataagatatcataaacttattgttatatctatctaagtcaatatcagttagttaatcttaggtcaataaatcttaatcctgatatagttaggttctgcttaaatgtattatctgtgttcctagagttattcgttaaagctttgatcggcccaatacttacatcttgggaacatgatagtataattgagtgggagcgctaatcatagatatagaatctatagctcttataaatacgtagaagtgaaatgatgatttccttcgagcttgacttaataaagataaatgattgaggtctcatttcagtaattatattagtagactgaagtatcacttatatgtggtagctaagtgttttaaggataaaatacattgaagggtaaaacggtaaatttgtccatattcaatgtagatcttctatagaggatctttgactatttagattgaaacaatgagtaattcaaatcacatatatttttggtaatagtgtgttctatgtaattaagaattcaattctaaatctatagtagagtgaggaggaattaataagttagaaaatttacttggtaaattttagatctacttattgtaagcttgattacatagggtcatggtccccacactagttgagataatactgcttgtagactcagctaattggttttaattaatcaattataattctaaaattagtctgtcttatttatgaattttcactaagcactgacttaattgtgaagaaaagagattttgagatttatttattaattgagagactttgtaaagtctaattaataaataagttaaatgacaattttatttgataattaattacaattattaaaaaaatagttttgacatttataggattgaaatcgggaaatatggcattattgaaagaa

SEQ ID NO: 346284 - DNA, 630 bp, Cannabis indica
ttttaaaaaatttaaatatctattaattcttaacacacaaccttaacatataccgtgtcattctattttttattttaaaaaattatgactttaatagcaaatttcacatattgaaaaaataataattaataaaagtcctaagtttaaaactcccaccctaatatattaaaaaaactaaaaaaaaaaaaaattaaagtgttaaaaataaaaataaaaaataaaaaaaaaatatatttagagtatgtttggaagttgaattttggtgaggaaacaaaaaagtaaagtaaatgcttggaaaaaaagtgtgaaaaataagaaaaaacaatcaaattttcatatttggtaaaaaaaattgttgaatgaaatttttttcaatacaatttttcattccataccaaatataagatttttatttatttatttatttattactttttagttttcctacaatggtaacataccaacttaaacaagtgaaattatagcaaatgaccacaaatcatagcactatataagtatatcctcatttcaaaacttgttgagaaatgagcattttatactatttattatttatattgtcttttgcggcataaaaaaatcaatatttttttcatatatttttttagaatt

SEQ ID NO: 346285 - DNA, 513 bp, Cannabis indica
ttattaccttattaattttttttagttcccatcaatgagtattacctattaaaaagtgttccatatatatatatagtaattaaggtgagagcaaagaaaatttaaattaaaaaaattaaagtgagtattaataatttgaaaggagaggaattggtggaagaaaaacgtgaagcatagaaaaaaaaaattgaaaaggaaccaattaaatctatctaagagaaaaaaatatctctaataattattaaattaaaattacgtaaataaaataataattttgcattaaagtgtacatatgcttagtttttttataggagaatctttaaagatatattttatgttttattcatacttttatgacttgaattatttacaaaaatataattttatagttttaaaactattaaaatatcattttctcaaaaaataagaaaattcataaaaaataatctcaccacaattataaatcaattataaataaactataaatcaacaaaaaataacaagaaaaccaaa

SEQ ID NO: 346286 - DNA, 588 bp, Cannabis indica
gtttgtttccgtggtgtaaaaaccatagatcataaagctatagaggatgattttttaggtagtaggtgaggtcaggatgagtctcttggtttgaaactatctgtgctgcatttcatccaatattttcttcttagcaatactccagataagaagtttctaggtttgatctagatgttgttgatagtggtcgttgggatgagtattgttggggtagggagtcctttgaattgactattgattcattcaaaggtagaatacagcatgggattaaaatgaaaaataagaaagaagagaagggaggtcagtatgatggttcgtatagagcgtttggctatccgtgggtgtttattgtttggttttatgaatgttgtcctgccatggtaaacacattctgcaaaagagtttcatccagaattctaagaattctgaattggagcaataacattgcgaccaaaaatccaactcttagagacttgaagggcaagatttttgatttaccgttgaacaaggtgattttcagtttctttactgtttttttttgttttgggctgttttattaatatttggttatttaattatttttgtttc

SEQ ID NO: 346287 - DNA, 686 bp, Cannabis indica
agctgacaatccttccgcacaaataagaaacagatacggtgaaataggatcgccttgacgaagcccccgacttggtataataggtccaatagtatacccgttactcacaatattgtattgaaccgaagagaggcacccataaacaagccgaacccatttatcactaaaccccaatcgagataacatagccgtcaaaatataccaatccactctatcataagctttactcaagtccaacttcaacgccatacaaccgtccctcccaacttgcttccgcttaagatagtgaagaacctcatacgaaaccataatgttatcagtaatcaattttccaggaataaaagcactttgattcaaagaaataatcccagggagtaatcctttcaatctattagctagcactttagtgataacttttgcaacaacattacacagagaaataggccttaattcactcatgtcatcaggctttttcttcttgggaatcagtgcaatattggtatcattcaaacccaccggcatctcctcagtcatgaagaaattctgaacacaagctaccacatcctccccaacaatgtgccaatacttttgaaaaaaatttgggttcattccatccggcccgggagacttatcgggatgcatttggaataatgcatctttgacttcttgagtttcaatgggtctaa

SEQ ID NO: 346288 - DNA, 865 bp, Cannabis indica
tttttttttgttaattaatttttgaaattcccaaggactaagcaagaggattaaaatttctaattcaattgggaattcttgaagaacagaatcaattgcctaacattttcaaaattaatgcccaactggtagtttaatgtgaaacgcgctcgattcacgtcattaagtcaactccacacaagtgtaaagttgacttgggggcaaatgttaacccaaaaactttccatggtgacatggacatcaatgtttgacatgtagaaagaaggatgacattagggagttgagtagacctgagtcataccagtcgacctaggaggggaccctagccctgcgctcaggttgacttcgagagcttcgagatggaagttcagacttcaatagcttgaatccaactcacaatatttaagtattttgtaccattaagacatggagcaacctaatccaagccccaagacctgaaactacacaaacctgcaacctggaagccaacttgggcacctagggtttcacccaatgcctaggtttatattcccaactagggttttaatttttgggaccatcttagtgcaaatggatcaaactttgcatttggacatcaagtagactaccatgtacatatttgaggcatcagaattagatttagagcaagtttatttttgagtacctagggccccgatgcctgggcacccagttgccaagttgacaatttgtcaatctgagcgccttccaagtatcaaatcgacgatccaacttttgcatcttcttcgtcttcatgaaaaatggggaaacgtgtacttttggggaagaaacaacacttcatgggtgccaaaagcaaggccaagcacccaagttgacattttatcaa

SEQ ID NO: 346289 - DNA, 1486 bp, Cannabis indica
tgtccccgatactggggggcattgaagtccttggcaaactttggaaggacataaggaaaaacggaccggtaaactcgatgagtgagtttcttgaccgcacaaaaggttttattaagcttgaagaagccattcgacgataagagggtgaataaaaacctagccagtcaaaagctccttctaatgggacatccgtccagctcccctattacccaagcaattcaagctcgagtggtaaacggtccaacaacaataataggcaagggaatgggaaaaaagggaagttcactggcaagaccgaacaagctccccgggagaatcttgccaagtatactgcatttaccgtcctaacgaaagatatagaaagtgtgtacatggctactcagtcattagccctttacaagaagcccacacccatgaaaaaagatgtcaacaagagagacatgaccatgttttgtcgttttcatggggattatggccatgacaccaatgaatgcaacaatctgaatcgagagatcaaattcctaataaggaaaaataattcgcacgtggaaaagtatgtcaaggccggtcagaatcagaggggtgataacagccaagacttgcgaccaccaccagtagatggacatttgcaagtcattattggaggtccacacatagctggagattcaggaaaatcctgggagaggtatgcccgaatagtacaacacgagcaagaataagtagtcctggccgtagaagaaaggaagtcgaagatcccacaggcacgagagcccaccataacatttaatgatgaagatgctttcaagatcagatttctgcacaacgacctgttggtcgtggaagtccagatagccaacaagatggtggcccgaaccatgatagacaatggagcctcctccaacatcttattcaagacaacgtatgaaaagatggggctcgagctaaaagatttaaccccctgtctccagcccgtgtatggtttctccggccaaggagtcgcacctatagggcaaatttgcctacccctcactgttgggcaggctccgagaagcataactataatggcacaatttttggtattggacattctattagcttttaacgtcatgctaggccggccaactttgtatgatttaaaggttgttacgtcgatatttcattcatgccttaagtttccaacaaagaatggggtaggatgtctaagaggaaaccagcaagttgctcgggaatgttataaccttgccatagccaaggctaaaaaggaagtgtcctctagtaagagtttcgagaaggggaaaacatttctaaatagggaacttcccaaggcggggatgaagatgtgtatcctcgacttggggacctaagcaacaatgttggaccagtggaagaactggaagagattgagatcgacccagatattccggccagaaagcttaaaattggaaaaggtttgttgctcgaagtaaaatcagcattgataaaattt

SEQ ID NO: 346290 - DNA, 1054 bp, Cannabis indica
aaaaaaaaaaaaaacttgacaattgataatgctgaaactatgcggtgttcaatcaactttaatttcatctaattttcgatgcttttttggttggtttatttatttgtttttttgtaaattgattttattaccttgattatttttgcaaaattattttaattaatacttgactaggatggattctagattaccagaaaaaaaagggtcttattaaactggtggtattggagtttttggggaggggatataatcatggagttagtgggccaattagttgttctctaattgggaattcaaaatgttttctttaatgagaaagggataagtattatgatatggtcaactgtgccataactagccagccatgagttgttattatggatatctttattctcaattgtctaaagtcaatggtcgccttaactctcccaaaaaagaaaagaaaaagagcgataatacatactgtagccatttttatataaatggcgatattacaccattgaagagcatagcttaatgaaagccaagtcaacggtgaaaataagagctaacgcgtaaaaaaataaaagggcttgctttgacttttatggccggctctttgttatttttatataggcaactggtcctttattcaaaagtgttgcttataaataaatgaatgatgatacatctgttatgttatgaaatattttttaggaaggtttaaattattaaattaattattattattaatgtttggttgtatttttttttattacattgattttttttttaataaaaatcataagatctagtaataaattatacgagttgttagaaagatacgaggtatattatggttatatctatttgaccattacaacaatacgatgaggttcgtcttgtaccttttaaatgtacacatcattgaattgatgatgaagaaatataaagtttgatatacataatagtaactagggctgcacatgggttgggttgggcggtttttgggcggtttggcagtttttttatttggtggttttttaaaatcacaacccatacctgcccaataaaa

SEQ ID NO: 346291 - DNA, 514 bp, Cannabis indica
gagactcgctcctcaccaccaaccacagcgactacaaaagcctttttgtctctcgactcgcccgcgactcaaaccgagtcaactcgctcaatgccaagctttagctgaaactcagcaacatccataaatccgatctccgaccagtggagaccgagattcgaccagaagacctctcaacacccataatctccggcgtaagtcagggaagcggagaatacttcgctcggatcagagtcggtactccggcaaatcagtgcaaaccttgctctgattgctaccaagaaaccgatccgatattccaacctgaatcatcatcttcttacagtcctctcacctccgattcacgccaatgcgttgccctcgaaaacctctgcctgtagaaacaataggtgtttataccaggtctcttatggcgacggttcgtacaccgtcggtgatttcgttaccgaaacgctgtcgtttggtaagtcaggttcaataaaaaaattaaaaaccctagatctagattaagaga

SEQ ID NO: 346292 - DNA, 722 bp, Cannabis indica
taaaattttatcaatacaatcaatagtttaaaattttatgaattctgaattcaaatttaattatttgattacatatatataactgagaattgtttggttaaattgataaaactgtattgattaaattttactttagggtaccaaatatgtacaatttaaaaatatgaggtactaattaagtattattaaaaatacaggataagaaatatgtttttcataaaaacacaagatactaaataagtatattctcttgttttttttattaaaatattttataatttaatataaattacattattattttgataactcatatgttttggcttttacatattaaagtatttatttaatctttgttttttataaaaatcttttataatttacttaaccattatattataacaagtgagaaattttgtaagtgatattttttatttttaattattccttgtgaatacctatatattagttaataatcacaaaacaaataaatatatataattatatttgtgttgatagaaataatatgtatatattgtagtttatatctataaacattatcatagataactatatctatattaattaataactatatattaaatcaatataaataattatatttgtgtggatagaaataatatgcatataatatagtttatctataaatattaccattaacaacaaaaattataaaatattcttttaattactctctataa

SEQ ID NO: 346293 - DNA, 751 bp, Cannabis indica
tctttactgtttttttttgttttgggctgttttattaatatttggttatttaattatttttgtttcatgttttgttgttttgattatgatttttagttaaagattaaaaacatttgtcctactgatgaggagaggcagaagctacaattggtgatcgcggacatttgtcctactattgatgatcgcagtacatctaagcaaacatttgagagtggttcatcttctaagaagtctgattccgaggacattgaattgttgaaatctaagttggagctggtcatttcgaatcaagaatccttggccgaagacttcatttctttgaggtgttttgttgaccttaatttcaagtctgtcatgactgtaattaaggatattcaagaaaaagttaatggattcatcgtcgaccttctgatgaagtatttaattatacttttattgtttcagtttttaactgcttttatttttagtttttttcctattttatttagttgcaatactgttgtatgattcggggtaaatcatctgatgagttagtaacacaggaatctgatgatgatgatgatgctgaggatgatgacaaggaattacctgatcctgagaatattgattccgactccgatgatggtgacgagttgggtaaagatggtggtgatgctgctggagttgataaggttgttagtgatgttcctgctgctgatgtgaatcaatctaagactgttgcaggtagtgaagagagggctaaggatgttga

SEQ ID NO: 346294 - DNA, 278 bp, Cannabis indica
aacatttttctgccatcatgttttaggctttatctttaaattaatatatttattttgagactaaaataaacatgacttgatggatcagtacaataatattactgtaattactttgactttttcattatgaagaaatgtatacctaatgactactttcaatatatgaatactattatactaggaataattacataagagactattttttgtaaaatatttacatttttacgttcaaagaatgttttttttacatttttacgatttctaaaaataacacg

SEQ ID NO: 346295 - DNA, 631 bp, Cannabis indica
aaatacccagaaaaatacaacaccgcaagcaattatttgaaatgcaaaaagaaaataatggaaagagtgcaccgattttatagaggttccctaaaaattgttgttgggtacatcctcttcgagctcgcctcagattgctcgtttccattatagaccttcaaagatcaaaagattacaccaaatcacgggtacgattggtaatctataattatttagagtgtttgaaaactctctctttctctctgtttattactaaatcaatactgactttttctcctctcttttccatgaacaatcaccatatgagtttattttaactaagattagattgagtaaccaccatgctagtttaatttttatgctttgctcaaaaaagattcatactccaaatcattttttttccttatccacttatattttatttttacaattttaaaaaatacttttaacatttagggtcagtttggtacgcaggattagactggactggacaagattagtgggtattatttaccccaccttgctagatgggataaataattccagacatattagattagctgtaatagttatccagacttctaacattcccaaacactggattagacaaattaatctgtgttatccaatc

SEQ ID NO: 346296 - DNA, 637 bp, Cannabis indica
attcatgctttaatcttgtatgtagactaagcgattaattaacctcacacttttgattccaagcgaatcatgctagccaaatattgtgtccacttttaaggtgaccaattttctccttaagtagtaaagctttgaaaatttaatcataaaaaattagttcttacacaactcaatttctcaccaattttgataattttgaaactaaacatatcaaaatcaaactctaatgtagacactaaatgtgtctaaattgaacacttaactttagacaccaaatatgtctaagttacactttattttaagacaccaaacatgtctaaattttgtcatattggagtatgaaccatttgttagcttccacaaacaacttgaagaacataagtaacacaactaagttgaatctaaccatatcaggattaagatccatagacctaagatcgaccgttgatattgacttagaaggatataatcgtaagttaatttatgatatcttatccaagatcaatatcagcccctttcaatgtatactccatacatccgatactggtaaactttgtcaatgcccaagaaaagacataacacttattctgttgggttttatgccctaaataaaactcacttcaatataatcagattt

SEQ ID NO: 346297 - DNA, 748 bp, Cannabis indica
aaataatttccaacacaatgccccctcatagtcctcttcctcagcagcggataggtcatgttcgacactcggcaacgtggcatgctatgccacgtgaggatcagttgcattaatctttcacatcgtctgttttgtgcaggccatcatcctccttctagacgtgtattggtgtgtgtgtcatgcaacggtcacggtaggagtagcaattgggatgccaaaggcaccagaacttggacagcctataggaatagtgtcagcgacagctggccggatgatataggtctagttagacacaagataacgtctccaccccttcctaggctcccaaacaaatcgcccgtaaccttctcctacgatctgctcagagtaaaaatggtgttgtacctcaggttcaagagtggatgaactttcactactcacctcccaatcttcaaaactcaacttagaatgtccgtcactcaaagaggacggactagcgcaaagacaaggttggtccttgtataaaagctgaagaagatcccgattgatatagtgttcgcctctccaaaactcaccagggttcatctacaaaagataatacatgagatgagtatttggccgggatattgaacaaaaataagcaaatatatcgaccaggtctaatcgatggattaaaaagatgaaaaaactttgtaaaggttaaattcgtaacccagaagttcaaaaattttgaattaagggttaaccttcactaaacctcgaatgggca

SEQ ID NO: 346298 - DNA, 540 bp, Cannabis indica
ttttgagcacccagagcacctagtgcctgggcacctagtgcctagattaacaacttgtcaatctgggcaacttccaagtatcagattgatgattcaacttttgcatcttcttcatgttaattaaaaatggagaaataggtacttttggggaagaaagagcacttcctgggtgccacaaacaaggcccagcgccaaggttgacaccttgagttggcccaacgccccacattttgtcaactggctgattttaatgatgttttctaagaaatctttcgagcatcttctccgttcttagcaaattattaagattcaactattttttaggaccaaacgaaacttcgaaagggccataaaggggacccaacgccccagttgacacctgtcactgggcccaacgcccctgttgatatattataaacctgggctgtttccaatcaagttctcaaaaaaagtgctccgagcattgtttttcgtcatcagaaataatgaagattcaagcaaactcggggagaaaactacaaacctgaggccctagaaaca

SEQ ID NO: 346299 - DNA, 943 bp, Cannabis indica
catataatcatgattatatttgattgtgttgacgataccataatcatgaacaaatatatatatttatatatgttctagacttaatagaacttatacattaaacatcatcatgaaataaatcatgtgaaccatgcaacatagagtgaattctgatcttttattaattagtaagtgtgattatattgaaatgagttttatttagggcacaaaacccaacatatatatacacaaaacaaaaattatatacattatatatacagttaacgcagattttcgttaaccaaatttgagcctcgcgatgataattcaacacagaaaaaataaaagctatgaaagcaaaatatatgaacacaagattttttacgtggttttgcagttaaaattctacatagtccacgagtcaatcttattaagatttcttagtattttttctagggcctctctcttcagagtttttcccccttttttgagattgtttgccactatttatagttgcatagtggcagttaattacaaagctaaccaaaatatgtttacaaccattatccctaaaattgtgggatctgattacaaatcaagccaaataaatgaggtttttacatagctgtgaatattccacttttattgggtcgagatgaacgcgtaatcataaatatacagtaagtctcatagggatgccttgctgagaatggagccaagataactttggtagcgagcaattgtttgtcatttggcttttcaagactaatattattttaactctgataactatgctgttctggtgtcgagatgatcttcctcgcatgcataccaccttttagcgagataagcgcctcgttgtctgttatcttgactcgtcacactatctatactcagtttgtatatcgtataatatacgttaagtattttagtgttgttgttttctctttcacgcagcgaggtt

SEQ ID NO: 346300 - DNA, 541 bp, Cannabis indica
cgatctaattgatttaaataacaaaattttttgtttagaagggatctagcgttagcaaaggtgggacaatttatgagtgttgtttagaatcctagatgaattgaaggaggtgattgtgtactaattttgagattatataggcgtgggactacctatgttagcaagaagcatcttattttggtagctcaccatgaaggaactccatggtcgagtgtccatgactttgagtggtttcatttaggaaatttccccatgaagcgtgcaagtcagagcaaagcacgttagaaacacttggattggtccatgggaccagtcgtcagtccaagaaatagctagaatgatgcactcatatataagagccatcattccgtgggcgtaagggcccaacggaggcttgaagcggggatgttatcggggtaacgtataaaagaatatcaggaagaatagtggtatcactaaggtaaagaagattacctgaattacttaaggtgacacaacaatgatggagagtactttataattgactggatagttaatgtga

SEQ ID NO: 346301 - DNA, 555 bp, Cannabis indica
aaattatggagggtctaaattttgatattgggagttttattaagggcaaaaaatgaaatttccctacatgaattaaatttttttgtactttcatatgaataccactctcatgaactaattatgtacatttccacactgtacataatagttattttaataatcagtagtatatacaatctttaactactcatgaaattggtttatttatttaatttctatgattgaatctaatcatttcaatatatcaagttatataagttgcaataatttacggttaaatctttctaactattattttatttacatttaatttttcaatctcaaattttggtagtaaaaccttttaaattattaaactgttagtaaatttaaggtgtatcatctatttatctcaattaactgctaacatggactgcttacgtctaccatcatgtacacgtggcacatttatattggtccacctaatataattatttaaaaattataaaaatatttgttgaatttattttaaaattataaaaaaataatttaaatttataaaattattaataaata

SEQ ID NO: 346302 - DNA, 1128 bp, Cannabis indica
ggagtatgcatcggaagggacttatattgaacttggattagatatgataaacttaccataatatctattcaattcaatttcacctagttgatcctagattaaattgatcttaatcctgagatggttaggttctagttcagttgcattatttgtgttctttaatctattaagtcgaccaaataattcttcccgtgatgtataggttcagaacatggtagttcaattgagtgggagcgctaatcatagatacgaaatctataggttctatctggacatagaagtgaaacgatgatttccttcgagcttggcttaacagagataaatagttgagtactcatttcagtgattatgttagttcgctgaaatatcatttatatgtagctaagtgttttaaggataaaatacattgaagggtgttacgataaattaatccctatgcaatgtaaatcatctataaaggatcattgattattggtattataacaatggataactaatattgtatctatattgtggaacatatagagcgttctatataactgagagtacgattccaagttctatagtggttcaatgaggaattaataacttattgggagctcagttatataggcccatggtccccatactagttgggacacaccgcttgaaagacttagttaattgattttagttaatcaattattagactatgtctatagtttatgaattctcactaagatatggcttggttgtgaagaaataggattttagggtttgtttgttaattaagagactttatggagtctaattaataaatattataaatgaaaatattatttgataattatttgaattattaaataaatagttttggcaattatagggttgaaagtacaaaaagtagtatttgtgaaaatagataaaatggttgagaaaaatggcaaaaatctaacaagtgtagggcccacttcatggacgacaactagatgctatttttgctctaattttatcatttttttatttcaaataaatcaaccctaaccctaggtgaaattagtataaaagaaaagatatggtctcattatctaactaatgcttcaaaagctaaaaacctagtttctttctctttgacaactaggtttatga

SEQ ID NO: 346303 - DNA, 671 bp, Cannabis indica
aaacaacaacaacagcagcagtaaaatctaaaaaaaataaaatatataataccttttatataatgaaaaaatagttgataaaaattcagtagagaggttttgatttattggttttcataatttctattaaaggaataaacatataatatcttttatacaatgaaaggtattttaggtattaaaaagtaaaaaaggacatttgctttattattttaaaaaaggaacattaactatctatagagttagaaatagggccatttacttacatttctcttttccaaatttctaacagtgaacttgttcatattaaatcatagagagacatgtagatagagttacatatgtggaaacactattctaatttttaatgtttcacaacagttgcataaatattttgctaacagttattttgtctgattgaaaccttcgtctgatgcaaccttcggccaaccacccataaactttcgtatcattgaaacattcgtctgatgtaaccttcggccaaccaccctgcaaccatcgtctgattgaaaccttcatctgatgcaaccacccagcaatcatcgtctgatatcgtcaataatagtgtaagtggtattttggtaattaaaattacataaaaagtataaatgttgtctttaccttatgacgtatttttgtaaataaagtgt

SEQ ID NO: 346304 - DNA, 959 bp, Cannabis indica
ggtatataggtaaggcaaagattagtaagtttagaaagtaagtacttgctgcagcagtggcttctctagtttatagtatttggagggctcagaatgatattatatggaatgaagaacacttatcttccactagattactcgaagacctcaaatggaagctgaaattctgaatttctatgtttttaccaaagaaaattacacatgtagatatagagtggtttcaagcattataagggtacacatacttaggtaagaaaagaagaggaaaaggaaatgtatagatagtctttaggctccaaattttgagtgctattagtgtgtaaagattgatttgtgcaataccacttcctaatttatcaaaaaataacatgcttgtgcattactaaataacatgtcatacatagatatcccacaaagttataatatatgtatctgatagtagaaacatgatatataaggattatcctatgtgtttatgtgtttttcattttttgaaatcaaagcatgtaaactggctaaaattaatttataattaacttagtaaaattagcctattcatttaaaagagttctaaattatgaagggatttttttaaaaaaatttgaggcttttattataaataagttaatcataattattaaagttattaatatgtataaattctaggaattaataaaacaaacaattgaacctaaaatattgagtgggagaaggattacatgtcaatgtaacctacgacatacattgttggtcaacatcgagtgaggatagattggccttgagatagctttattttgtcttcgtaaggaatgtatttgtctatattgctgctcaaggatgatctgttgacaaaaataagaggaagtgatgtattttagtgtggcattgacccttaaggtgacacactaagttaagtcatgaaatctaaaataatgggttacactcataaagtgtaacta

SEQ ID NO: 346305 - DNA, 592 bp, Cannabis indica
aataataataataaattcttcaatctttctttctattattgataaatcttcacagaaacattacaatgataaagaaatttattaattaactaaagaagaacaaagttaccataattttggatcatattcactccatatttcttaaatcccatcactcaacacttgagaaaagaaaatccactgatcaaaaacataatcagagctatcaccatcattactttcttggtccaaatattgatcaatacaattactccaatgctcatttatcttattatggattcttttcaatttgtctttggaaaccttactttcaagatcctctacctttgaatgaaacactttaataaagtttttgatctctatagggatgaattcaggactaaaaaagcttacctcgaaacgaagaacttcattgatgatatgctgaactaattcgtcttcgatttcatcattcaaataaaatattgtcttcttcctttccttcttattcgtctcgttatacgaaaatggtccaaccaactccattactttttttaaaaaatcgtacaataaagtatcagaccatctattagaaaagacttgttacgattct

SEQ ID NO: 346306 - DNA, 686 bp, Cannabis indica
tgtacaacaacaaaaacccaattgtattttttttttagatttaatgggatttattttatttattttattatatataaataaaaagtgactcatgaatttctcataaactattttatttttaataataaattattttattttgaatataaataaaaagtgacccatgaatttctcataaactattttatttttaataataaatcattttatttttaatataaataaaaagtctcccacaaatttctcataaactaagaattcggttatataggcacactttatatagaatagaaataaatattttgataggttaggatttataaaacactcaaaaattctaaaattactttaatataaaaaatcttaaattataaatctatataatttttactaaattaaaaaataagaagatgataaaagatgagcggaagtactaacttgaagctattgctggagattgcagagaaggtttgatcttccaagaatatttttttaaagtattttctttgaagtggaaggagagaatacagaaaactagtgtttctagaggaccactacttatttatagactcatcttagaatgagttttgggtatttataatttggcccaacaacaaattataaattaacttatggtatctacacattattttcatgacaatttaatacctttttgatacccataa

SEQ ID NO: 346307 - DNA, 500 bp, Cannabis indica
gtcgcaaatcactaatgcagcgttttaacactgaattacaagatacttcaacgaaagagtcaataaaagactattcaatgatggagtcttggtgttaaggagagtatttgcaaacacgagagatgcgtctgcaggattgttcaaccagaactgggagggtctatatgtaatggaagcagtagtaggaatcagagtttacaaattggctcggataaatggctcactaataaagaactactggaacgtggaacatttgcgaccctactaccaataaattaatgatgtaactcacattgctgatgtaatattttaacttcagttatgaataaagagaatcatttcttttatttaagtaattacaaagcttcactctttaaaattacttaaggggcatttatgtatgattaaccggaattcatcttgaaatacatgatataattcaaacccataactttaatttttttaaagtttttggtcaaacctttctgacgagaagggga

SEQ ID NO: 346308 - DNA, 754 bp, Cannabis indica
ttaataggctacctattatttatgtgcgaaaaaaatcataaaaatttatcatatatttcgagcaacaaatatggacacaacacgtggacgagagttccaaaataaaatgtatttaagagaaataaatattgtaacgtctagagaaacgccacgtgccaagattaaaatatgctaatctcgttaactggggtccataagccaagtgatttaaaataaatttcacttaattaaacaaataacttgtaataaaaacatacattactttaaaataaaatattaaagttacatgtctgggatcccgtaaaattatttttaaaatattacgagttatttcatactgttgcccctaattttgcccaaaatacgtggaccaaccgattgaggacacgtggacggaaaaggtttagcatttgaataaaacagctaagtcttcttaaagcgaaggattaccctagacatgcctcccgaagaaggcatgtaagtctcgtatgctcccggagggcaagatggcaacaaagcatctccgggtggtgttagaagtcatctgaacagtcatctcgcatttaatgtcgcatgagaagaggcgtattgaaactgtcatacgcagtaaagtctgacggcacaactcccaatctatacctcctaggctatgattaataaagtctagtgacggctactctgtgaagaatcacatcggtcaaaaagggattaaggactaccctcataaaaatcccctacagaacctagggattag

SEQ ID NO: 346309 - DNA, 856 bp, Cannabis indica
aaagacatgggaaaagctctagctcgataccagggttattgttgctatgttcacagcgagacgtcccagaacgatacgctttacaacataattaatacacgtttgaattgacccagtaaaagtggaccaatcatagctgtgtaattttcaaataataactgcatttattttatgtgggatgtaatcaaattccaaaatttcaggggattattgttgtaaattagtcaaatttgtaattaactgccctcctatgtaattataaataggagcaggttacactaaaaaagggacgaaaaaattattagagaaaaaagccctagaactgtatcagaaatctaataagattgactcgtagactatgcagaattttaactacaaaaccacgtaaaaaacccttatgttcttattttttcttcactgcttttatttctggtgcaaatccatcgcaatttaggcttaaatatagttaacaaaagtctgcgttaacataatatataaattacgtttactagttaaactattttacatttaaagttcatatattatagtgtttaatttgacatttagaatttatagttgatcattttcattgtatttgaatattgaagttaaaatttacatatgagtatatttttttattctaatttttgaaaaaaattgtttaatactttaatatttattcaatttatatttattttttaacattaatttcaactgtaaccattttaatcttgaaaggcctatactatacatttattttttttcaaatctattatttgaacaccaaaaattaacaataataaaaaataaaaaataaagatcggtttaaacgtgttaacccgaccaaactgaaaaa

SEQ ID NO: 346310 - DNA, 694 bp, Cannabis indica
gtccgctaaacttttaaaaaaaatatatatatgtatatagtagtaaagtacttttaacttgtattttgatactcgggatcccgatccatgtgattattaatatataaattattaaaaataattttcaagtttattattataaaatacgggcgttacactaggattcaataatacccaatccacataaaaatctccttagttcttactttattatatcgagtttttgaaattctcggtaagcataaacctatgtcttcagttatttggtaacaatcaaaggcataggtgttgtggatcacgcaagtatatgtatcgttagcaagtaatagactcacaagagtgagattgatcccacaagaattatagttaagtacattaaaattaaacttttatttctatttggctatatcaaaatttaaaactaaaaaaattataaaaacaaaaagcaagtaaattaatgtgtgaattaacaatgaatagaactaggattattgattttaatcatatctatctattatggtctaacataattcaattcttagtactaatttatacgcaataactggtttactccagtaatttataatctattcagatatataaatctcaattacatgaaaattttatacttttgtgaaaaattaaaacatgtaaaaggtattaaacacaaaaatcctataagctatccaaacca

SEQ ID NO: 346311 - DNA, 643 bp, Cannabis indica
cattgatcatgggtacgtcatgtctgaattcaggggcatggacgaagccatgaagagtctacgaaacttggcggctgagaggaaggcatttcgggaggaggcccaacagagggaggctcaggtggagcggaggcatcaggaggcgttgaaggccaaggctgaggagttgaaggcacgggatgaggtcgtggctagggcgaggcgcgagcttagggaggctaaggagacaatggaagatctgactgccaagctgaagtccctgaaggagctgcaccaggctaacttgcagacgactactaacctaaccattgaggtgaaggagctttgtgacttcaaggctcaagctgaaaagaaagcaaaaagagatgagcttttggcctccgttacttgccagcactgcaccaaatgcttcgatgatggcgtctttatggcctggcagactaatggcccaaaccttaagctcggcttctatccaaagcctgaggaggttctcgtcctcttctgggagaagaagaagagacttgacgccttgctggaggagcgcaggggtcctcgccttccaccgcgaattgattaagccagtcgttcatcactattgctattatccttatctttttttttctttatatatttagtccttttt

SEQ ID NO: 346312 - DNA, 1120 bp, Cannabis indica
taatctatatgataatttaacagtacacgaatgacaaatttgttgggattttatgccataaataaaactcattttaatataatattatttgttatcaatagaaaattagaagtcatttaagttaacatgtgattttcattattatagtttaatatacaatttttgataaattcaaaaatattgttattcacaattacagtgatgtcatcacagtgaaaattatatgttattcaatacctttacttttctcaacgaaagagtttggcttaacctttttcttaatctgttaatttaactcaaatgttcttaatgagcccatgagttcttcaaccttcattttgccaaaattttttgcctcttccattgctagcaattttgtgtcaaacctgtcaggaagcacacgaacaattttttgaatcagattcatctaatttttcttccaaggcaaaaaacttattagaaatatcagataatctttcataaaattcagacaaagtttcagtttttgacactctcaattcatcaaatctagtttgcaacatggtaaaacgtgatctttatacattagtgataccctcaaactgagtttgaaggatttaccatgcgtcatttgcagattcacaagataaaattaatttaataaagccttcactaacactataaaaaattgcatgtaaaaccttattgttataactatataattttttatcttcagtagtccaattgagtttaggttttacctttatcgtcattttcagtaagttgcgaccagcctataagtataactctccaagccttctcatcttgtgacttaatgaatgctctcatcctgaccttccaatatgaataatttgaatcattcaacagaggtggtcaagtaatggagtttcctcatacaaacaaagacatctcacacaaaataaattaaacggaattatctcaagatctcactaagattttagtaacccactctgatacaaattgaaattctgcattttaatattctcactttattatttaattaaatacttaattaaatgcagaataataaaactggtactgaaacagtttttctgtagctacaaaagacaactgtgtaactttagaataaaccagaaaa

SEQ ID NO: 346313 - DNA, 673 bp, Cannabis indica
gagtaaagaaataatacacatctcgatcttcttctctctcaacaagcaaacaagtaaatatagtacaaaaatttatgtaaaatttgtagaaataaatattgaagaaaacattttctaatttaattttttttactaatcacccgtttacttaccagcaccaaacaagaaattcaagcactaaatgtaacaaaacaattcttagaataagaacaaagagcagaaaaataaagctactcattttttttgtccaaccataaaatcaaaacaacttaattttttttcctttaactttgaaaaaaaaaaaactcatcaaagagtgttagtgtgaaatatcactaatgaccctcataatttaataaatttctattgttggtgtaaggataaagtagtaatttaaacaaaataagtgagtttctaaaaataacttttaattctttaatactattggttagaattattataccttattgttaaataaaatatatatatattttttagcaaaaaaaaatgggcattttttatttttacacttcaaaacagtttttttttttttttttatttttttgtatttttacggaattctacatagaacccatatattgcaactagcattgactaacctaaattgacaaacaaaaatcgtatagaaactccaattgcaattagcgctaca

SEQ ID NO: 346314 - DNA, 524 bp, Cannabis indica
ttctcaaataagccccttgcttagtgaaaattcacaaaaaaaaatatagtcttattcagaattctaattgattaattaaaaccaattaattgaatccgcaagacaacacaatcctagacaatgtggggaccataggcctatgtaaccaagctcctaataagtagatttaaaatttattaagtaaatttcctaacttatttatttctcatgactccactatagatttagaattacacccctgattacatgaaacgttatatatatatagcaaatatagatacactacaattatctattatttcgatccaaataatcaaagatcctcttagatgatttacattgagtatggacaaatttaccgttctatcttttaatgtattttatccttaaaacacttagctttgtatataagatattttagtaaactaatatagttactaaaataagagctttttcatttatgtctgttaagccaagctcaaagaaaatcatcatttcacttctaaatagttatagaagctata

SEQ ID NO: 346315 - DNA, 647 bp, Cannabis indica
atttacaaggctcaatagatgagtaagaacgttccatactagggtatagccactataccacatacactacgtacctcaccgtacgagtgttggtagggtttgtttcataccctgagtaccactgagtgatataccacacacactcagtacttttctgcacttgtgctagtatcactgtaatgtattcttaaataacattcactataccaatgcactctataccttaactgtactagtgttggtagtgcaattaacattttaagcatgcatatacacacaacatatacacacacttagatattgatatcacacattatatacagttcttaccttctttctagattcaagtgtgctggccgacctgaatggaaagtctcgcgctagatggatgccctaatcacataatgaaaccgggtaaatcacatgatcaaaaccttaatctgggaaatccaaacctacaaccataggttctactatattctctatggattattttaactcaggaagtagggaatcacccaactatggcacgaaaatgacaagaattgaggaaatgagagactcggggaaccctgccaaaactggctaaccggtttgcaccagttcacccaagaaatctaatttcttgctcaaaactctaccaaatg

SEQ ID NO: 346316 - DNA, 1605 bp, Cannabis indica
cccgcagacgaagagaggcaattgctccggatcgccaaacataactacgccctggacaagttcagtcagggatatgctgaggtggaggccttgaagaaggtcctccgggaggagcaatagaacaccttacgggaggacgccttcaggaatccctgggacctgaacatggatcccctaacggactgttcaaccgctttgtcggtcctaccctcggcccttttgccttcgagatgaccagccagtttgtctctcatctgactcaattcccacccaagagatacgcagcttgtgcctcactgaactctgtttactaggttcaggacatcagtgctgccatggctgcggtgagtttttgcgattcattcctttcttttagcttgtattttttcttaaggcatctgatttcattcttgttttcctttttcagatcaccgcagagaccgaccgcctctccaagaccctaattgatcacgggtttgtcatgtccgaatttgggagcatggacgaggctgcgaagattttgcgggacttgtcagccgagaggagggcattccggaaggaggaccagtaaagagattcccaggcggtggcgaagcaccgggaggaggcgcactagagggaggctcaggcagaggcgaatcaccgagaggagctgaaggcggagggtgaggctacagccaaggctaagcgcgagctgcaggaagccagggaggttatggacgaaatggccgctaagttaaaatccttggaggaattgcaccaagtggacttgcagtcgacgaccgacctgactgtggaggtgaaggagctcagggactttaaagaccaagccttgaaaaaggctaaaagagatgagctcctaacccccatcgtctgcaagcactgcgtcaagcgctttgaagatggcatctacatggcttgacagtcgaatggccagagtatcaagcttgacttttatcccaaacctgaggaagccctcgttcgtttctggaagaagaagaaaaggcttgacgctttgcttgaagaacgccgggctcctcgtcacactccccgcattgattaggccgaccagttcaaccatttcaccactataattatttttctttttctttcagacaatttaattatcttctaaggggagacagtttctaaggcccgtccctatgcccttaatatttttttaggacctgcttttgggtcaggacatctcttatgttttcatttaaatatatatatttcgcttagatatattttctgcttgattttgcttttacttctggcctgttttacatttgtctgtgtggtatgccttagtacccccctgagtggcatgaaaatattgtttttaaggcactcagctttattcataaatttagaggttccatacacttttcggtacaaattatcttaacaaagcctaagtttacatcttcggactattggtaatactttcgaagatgatcagtgttccaggccctaggcaccatggttccgtccaatctttttagcttataggtcctggagccgagctcatcctccatttcatacggtccttcccagtttggctcaagtacccccactttgggttcctgagtggctgggaag

SEQ ID NO: 346317 - DNA, 730 bp, Cannabis indica
ggtccaatctgtaacttttgcaaaatacagggtccaaaatagtatttacccacattttaatatgtaaccaaacaaaataatggaatgaagattgtttcttttcttttccattccatttcattacctccaactaaacgtcacttaacaaagtttgtgccattaattccctggctgtgaattttgttatagagatgaagggcactcgataataacaaaagcaacttacctaccacattctaattctatggtattgttatctcttacaataaggaagagccttatttaaaaaataaataagtttggttatgaagtcttaagaaacaaatagaacttattgaactgagctatgtcctatgtatgtataataaggcatgagctagagcctacctaatgctttcaaaacatatttatcatgaattacatatataggcatttgacttatgtttgtgttggtactaaatagtaatgactgtcaaagtccaatgtgaggcatgaaatggagtattattctattctctgatagaaagagatttaagtgtggttagtttattcttgttaatattaaggtcaaagtatatcaacgacgagaaggttgagaactcaatacacaaaatagtaagtaaaaccttgaactaataatgtatggaactaaaacaaaaaggaatgaaatttcaacatccagaaatcagacaaagtaaactcatattacatttttggctactgaaaagag

SEQ ID NO: 346318 - DNA, 351 bp, Cannabis indica
tgggcactcactctatcactctaggttcgaaaatttgaagaagaaaagagagggaatagtggttcggctataggtatagaataggtggctcaattttcttaaaggcaagaaatttcatccactatcatctgttaagtgtgagccatcatttctcaaaaaatgtcatttttccaattctaaccattaaaatgaaaaactaattatttaataactagacatagtctaattttggaattataattgattaattaaaatcaattaactgagtcttacaagcaggatggtctcaactagtatggggaccatgggcctatacaactgagcttccaataagtcaaactgtaatttacc

SEQ ID NO: 346319 - DNA, 776 bp, Cannabis indica
cttgtctaacaaattgaatcaaaggcaaatctcttattttctattgtaatttttgaattctcttgagttttcttcataaaattttgtgctcatggtgattgagagtatgcccactcgtgtcaaagtaatacctagcatagtgtggaagactatggttaaccaaactgaaggagagaagatccaagttcagatcttgataatgctatgcgacaaaaagaaatcaagggctagagatctgaacagaaatagtcattatatttcgctgccatcaatataaggatttcttaatttcttatgtgtttatttcatcgtattaagaaattcatatttagggtgttagtttatagattgtaatcggcatacatgttagtaaatctaaattctaataaaataatttccaacacataggtatataaatatatgaatatatacaatatttctctctcatatatatatatatgaatatgtgtatatattttatgtatgtccttttggtggctcaagacttatatatacttcacatatatatttataatgctatgtaaactagttagaaattttaaaattttcatgcatactttaacgatgattagttagagatgatcttactagactcacaattttaacaaattttatagttgggattgtgaagataatgaatttgaatctcttccttttgagtctcttgaaacttccttctctcaatgaaagtactaaactgttgatacaatttttcatcaacttaatctaagcagattattaattcaagaataaaa

SEQ ID NO: 346320 - DNA, 549 bp, Cannabis indica
tttattctaatttaatattgttattaattgtaaaacgatcttataatcggtcaattatgtgtaactaaaatgacatttactttgtatataaaggggcgatccaagatgaataaactaagcagaaattattttgcaataatggactaagtagaccgtgatctgactgaacgaatatattctcttgtgttcattttacttttctatttgttctatcgtttgggcagtctcttttgaatactcgctattctaagcagggtatttgttatttttcttttaatcatttattatttatttactttttggtgttgtccaaattcctccgacaacaaagacgttatagctttattgtctaaattcgaggagcagttttgtcccatgtggttcacgttgagaatttagcagctcattgttaacatattttttggttagacaatgagctatcctagatcgagaaaatatcctgcgctgattgtgaatatctgaattgtaaattcatgagtgattctaatcataatgtcaaaaaagaaaaaattgatacaattttattac

SEQ ID NO: 346321 - DNA, 1219 bp, Cannabis indica
aaatattaaattaaaatttatatttagagttatttaaattagtaatttaattaaataaatatatgttaaaatttataaattaaaataaatattaaatacaaatacaactctttaaaataatgagctttagttataaggatattcgatcttcattgttagttctacacaattcttgttttagtgagtaatcatccctaatggatgaacattcattatcaaattaatgtcgtagaatcttaaaagatagtattattgtaagtgttttattttcagtaacgtccaccctaaagtgactgctaagagtaagacttacaaggtatgaaataatggtggaagttcataagatagaatggccttgactctcgcctaaacggaacaatgccaaattctggtcttgatcgaataaaaggttgctagaatggtatctattttaaatgagttgactactctactcaatgaatgatacctttgactctctcctaaatgggacaatgtatgagtttattggaaaccttggaaattatttaagatgtgtttgttttgtattcttacatgtctttcttacttgctaaatgtatgataatttctgaatgtgtatgaatttatattgaatcatgttgttttctgttattaatgttgtagtataatttcgaatctttatcgttggtctaacttaattgttgttttaatggaacaaatcccaaaggattgtcatccgttagacaaacataatagtgttaggtctcaatagataaatatttgtaaatgtaacatctagttgtacatccaaagatgacaacttagactagtgtttaaaatatgaaacaatgaagaatttataaaatgagaataacttttactctcgcctactgggacatcgttggattcttattttcatcgaaattatcctttaatttttcctcttaactttttcttttagaatttacttagatagtatatcattggatgaatggtttataaatcatctgcatatgatgtcactctaatttctcttatgaaattgaatggcacagatgactatattcttgatattctatcccgatatgatataaattttcgatctttgaaatcttctacttgtacatgcttactataggtaacttaaacttagagttagattagtagtgatggtccaagctggaataattactcaagatatatttggtataaatttaagtctttgactttaaattttaga

SEQ ID NO: 346322 - DNA, 534 bp, Cannabis indica
tggctactgctgttattcggcaggggacgtgttagtgagatggaggaagcacctatggtgagttggctatttagcgtgcacataatgattttctttggcaacacaagagttgggctacatcaaatattgttgcatcagcgaaaaacatgcttgatcagtataaatttgctcaaggtagaaagggtctttctttgtctcctttgaatgaagggaggcgacattttgagcattggaatgcacctatgttacataagatcaaagttgatgttgatggggctttgtttgatcaggaaggtcggtttggtgtgggttgcgtaactcgggatcaccatagtaatatgctagaaaccttcacaaaggggaagattagccgggttcaacttgaaattgcagaaataataggcatcaattaaagaagctttaagctggattgcatatcgtccatgggaccacgttattttggaaacatatagcttggtctgtgtccaagctatcgaaagtaatttttctatgatttctcaatttggtttactt

SEQ ID NO: 346323 - DNA, 983 bp, Cannabis indica
  modified_base (64)..(64): a, c, t, g, unknown or other
gtttgtccatccactcttagaatgcacacctctttgttcgacaaatggttcatttgagttacanagttttttttcctgagttatggtggaggacattggtgtgattctggacatgttttgtcgcttctctcaggatctttagattaaagtttttccccaaatcaactcaaggttgtccatagatggttatttggtgcccgacccagtctctccaacatacgcctggttggtatttcaagtttctttaacactgggcgtgactccaatgaggggggttgtaatcccggtagtccttgggttaacattggcaggtgtcttaggtaggttgccccgaggtggccgtcatccattggagttctcaactcctaagtttgtgggagttttgactttagggttcgtcgccattggatcgtgcaactcggtggattgagacctccttataaggaccattgtcaagaagtcaaaacaaggatgatactgtgttcctttcctcccaataaaagtactacaatgttgacttcacttttacccaacgacgctaagtcattaaagcgatttaattgaattatcaattaataaaataataataataaagtaaagcaataaggacaccaagaatctaaaaaggtttggcctcgtgataatagtaatagtctacttcccttttagttgtcttacttagaaaattattaagatcacaaggttcgaccaagtgagtttcttaatattctcgagaaagcttacaaatattttagcagtgtactagcttttagaaagtcgaaaaaagaattctataaaaatgactccactatttataaggaaaaatacgtaatgttcgagagtatatgtaaagaccgcttagtttaatttggaaattagcagttaattatgattaattatgaaaattctttatagctatttaaataatttattatactgttattattgaattcagagatgcatttttatgtcatgtagtagtt

SEQ ID NO: 346324 - DNA, 1046 bp, Cannabis indica
accaggagccagggcaacttagttggatcaaaagaaggtcggggagctcagtttcctccaaatgtttggggctgaggtagaggtcccaagggcagggcacatggtcggggtgatgctcagaattgggaaaacaggtttgaagaaatgcaagccagaatcgaggaacaagataatgaaatccagcgattgagacagcagggtgctcctgcagtgcctgctcaagaaattccagtggcaactgcccctgttgtccaggctgaaccagtgattgcagttaacctgatggaacctctgtatgaatggttccgtaagcaggcacctccagtctttctgggaggtctggatgttatgaaagtcgagcaatggccaacaatgattactagaattttgaatttcatgggcgtcatggggaacgatagagtggtatgtgccacttttcaattccaagaagatgccttagtttggtgggacatggtgtccatgatacatgacgttaccacaatgacctggaaaaagttccaggaacttttcaatgccaagtattataatgaggcagtcagaagtgccaagagaaaagagttcactcacttgacccagaaggaaaacatgagtgttacagagtatacgacccagtttgatcgcttggcgaggttggcctcgggtatagtgccaaccgatttcagtaaaaaggagaaatatctggatggattaaatgcaaagattagacatgatctaatgattactacagacgacaaaaccacctatgctgaaatggtggataaggcactgcgagctgagggcgcagttggatgcatgacacagtctgttgggactcctgtgattggcggggctcctacccctcctgcatcaggttttagcaggggaggtagtggttcggccatggatcataaaaggaaagcatccactgcaactggtggctcaggtcagaacaagaggttccaggggaaccagggtcgaggcagtcgtcaaggtagttctaaggcccgatacacttatccaaggtgccccagttgtaaaaggcacca

SEQ ID NO: 346325 - DNA, 846 bp, Cannabis indica
agcaactccttttcggtggttgactagtgaatttgagcattgatgagagtcttgcttgcatagtaaatagaatggaaaatctttcctctttgctgtccaagtactacacaaatagtaaaatcactagcatcacacatcaactcaaatggcaaagtccaatccagagctacaataactggggttgtcaccaataccttttccaaagtcacaaaagcctcatgacactccttagtgaactcaaatggtcgattttgttccaacaacaaacaaagaggctttgaaatcttcgaaaaatccttgatgaaccttctaataaaccccgcatgtccaagaaagcttctaatacccttgaccgtggtaggaggcggtagcttttcaatgacttccaacttagccttgtccacctcaatacccttgtgagaaaccttgtttcccaaaacgatgccttcttttaccataaaatggcatttctcccaattgagtaccaaatttgtttcttcacacctcttcaacactttctccaagttagctaaacaagtgccaaaagattccccaaatactgaaaaatcatccatgaagatctcaagaatgcttttcgccgtatctgaaaaaattgccatcatgcacctttggaaagtggcgggagcattacatagcgcaaatggcatcctcctaaaggcaaaggtgccatatggacaagtgaaggttcttttctcttggtcctctggagctatagaaatttgattgtagaccgaataaccatcaagaaagcaatagaactctttacccgccaaacgatccaacatttggtcaataaatggcagcaggaaatgatccttcctagtg

SEQ ID NO: 346326 - DNA, 670 bp, Cannabis indica
tttttgaaaagatttttgtgtgacagtatttttgtaaaagttaaccaaaattccagtattttttgtaagtttcccctaaactatccccaattacgaagttacaatataattatgtggtaaaaaaaaattatataattacacaaaattcaaattttcttttggcttttcaaacacgctcttctggtgtgtttcgaagtaattatgtaattattaggatagtaattatacactaaagtaattacactatattttaaaatataatgtatttttaaatgtaattagtaattgtatataaattcttattttttatgtttgacaaatgagttagtaattgtataatttaataacattaattatctaaaattagtaatattttgtaattacacctaattctcatccggtgtgattgaaactttttaattatttccaattacataattaatgtgtaataccttattgaataaatatgttaaatattgtaattactctaaatcatactcaattctaatcatacggtgactttccaaactgtgtgataatataaattgttagaggaaagtatgaataggaatataaaaaggaaagagatttttttcttcagatttatgggttcttttataataaaaaatatatatctttatatattaaaagtgtctatctaacggcattt

SEQ ID NO: 346327 - DNA, 1291 bp, Cannabis indica
ttttatgtcatatagtgaaaattcataattttgcattttcggtacccggcaacatggaacgcggtgtatggctcagtagaatcacaatttaatattttagtatagtgggacggtttatttagacattgggaatgtcgggattagtcgggaatttagaatttcccaaaataccattagtaccccttttatgttatttttgtgtggaggggcaaaatggtcattttaccccatttgtattttgtcctttagtggacttagtggtgtttttattcagcttttattagtggtatttggctgaagtaattaagtaaaaaccattttattattcattttataaaaattggaaaaagaaagaaaaaattccattttctctcaaaatcttcctctgtctttcgaacccacctagaggcagctaggttttggttgatttctctgcattttcaagctggttttggcaaggaattgtgatctcaagttcttggtaagattcttgtagctttctcttaagtttcttgagttttaagaaaaagaaaatggttgcatgcttggtgattttggtgttgtggttgttgtagttgtttgttgttatattcagaggtttagttatgagtttttatgtggattcaagctagttttgttgttagttagttggatttaaccttatgaaaagctttgaactcaaaactttggtttttatggtaaaatgatgaattagctgctgtggttgttgtttgtgtttgggtttgttttctggtgttatattatggttatatatggtgaattgagcaggttttgatagctagtttgtgggatgagcaagctttgagtttttgaactcaagcttgagtcatcaatggtgatttttgtaatggtgcatgaagctgtgttttattgctttgttattgacctctaggatgtttagaacaggtctggaaagtttggagtggattggggttgaattggttgagctatggaatttttagtgtttcctgcactgaaccggaattccggttcagagaggcctgtaggaaccggaattccggttggcttccaagatttcctcccagaaccggaattccagttggggaaccggtctaccgcttggggcaaatttgggaaccctagtttttcccatttttgtgttatttagggtattgccatgctatttatcgatagggaaacttctagtttcgagtttaagtccccgggaagtgatttagcgtgtcacttaccagtgttatgattattatgatttaggagcctgtaattcaccgagcagattgttccactc

SEQ ID NO: 346328 - DNA, 705 bp, Cannabis indica
tcgctctaaaatagtagattgcagggtaatattagctatctgccctactaccaactcaatcttagctcggatcagctcatttgcaaactattgggagatttgtttcacagtatttatttgactttgcccctttctacttaaggcatcaacaaccacgatgggtctaccagggtgataaaggatctcacagtcctaatccttcaccaactctagccagcgtctctgtctcatattcagatctctctaggtaaagaagtatttcagactcttatgatcaatgtatatctcacatttctcgccatataggtaatgccatcaaatctttagcgcaaataccactgctgcgagttctagatcgtgagtagggtaactctgctcgtactccttttactaccgagaagcataggctattacctttctagcttgcataagcacacaactaagaccctatctcaaggcatcagaataaaccataaactgttccttatctaaaggaagggttaatactggagtggtaatcaagtgctgctttaactataggaaacatttctcacaccgatctgtccaaacaaactttaggttctttcgggtcggctgcgttaagggtacaacaatctttgaaaaaccctaaacgaaccgacaataatacctagctaatcctagaaagcttctaacctcagtagctaattttggtgttggccaatc

SEQ ID NO: 346329 - DNA, 511 bp, Cannabis indica
agatcctggtaaaataaattccaacagatctcgatactcaaacaggacatcaaatgacataccagctttctcgcaggagctggacggccacccctagatagctaacctctggacatcccatggccggctagcctacttccttgaagtgtctggccggccagggaagggcctggaaggattttctatacactttcacacgtggactgcgagttgggctgtcaattgggccctaacaacctaagaaaatagctagaaaatatctatgttcaagggtattttagccttttgtaattaactaatttaacatacaaatatctaaaggtttccgttataaattagggttaagctttactatataaagggccttaactctaacctagaaatctctaagtcccattctagcctccaagtggtaaagttctaaacttaagtgtggaagtctgataagtctctctgttggaaatattttaccaaaatctagatttactaacaagtatgtttcattaacatc

SEQ ID NO: 346330 - DNA, 535 bp, Cannabis indica
atgcaacaatatttgatgcagcctaactcttttgttgtcaaacaaaatcattccgtgcacgccaaatagcccagctcaccacagctgcttcctccatctcactaacacgtcccctgccaaataacagcagtagccagctactaaatgttccaaagctggtcccaacatccactaagctgcgactccaggcagcagtagaaaactcacactccaccaaggcgtgatgcacaatttctgcagcaacattgcacaaaggacaagcaacattaacagggacattgtgggattatgttttaccaggatctagatttactaccatgtatattatttaacatcctaaatatgaatttctaaaataatgtaatttaaacacatataatgtttaagaagccttacattgggtgcagcggatcttaaatgactccttcccctcagatctctaacccttgtatcctttctgtagcagagtatcaccaagatctgagcccgattctccttctcttgaattggattcttcacagtcttacacactatg

SEQ ID NO: 346331 - DNA, 682 bp, Cannabis indica
gtgacacgccttttgatttttttcccgattttcaaaaattcataactaattcaaatagaatcaaaattgagttctgtaaaaaagtgaattgcttccagtaaaaataattccataacaaaaattcaattattttacgtaaaaaattcgcaaacatcaatcaatcatcaataaacacatagatcaacatgaatcacattcaaatcacacatacatcgttttaaatccatatttcttgaaagtaaatcaattaccatggctctggcgcaaaatgttagaatatcttttatcaagatctagatttactaacaagtatgtttttaacatcgtaatatgaatttctaaaacaatgaaaataaacacataaatggtatccttgcattggttgcagtggaattaaatgactccttctgcttaggtctctaacccttgtatcctttctatcccagagtatcaacaaaatctgagcctgattctccttcagttgtttggattcttcacagtcttacatactatgattgaggactggcttgctatgggcgggcacacactcaatcactaatggctgaattttgtttttgtgaagaacactatagaatttcgaaaataagagaagaaaagaagaagaagaagtctctacaaaaacctagagagaaagaaacctaggtttattgcctttgaagca

SEQ ID NO: 346332 - DNA, 846 bp, Cannabis indica
acaaccctcatttctctcatatagtttgtaacaactatatttcataacatttgaattccatcattaattgtgtaacatctcttctattatacaaaatatgatcaaccaaaagaagttacaaaaataattaatcttgtaattcctctctatattacaaaatgtaggttacaattttaagttaaataaattatatgttacacaatttatttaccaaacacttaatgtatattattcacataatatattaccacattttaatctacacttattatattataaaataatataacatgttatagtgtgaatttttcacctagaaactcgagatcaggctcccataaggacgacacgtggactcactctcctcaaggattgctgagctgtcagaaggagaccgctcgaggataaacctcgcctaaaccaaactcagcgagatgatgtgaccctgatagagtctagtcgcattattacgcctcgcatgacgtaggaccaagatggaaatgttcaggtctcgcatatactaagatatatgcaatgtctttgaagacttatcctgcgacttagtaaagatcgtttctttacatagcaagttagtccaaaagacttaatatgctcgatgatccgataaggacttgcacgtcctagatcatcgacgctgtcaaggtatccacatatgcgactcaattaggatgcagatagctaagtacgagactcgttagtctcgattaacaagagcacaccctaagtttgcgagtttgtgtcgagcaaatgaacagacaacttgcactatgaaagtcgcatatgttgctgtaattgtaaaacgatttaaatgttcttcatttattt

SEQ ID NO: 346333 - DNA, 579 bp, Cannabis indica
gggcataaaacccaacactcaagcttgactctttaatggtgaatcttgattttgagcatgttaggttattctgtaacttggattatgttctttggggtatattaagcaggtttggaaggtttggtattgtttggattgaattggttgaggtttcaaatttttcgggttacctggtgtaaactgattaaccgtttttaaaggccttttaaaaccagttaaccggatcagcagctgggttcccaaacttttcgtgttgtcgattcatgttagttctagagctttggttggttaattcgttgatattttagggtattgccatgttaactttcagtaggaaaacttttggtttaaaacctaagtccctaaatgtgatttagtgtgtcacttaccgtgttacgaatgatgtgatttaggggcctataatttgctgaggagctattccactcaagttggccgacacacctgaatttggaaatgaggtaagattagtataatatcatgcatatgtatctacatgtttagcgtacattttatttatgcatgttagagtacattgatagcagtatcagtatacataga

SEQ ID NO: 346334 - DNA, 1014 bp, Cannabis indica
tgatttgactacacaatacattttgccccacactactacaatgttaacctttagaggctgttttttcacccttatttataaaaaaagaagttaaagggtgtgaaaatacccgtttttgtcgaaattgacatttagaggcggttttttgataaaaactgtaggtataaaattgtattataccatttaaagtcggttgagaaataaaatactttggttatatgaagaataaccctatggcgtcggttcctgtataagaaccgacggcatagggtacactataatttgacacgtgtaccctatgccgtcggttcctatgaaggaaccgacgccatagggtcgatcagagtatatgttcttcgatcttcttcttccttcccacttcactcagcaacccagcaaaaccagagagcatatacccagcaaaaccctcgccgcaaccccctcctcaccaccatatctcccccatttctcaaccatttgagcccattttttttttaaatcctccattttcgatacttaataacatacacctaaaaagttttaattttttaccctctttgagtgtcatccgaacccaaatagtaaagtttgggtttgaaatccggccacccatttttcttgagaaatccttgaatctcaacctcgtttaaggtataaatattgtttctattcatttttattatgtacattgttttatttttggtttttgtaaattattatttgagtttttttattttattagtaatattattgtgttttatgtgtatagtgccgggattttttacggtggtcgtcggattgcggttattaggtaataatttatacctcaatgtatagtatatatatgtatttgtatattttattgaatatttgtatataatgtgtgtatatattgtgtgtatatagtgtgtgtatatttttttatggaaataaattttgtaattgtattttatatattttttgtaatatatatttattgtgaatagaatgacattggagggatttcattagttt

SEQ ID NO: 346335 - DNA, 821 bp, Cannabis indica
aaaataaaatataaattatttttaaaaaaataatagatttaataattatttattttattataattaatttattttatttattttattttttaatatgtaataaataagtaaatatggtcttagtacaaaattttttattatagtcttttaatcaaaacaactttttctaaaagttgggttggagcagcttcagcttttagttgtagcttctccaaaaattcttcaaaaaactgttttttgactgtttaccatcacatttttatcacagttttttcaaaaaacaaaaaagttgtgccaaacgggcccatagtaattctatttttgaaatctttaaattgacaaaaatattttatagtttatttattaattttgattgaggtgtttatgtgatattcatatttttgtattgattgaattatatatggaagaaaatatgtctagcttttctatttatagaaagtaaggcataaagggtaatttcgatgacacgtcatttttctatctatctagctgcgtatatctgattctttgtgagttttctaaaatatttgatcaaatttcttgtgaagaaaaccaaagcatttccttttctataaaaggagtcacacttactgctcactgttttgtaagtgcacaaacagaaattcctgggctaattgaatatctattttaggaaattttctagtgagttgtggtcttgttcagaccgtgtatgagctgtcaataaggtgtatattgattataaatacaccttatagcaactaggtaatgtatctcttttatacactttgaattgtattcatatatttagaaaatagagt

SEQ ID NO: 346336 - DNA, 879 bp, Cannabis indica
aaaagaaatccaatcccacattcgggctcctgaatccagaacaggcataaccccccacagagaagattgccaaagatggaaggcaaaattacaatacaggaacaagtgctctgtggtctcctcagcctccccacaaatagggttggaaacctcgtcaaaacccatcctcttattagcaagagggactcttaagggtagagcattggaaaggatattccaccaatggaccttgtgtcactccaaaatctttgagttccaaagtttgttccatagtgccggagcaatgttgcacaaaggagcccgatcaagggcttgaataagataggcagacttggttgaaaatagaccatttgattcttttgtccacacccatctatcccttccctggccactcgaattaccgcctcttaagatgttactaacagtttcctggtcaaaaaggttgtgtagcttgggcgtgtcccaatttccgttaggtaaaagtaaatccgacactttctccaagccccgctgttgacgataattggacttagggtaaaaatctgtaccatggataacccaagggtcatcccaaatacttgtctctctcccgtcagatattagcttgcacaccccttttcttaaaatctcttttgatcgcaccacatttctccaaaaccaagaatcagagctcttaacctcacagtcaaaaaactgtttacccttaaggtacttagatctgagaacattacagcacaacgactgttcctcagtaagtagagcccaaccccacttggccagcaatgcctggttcatctccacagtctttctaaagccaagccccccacgagacttgggaagacacaactggtcccaggctttaagacagatgcctctatt

SEQ ID NO: 346337 - DNA, 399 bp, Cannabis indica
ggtaaataatttttttgtacttgttattggcaccttaatgtgcttaatgtcataccgatatggtatctaataattagatagtaatttttttggtcttttgtattaattaacaatttttttatcttttgtgtgatttttttttattttttataaatgatctttgtaatatatttttttgtaaataatttggtgtactattattgttatgtgacattttagggtgttcaatatcatactgattcacatacacagtaattgattatcaattttctaaatcatttattaaattaaaatttgtaggaactgatattgaaatacactaatcacattcttttgtggtgcttggcaccttaacgtgccattcaatgttgtcattattaatatatacatatctttatt

SEQ ID NO: 346338 - DNA, 614 bp, Cannabis indica
caactaagcaaacatcaagctcaagaacttcaacttcaactcacctaattctataaatttccagcagcaaccatcaaatttaaacctgaatttaagtaatgtagggctcaacaacaaattcacaacaagctcaaggaatcaacccttaaatcccagaaaaacatcactactcatccatgcatgcattaacaacaagatcaacacataatcatgctctttccatagtgaaattcagcaatgaatccaaaaataaaaactgtaaaaactacctcaatctccaactcaaagcttagcacaatcaattcccaaaaatcaagctccaaccaagcttaatcctcacacaaatcaagttgaaatcaagagagggttagggagagaaagagggttcgggtgagagggagaagcaaccagaaaaagaattatcaattccctcaaaatcaattttccaaacatagtaattaaaggtcaaatgaccaaaatgcacttagggcccaaaacatagtaattttatcatttcatactcaatttaatcctaaataaatttcagattatcacttatcaaataaaatgccaattaaatcaatccaattgtatttcgggcccgaacccggttc

SEQ ID NO: 346339 - DNA, 665 bp, Cannabis indica
agcggttggcggcacagagacaggggttgggggcacagttgtagatgtggaggggtctggtgcagttttgggtgaggatggttgaataatatttgcactttccacatactctgccacccgtcttgcttgggtctcgaatgcagtcgaatcttgctccccagcttgtgtttcttcaacctcatccaagcccattttcactgtggggacctcaccctcacaattcgtcttccaataatcaacctcccaatttcgaggatataaaatctgaagaacaaccatctgcaaaagtgaatatcacgttaaatcttaattatatcgcatataaatcgcacaatatcacccaaaatctaataaactttataagttattgtcaccaaaatcgcataaacatcgcatagtaatcgcattacgtcgctaaaactcaattatacatcaatagaaagtttataagctactgtcataaagaatcgtacaaagatcgcacagtaatcgcataaagtcgccaaaaatataaaacaattcaagtgaaaatttatttagagactgccaacaaaatcgcacaaaaatcgctcacgaatcgcataaagtcgccaaaaaacacactttgcaactaacatttataatgcactgccatgtaaatcgcacaaatatcgcacaatgtcgca

SEQ ID NO: 346340 - DNA, 625 bp, Cannabis indica
tgctttgatcttcgcagggtttgcctctattcctcgttgatgaaccataaacccgaggaacttccctgaaccaactccaaagacgcactttaatggatttagccgcattttatatcgcctaagtatttcaaacattgcttgtaaatggttgacatggtcttttgcctattgagatttcacgagcatatcgtcaacatacacttccatagtatccccaagcagatatgcgaacatcatatttaccaatctctgatacgtcgcacctgcgttgatcaaaccaaaaggcattactttataacaatacagacctcgatctgtaatgaacgaggaatgttcttgatctggctcatacatcgggatttgattatatcccgagtatgcatccatgaagctgagaagttcatgacctgcagtggcatcaacaagttggtcaatgctaggaagtggacagttgtctttgggacaagctttatttaaatctgtaaagtcaacgcatgtgcgccatgagccattaggcttgggtacaagtacaggatttgctaaccaatcggggtagaacgattcccgtattaagccacaggctaggaggtggtcgacttcttcttttagcgcttggtacctcgcg

SEQ ID NO: 346341 - DNA, 2389 bp, Cannabis indica
ttagggtttcataagcattttgggtagcgtgcctaattatttagggcgttacaatatagatataagactctactgaattagagaaaagatagaagatgggttggttgatttagagaaggtcggtactgaagataatcgtgctgatgttgggactaaggtcttaaccttaaacaagttcaagcattgcttgaacttgatcaatctcagaagttaatatactgagatttatggaacaccaaccaatgatggctgcattctttcttcatcatcgtcattcttataatttgaagtaactaggtgtaatttatggtgtagttcctccaaatgaaaaagtctccgcaatcgtcatttttgggaagctattcactcgctatctcaaaaggagttgtgtggaatgatagttgagtctcgaagggagttttcggatgagtatatatcatcagtcttcaggatagctagcccttccctgaaaaagagttccagttagctagttatccctccttgaatggtagtttcgaatagtcaactccgtagtcttatatcttaccgaaagcatcttcagcaaggatctgtggtcctcaagcctggaagctcatttatgttcctggaggccttggtgcttatgctgacgtagagactttgctaaatgaggagttggttaagttatttatttttaattaacttaacaacctcatttcttcaacctataaatacctccttgactcaacatttgaagacacgattgagatacgagtttgagaactctgttcagaggagattgagagtttgagagagaaaagattgagaggtagagagataggtgtagagaaaagagagagagattgggtttgagttttgtaaaaagaatcttctatagatgaataagattcttgggtataaagtgtgagagttgaaacattttgtgagaactcaacagataatctcgtctcaattgtattgtacctattcttgctcaatcagtaaagaagaattacggtagtgatccagaactggagtagagtcatagatcacatcaatctatcggacttgaactagtatatattttggtggtgatttgtttattttctttatttaccgtttctagtttaaatactctgcttgcccttgtttttatctaattgttaatcttattattgctaattgtttgattgtttaaggttttgatcatcttgattctgctccattagtcttaatttttccacataatttatgtatctaaaacctaagagtaatgagctatttgtgagagcttcaaattttataagaaaaaaagggtcatatgatacttcactgattttttaagaaataccaactgtcctttcttagaattctctattgagaatctttctagcaccttatccatataagttgcttgaaaaagttctaatgttctccgctttctatctctatagattttaataccgagaacatagattgcctctcccaaatccttcgtttggaattgttcagctaaccacttctttacgtctgatagcctttctacattgtttctaataagtagaatggcacccatataaagaactaggaataccactacattacatttaatttttttttatacacagggttcgtcttcattctattcgaagccatacactttaatagtcttattaaaggtgatattctaatatttctaggtttgcttcaatctataaattgatttaatcattttgcatatatacctttctgatcttctccttgttgcacatacccttctggctgttccatataaatagtttcgtcaagattgtcatttagtaatattttatttctatagttgataattatagtaggtatgtttaagcctatttgctagcaactaagaaggagtgtctggaacagtttaaaatttgaaaaactcaggtggaaaaccaaaatgatctaaaagttaagaatcttaggacggacaatgggttagaatttattaaatctaaatttgacatgttgtgtcaagagtatgggatcactagacacagaaccgtagttaagacccggaacaaaatggtattgctgaaaggatgaactgaaccctgttgaatatagttagatgtttattattcaatttcagattagagaaaccattttgggaggaagctctagctactgcaacctaccttataaatagaagtgcaaactgtgttataggcttaaaaccccttattaatagtggtataatagaactccaaacttattacacttaataacctttgggtgtacagtttatgtacaccaatctattgataagctggaacctagattagttaagggaaccttcctaggttatgccttaggtatcaaggggtatagaatttacatttccaagaagggtagaccaaagattgtgatt

SEQ ID NO: 346342 - DNA, 617 bp, Cannabis indica
tcacatggagagtatcttgaagtgacaggggtcaaaattggtacaatatttaaaaaaatggtaaaaaatgatagattttaaaaaagaagataaaataaagatgacaatataaaaaaggatatagaatgtaatttcctcaattgtaatctccattccattccaaacttgattacaccaaaacaaatatagtgcaactccaatgcagttgctaagagcaactccaacgttgcactgaaacttggatttggtgtataaaatccctccaatgtagctccatagtttacagcatatatgctgtgtggctacagtactcggcatatatgctgtatggctacaatgcacggtatatatgctgtagtactgtagttacgacattttttaaaaaaaaaaaataaattattgttatttaatttatactatagatattgatattattattatttgtatttataagattaaaaatgttatttctacactacactcctttaaaataaattcattgatgtacttttatatattgtatttgagataattttttagcttaatttttatatggtcgtctagattatagttatttaagacttcttacaaaatttaaagaaatttaaaaaaaaaat

SEQ ID NO: 346343 - DNA, 1073 bp, Cannabis indica
taatccaaagagttaacagaattaagcatacagttattttgcaatttcagagcacattacaataaatgcagcacacaattatcttttagcttattgcccattcctaactaaaaacataaaaaattaaagcagaaaattaaaaattttaaatctctccccccaaactaaatattacattgtccccaatgtgtacaataaaacgcaaaggtgagagacttacctgaggccctttcaaaaagggtttggtggcagcggctgatcatacagataaagccgaggaggtggcgccaagtaattcgggtcgtcaatcccaatgttcattatgttgatcagagagttgatttggttaacttgtccttcatcatgaatactcctttgcaccatatagtttttcatgtgattattctgctgaattatgtaactcagctgtgcatgagtatactgcatcgccggatcaatagacccaaggagttgtgggggctcgtcctcctcttcttcgacactaggctctctttgccgccttcggccttgttgttgcgcatcagccgggggttgtccataaggatgaggcctttttagcctgttgaccatagtgatgtccatttttcttagcggtaccacagtattgtcatattcaagttgtggcacatcatacgccccgcaaagctcagtaatgatacccgccaaaccaaggccaccacccgtggctccttgaacaatctactccatgctccctcgaatgacttgtccaatattaatattgtaccccttcatgatggcgtacacatattttagtctatccatttggacatcggagaaatgtttactcggcaccaaccgagcactcataaagtatagctaggtttttgccaccgagttgatttcacatcggtgtagaatattgggcgacccgtcttgcccatcattgtcgtggaatctgtatgatcgctctagtaatgtggattagtaaaggcaattagcactaatttttattattatttgtgaattaattttaaacgtggaccccaatatttagaaataaatattagagttataatttctcaattccggag

SEQ ID NO: 346344 - DNA, 625 bp, Cannabis indica
taaaaaataattaaaataattttaaataattttacatgtattgaccccttgtaaatttcggtttacgtgaatattgatgacacatgcatagtgatatagtaagtagagttgtacatattgtaaagatgtattggctattggtacgtactgcattttgagtatgaacggatacacaccgtgcatgtaattaataaggatgttagagtatatatgtgctgccttaggtttgatgatcaattaatgaatttggctatattatgtattgtgatatgaatcaagatcccctatccaaatattgtatcccatattatgtctaaccaatataatgatgacacatcatttaattatttttgtaaactttactcactaaaactaacggagcaattccattaattacaaagttttcatttttttaatagtttcttttttttttggctgtttttggctgaacagtagtttcttttttttttttgtcaagattagtttctttttttcaaatctagaaccttattaaaatattatttttttaatataaatttattatacctcatattaacttagaattttcaaactcatactctgaagtaggccgacacataaaaaccgctaaactgtgggaaccgcc

SEQ ID NO: 346345 - DNA, 1598 bp, Cannabis indica
cacccgaccaggcacacatccccgttgaggtttgaggctcgattgttgaggcaggaacataacagtccagctcgcccaaatagccgccttagtcgagatcccgtaagcgcgcctcggtgaccttggacggagggctcacccaccttgcgcccaaggcaccctgcctcctgtgagaaactgcggcagtaagttcctcagtgacgaagtccacgcccttgaccaggacatcgccatccgcgtctactagctccccaacctcgttgtatcccccaaagtttgggggtgtagcttcctccttttcctccgccttggaaggactaccaggacggatatcgccctgctcctctatctcctggactttggcgtcccctttatgatccccctcctcctgcacaggtggatcctgttcggggctgggcaaggtggcgtgatgggccacgtgagggtcagacgtgttgactttacgcattgtctgtttggtgcgagccatcatcctgtggctggacgggaaaattgaactaaaatgtctgtcgcttgaaaaaggcggactagaacaaagacgaggatgatcctcgtacaagagttgaagcagatcctagtcaattcggtgttcgcttctccaaaactcacctaggttcatctacaaaagacaacacgcgagatgagtgtttggtcgggatatcgaacattaaacaggcaaatatgccgaccaggagtactcaacagattaaagaatgaaattcgacgaaaagtcaaaactcagaagtttgaaattttcgtgacttagggcgaaaatttcatgaagctttgaataagcaagatgaaagcatgcatgtgcagttcaaaaagcaagcattataaatggcgaagtcgcatgaatcgttacaaagaaaaatcgcagagtttactaacctagggttttctacataccttctacagcaaagttagatcgcattcagaaagtaaaagtgcaaagtaaaagaaattgagaaccttactcaaggattgacgtctggattcagtttttgcaaagctgaacgaacggttttttgtgaaaaattttcagcaaacttgaagctaaaaacctctcttgtgctctgaacttgcttaacaaagaaggttggtgaaaatgagtttgtaaacgatgatcagccgtatttataggtaaaacaacgaaaaggggtaatcatttacaaaaacctcagacgtctcggttacccccaaaagcaaaaattaggaaatacaaaagaaataaagtgtaaccgtaaaacgtggtgagagaaaataagaattcgaagcattaattgcgtcagggcatttattagaccgaaaaccgaagagacgcctagtcagcctcacatcgagtcgcgaacagacgcacctaacacgtgtcacacataccaaatgacaaagacagctcagatgaagtctacacgcaacttcggaagtcctatacagacttggggggcaaatgttatcccaatttttgcactctgacgtgacatcacacgatggtgacacgtggaatcgactctgggtacctgctcgcaagacacaggccgaacagggcacctcatacatttgctcagacaaggtcc

SEQ ID NO: 346346 - DNA, 729 bp, Cannabis indica
ggtcggagatgtcccttaacggggatgggaacggggggagcactccccgccaattccccgccccgtgtgcatccctagtcataacacgtataggtcggattattattaagttttatcttgacaaaaaatcaattcaaggtcccatttgtcatattttaaataatacatggcctattttatcatttaacaaaacagaatgtctaatctgtaacttttgcaaaatataacgtctaaaatgatatttactcaaataattatcatgtcaaaattttttgtttcaatttatataaattaattcttcaaatatttgttcctattttatatacacatgaatattattaacataagaaattcatttatatttatttattcatttgttcacaatattttttacccaataaatatattactatacatttaaaaaaaacaaataatattcatattaaaatcctttaaatatggatagtacatatattaatttaacttcttatatttataatttagtctaaattttaaaatatacattattcatgtttttgataataataataataataataataataataataataagctttaatatgatatgatctaagttaattagtattaagagtcctaattaatctttaaatctcaaatcataaattgaaatttacttcaaatattcaaaacccttttccccaaatcaaaaattcattctctctcccaaaattgatgatccaattt

SEQ ID NO: 346347 - DNA, 595 bp, Cannabis indica
taggtgctaaccgagtcatcgcctggtgaagatagatcaaagattcattcaactcgaagatccgagggccatttccttggctgaaacgattgttcaaagcagtccacatagcggcagctgtttctaggtacatgatgctacttttaatttctggagaaaccgaatgcataatccaggacatcaccatctggttgcaacgggtccaagaactaaggagagcatcatctggttttggttgaggaagactgccatcaagaaacggagttttattgcgtgcgccgatggagatcataaaatctcttttccatggttggaaattccgatcggtgagaatcggagtggcaagagcaagacccggatgatctgcagtgcttaagtaatacggacttctgatatcttcataagcagggcgatcttgaacattggatcttgaagctggtaatggtggtgaatcacgatgtccagcagattgttgagatggtggtggagcaactggattcgtggcatcgatcacaggattgtcgtcagtgatggtagctgatgaagttgctctggtgcgcaccattgttgaaaaaagcttgggattcttttgaag

SEQ ID NO: 346348 - DNA, 584 bp, Cannabis indica
aaagagttttatttagggcataaaacccaacacaggcttcaaacttcatgtaagttcttaatacactttacacttgctttgtttgtttatattacatgtttacagtttttgggttgaatgttggacttttggtgataattttgcctgagtttgttgagtgatgcgttgaattcctcttttttgcatcttgattgctcctttttactacgtttctgttgaggaatcgtgtttaccttttgtaataacgcctttagggcttagagtagttcgtgctttctcggctttgcccttttttccctttttctttttctctttcttttggcaatgtcactgcctttcagatttttgcacctgatgtttgccaaggaaggtctctttgggcttcctaattttgcaagcatctagagggggcttctttccagcggttaggggtcccccattccctattacacattagggtttagtttggggcctaactgctggattttctcaattttttcagaatcaaaatgtctgcttccgcatctaactccaagtcttccaagaagggggcggttcaattagccaccctagaagaggtcatg

SEQ ID NO: 346349 - DNA, 1046 bp, Cannabis indica
acctcctgggaagtttttccaggaagcgtgcgagtgaggacaaagcacgctggaaacactcgtgtcggtgtgtagggtcagtcattagtctaggaagcagccagagtggcgtacccgtggataagagccattagtccgtgggtgtaaaggcccaatggaggcttgaagcggggacgttacattcacgatctcttgaaacataacaagcacaaccaaggacatgaaaatgacttacatttggatgcttaccaaggatatgaatctataatcaatagttactagtatggttcactgatgcgcgttcttcagtacaagtaatctcagtttggattgatgatgtattatgacatctaagtgaaggtgttatatataatagagattatatatgacaatgaccgatatgaataaagttatctttatcaaacatgtcatttgctataaagacctaattcatatcataacgatgatcaatagtagatcggcctaaatcatgagtaatcatgaactcctattcatgttattagtttctttaatttactcattaaagtttctcaaaggagatgattcttacaacttctgttttggaaatctaacaatgtggatggctgggaacataatctacaattatggaatcctgactttcctaatgattaaatgttggttccctttaatttttaattttggaactcatatgttgtgcacaaatttagatgagatctaaattatactttcactagtgaattaacggtactaaaggataaagaagtcattagaagggtaaaacaatattttgacaaaaactaagtacgaactgacacaaggatggctaatcactggaattaattatatcaatgcacgttgtagtaaaactcagtaaatataattctataattactaagagtttaattccatatttataatagagtaatcatggaattattcaccagttctcagagatcttacttttttatgaaactgggtagacttgaaactttctaattttgtcgatatttctgttgggttttttgccctaaataaaactcatt

SEQ ID NO: 346350 - DNA, 513 bp, Cannabis indica
atggcgttgagagaaaggaaagtagggaagagaatctgcggcagagcaaaaatgtggagtcgaacacagctccgtgagagtaaggaaaccaaggaatgtggtcagtggcaaagctccaacctttaggtttaacactccctagggcaaactcttcaattatatttaattttaggctatattatttagagaagttgaaaaatacctttattttcttatatattaattaactttatatttaaataaagtttaatttaaatttattttttatgattattgtacttaaattatcctcacattttcatatgaatgagtatgtttttgagaaaatttaagtaaaattttgattagagaataatagaaactcgtgaaatgataaaaataaattaataaaatgattgaaaaaaaaaagtaaacagaatgtaaaaattaaaaacatcaatttaaaaaagtatataaagtatatagtgtatatatattattttgtattagtatatgaagtattttttttttttt

SEQ ID NO: 346351 - DNA, 872 bp, Cannabis indica
ttaaaatattatattaaaattatcttataggataaattaaataattaacaaatttaaaattaacctagatatttttatagatattctaatcataatattttcaaattcataaattagttatttgtttaaatattttaattatttataaattataatttaaaaaaaaataatattttatatcattttacttatgagaaatttataaatagtattttaaatatttaaataacctatatatttttgtagaaactcgaaaaaggcttaatttaagatattttgacatataatttggataattgttatttgtttattattttatccttaaaataataacatatctattttgaaattagtttattttgttattttaattttattaaattataagattagaaaatgatattgaaaatatctatttagttattttcaaatcatttatcttattagatatttaatttaatttgataaaaataatttaaataaaactagatattttaaaattagtttaaattttattattttgaaaagatatttaaggttgtttcaacaaccctaaattttcaaaatttagttggttagtttaatgataatttaattatataaatatcttatttcacatattgttacatggataatatttgttttatttaattggttattcaaaaacttttttaactaacctagtatttatttgatctaaattgtcatgattaacttgatgacagatccaataatctgatttaaatcatagttcaattgtcaatagatcttgtaaataatttgtaacaaataaattttgtatttctttcatctatgtagacttagaaacatgatagaccccatctaaatctatttgacctgtgtgagcctat

SEQ ID NO: 346352 - DNA, 1056 bp, Cannabis indica
tccaggttctggtccgagtcctaagttccaatctgggtctggtttctgaggcccacgtctaggttccccatccatgtctagggccttgtcccagtctgggtccatgttcgggtttgggtcctagtcctagttttgatttcgattcagtgtctaggttcgggtttgggtccgggtctgggtcggggccttagtcctggtccgagtttgggtccgggtgtgggttcaggtccgaatcccagtctgggtatgtgttcgagtctaggtcctagttcgggtctcgggtgcgggtccaagacagggtctaggtcagggtctcggtccagatctagctcctaagtttcgatcccggtgtgggtctaggtctgggttcgagtctaggttcgtattcggatccctatctaggtttgagtctgggtttgggatcgagtcccaggtctaggtctaggtccgggtctcggtcctggtctgggtaaacgaccgtgtctaagcctgagttctggtctcgatttgggtctggggctaggtccgagttcagttctaggtctgggtctgggtctgggtcctagtcacggtcctagtcttgttcgagggtccttgtcaggcggtttttgttcaggttctagattcgggtcccaggtctgggtcagggtccgattcgggtcttggtgcaagttcgagtcctggtctgagtcccagatctggatccgtgtcacgtgtcccaatctagttctggtttaggtctcgggtcccatgatcaagtttgggttctagaccgagattggggtgcagttctaggtctcggtcccagttttgtgtcgtgagtctggttccatgtttaggtctgagtttgggtccaagttcgggtcctgagtccaggtttgggttgggagtacggctcctggtctagttacggttccgggtctaagttcaggtctagttatggttcgaggtccaggtccaagtctttgtttcttacccgttcccaagtcccggtctacatccgatttcgattccaattttaggtcacatggtacgggtttgggtctaggtttgggt

SEQ ID NO: 346353 - DNA, 662 bp, Cannabis indica
acttcaagcatgaatggaatatcaccgtaacagcttttaagtcatacaagactggtcggcctaacttgacgttaaaggctgatggaacgtccaataccagaaattgtgccattatagttatgctcgtcggagcttgcccaacagtgaggggtaggtgaattcgccctagaggtgtgactccttggctggagaaaccatatacgggcagaagacaaggggttagatctttgagttggagccccatcttttatatgtggtcttgaataagatgttggaacaggctccattatctaccatagttctggccaccatcttgttggctatttaaacttcaacgaccaacgggtcgttgtgccgaaatctgattttgacagcatcctcatcattgaatgttatggtgggctctcccgcccgtgggattttcggcttcctctcttgtacggccaggactacttcttcttgctcgtgctatactgtttgggcatacctctcccgggctttgcctgaatctccagctatgtgcgggcctccaatactgacttgcagatgtccatcttcttgtggttgtagcaagtcttggttgttattgcccctctgattttcatcggccttgacatacttctgtatgtgtgggttatttttccttatcaggaattcgattt

SEQ ID NO: 346354 - DNA, 785 bp, Cannabis indica
gagagcctatgttaagaagtgcgacaaatgccagagattttcaaagataccaagagctccgccaaacgagctgacacagatgcaaagtccgtggccctttgccatttggggaattgacctaatcgggcagttacctaaaggtaaaggcggagtgcagtatgcagtggtagcagtcgactactttactaagtggactgaagccgaaccacttgcaaccattacatcaaagaaagttcaagactttatagtgaagaacatcatatgccggtttggactaccgtacaaaatagtctcggacaatggcaaacagttcgacagccaatctttcactgatttctgtgcgaaccatggtatcatcaaaagtttctccgcagtggcacatcctcaagcaaacggtcaagttgaagcagtcaacaaaaccttgaaggatacactaaagaagaaactcgaagatgctaaaggaaactggccagaagaactccccgaagttctatggtcataccgtacaacggaaaaaacagcaaccggtcagacaccatttgtaatggcgtacggttatgaagctatgctgcccgtcgaactcgagccaccttcccacagaagattgacgtacgatcaaggtaccaatcacatactccttgcagaatcacttgatgaaatcgaagaaaaacgagcaactgcaaaattaaagttgatagctcatcaacaaaaagtagctcggtatttcaacaaacaagtgaaagctcagaaattcttcgtgggagatatggtcctgagaagggtat

SEQ ID NO: 346355 - DNA, 583 bp, Cannabis indica
tttcgaatttttggaaattttttgccaaagaaccatttcatcatcattttcatcatcagaaacaatattttcagaagcattaaaggcaatacctttgcttttctcattcgagagactttgcttactctttttcttgatttgttgattcaactcaaaggttcttaaagatcccatgagttcctcaaccttcattttgccaaaatcttttgcctcttccattgcaagcaattttgtatcaaacctgtcaggaagaactcgaacaatttttcgaaccaagacagattcatctaatttttctcccaaggcaaaaaactcattagaaatatcagataatctttcataaaaatcatttaaagtttcagtatctgacattctcaattcatcaaatctagtttgcagcatggtaaatcgtgatctctttacatcagcagtaccttcaaattgaatttgaaggatttcccatgcttcctttgcagattcacaagatgagattaatttaataaagccttcaccaacaccattaaaaatagcatgtaaagccttattattataaccagacaatttttcatcttcagtggtccaa

SEQ ID NO: 346356 - DNA, 595 bp, Cannabis indica
tataaaaaggtaaatagtttttagagaatttatgtggcatgcctaagattcttattatcttcaatacctatttttctcttttttctaatattttaataattttgtatctctctacatgtagaccaaaagtcatatatgtatcataccaatactatatgcttattgctaaataattttttatttttactaacaataatatatcccttcatatatcatcttcaatcttatttattatatcaatcataatatatagataaaaaaaataaactttctattttttatttcttttttatactaaaaaattacaaaaattgacctataacattctaaaatcaaaatctatcatttctatcatttatatatattcactaatcaatatcaatatatatatctatctatctatataattctcttgctaagcaagatgacatggcatcctaattgagttttatttgttaattttttctattttctaattttttcacattttttttttttctaaatctaacagcctattattgataaaaaccttacatttatagttttaattaacaatgtcaataaactttaaaataaatgtaaactcaaaacttag

SEQ ID NO: 346357 - DNA, 817 bp, Cannabis indica
ttttcatctacttgcccaatttgtatgctcccgattcgagaacttcgaccacttgacatggtccttcccagttaggtctgagtacacctgctgtactgtctttggtgtttagaaatgctcttcttaggaccatatctcccacaaagatttctgagctgcacttgtttgttgaaataccgagctactttttgctgatgggccatcagctttaagtttgttatggtttgcttctcttcaatttcatcaagtgatttggcaaggagtacgtgatttgcttcttggctatacatcaatcttctgtgggatggtggctcgagttctacgggcagcattgcttcgtatccatatgccatggaaaatggagtctgttcggttgtcattttcttagttgttcggtacgaccatagaacttcaggaagttcctcgggccagtttcctttagcctcctcaagtattttctatagtgtatcttttaatgtcttgttgactgcttcaacttgaccatttgcttggggatgcgccactgcgaagaaacttttgatgataccatggttcgcacaaaaatcagtgaaggactggctgtcaaactatttgccattgtccaagactattttgtacggcaatcccaaccggcagattatgttcttcacaacaaagtcttgaacttttttggatgtaatggttgccagtggcttgccttctgtccacttagtaaagtgatcaacggcaaccacttcatactgcactccacctttgctttgggtaattgtccgatcaggtcaattccctaaatggcaaaaggccacggactttgcat

SEQ ID NO: 346358 - DNA, 973 bp, Cannabis indica
gagctatcatcaaaccgttctggcataaaactttgaggttcattccaatactttggatctcttccaattctccaaacatttaccaatactcttgttccattaggtatctcataaccattaatttcacatttttcactactttcccttggaagtaaaaatggagcaggaggatggaaccttagagtttctttaataattaattttaagtatttcatctcatggattgatgtttcatcaactaacccacctcatcttcagccattttcatcattattggatttctcatcaattctcactacaaagaaatgtcactattgccaacatatttttttgctgacaaaagtttggtattgtactggcaaaacggaatctacttttgatgtgttagcaaaagagattggcaaatcaacgttgatgttagaatttttgctggcacaaaataaaaagtgctggcaaaaataacttttcccaacgcgtcaatacaccgataattgttagacttttaccacaatgtgcactagtaaaattttaaccttttgctagcgcaatttgtgaaatgtgctggtaaaagttacttttatcaatacaataacaaattgcgctgataaaagtaatatttcttatagtgtctaccatagcctaattttctgttacatctgatgtttcacttctagcttcaaagatgtcgtgcaaaattaaaacacatcacaacatataagtaatattatataaaaaaagagtaatttgcgctataaatacctaagtttaactcccaattgcaaataaataattaagtttaatttttgacttggaactttgtaggtacctagttgttaaatgttaagaaaattgccacatgacaatccctgattggtctaggttatgaattttttttttttattaaaaaattaatttaaatatatcaataagaaaatgacacgtggattcggacttgatatttaatggtcaggta

SEQ ID NO: 346359 - DNA, 1194 bp, Cannabis indica
tgaggccattaggaggaaaaaaaagtttttcgatcaccgggtatcgtgtctacgcccctatcatgcgttttctaacataatacacgggatgctgagttttttcctcttcccgtactaaggtcgcgctaaccgcattctcggagacggccaagtataggaacaagtcttcttcgaggacaagttttgataggataaagggtttagccatgtattcttttagttttttgaatgcctccttgcactcgtcggaccatttgaatttttcgcatttcttcaggatgttgaagaaaggaatgcacttgtctgtagatcgggagataaaccggctcaaggtagcaacctttccggttaagctttgtatatctttgtgctttttgggagaaggcatattcaggagagcttggattttttccggattttcctctatccctcgttggctgacaataaatcccaaaaaatttcctgatttgaccccaaaagtacacttttttgggttaagcttcattccgtatctccgaaccacttcaaaacattctgcgaggtattttcatggcttgtacatgcctttgatttgatcaacatgtcatccacatatacttccatgttttgtcccagaaggcctttaaacatccggttcaccattcgctgatatgttgcaccagcgttctttaacccgagaggcatgactaggtagcagtataccgtcttatcggtcctgaaccttgtgcattcttgatctgcaatgtgcatcttgatctgattgtagccggcataagcgtccatgaaggacagtagcttgaatctggaggtggcgtccaccatttggtcgatctgtggtaaggggaaacagtcttttgggcaggccttgtttagatcggtaaaatctatacatacccgccaagtcgcacttggtttaggcactagcaccggattgtccagccattctggataatacacatcccggatcatgccactagttagtagcttgtccacctctttctccagggcctctgcctttactgggtcgaggggacgccgcttctgttgaactggtggcatattcgggttaacgttgaggacatgggttatgacatggggacttatgccggtcatgtctcctcggcaccacgcaaaaacatccgtggctgctctcaatgctttaattattttttctttttcctctggctctaggct

SEQ ID NO: 346360 - DNA, 482 bp, Cannabis indica
cataaaacccaacaggtacttggtcattcctacccctttcgggtggatttccaggttggtgttgcctattaggggtatacggccctctggcttgataaccccctagctcaggatttggttggttgttagcccgactttcagattcatcatcaccatgaccgtcatggtagcatggatggtagtcacttttgacctcagggtcttctcttctctccctggacctactatttcttaggtgatcattactgtttcgtggttggccacgttgatcgcggggttgccactgcctacgttggggcatccttccactgcttctgccacggtcaccattgttatttctagagtttcctccaccactccgccttagacggacattgtaggagtcatcgcgtcccatatgatgaccgggtaggacttgctcattggcctggggtggtcgattatattgcggggaaccctgttggagggtgactcctagtcct

SEQ ID NO: 346361 - DNA, 767 bp, Cannabis indica
gctcaaatctattcaatcaagcatacttaaactttagaaaacaacacataatcacagcagcaacaacaactcaaaaactacacatgcaacctatcatctttttttaattttcaagaaattaaagagagaaagagtaaagctaacctagagcttggattgaacacaaacaaagcttgaatccacaaaggaaaagtgacaatccttgctgctcaaagggccgaaagagggagagagcttgagaggaaaaattttgtttttctttatctttgattttttctcaattttaaaataattgaataaatgataaaaacataattccaacctttaatttagccaaaacatatccaataaaccacatattcacattacactaagtccactaaaggataaaatatcattggggcaaaatgaccattttgcccctccacactaaaataacataaaagagtactaaaggggtattttgggaaattctaaattcccgaccaatcccgacattccaaatgtctaataaactatcccacaatactaacatgctaagttgtgattctactgagccaaacaccgagttccatgttgccgggcaccggaaatacaaaattataaaatttcactatatgacataaaatgcatttcagaattcaaatataacaacataaataattatttaaatatctataaataattttccttaattaaatcataattaactgctaatttccaaattaaactaagcagtctttacagattatattgaaataggtttt

SEQ ID NO: 346362 - DNA, 1062 bp, Cannabis indica
tcatccaaagtgaataaaagatccgtataagcttgattttggacaagaagttttccagcttcaattcgttgttcaaatgacagtccatcgatttttttcaactcatcaaacactttcagtcttctacttgcaccttctgtctcgaactggaaacaatcaacaattcttctaatactatcaccaccagcagcttgtatttcactaaatttgttcactgtggtagtcaatacttcaactaatttcctagacctctttctacttctctttcttgatagtgctgaagttgttcccgtacttgtgtgactatcagttggattaccaacaagatcatctattggggtaaatggatcaaactaagattgttgatcattttctgcttctctatcaatctcatctattgtttcagaaaatcccatagcaccttgtctatttgcacgatcctttccaaatatagcaacaaagtcatcataatgaggaaatgttttactccttaagccccttgcattttggatgactctgcaattaataaaaaacatattaaaagaattaagatatgattaaattgtaaataaaattgaacaaagtaacacttacttttacccaaatcatcgaagacactcttttcagcaaccacacactttaggtcctcattccaaccgaaaccacttgcttgtttcaacatgtctgaaattgcattgaattgtttctttagtatcttgatacgagactcaatgtggggttgtcctttcaatctgcaatgaggaactttttcattcatccatctttccaattgttgtagatagccaggtttgaaagtcccattgtctgctttccatcttccactatctaccaactccaacaaacactcaactagttttgaatcctcaattgaagtccattggtattttttttccagaaatcgatgttgcttgctccaaagcatccattttcttaagatatgtatatctcacatctacttgtaacaatatatagcaataaatatattaacatatgaaattaaattaaaaacatagatatataaatttgatatccaacacataa

SEQ ID NO: 346363 - DNA, 627 bp, Cannabis indica
gacagatgaaaagctaaatgataatgttggaagtgtattcttcttaattaggtgtgagcacaaacaagtaatctggtgtgatcccatcagagattggtaacttgtcaaatttagagtactttaaactttatgagaattcttgctatggagaaatactacccaaaatagacttttgtaagaagcttatttttcttgaactaaacacaaataacttaagtggatccattccttcagagcatggtgagttagttcatctagagaaattacagctgtaacaatttttatttgtctaagttagaaaatcaaaaaagtaaaaatccattcagggacgacctctatgccttgggaactaaatgtgactttatgtttaaatggtaatttaacttgaatttatgtttcaagttgtatatgtaccgatgtagtttgattacttaaagttaattattgtatattgaaatgtgtttatattttataggttttgatgttttgcaagtgtttgaaaagaatttgagtcaagtgggaatttcaatctcgattcatcggaggtatatatattttttgtaattcctttattatattacatataattcatagaagagttttaatatcttatatattgattcatag

SEQ ID NO: 346364 - DNA, 509 bp, Cannabis indica
aggacgggttttgataggataggaggcttggccatatgttctttcaactttttgaatgcctcctcgcactcgtccgaccactcaaacttttgacacttcttcagtatgttgaagaaggggatgcacttgtctgtagaccgggagataaaacggcttagggcagcaactttcccggttaggctctgcacgtctttatgctttttgggggatggcatgctcaggagagcttggattttttctgggtttgcctcaatccccctctggctgacgatgaagcctaggaacttccccgatttgaccccaaaggtgcatttctttgggttgagcttcatgccgtatctccggactacctcaaaacactcctctaagtcatctgcatggctattgcatgctttagacttgacgagcatgtcgtccacgtatacctccatgtttcgccccaagaggcctttgaacatccggttgaccattctttggtaggtcgctccagcgttcttcactccgaaagg

SEQ ID NO: 346365 - DNA, 755 bp, Cannabis indica
tcaatgaaagtgacaaaatactcataaccacctcgggctttgacattcaggggtccacagacatctgaatgtactaatccaaggggttgtttggcacgctctccctttgcagagaaagaacgtttggtcatttttccttctaggcaagattcacatactggtaattcacccaagacgacatttttcaatggaccgtctttggttaacctatgaagtctatcatagcctatatgacctaatcgtaaatgccatagataagtttcatcatcattatcaatctcttttcttttatggtttctaggtttagcaatattgaaaagttcattgttaagtgcgatttgtatttccggtcttaaaacataaagcccttgttccatgtgagcaacacataattgaaatccattacgagaaattgtgcaaacagaactcaaaaaattcaatttataaaattgtgtttgtaaacatgaaacactaatcaagtttctactaaaattaggaataaacaaaacattgtctaaaactaaaaatttcttctgaaacttgaggcgggctcttcctttagcttggaccgatactaactcgccatttccaactttgagcttcaactcctctggattcagataatcccaagtttcaagcagctgcaatgaagaacaaacatggttagtagatccagaatcaacaatccagaaggatttgtcattctctaaaacacatgattcaaaaacaaaagcattaccttcattcgaattgtt

SEQ ID NO: 346366 - DNA, 286 bp, Cannabis indica
tattcagcctatggaaagctctatacagtttttggcattgtaccaacaatttattaacttctagtgttacttcttgactaacacagaagtagttgccagaaagtaaggaatcttgtatccctagaggagtagacatatagagaggaatttaacaatatcaaagattttgtgattaaggctgtgtaatggtggagaaagtttgtattcaatacaacctgtaagatcctatacaaagataatactacataatacacttgatctggatattattggaattattttacca

SEQ ID NO: 346367 - DNA, 2074 bp, Cannabis indica
taataatagctcaagattgttaaagaaatataatttaaatgttttcttcaaaatattttaataaatatgatgagtccatatttgtcgtaaaatatgattaatttgcatattaatattcttaaattgattctttaaattactgattagtgtgattttaatttgttaggctatttaaaagactattcatgcatttagagtctttcagagggattttagcatattttggtgaaaaatagtagaagccggcgagctcgattttacaaggcaaaatttaaatacaaattcaaacgaccgtagaggtagaactggacttggagctcaacatgaaggtttaagatctcgctcttagctttctagaatatcttgaatcgtcaaattccgagtaatatcgagagagtttgaccaaaatactatcaatcgtcgcagtagaaaatttctaaaaaaagataacaaaaaaaaaaaaagatagattttcaaccagagttgcgatttttatctattgtttaaaagatgagttatcttttcttttagtgagatattttctaatactattataaatagaatccttattctaaaaggatttatctatttttcaagcactataaataggacctcttaaactatgaaataaaataagtctaaaagctacaaattaaagacagaaatttagagagagagcaaggaagtgacggagagcggcttcgaactgttcttcattctagttcttttctttcccttctactcttattaaatattatgattattataatgtctagttctgagtggttttcttttagttaagggttatttcaaaatccgagacatgaattcttagtttctttactaaatgttattttccagtttccattatattaaattgtttctattcttctatgtttaatgtcatgattattgttttaatcttgtttagatggccaataaattaggttttactttaatctaccgtcatcttatgattactattcacctaatagtctaggattctaagtgtttgtgataaattgtaatttttatatgtgatgaagaatagaacctaggttaaatgaattatatgcttcatttgttgcctagattagtctatctccataattctcaaagctttatctaagttaaataagttacatgcttcgtgaatttactactttaggtaaaagagttaattattgagctcttcgccttgattacatacaatagggaaattgaaataattgactgcttcagcattttctacgggattaatagtttgattggaaactaaaaattacattctttatagggattaggaatgattgttgagggtgtgaaataatctttaactagttaatttttattattacaatttttattctaatcatcaaaaccccattttttctaattcttgttactaatttgtgaataattaaataaacatagtactcgtgggatcgacccttacttacgattatactaaaatgattgtaagtattggaattaaaaaagtagtaatttgttgtggcttacgacacgcatcaaatttttagcgccgttgccgggaacttgttttattttattattcatatttagtttttagtatttttatttttttaaaaaaatcagaatataaaatagatatttagagaaaaaatttagaattttgtttttgaaaataaatttagattttagaaaaaaaattagattttttttattcatatttaatttttattactaacttgttcttctagttgtggttttaattttcagatcttcctttagaaacatgaagatgtacaatcaacaatactatgatccttattataccttgccacaagtgtaacaatatgatccctattacaacacttacacatacaatcaacaatggggagattattctagcacttactacaatgggatcgatcaatatgttcaaccaacttcttactatcctcctgtaccaccacaagctctagatcgttctcttattgatataatcaactctttgcaggttgctactctggagatggaacaaaatatggtgcagtgtcagtatagctttcagaaaaatatgcagagcctt

SEQ ID NO: 346368 - DNA, 820 bp, Cannabis indica
ttgttttagaattaacaattattcataaacatagaatgaaattctaagtgtttatgtggcattcattctttgtagagtttaatataccatagaatttgtatcaataataaaacacaaacacatacaaacattataaacatataattaaattggtactggcatacacaagataaagtaaatgaagctcaattcataaatgcaattcatttccaaaaagagaagaagtttattataatattctccaaaataaaacgaattgtctgcaataatatgaaaaataggggataaaaatcccaaaccaacaattgaaatccaaattgttcttaaattaaaacaattaattcaaaaattataataaaatagaagatttcgagcttcatcttcaatcttggactatctctacccatatgtccaaccatcttcaatctaaaacacatgagtttatagcatagaaagaaataccttgtttctttgctagaaacttaggacattggggtttctagtggcccttttcattgcaatagaagaattttccttttggcttatctctgggagtagcagcctttttctttttaacagttttcacagcttgagcaggcttcttgctattcttcctcttcttcttgttgttgggtttggaagtagaggtaatgtatgcctcatccttagcgcccccattagcattgctagaactaggagctttagatcctcctttctgcggtcctccaatcaaattttcaaatgtccgaaggttgttgattaactcgtgaaagtcaagctccaacttgttcatgacatagtttgaagtgaagggcagaaa

SEQ ID NO: 346369 - DNA, 705 bp, Cannabis indica
ggtaaaataatttctaacagttatatatgcgtgaaatatgtaaatatatagttgtgtaattaatattgttattcgtgtttctactaagtatgtcacacgtgggatttagtggggaagattagtttaatacttgtctaatcccaatccttttaacacaatcttgccccggagaagcctcatggaattaagaacgactcgggatgacagaatgcacgaacgcctacttaatcctccctcagcttccccacgtggaaggaaaattgcttctcttggacgtggagagaggtctaagcatggaagctcgcccagatgatacctggatgggtatttgaagggcccaatgcgaatatcgacaaccttggaatgtcgcggatatcgaccttctatgcacgccagacaccaagtgacgattgtgctttctctaacaaagatcagatcttctctcctacatctgagcatggtagtatgcatacctccaccacctttgtgccaggtggatattacaaacccctatttacaaaaaagaaagctttgagcgacatgttgcctttactttattaggttaaaccgttgaatgacatgtgtccatatggtacaaaatggtccccattatccagctgcagcacgcacgtgcataatgtttccgacgggacccaacagtcagctctaacagtcgtttaaagtattcccgtcggtttctataac

SEQ ID NO: 346370 - DNA, 785 bp, Cannabis indica
agggtggtgctttaaatcccttaggctataccaagtcaaattttcaagcttgtcttgatgatagaaagtctacatttgggatggtattcactctcgggggtggagcagctgtttggagaagtgtcaagcaatctacaatatccgactctaccatggaggccaaatacatagttgtcgctgaagttgctatggaactggtctggctaagaaagttcttcatagaacttggtgttattctaggaatagaaaaaccactagtgttactttgttacaacactggtgctatagccaacagtaaagagcctcgaagccataagaaaagtaaacacattgagaggaaataccacatcattagagaacatatggcaagaggagacgtactagtagaaaatgttgatactgaagacaacctaactgaccattcactaagactttgacagagactaaatttgaaaaacatagaaataatctaggattaattgaaatgtactaattgttttatgctagttcaagtgggagtttgttgggttttatgtcccaactaaaactctatttcaatgtaatcttaaatattcatttatcattgaagaaacataattattgtattatttgtttaatatgttgcttggttcacgtgtttgtttcatgatcattcgtttgatttataaattcatctaaatccttatcacattgttattcatgattactgtgttatctacacagtggaaagtaatcaagattatatgattaaatatagtcccacgatttatcaatacacaggattt

SEQ ID NO: 346371 - DNA, 501 bp, Cannabis indica
aaaaaaagatgatttatcttttcttttagtgagatattttctagtactgtaaataagatctcttaagctacaaatttcattattctagagctacaaaatagagagagaaacttggagagagagcaaggaagagaaggaggtcgcagcttcgaagtattcttcattctagttcttttcttctccttaaactcttactaaatattataattttctttataatgcctaattcagagtagttttcttttagttaagggttatttcaaaacccgagacatgaattcttaatttcattattgaatgtcgatttctaatttttattatatcaaatggtttgtatcttctatgttcaatgttatgattattattttaatcttgtttagacggctgctaaattaagttttactttaatctaccgtcatcttagaattactattcacctaatagtctaggattctaattgtttatgacaaattgcaattttaattgtgatgaaaaataaaa

SEQ ID NO: 346372 - DNA, 1060 bp, Cannabis indica
tgttggacaaagagagccctaacactaaaagaagaggtcaaaaagctgcgcaacaacaatttcataattgaggctttctacccggcctgggtagcaaaccccgtactagttcccaagcgtaacaaaaaatggcgagtatgtattgactttaccaacctcaacaaggcgtgccccaaagactattttccacttccaagaatagatcaacttgtggatgcaacagccagacacgaaatattaagcttcatggacgcctatttggggtataatcaaataaaaatgcatccaccaaaccaagaacatacaagtttctgaacagatttgggtctatactgttataaggtcatgccatttggtctcaagaacgccggagccacataccaaagattggtaaataaaatgttcaaagaccagatcggacgaaatatggaagtatatatggatgaaatgctcgtcaaatccatgaaggctggggggcatatagatgaccttgacgaatgcttcaaagtctttaggaaatacaacataaaactcaatcccctaaagtgttcctttggagttagctcgggtaagtttttgggctttattgttaacgcccaaggtattgaagccaatttaaaaaaaattcaagccctcctggatatgaaatcgcttacaaaaaccaaagaagtctaaagtttaccttgtcagattgtcgcactcagtagatttgtttcaaagtcaacagacaagtgtgttccattcttcaacatcttgcgaggaaacaaaaaatttgagtggacaaaggaaggcgagaacgcctttcaagagctaaaaaggcaactcgcaaaacccccccacactcttaaaacctctagacggagaagaattagggatatacctagctgtcacagaacatgctgtaagtgtcgtattgatcaaagacgagaacaatatccaacatctggtctactacatcaagaaaagactcattgaagtcaaggggcgatacccattgatagaaaatctcacttattgcctaatcttagcagtaagaaagctaaggccttactttcaggct

SEQ ID NO: 346373 - DNA, 800 bp, Cannabis indica
aagaagaagatgggagatcctgagaagaaaaagccaaatgataagcagacttaacagagaaaatacctgaactttccctttcccaaatcagattatcattgccataacaccgagaaatgggaacttcaagaatatcggcaatcattgactcatcaaaataagaacccaatttagtaacatcccaagtacctgagtcagtaataaaataggaaaaaaaaaaaaactagaaggaggatggacattattaataaatgatttatacctatagttaggaagccaatgatcattcaaaattctaattccactaccatttcctactttccaaatgattcccgaagccaacaagtctctaccccataaaatgcttctccatgtaaaagaagggttatgaccagggacaaccgtaaggatagaggtctgaggaaagtaatgagctttaagaagcaaactaagatgagagttagggtttttaagaatacgccaagcttgcttagctaacatagcttggttaaagtgagcacgagaacgaaaacccaaactaccacgaaattttgattgacaaagaaatttccaagatttccaatgaatttttctagattcccgagtagaaccccaccagaatctagccatcgcagcttcaattcccttacaaatcttaacaggtagccgaaaacaagccatcgcataagctaggatagcttgaatcacggctttcaaaagaacctctttaccagctctagagaaacatttggaagaccagcttcgaagaacagaagcaacttttgttggaattattttac

SEQ ID NO: 346374 - DNA, 523 bp, Cannabis indica
tctattcaactatgcaactgctacaaatgactgctagagttggaaatatgaaagcctcggacagtactcagtcaagagtgcttataaatatttacaagaaatgaaaggggtctggcctaatgatggtggttcgaatttttggaaggagctgtggaatctgaaggttccaccaaaagtcagtaattttctatggagggcagcttcgggttcgcttcctacttgttttcagctgaagcacaagcatgttcctgttaattctatatgtcctttgtgtaacgcttcagatgaaacgatctaccatgctttggtggggtgtgattttgctcgtgcgtgctggcatagaactatggtggacgtgggcagcactttgaacgacactttctgcaattggctgctagttttgtttagccgtagtaggccgaaagagatggaggaagctgcagttgttagctggtcaatttggcgtgcctgtaatgactttttttggcaacaaaggagccgtactgctgcaaatgtggttgct

SEQ ID NO: 346375 - DNA, 619 bp, Cannabis indica
gtgctctttatataggcgagcttacaagagatagtacgttaatatcccttaaaaaggacatattacctatttattacataataaaataataactaaattatatgtgaattaacccccaaaaataggtaaataacggatctttatcccctattttcgtgggttgttgaagctcaattcgtgacttgtagtccttccaggatgtatgctgtacaacaagtgcctcccaagatgtaggctgcacaacagtgcctgccatgatgttggctgcacaacaagtgcttgcaagaatgtaggttgcacaataagtgccagctaggatgtatgctgcagaaaaagtgtctgctagcatgtaggttgcacaacaagtgcttgccaactttggcaacagtgggctagccgttgtacaactttccttgaaagggtcaggcttccttggtcaaataggccgttttgtgtctgacagtcaccctttggccggccagcttgtgctcaaaccctggtcgaccaagcaagcttcccctggccgacctatgtacttcccttggctggccaaacatagttgtccagcttcttgacggcttgcttaactcctttttcttgttacttgacagttttacca

SEQ ID NO: 346376 - DNA, 564 bp, Cannabis indica
gtagggtttcaaatcctgatacattttggtggttcctggatgcagtgaataaggtgtggtatgagcttcatcaagtatctctttcttaagctcgccaacactaggaacacaaactcgagctttatacaacaacattccattagtcgagactgaaaagtccttaggccgaccagccatcacctcatctcgaaccttagctaactcaggatcttctagttgatcttttctaattctttccaacaaatcagattgaagtgttaagttgtgcaacttcacaactacaaacttaatccctacactaaccatttttgaggctagttgaggggctatcagaaccgcggtgtaaatctacccaggacctcttctactcaaggcatcagccacaacattggcttttccggggtgatacagaatctcacagtcgtagtccttaaccaattccagccacctcctctgcctcatgttcaaatccttctgggtgaaaaagtacttgagactcttatgatcagtataaatctcacatttttcaccgtaaagataatgtcgccatatcttaagagcaaa

SEQ ID NO: 346377 - DNA, 852 bp, Cannabis indica
tgcgatttaggttgctccgctaaatgctacatgggattctatgtgaaattctgtaagaatgttaaaaaaactgttttgaaatgtaaaaattaaaaagctgctatttttttacctatcttttttctcttgtatttttttatttcaattttgtttgctaatttttttaatttttcttcttattttcttattagtaaataatagtgtagaaaattatacaagcttagggaatgtataatttagtggaatataatggtaatagtaatggtttcttgttggaataaatgttagaaaagggagctcagctccttgtccccttcagcacgccacgcgggcgtggcctccactgcagcaccccaaccgtgggtgcttcccacaccccaagcccacgactgggctcctctccctccaattccttttagctcccaaaaagtcaaaattgctccttttacagccaatcaaatgatgacacatggcaccacctcacccaaagcaaccaatcagcatgtgtcacgtgtcattccggtttaaagtttgtgtaattgtattttttactccatgcaatttgtaataagtttaatttcacattagtccttttaccttcctataaatagaaacttaggattttaggatttagtacaattttagacaaaaaaattcagagaaaacactcaaagcgctcagtgttagtttactgcttttcttagttaattttcttatggatttctatgttctcttattattaaggcggacgatgaatcctagtgtatttaattaagtatttatttttattttgattctcagtgcaatatatatgcttatgattttcgcttcttaaaataatttctttcatct

SEQ ID NO: 346378 - DNA, 1029 bp, Cannabis indica
gaagtgaagaacgagcagtctgcctttgactccagaaccttccaagaaattaaagaccgaagaacttccaattatattttggaggaagatgaaaagaatgtgaggtaccctcacgttgacccattggtaatcaccatccagctcgctaacaaaaggataaaaagggtgctattagataagtatgagtttattgaacatcctttacagggaaacactgaagaagattgggctcgaaaaagctaaattaaggccttgtatggtgaatctgtgcggactgtcgccagtcaaggcataattgagcttgcattaactttgggcgaagcacctttatccaccacaataatgcaagattttttggttgtcgacttgccatcggcttacaatatattgctgggtcgtccagcattaatcagacaaggggtagctagttcgatcaagcacttatccctaaagtttcagacactagtgggtgtgggagtagtgcgaggtgatcagatgctggctcacgaatgctatcgcataaagctacaccacagaaaagccgatcaccaactaatggcagtcttgacagaagaaggcgagaagaaggatgaagatcttgatcctcgaattcaagatgaaagaaacttactgaaaccaattgaagaattggaagaagtttttctagacccaggaaatcccacaaagtgtgtttacattgggaagaacctggatgaacaattgaaatagcagctaataagttttttaagggcgaaccaagatgagttcgcatggagccatggagatatgatagggattgaccctaatattatctgccatcatttaaatgtcgatccaaactacccaagcaaagagacaaaaagaggaaatctttggattccgagagacaaaggggcactcaaaacagtaagtggataaagttgttggtcaaacgactttatacacgaggtgttttatccctcatggatagccaaatcatattcttgtcccaaaaacccacaaaacttagagaacttgtattgatttctc

SEQ ID NO: 346379 - DNA, 1372 bp, Cannabis indica
ccaagttccaaaataccgggcaccggaaatgcaaactatgaaaactactgaataacataaccatgcatttcagaattccataaataacagtaataaattatttaaatagctataaataatttcataattaatcataattaactgataatttccaaattaactaagcgggctttacactaatgatctccttagacagactttgccaaccagcatgatccccacaaaagccttcatgaatttccttaatgattttatttgcttccacgggaggaacatgccgaagtaggggcattcaataccctcttctatatagtttgccttcgatcattgtgtagcgaggcactatatataataggttttgcgcctcgtttttgtcatttggaagtttcccgtcgagtatataattgataataggcatcatccatgttggataactatctatcatctcgacgtctttagttttacatatacttggcttgctcaacatttctaacggaactagattgagttcatccaggtcattctgcgaggccaactttgctaaggcatcgacgttggagttttgttctctcggaatttgttcaattttaaagtaatcgaatctctcaaagttcttccgaactttctctaaatacttcgccatttttaagcctttggcctggtattccccgaggacctagttcacgatcagctatgaatcactatgccaaatgagatttttgacttttaaggcctctactatctttaagctggcgatcaaggcttcatattcagccttgttatttaatgcgtcaaattggaacctcagagcatagtgaaacttaaagccttccggtaatattaatattatccctgcacccgaaccctgttcgttggatgcgccatcgacatataacttctaggtgtctgcgtctcgctaatctggtgggatttcttctagagttataccttctattaagaattcagctaaagcttggcccttgatggatgttcaaggattgtatgttatgtcgatctgccccagttcaatcgatcattttatcaatcttccagaagcatttggttttgataaaacatgtctcaagggctgatcgattaacacttttatggggtgagcctggaagtatggccgtagtttgcgagatgcatgaactaggcataacgcgagtttttgtagagggggatatctggattctgcccctagtaaccttttacttacgtagtaaataggttgttggtgcttgccctcttctcgtactatagctgcactaattgcatcttccgagatagccaaataaagaaataaagtctctacagttattggtttttccaaaactggaggcgttgcaagatgccttttttatgctctgaa

SEQ ID NO: 346380 - DNA, 612 bp, Cannabis indica
tatcgtatacgccgtatacgtgctctctctctctctctctctcgttggttctctgttttgggtgtacgaaaatagagtttaaaacctaatttctatcgtgtttaaacccaagcaaaatatcgcattgaaccgaagtggagcgattcccattccaccaaaataggcgttcggttcggttcggttcgtgtatgttaagttcgtatataacagtttaataataataataatatacccatataacaatatccagacatatgtatctattaggcattatgcacatgccaataaaatcaaatattatatcatcataaaaataatcccatacatatttaaatccataaatatgtaaaataaaaaatactctcagctaaataaaattacaaaaataccctttcggagttagcggatattacaatatattttttgagtattaatttagtattcttataacaatataacaatatgcaatatgcaatactaaaaaaattatgtaacttaatttagtatcaattttagtactacgatatatctaatactgctgtatatatttaaatgatctaatacatttattatttttgttacaatataacaatatgcaatactaaaaaaatt

SEQ ID NO: 346381 - DNA, 489 bp, Cannabis indica
ttgcaacaggagcaaaagtttcatcaaaatcaataccttctacctgtatgtatccttgtggcaccaatcgagcattgttcctcacaattgtaccgaattcatcacttttatttttaaaaatccattttgttccaatcacattgatttcttttggtcttcgaaccaaaatccaaactttgttgcaaacaaattgattgagttcctcttgcattgcattgagccattcttcaaaagtcatggcttccttcacatttttcggtttaaattgtgagacaaaacaaagaaatctaattaaattaacataccttcttcgggttaccatgctttcttcaaaattttcaataatgagttctttgggatggtttagtttaactctggtgcttggttccttctggatagaatcagtgatgatgtttggatgagtagagtgttggaaattattttaccaggatcttagatctacttaaaagtatgttgattaacacccta

SEQ ID NO: 346382 - DNA, 584 bp, Cannabis indica
agaattggtgaacggcttcaccaaaactaaaactaaatgatgtcaaaatataccttaagcatcaaaaattacatcctcaacacgtttttcccttggcccagcatctaggttgacgtcatatatcaacttaggcactagatgtcaacctaggacctggtattagagcaacttttagtaaatggccataactcactcaataatgatccaattaacaaaattcaacttatattttaaagctatttcaattctctatcaagtcatgtatcacactctaatcacaatcctgaagatatcaagtccaaatttcatcctcaatggagttatgaatatcaactacaacttacccaaaacgggtcccacagacacaattcaagctctaaaaattgacgactgacctctggattcaatttcatcgttatatcatcatcaatggtcaaaaatatcttaaatgtattttttttttcaaattttgttattattttaaggaccttcgtccctataaaaagagagctcatctagctcatttttcacattcaaaaaagtactcataaggtcagagcatctctctcttgtttctctctcta

SEQ ID NO: 346383 - DNA, 523 bp, Cannabis indica
tttttttgaagtccaataatgctggacatgaaaacttcttaaaatattttttatgtctaacactaattttgttggacataaaaaagggacatagaaagggtattttgtagtagtgcatggaaatcatgggccgcggcccgccccttctaatccttgctaaatatatgaaatcaaagccctaactttaatcattgttaatttctatttcgaattatttcctttctaatttcaccgtctttttagtgttattaaatttaatttcctcttaattttgaatctcccaaataagaataaatatttaattttaaagtacttaattacaatctctgtgagatcgatctcactcttggcgagtttactacttgttacgatacgtacacttgcgtgtgcaaaaataccacaatattggcgtttggttggaggtaatgaaatggaatggaatggaaaggaaacaattttcattccattcctttgtttggttgcattttaaagtattggaatgacattccaatggaatgctctt

SEQ ID NO: 346384 - DNA, 527 bp, Cannabis indica
tcaaacctttatgtttcttttgagatttttccaaattaccaaaataatctattttaaacatattttgcaaagtgaaatatttaggtctgatatgaccttttctaccacaaaatgacagctaggaacaaacctttttaccttagatcttactctttaagtaaatcctaaggattttgaagcaacagattttgtttttgcaacaacaggttgtgaaactgttacagtagactgcacatttgtagtatcagaaagattcgttggaacactagattttacaaacttcgtgattccagaactttccattccattagaaccaaggcctgcaaaacctctttgacctgcattctgagctttttcaaaaatagaagatccagggttaagcatttgaacatttttcttaaaattttcaagttccttctttaagagattgattttttcatctttaacacaaaaatctgtctcataatcttttattttaactcaaacatttcaatttgatgagacagttttttattcattttaatcaa

SEQ ID NO: 346385 - DNA, 783 bp, Cannabis indica
aagaatctctcttttcgctctgaagcttacttagcaaagaaaggtgatgaaaatgagtttacgggccaatgttgtttggtatttataggcaagtcacgaaaagaggtaatcgtctcaaaggaacctcagacgcctcagtttccctccttaaaagcgaatatgggaaataaaaaataatcaagtgcagtcgtcagccgtggagagagaaaatcggatttcgaaatattaagtgtcagagaatttattagttgaaaaccgaagggacgcccagtcagcctcacattgagtctcggacggtcgcgctcgacacatgtccgcatccaaaagcagaagcggctcaaataaagtctacacacaacttcggaagtcccgtacagacttggggggcaaatgttatcctaatttttacactctgacgtggcatcaaatgaatggttgcacgtggagtctacttcgaacatttgctccaaaagcacagtccgagcaggatgcctcactggcatgcccagagcaaagtatttagtaatccgcatagaatgaccaaacacttagcgaattcaacttttgcatcgtgagtcgtcagcacaatccctataactcagggatcaatttacgtggatatggcatacacacgatcccactatcagtgtattcaacctcaatcccacgatccttgcattcagcattgatcccacaatatttctgtttatacgcattgtaacgagagggcaaactcttcctccccaagcttactagccctataaatagtgatgcatattcaat

SEQ ID NO: 346386 - DNA, 862 bp, Cannabis indica
tttactacttcatttaatgttaaaaataattaattaataaatacatatttatttaattaaataatttttctttgaaaaataagtgactcctcactcgccaccctggcatgtgtgtggtggtccagtgtgtgagttctcacccatttgcacaaaattgggtactccttgagcccaaacccaaatctcaaacttgcacattatatgcacttctaatgaagtatttctatcccatgtgagactccattcactcactcatacacttcactttttatttttttatatacaatttcataaagttccaacagacaaattaaaaaataataaaattgtcaactattttttttaataaatcatgtaattttattaatatagcaataagctaaaatgatagcatacaatttattcgggatatcatcccgttagagacacaaccatgattaaagttagacaaacaagctaaataatcaaccatttaattccagatcgtttgacaaaaaataaaaataaaacaatgaaaaagattgcaacaattaactttaagtatacctatattcagattcatttatcgcttaaaagacacaacattagaaattgctgcaataagattatttaacctcgtaactagagatgtacatttcctccacggggatgggactccgcggggacccgcccctaatggggcggggattccccatctaaatggagaatgggacggggacgaggacggggatcacactccccaccccaacggggacccgtttagtaatttatcttatatttctagtaatattttacaatttattatttatgtttgtatttttttagtatattagtatctgttttatgaattttaagttgtatt

SEQ ID NO: 346387 - DNA, 1227 bp, Cannabis indica
tcggagtgagagcgttgactgagatggaagaagtcaactcgatggtaggggagaagagagagagtgaggaagttgagaagtgaataggagtactaggattgaaatggattagcagttgatgatgatgattacgaagatctggtttgaggcgaagaaaatatttggatgagagaagaaggcgttgaggcatgttgtactgaaatgaaaatagacaaggccttaactttcgaattgagtactgattttggtttcatctgtcctacggacaaatgactgtcagttttttttttttttttttttttttttacggtaaatgcaacttttattaaataatttacacaggggaactataccatttggtgtttcactattactaaatttgacgtcaaaaagtatttttactccaaccacaatattaaaaattatactaaaaaaatattctttattgttatattaattttttatttaaattataattaaaaataaaaataatttatattattcacatttaaattttcacaaaaaaatattataaggtgctttgacaatgtatccctctaaacaaaagagtcacgtgatagaaagtttgaattttattttcggcgtgttaattttttaaaaaaattttgaaattttgcaaaaagtagcccaagagatgaaagtcgaacacatcgaaatctgcagtgattcacaattggtggtaatcatgtatctggagaatatgaggctcggggagaaaagatgatagcatatctgagcaaaatacatgacctgctcgctcaattcaaaatctacggtctcaaacaaattccaaggaaagaaaacacaactccagacgcgttagctcgattggcaagcagtaatgtaaatgaaaaagtgaacttggttcctatccagttcctcgaagagcctagcattactggcacgaaagagatcaaaatgataaatacttccccaaactggatgacgccaatagcagcttaccttaacactagggaactccctgataaccgaaatgaagctcaaaagatgagaaggaaggttgcacggtatatcatagtagagggaattatgtacagacgagggttctccatgtcgttgctcagatgtgttactcaagaagaagctgcacgacttttatctgaagtgcacgatggattttgtggaaatcatgtcgccgggcagagtttatccaagaaaaattctaaggcaaggttatttatggcc

SEQ ID NO: 346388 - DNA, 735 bp, Cannabis indica
ttttcattgccatttcatcctctttgaagacaacatctctactatgatgcactttctaaaccaaggttccatacaccaaagtttgtaacctttgactccatcaggataaccaagaaacatgcacttcagtgctcttggttgtaactcatcttgttttatgtgtgcataggcagtgcacccaaaaactctaaggtgatcgagtttgggaacatgccctgtccacatttcttgtggagtcttgaacttgtttgcaacagatggacatctgttaaccaaatagcagacagttttgagtgcctcaccccaaaatttcttttctaatccagcaccaagtagtaggcatctcactctttcaagtagtgtcctattcattctctcagccaaactattttgagggtttttgatcactgttttgtgtctcattattccttctctggcacagaaatctttgaacatatttgagcaatattctaggccattatctgttctcaacacctttaatttcttgccagtttggttctcaagtaatgtcctccaattgacaaaggtttcaaaagcttgatctttacttttgagtagatagacccacacctttctactataatcatctatgatgctcatgaagtaactagccccaccaattgtctccaccttagaaggcccccataaatctgaatggacataggctagtttctcagttgtgtgatgttctccttttccaaacttaaccttgca

SEQ ID NO: 346389 - DNA, 523 bp, Cannabis indica
tacttgtgagtagatctaagatcttaggtaaaaaaatttccaacacttcctacatgatggcatagtcctctctggactaattgtattttgtataaaaaacttttttctaaaatcttcacatatattagccatatgtttaccatctaatttaagagtgtgcaaccctagaatatccaacaagattgtatttcttctttcgatatctattctttcattcttctttaataaattacttacatagaatatctatcttagtccagtatagcttccgccattccaagtcattcactgtgtaaagtccttttttggcaagttagttgacaaataatttttccttttattgtaagattggtttgcattcatacccgatttcttaccttgtatattcggtttgtagttgctcttttccttgttaggaaagttgcactttttagctgaactttcctttgtttggaaacttcttaaaagagaaccaattctcttttggaaaattgtcttttttagggaaactttgattattgcc

SEQ ID NO: 346390 - DNA, 509 bp, Cannabis indica
tgctacaaaaaggatacaagggttaaagatgtgagtggaatgagtcatttaattccgctgcaaccaatgtaaggttttctgaactttatatgtgtttaaattctatgattttagaaattcatatttaggatgttaaataacatatatggtagtaaatcttgatcctggtaaaataatccccaacaaatataatatgtaattaaactagcaaacttgtagaacttattcttaatcctgtatctgttctagtatttgttataatagtaaaatgataccagtgaagtccttggacatataatcacagtaccttattttagtggaaggatttttccaacccattattatttggatgacactagtcatagcctactatgatatgttcaagaaaaactttaaaataaaacaaaagaaaagtaaaaactaaccattcatatggatagtaataacttatcagaattatgaggataagataagaaatttttgcaatgtctattcgaatgacttaagca

SEQ ID NO: 346391 - DNA, 512 bp, Cannabis indica
ttgaggaagacaaaggcccgataggtctgattgttggcctaatggggcctgatgcctttgtaaaaaaaacaaaatttattatggcccgatgggcccaatgcctttgtaaagaattcaaaatttgttatggcccaatgggcctaatggccttgttaatttttcatttttttaatattgcccgattggtccgatgttgggcgcgatggcctccacaaaattttaatttctaataggctcgatacgtccaacgttgggcccgatatagggcccgatgtccttgccaaaattttaatttttaattttttctaactttcattttcttgtttttttttgcagagacctccatagctaataattccactgttgaagcattacacaggccatgtcacttggcgcgacggtagttattactacccaaagattaaggccaaatttgaagaattcagatcacaggatagggtgagggaattccctttcaaacagttctttgagagagagccattacaattttt

SEQ ID NO: 346392 - DNA, 557 bp, Cannabis indica
aaaaaaaaaaatgtgaaaaaaacagtatatggggaattccccttgttattatacgtcatcccaaacttcaaaaaaaacttctctacatttagctcatgaatagtgaagaggtaaaatatattttatatttttctttccctcttttttactcattttcatttttttttttgttttaataagtaaaatatatgtaaaaatataatatttaaataatttaaagcaaaatataaagaagctgatgtatgatgtaatataaatgtgtgaggtaaaataaagaaaatggtattttagtgagatattttaaaaaatagagtagagaaattattggaagtgctcttagttcatttgttcaaaagtactgttcaaaagacagtgtaataaaagatagagtagtaaatttacctctttcaagagaaaaattgatgggaaattttatttgtactctacaaaatgataatatatccctatatttaaaatataatttatttttatttgataggtatatattttaagaatatgagttgaaacaaaaaaaaaaactaatataattaaagata

SEQ ID NO: 346393 - DNA, 1325 bp, Cannabis indica
attattatttggatgacactagtcatagcctactatgatatgttcaaagaaaaactttaaaataaaacaaaagaaaagtaaaaactaaccattcatatggatagtaataacttatcagaattatgaggataagataagaaatttttgcaatgtctattcgaatgacttaagcacaattcctggtccttatgaaatattttatggtatctctagtgattacttaatctcaagcatgtactttatattaatgttagtactagaatgatatattgatgacttagtctagaaggaacttaatgtttctgattaagataaaatctcacaacaagatgtccttaagtaccaatagtaagaggattaaatacacacttgtgtatgcattaaacaagactcttactattgagtggaagccatcaaagatgtaatcaaacaagaaatattgggagacaatcaagaaataatctctgaaagtgacctatatgttagatgataggggtgtatattagagtccttaaatctacatcagctcaaaatttaatgtcagagatggtggttactctaggggtggacgaattattctagaagggtgtaaaaatctatctataattatttagttccactagtgaagctaaatgacttagttgcttttaaaaggcgctagaaagttattaaatggaagaaagttattgactattttatctttattccattttggatagaattagagttgtgtcttctgtacatacagatgcacttatcaaacagtaaataattcagtatccctagaagagtaatgcatataagaaaataatgttttatgaacacaaaagaagtaattatggagaaagctattgcttactacaaccttacagttcctgttatttggtattgtcaaacacactacacttgatatggatatcaaggtaatagattgattgtaatgcacttctagttttatgttagtgtaagtgggagtttgttaggattttatgccctaaataaaacatatttcaatatttattagttatcaatagaagattagaagtcatttaagttaacatgtgattttcatgattatggtttaatatacaatttctaataaatccaaaatatataattattcacaattacagtgatgtcatcacaatggaaggtaattgtgattatatgcttcaaagattatgtcccatgattcatcagtgcactggatttacactgaagaaataatcaacaataaagtttacttacaccttggataagtgttatgtcctttccaaggaattaataaagtatactattatcggatgtatgaagtatacattgga

SEQ ID NO: 346394 - DNA, 748 bp, Cannabis indica
aaaaaaggaaaaaaattacaaaattactatcgaccggcccattcagcatttatacagcccaaaatcaaaaaattacaaaaattccacatgctctataccttaagccacactgaatgaacgaagaagatgaacatacctccatcgatcaaatcaacaacacaaccagaatgaaaaccaaaatgagggtaatgcaaccatcaattctggcgaaatttaattggaaaagaagaactacaataatctaaacagaaaattacgaaaaaaaaacagaaaaattgagaagaaactaaaattaaacatttgatttcggttttaatcgttcaaataactccttctaaaatcgaaaatctagattcatgcaatgtagatctgaattaaacaaatctggagctccctctcgaatccaaaacaaggtatgatatgaaatttttttaaatactaaatctacgttatatacagttgcatcctggttgattcatggtttaaaatgggcaattcaactttttaaaacacaataacaagatataattctaattaaagaacaacatgttacgtataagtttgttgtttattttttggcgttgccttatagttgcattatcgttttataatagtttacaaattatggaggaatttcagttgacgggtaccaacaaatagcatttatacaaggtaagatttatgtaaatagttacaaattagttttataataattggaaattgatctgattcaaataaaactgatgaa

SEQ ID NO: 346395 - DNA, 1110 bp, Cannabis indica
gtcagtcccatgaatttttcataaaccaagaattcagttatatagacacactttatatagaatagatatatattttgatcttggtttggtacatatgtgccaatgcaaaccttataataattagcattattgagttagtttggagtcccttgctgtttttggattttatgatgattttaagagtagtaataaaactgtacttgggagttgggaatctttctttgaagctaattacgttgacacacatataattatgaatcatttgcatgtatgtgattaaattaattccaaacaaaacattgtagtagcctcaaagcactttctcaaaagtaaaagtataatttaagttcaatcattaaaacaattttttcttttcttttttgactttgatatattgttttttttttctttttttttttttttttgaataacaaactttgatatattgtcgagaatttgaggtgaagcacacactgacacagaccaccaccataccatacctggactcttcctgtacaaaatcaattcaagataatgactggattacttctgtacatacatattatatgtgttgtataataaaagttgacatagtcaagacatgttatctctttggtttagatatagaaattagaaagtatgcacttacccaaaaactgaaagataagataaatttggtaaatgaaaagggatagaattattacataattatttcagaatttgattagttgatatttaacttttaccatgtgatagagagtgcatcatggatagaatgagaacatctaggcatagctctcactatcgtttgactcattcccataaaaattataagaaacaatgatgtccaactccaaattccttttctcaattccacgaaagttgtgaaatatttggaattatatttatatgaaaagttccactcttgatattccctttataaaattaacaaaatttaattaggaattttaaattaatatgcatacatttagtctatattaaattttttaactacaaatttaccaaattataaaataagctcattttatatagttcagctcattttcatattcgggcttaaatttgtgttttacttttttatattttttt

SEQ ID NO: 346396 - DNA, 506 bp, Cannabis indica
atatatatttacaaagtaaatgaggcaaagaagtgtacagtgaatcatggagatgaattttcattttgatagcaaggtaaatctaaataatagtaaatcataatttgaatgaatgatgtttgtttagcttcttcatgttgttgctaagcaataaggtaatagttggaatattaatagtcaagattgttctccatttcacctttctttgattggcacaaccattgattatgctgaaagatttctccatgacatagatgagtgagtgacttgtcgaaattgctagtttctagaattagaaattgtacaattgttctatttacttttgtggtgtttactagaaacaaatgatttattctttgaagccatgaataaatagaattgcacctgcaccccatagactttagaatagcataaattgcatcacaaaaatgggacgaagtgccgtgtgaccgatttaccctaatagccaactaatttaataaaaatttcagacaaaattaaaaata

SEQ ID NO: 346397 - DNA, 576 bp, Cannabis indica
acatataacaacaaagttgacacaaaacttctaacaatctagtttgcagaacaaacatgctacgggttgagaagggagattatagttagataagcattgaatggggaatatagtcaatataccattaataagtaataaaaaacccacatctctaatgcacatagattaagatcactcaacaaaaatcaaacttgctactatgaaactgcaatgtaaaattcaatttctgctatgactttaaataactaaactccaaaacatttaaaccaaagattgaaattgacgactttgaactaaatacaacatcttttgggcaaccaatcttgagtagagaaccttgactgaaacccaagattttataggctcttttcgtgaagaaattaagaggaatatcttagtactaaaatatttgaaagaaagtgaaccttgaatttgaacataagatcaagcaatcaaacaaacaacatcgtatttatttcaagaaactcttcttcgacgtaggtatatatatttatttaattacatctcattttgaaacattacaattaaaaaaaatggaagaatgaatatcagaaa

SEQ ID NO: 346398 - DNA, 568 bp, Cannabis indica
aaactaaagtcatttctttgaatatttgtcatcacgttacataatggggcaattataattcattaaagttatgttcttttaacaataacgattaagagtagagaagttagtttacaattcttgtctatcaacttcttgattatggataactcttatatatctccaacttattatataaatgtctatttattaatattttttattgtgtcttaataatacaaatttttatgtacttttttaacaaaaaatattaattttaattaaaatataacatttacatcctcccacaaaataattattaatcattatgcatccattcatatatactatggcaaatttattaagaaaaccagattacattttttagttgaattacgtcaaatttgtatttttagcacaccaaaaaaaaatatttaagtattaaactagtggaagtagtgggagaattgacgtttggttgggaggaatgaaaatataggaatgagaatgtgaatgggaatatgaataggaatggaatggaataaaatttaaagtgcataaaaaaaattgataaaaaaatcattaattt

SEQ ID NO: 346399 - DNA, 534 bp, Cannabis indica
tttcttttatatttctttaatgatatttttgttaaaaaatgtaattaaaaaaggtaaaaaattaaaatatatacttcataaaatataaaaagaaaatctttataactactttgtacaaaaaaatttaaaatattatcaattttgtctacagtttacaagatatgattacagaaaatcttatctttagtaaattgtgactaaaagtaaaaagttgtgattaaatataaatcaacattattatgttgtgactaaaaaattcgtagctaaatgtattagtgacaaaaatcacaatgtgttgtgactaaatatacttttaattagtcacaatacttgttgtaattaaaagtaaattattgagaacttgtatttaaatattgagcattgctataaggcaccggtggtgcctagcaccttctcgacatgtcgcattgcgattggctagcgatactctctaaaaactattatattaaattatatgggactcgatacttagttggaccaatagcgatattgacacataggagggtgctaagc

SEQ ID NO: 346400 - DNA, 687 bp, Cannabis indica
aattagaaaccgagattagggttattaccctaaagtgagcggtttaatggcctagggttattaccctagtaattattaatgtgtaaatgctatgccatgctaaatatattgtaataaagaattatgcgcacaaggcataattaagttagactcggtaaattagtaccttgagtttgatagtaatgcggtctagggttattaccctagaagttatgtgaaggtaagaaagtcatgatgtacaataatattgctaatcaagtgaaagcatgaattagggttattaatctctataagtgttattttgagcatgcaatgatatgttatatgagagactatttggtatgtaatttagggttattaccctaagattctatatgttttgttatctattgaatacatacatatattcaagagttatgtgcataagacataacttggttagacctagtatattactaggataaaccactgaaagaacgtaatgtatggattacgtaaatatatatgaatagggttatgtgagcaaggcataaccaggttagactcggtaattataatcgagataaaccttactaaggccttattgtaaatagacgtgtgagcgtaacacgtaggtctatgctacatagacatatatagacgtgtgggagcaacacgtaggtctatgctacatagacatatataggc

SEQ ID NO: 346401 - DNA, 615 bp, Cannabis indica
aaaattcgggttgctcgtacatatttagttaagttaagactccaataaagggtgctccaaaaagagtgtgtgtgagagtgactttcttgagagagatgagaatgaaaaggaaaagatagtaaataggaattagttttattatgaaaaggataaatttaatactaacaaaaatataacatattttgtttaatatttaacagggtagtaaatgataaagacatgcaacatcattgatggtcaaattttccctttcaaataagagcattgttattaggcaccagtggtaattagtaccttttcgatatgttacattgtaattggctagtaatactttctaaaaactattacattaaattatatagaactcgatacttagttaaacaataacgatattgacacatataaaggtgttagcatttctcttaaaatattatcatgtttatgtcactataattgattgaattataaaacatgtccctaccattgttatttatttatgggatattggcggctaaaccacctaaactttacggtttgtaacacttaaccaccaaaactgaatttttggcggctaaactacctaaactctggttccgttttgctctgcacacctcc

SEQ ID NO: 346402 - DNA, 702 bp, Cannabis indica
ttaacatctgtaacactcagatagtactcgatggttgaaaagttgttcgttcaagatccagacatgtttatgccaagcgaagcatgaaagatggcaattccagagatcaatctcgttgtttccctaacgcgaagacaatccctataattacaggatttagacagagaataaagccaacacattttagtttcctatttattgcattgtaattatggaattaatatagtttcctattttactcattataggaaaaaagggaaactattcctcgtgtattaagttcctataaatagtggcctaatctaactatgaagaggatcgaaagaattgcttcagaaatacactcaagagagaatagtgatctaagagtaaaagttactctgagatcaattgtaagagcttttgagaggaagaacacttcgttccttctctcaagtcaatacaaatacaaggggactaggctactactatacttacggggtcgaatcccttttaaatctagtgtgcactttattttactgtctttgctttcttatatttatcttaattgatctttattttttactcactgttgttggctagaagcgaggtcaacatttttattctttcattgagagcaaaaacacaagtctttatgtaacaccctaactattataggcgtgttcgcgtgatttttaacgtattgtgcagctcgttgctaat

SEQ ID NO: 346403 - DNA, 463 bp, Cannabis indica
tctaagatcctagtaaaataattccaacagtttttctcctatgaaaattccaagttgtacaaggagaaaaccaagggatggcatgacaagaggattcaacaccgggtatttgaataagggcaacaagttctgttattcaattcaaggctcaagttgttttcgggaaacttaaagtctcgttggtgaagaccatttaccattgtcaaggtgtatccttttggagctgtggatgtcaagtatgaacaatctgaaaggatattcaaagtaaatggacagcaactaaagcactatatcggaggggttgttgatcgagcaaagacctccatcactttgtgagattcttgaggaagaatgacttcgggttgccatggctttaatgaatcacatttgggcaaccgagagtgaaggaacaagactatatatacatatatatatgtgttatgtaataagtttggggtgtgcc

SEQ ID NO: 346404 - DNA, 768 bp, Cannabis indica
accttcctgacttcgttcatgtccccaaaatcagacaggacgaagccatggttgattatgttcttggagagacggccagcttcagcagcaagctaaacaacaatacaagtataagaaagaatctccaaaaaagaataaggggaaaaacaaaattacaaaacacttaccacagtgagggagtggctgagatcctggacttggaagatggagttcagggatgcacaggtagcgaaccgcttaggcgcgcaccgggtaagctgagacgcaaactcgccagtcatctcgcagcaaagggagctaaggtgggcccaaggaagcgacggaaccagtccgatagggggtccaaatttaggtcccacggatcctggtactccgggttgttgatggtgtcttgcacctcaacccgcagaaccctcctaagggcttccacctcagcatacccccgggagtattcatccatggcgtagttgtgtttagctatccggagctcctgtctcgcctcgtctccaggaaccggagtcagcacaatgttgggaggggcagtatgctcttccatgggagagaccccaccatcaagaccgtgggccggagtatcagccctccgaggccgcttgggctcctcctgggcaatcattttgcctttacgcttgcgaatcagagcaatctcttgctcttcttcacttttttcagcttcctcaggaagagcccggagccctcctgcaccttcttcaacttcctcagaaaagccccattgcttttcttgacctt

SEQ ID NO: 346405 - DNA, 883 bp, Cannabis indica
ttagcctggtattccctgagaacctgatttacgatcaattacgaatcactatgacatatgagattcttgaccttcaatgcttctactatcttcaaaccagcgatcaagggttcatattcattctagttgtttgatgcatcgaattgaaatctcagagcataatgaaacttaaagccttttggcaaaattaatattacccctacacccgagccctgctcgttggatacaccaaccgcgaataacctccaagtgtccgcgtctcgctgtacaagaggattttcctctggagttattccttctattaggaaatctgccaaagcttggcccgtggtggatgtttgagggtgataagttatgtcaaactgccccattcaatcgaccattttatcagacttccagatgcatctagttttgataaaacttgcctcaagggttgatcagttaacactttaattgggtgtgcctggaagtaaggccagaacttgtgagatgcgtggattaggcataagacaagtttttcaagagggggataccttgattctgcccccaataaccttttactgacataataaatatgttgttggtgctttccctcttgttacactattgttgtactaatcacgtcttccgagacagctagatagaggagtaatgcctcttcagttactggtttcgccaaaaccggaggtgttgccaaatgcctttcaatgctctaaaaggcttcctcgcattcctctgtccattcaaatttcttgttgcctagcagtacattgaaaaatggtagacacttatcagttgacttcgaaatgaatcatgttaagtgcagccatccttcctgttaaggcctggacttccttaggcttggttggtgatggcatatcta

SEQ ID NO: 346406 - DNA, 506 bp, Cannabis indica
ttagttaacttctcttttactattttccgctcttcctatgaatgttattacatacagaaaacttatatttttctacttaatttccttacctcgattgtggagtcctagccttgattgcaataagagtgatccttgagaaacaatattttcttatgaaacttaattttcatatttattaattagaacatatcacaatggtatatatatatacacacaaaaccttaaccttgaatctacaaatttaaaattatagaatgataccttagattcaaaaggaaatctagtagagaaataatggtggtggtgatattgatatatttaagtaaataatggtggtgtatataaatacctaaaaggttggcggtggtgatatgtgagtatgacaagaatgatggagataaaataattagttgggattagtattgagatgatggtgaaatgatagaaaaagaaattgtaaaaaggatgatagagaaaatgatgaaggatgatggtattgatggtgg

SEQ ID NO: 346407 - DNA, 727 bp, Cannabis indica
aggtcaccctaaagaaaaatctgatggcctgcaaaaacaactggcctgaagaatttccaagagtgttatgggcctacccgacgaccccaagaactacgaccggccactcacctttctcaatggcgtacggttgtgaagcaatgttcccggtacaaacgttattcccatcccacaagagaacgacttatgatccagctacaaaccaagctttgttacaggaagcgctggatcaagttgaagagctccgcgatgagtctcaaatacgaatggcagcttatcaaaagaaggtgactaaatattttaactccaaagttaaaaatagaaaattcactattggggatatggtcttaagaagagtcttcatagccactcaagaacccggagtgggggtacttgggccaaattgggaagggacatatgaaatcgaggatgagatcggctccggaacctacaagctaaaaaggatggacggaaccattgtgccaagagcctggaacgccgatcatctccggaagtattaccaatagtccaaatatgttaacttaggctttgtttaaagaatttgtaccgtcaaaatgtatgcaatctctaaaatttaaaataaaacttagtgccttaataacaaagttttcatgccactcaggggggtactaaggcataccgcatagacagatgtaaaacaggccaagagtaaaaacaaaagtcaaaaaagaataatacaatcaaa

SEQ ID NO: 346408 - DNA, 524 bp, Cannabis indica
tatttgagagagctgactcgatgtagcagtggatctcattggaagatgtctgaagctgattagtgaaggtaccatatgtatgtcttcttataaagagatgtatgcctcgatattcgttgtttagattcattcaactgttatgcttagtttgtataatgtatgttatacgctaggtgttctaacaatcaacatgtctcatctacatctcttcatacgtagcaacgttggtgcctcgctttgtattactgatgtcgttcttatgatcgtgtcttcttatacgaaatggtttctcgttaatatgtgaattaatagtttatacatccgtatctcccttaagactttacaattaacgagttatagatatactctatcagcttcgcatttaatgagttattccattttaatatcttcgaatataatcgtcattgtattcatcaattcacgttctccaaggttaccacgtgtcctcctctgaagtgccaaccgaatttcgggtataacactattcaattccaaatctatag

SEQ ID NO: 346409 - DNA, 525 bp, Cannabis indica
aacttacgtaaaaatacgtaacacataagtcaatttcccttgcatgacacaccatacacaagcatttattattttgattcatacaaacatattgcatgtactcaaataatcatttttaacgtaaaacatgaattcatacaaaacctttttacgtaaaattttactaaaatactatttattctaattataacccaaataaataattaattaatcacaactaattataataaatacctacaacaactaataaattataaaacctatttcactttatatcagagacagtaaatggtattacaaacataccttttactattttaacaacacatatctatttttcataattaatttaagcagtaattaagtaaattcatgaaaaatactaaaaataattaaaatctgaatccaactattctaaccctgtttgtattcggtactaaaccacaaataatttactttgaattttctaagtaacctaggtattttttataattaaaataaaaaataatatcaataattcatgaa

SEQ ID NO: 346410 - DNA, 722 bp, Cannabis indica
gagcggatagacaaacgcctctccaagcaaacctctcgaccaacatcaggtaacatatctcacgttataaactattgccttgaagtttattcatacttatctttatttgtcctcgcagagatgactttcttgaagtccgcgcccatcctcaaccgcaagccaaaaagtggaacagcgacgacatcgcccgtcactactcaaaagaggaagagcgacgttataactactcctgccgcggattcctccaagaagctggctaagatcgcacaagacaaagggaagaaagtcatgatcgagccaactatccgggcccgcgattttctggctatgcaggagaagttcgtgggcgaggagttcatatccaaggcggagaggatcccttctgaagagcttgttccgcgctctgtggagttggcttcgcagtcgatgactctgttcatgaaagtcgttaccgctggttctaaggaagctgaactgctgaagaggcaaaatgcccagctccaggagagcataaagaaactaaaacaagacgtgactgataaggacagggtgcttgaagaccttcgcaagtctaaggagcaggtcgagctcgaggccaagaactctcagatgaagatcgaggagatgtctcgcgacttggaggtcgagaaggagaatgggaagaaacagtatgaccaggcggtttctgactatatttacaccactctttccaaaattccaga

SEQ ID NO: 346411 - DNA, 520 bp, Cannabis indica
taccaaaagaccccaacaaaggcatacagccatcaagaatcaaagttaaagtagagcacaaagaaatagagcttcagattgactctataacaaccaggatatcgatttcaataacatgcaacacaagagaaagattaagtctccaactagctgagagcttctttaattcccaatgcctctgttatctttggccccaccttccctacaagacatccagaaaacccagccacttgttagaatttatgccctaaaaataagtaattaatagacagtatattacataatatatgaaataaaattataagataaatgagtacattcattatagaagtataattaataaatatataaaaatgccttattcaaatggagaaggtataatcttgtaaggatatgcaagagaattaagattatatgatatgaacaaaactagtctgtagtgtattaaagtaaatgaatctttaataaagaattactatgtatagtttactatacattatactctagtgtgtgtaatttt

SEQ ID NO: 346412 - DNA, 587 bp, Cannabis indica
ttaacaccataaccccctcattcccggaagcattgcgcttcaaatagtgcataattgataccataatattatcgaaaatcaactaaatcagtataaatacgctttatgcgtcaaaaattacatgtggcagtaccactttaaaatgattggccatcaccttaaaaataatcttgtagaccacattacacaaaagagattggccttaaattcaccatctttatcgagttattatttgttggaataataacaatattgatatcattaatgccaattgaaaactcactcgaagagaaaacccgttgaactaactttactacattcgccccacaatatgccaaaatttctgataaaatcccagactcattctattaggactcggagccttctccggatgcatttaaaacagagccctatgaattccctcttccgaaacgagacacactaaatcatcattttgagaatctgaaaccaaaacttgaatatcattaagcaggttaccccaattggtatctgaggcaatatgaataccttggaaatagttttttactaactgaggaagcccatcatcccaagtaaaccaatcaccc

SEQ ID NO: 346413 - DNA, 609 bp, Cannabis indica
gtatttgagagaaggacataaccgattttgccaaattaagttcttgaccagaagctttgtggtaggtgtccaagaccctcttaatagcaagacaagatctctcattagcgtggcaaaaaagaagggtgtcatcagcaaagaacaaatgagtgattggaggagcatgacgtgtcaacttgaaacccaaaagattgccagattcctgctcatgttgtaaaagtctagagaagccttcagagcaaatcaagaacaagtatggtgataatggacatccttgtcgaagacctcgggatggagtcaactcacccataacttcaccattaatgagaaatgagaagctattagtagtaaggcaacacatgattaatgaaatccatctttcagcaaaccccattttccgcataacttcttcaatgaacttccactccaccctatcgaaagccttactcatatcaagcttaaaagaggcaataccattgcgaccagccgttttattcttaatggcatgtaccaattcaaaagccaccaatacattgtcggtgattaagcggttgggtaagaaagcactttgagcttcagaaataaccaatggaagagcaagcttgaacc

SEQ ID NO: 346414 - DNA, 556 bp, Cannabis indica
aaaaaaaaatagtgactttttattcttataacttctattctattttattattttattaattaaacctcataacaatcttaaagctaattaatataatataatatttgagaagtatacttatacatctatatactcttccaccttctcatatttatgacatatgtaaaatttaagctatataatgttggaaaagttctcattacaagagagaataggaggattacaatcaaaatactcaaaatacaaatagaagtatttcatcaagattacaagaaagctagagaagaataagaagaataataacacacacaaagcttgaccaaggctcaaggacatttgtcctaaaagtaatttcctcctcatatggacacttagagaaactctagaaatgctcttaaggatttatcaagcctcatatgctcagcctagtatctaaggatgagcatatcctcacaacggttctaaacccacaacaaatggtttcaaactacttctcatacaagtgaacaatatgacctctattaatagagtttttcactctcatatgaacatgaat

SEQ ID NO: 346415 - DNA, 1563 bp, Cannabis indica
agtgcccacacacagcaaatagtacctcaatcatagattggaagattgtgacggatcacatccatctgaaggtagatctaagatcatggtaaaattaattccaacagcttattctaagcttcatgaacttttttgccttaactcaagaaaattttctgacttcttgagttatgacatttctttaaacatagatgttctttaatctgttgagtactcctggtcggcatattttcttggttattgttcgatattctgaccaacactcatctcgtgtgttgtcttttgtagatgaactcaggtgagtcttgggaactcggacattggatcgaccatgatttgcttcaacttttgcacgaggatcacccatgtcttcgttctagtactccttcttctagtgaaggacattcttctggccctgtacccagccataggatgatggctcgtacaaagaaaaccacgcgtctggcggatgcaactaatcctcaagtggctcggcttgccactttgcccagcgccgaacaggattcgaccgtcgagatggaggaggatcgtgacggggacgctgaggtccaggaggttgaggatctggatgatgtgcgtccgggcagtccctccaaggcggagggagaggaagaggttgagcccccaaattacggggggtacaacgaggctggggaacaaaacaatgctgacagacacgtgttggttgagggcgtggactacgtcacttaggagcttgccgcagcggttcctcataaaaggcaaggtgccttgggcgccagatgggtaagtcctacgtccaagattacggaggcgcgccttcaaactcttgaccagggcggaaacctgggcgagctagactgctacattcccgtccacaataatcttgtcacaaaccctgacaaggggatgttcgcctggtcgggagcccatggtcagcaaggagcgttgatgccctttcataagtacttcaaggatgtggcagacttctttggtctctacccgacctagttcactcctaagggcattaagtatttgtctgccctcttcgtcctctacgcttcctaaggatggggtactccttctcttcacgaggtcgccaggttcttcgatttgaagtccaccccaaaacaaggcaggtcgaggtacttctatttttctcagccaagcgtcaagtggttgaccggcacgaatgacaaggccataagcaaaatagggcgttttgctgatgagtacttcatggtgaaggatgcgagcattacccagactcgatttcagcagattctaacatatcaccgtcctccactcactcttgctcttagggatagagctcaaaaacttgctcggttgtcgtggtagaccggaatattatacagttgacctccaatgataatcttgtgaggtacgggctttatcttgagcactttactcctaagtccatggcggggaagaagaggaagtctggtgctggccggactgaacaagctcaggaggaggatgagctcattcaactcaagcgcgaggctaagtttgttgggttttgtgccctaaataaaacccttt

SEQ ID NO: 346416 - DNA, 563 bp, Cannabis indica
ggacggctggatcctattcgacgttatgcaaagtggcgtgccaagccactttagggtcagatgcctcggttcccccttaaaagcgaatatgggaaatcaaaataatcgagtgcagccgtcaaccgtggtgagagaaaatcgaatttcaaaatattaattgtcagagtatttattagccaaaaactgaagggacccccagtcagcctcacatcaagtctcgaacagatgcgctcgacacgtgtccccatcaaaatgcagaagcagctcggataaagtctgcacgcaactttggaagtcccgtatagacttgggggcaaatgttatcccaatttttgcagtctaatgtggaatcacatgatggtgacacgtggtatcaacttcgagtatctgcacggagagtacagtccgaacatgatgcctcgtaggcatgcctgaagcaaagcgatcaacaatccgcgcagagcgaccaacacttagtgaattcagcttttgcattgttagtcatcaaagaaatccctataacttggggattagattgcagaggtatggcaagctgtccaaat

SEQ ID NO: 346417 - DNA, 1113 bp, Cannabis indica
tatgttccgctgcacccaatgtatggtttcctaaactttatatgtgtttatttcatcgttttcgaaagttcatatttagggtgttaatcaacatacttgtgagtagatctaagatccttgtaaaataatttccaacactattctgaccatgtctccatgtgaccatgagaagagttccaggtttacctttagaaattttgtaacgccctaacaattaggcatgctacactaatcgattaagaaaccctaatcccccaatccaggattactaaaaggataagcacggataatttaaaatttatttgaaacagaattaaaattaaacttgtaacaactttaaactttaccaccaaaagttacatgttttgggatcccgaaaatatttttacaaaatattgcaagtctttttcacgagccgacctaagcggcaaaattagagttacaaaatacatcactagtagaccctaatccacttggtctagtgtggcccaaacatgtacaagcacagccaagccctcgcactcatggctgatcacaaactgatttaccctttcctgcaatgtagagcacccgtgagccaagcccagaaagacgctaaaagatatcgataatcacaattaacgtaccacacatataataataatgccatttcacatttgtctattaaatatagacccgcgtgatactctcacacgcccatttatgtctatatggcatagacccacgtgttacgctcacacgtctaaatacaataaggccttagaacggttcatctcggttctagttaccgagtccaaccagattatgccttgaacgcataatccttaatcgcaatacatatatagcatggtatatcatttacacattaagaattactagggtaataaccctagaccattaaactgttcactttagggtaaaaaccctaaaccaagtttctaattactcacaaatatcacattcagcataagggccaccgcgcataactctacgcgctagctactgtcttacctcatgtcccaagtaagtggagattccaaatccccgagtgcttttgaacaagtgtcggtaatcctagtcacaattctaaagatttcacaaataggtttaatc

SEQ ID NO: 346418 - DNA, 463 bp, Cannabis indica
ttcaatattgttgaacaattttcaaaggtctttattcttactcgaccagtttttgatgtcaaaaagataaaaccctcttcttaattggttgcggctcctaaatcctaattgatgttgttaccttagctagtgttgtggacatttttctaataaacggtagagaattgaaccatatataaaaatataagttactctactcattgcattttgagatagaatccaaaaatagctatcatcttgaaggagaatatttaggacattcagggccgatcctaaggtatatgagacctaaggcgaaattatattttgagcagggccggccctgaaacaaagtgggtcatagggagaaatttttttttttgggcccttatattagaaaaaatatagtatttttcaaaatcggtaaaaaaatgtataattttaaaagagaaaaaaaaaattttgggcccctaggctgggtggg

SEQ ID NO: 346419 - DNA, 543 bp, Cannabis indica
cctcctttgcctttgggtaattgtccgatcagttcaattccccagatggcgaaaggccacggactttcaatctaagttaactcgttgggcggagcacgaggtatctttgaaaatctttgccatttgtcacatttcttaacataggcctctgaatattcaatcattgttggccagaaataaccttgccttagaattttcttagataaactctgctcgccggcatgatttccacaaaatccatcgtgtagctcagacaaaagtcgtgcagcttcttcttgagtaacacatctgagcaataacatagagaatccttttatgtacataattccctctactatgatatactgtgctgccttcctcctcatctttcgagcttcatttcgattatttgggagttcccagtgtggaggtaggcagcaatcagtgtcatccagtttggggaagtgtaaaccatttcgatctcttatgtgccagtaatgcaaggctcttcgaggaactggataggaaccaagttcatctaatcacttacattactgcttgcca

SEQ ID NO: 346420 - DNA, 983 bp, Cannabis indica
tgtctgaacgtgcgtgctgtccacgtgatgcttagccccgcgcgcacacacatatgatccaaaacaaaatactttcatctaaattcaaaaaatcataactaatacacaaaaaatccaaattgggttctgtaaaagccaaaatttattattttttgtctactttccagtaaaaatattttcaaaatgaaataaagaatatttctacaacgtatattgctatttccaaactatcatcaaataagcatataaaccatcatgaaaccatccaaatcaactcaaacatcgttttaattcatatctcatggaagtaaatcattaccatggctctaataccagttgttggaatatgttttaccagaatctagatttattaccatgtatgttatttaacatcctaaatatgaatttctaaaacaatgtaaataaacacatataaagtttcaaaaaccttacagtgggtgcagctgaataataattgctccttccactcagatctctaatccttgtatcatgtatgtaaaaggttatcaccaagatttgtgcctgaatgtccttctcttgaatttggattcctcacacactatgattgagtaccacttgatgtgtgtggccacttactctatcactaaaggtattaaaatatgaagagagaaagagaagagtttggttcaaaaataatagaagagatggctcaggaaaatttcactgaaggcttgaatttcatcatctttaagtgtgagccatcactatctatttataagcaaccacctaggtttaggttaggatttattaggcattaaaataatgaaaaattaaatggtaaatacccttgcaagtggtcggccatagtaagtggaccccactttgcaattttgccatttttcaacaattttccttattttctcgaaaatgttatttttccaattctaaccacttaaatgtcaaaactatctatttaataactaaaattaattatcaaataa

SEQ ID NO: 346421 - DNA, 717 bp, Cannabis indica
atatgaatgtgagaaagaaaaataactcaataaatctttaaaataaataaataagttcaaagtaatatcatttcaaacttttgtaaattatggtcaagtgaaaaacttgacaaatactttcaaactgtaaaagatttagcaagaataacatctaactagggagataagactaaattaccgaatagagtaaccattaatgataaactagacaatgaatgtatgtattaagtttaaaaggagaaaaaaaatgaaatgttagaaaattaaaattatatcgatatatagatatatagataaatagatatacaaattttgttatcgattgactagcttgaggcctcatacttagttcatctaattgtaataaaataattaaatatcatttaaaataattaattatttaaaatttattataagaagagaattttaatttgtgtaaaaagaagtttaaaatttgtaaaaaaaaaaaattttattgtaaatattataattagatggcttaattgttaaaataattacagtaggaatttaaatataaataaaaaaattatgtataaatattaattaccgtcttgttaaatatttaattaattgtcgtcttgttaaatatttaatcaattattttaagaaaatagttaattataattaattaattctaaaaaaaatatttatctattggtaacctgctattacaggtcaaagaaaactgtaaccatg

SEQ ID NO: 346422 - DNA, 587 bp, Cannabis indica
tccaactggaattccggttggactgtatcggggaaggccgattttcgtattttggccataacttttcactcgggtgtctgttttagacgttctatatactgttttaaagcttatgacgagctctacaatatggtgtataaactagacccaaattatgtattttattttagagtgtttctaccaaaaagttcagtagaaaaaccctaggttcttttctggcattagagaagtgtcctagggtaaacacttatcaattttatgttgtgacatagggcctccattaagcgtgtaattttccattgaggtcgtctggcacacttgaactcggaaataaggtaagattagcatagaacatattatataagcatgttttgtttgtgattgtatatgttttggctgacgtcaaagcggcttaaccattgtgtccgttcggcagtacgggaatcgtactggttaagagtgatattcaccgaaaagagtattaattggcgctatcatagcggcaaaaccattgtgtcggttcggcagaacgggcacagtactggttaagagtgatatcatgggcaattacactcttgggtgctatt

SEQ ID NO: 346423 - DNA, 612 bp, Cannabis indica
tccatcatcacctgacatcgagtttatctcagacgtaacagccttccattttccagcaatttggccgtacaggtgaaatgggctcccttatgcgaagtgcatgttcgacaggcctgggcgtggccgggagtttcttcttcctcttcaatggggtcacctgctcagcctcagcctcagcctcggcttcatcttcaggattcataggctcctgagcatactgctttgcccgggcacttcccttcaacttagcttcacgcttaagttgaatgatctcatcctccttattagctcgttcgggccgggtagcttcagatttccctttctttcccgccacggacttaggagatatcctgtcttcctccggattctcattggaggtcaactggatgatattcctgtcttcctccggcaaccaggaaagtttttgagctctatccctaagagcaagagtgagtggaggatggtgatatgtcgggatctgctgaaaccaagtccgggtgatgctcggatccttcaccatgaagtactcttcaacaaaatgccctattttgttgatggccttgtcgtccgtcccgctcaaccacttgaagcctggctgagagaagtaaaaat

SEQ ID NO: 346424 - DNA, 579 bp, Cannabis indica
tattggtaacctgctattacaggtcaaagaaaactgtaaccatgatggttacaataaaaatgtaatcattgaatagtcacccaacactatggaggatatttatataaggaaataagagttagaatacaaatagtttttttttttaatttaatagaagaatataaatagttttaataatcaattataaaattaatatataaacataaggaggatgtttcaatggttacattaaatatgtaaccttcatggttacagtttaatagccattagattaccattgaatggttgtgattaatttagaaattaaataaaaataattaataattaaactataacttaatagtcacttaataatttattttcttataaaactttaatgaagattaattatatttaaaattagattaattataattattaattaaatttttgtaatttattattaaataagaatcttttagtaattttttttgcccttaaattattaaaatttttatagcaaaactctttataatttaaaattatacacatataattttataattaaaattttgttatacctataactttaatttaaaa

SEQ ID NO: 346425 - DNA, 734 bp, Cannabis indica
gggccatcaactttaagtttgttgtggttcgcttctcttcgatttcatcaagtgatttggcaaggagtacgtgatttgcttcttggttgtacgtcaattttctgtgggatggtggctcgagttgtacgggcagcattgcttcatatccatatgccatggcaaatggagtctgtccggttgccattttctcggttgttcgatacgatcatagaacttcaggaagttcctccagccagtttcctttagcatcatcgagtcttttctttagtgtatccttccgggtcttgttgactgcttcaacttgaccattttcttggggagcgctactgcagagaaacttttgatgataccatggttcgcacaaaaatcagtgaatgactggctatcaaactgtttgccattgtccgaaactattttgtatggcaatccgaaccagcagaatatgttcttcacaacaacgtcttgaacttatttagatgtaatggttgccattggttcggctttcgtccacttagtgagtaatcaaccgcaaccactacatactgcactcaacctttgcctttgggtgattgtccgattaggtcaattacccaaatggcaaaaggccacggactttgcatctgagttaactcgttggacagagctcgaggtatcttcaaaaatctctagcatttgtcacattttttaacataggcctttgaatcctcgatcattgtcggccagaaataaccttg

SEQ ID NO: 346426 - DNA, 677 bp, Cannabis indica
gatggtgtttactcttgggggtggagtagtggtttggagaagtgctaaacaaaccacaatttaagactcagccatggaggccgaatacatagctaccgcggaggctgctaaggaacttgtctggcttagaaagttcttcacaggacttggtgttgttcttggaatggaaaaaatactagttttacttcgtgataacattggagccatcaccaacagtaaggagtctcgaagccacacgagaagcaaacacatagaaaggaaatatcatatcatcagagaatatatggcaagagggcatgtactggtggagaaagtggacactgaagacaacctagctgatccattcaccaaagttttggaaggaactgcatttgaaaagcaccgactgaatttaggattaattgaaatgtactaattgtttttatattagtgcaagtgggagtttgttgggctttgtgccctaaattaaactctattccaatgtaatctttatcattcaattatcaataaagagacagaagtattttcatcacttatttagtgtgtcatttggttcatgttatcatttatatgtttatttgatttataaattcatccaaatccttatcacattgatactcttgtttattgtgtcgtcagcacattggaaagtaatcaagattatgtgattaaatgta

SEQ ID NO: 346427 - DNA, 507 bp, Cannabis indica
tgcttgatgttagttctaagcaagcttgaattttgaaactcaagctttgagctttaatggcaacttgagatttattggtttgttctgtgaattattggttggaaatggttgtttatgcattgtataggtgtactggagagtttgataaagtttggttgagttttgaggtcatgggggaaatttttgggttcccagcacagagccgaaattccggttctggggacctgtggcaaccggtcgaccggttggtggcccagaaccggacttccggttgggaaccggtctgacgattggggggatttttggaaccctagttttgcctaattttgagatattttgggtattgccatgtggttcttcgatagggaaacttttggtttcaaatttaagtctccggaaagtgatttagcgagtcacttgtgttacaattattgtgattagggcatccatctagcacgagatttccgttcaaatcggccagcacacttgaattcggaaaacaggtaa

SEQ ID NO: 346428 - DNA, 638 bp, Cannabis indica
ttatttttataattttattacttttgaatatatgactcaattttttttttgtgtaaataactgttttatttttttatatttgcatataatgatgagtatctctatactctggtgtgatttgatatttgtttttctctttatttttttccattttttcttttcgaatcgaaactggagaaaggaagtatgctactagaccctgccccggttgcattttctcacaagttcgcatcatgcgaggtggaccgatcattctctgatcacattggttgttgtgtccacacttctttctgcagttaacatcactttctgcgattaacaacactttctgtggttaacagcacaggagtggagacaagtgcacacttgcaacaaattatcttttcctatgtggactacctccacgtggcaattttcacaagactgaactcatatttctaagcaagaaattcacaccataagtttaatttttaacggtaatagtatttaacttatatttctaaaacttccataagagcatcttcaatgcaaataattctaaaaattgccataaaattccacatcattccaaaatagaatattttattttctccctcatccacattatttttggccacttactactaaaaattactcca

SEQ ID NO: 346429 - DNA, 820 bp, Cannabis indica
aagccaacaagtgccgctaaatccttaccatactcagattctacttgaatgtgttcaaccactaaaggattatcagtaggagctgatgggcatgctttatgggaattttgaccaatgttagccatggttggtgtacgacttgaaatatcctcttgatcctgagagaatagatttgaagtttttgagaagtcaaggaatcctcccgtctgtaagtatatatatatgtatgtgtgtaagaaaattattcataatatactataaagcaagaatgaagaggagaattaagtactttcgtaccccaaaggatgcaatcgtaggaattggtccaactggaatggtagtctgaattgatccactaatggccccatcatggctgctatttgctgaacaaggcaaactttgcaacttgtgatttttatgagtttcgacaccttttttagataaattactaccccaacatgcatcacctaaaacactttggtcaccctccaaaaaggtcgacatcatatcatctggtatagacctagaaggaacatgacgctcaccaaccaagccatgtcctggagggtctacaagctgtgtttcttgtgaagtgatgtgtgccccagtttcggtggtaagatcctctccttctgtaggacctatcaaagatcaggtaatgattaatatatataaatatgggtatgcatgatatatgcatagtcacatatataaatgtgaatacgacaaagtgatgaaggcataaaaaaaagggggtcgacattatcaatacataaatatgtaataaatgttggattttgtgccctaaataaaacccttt

SEQ ID NO: 346430 - DNA, 501 bp, Cannabis indica
aaaatttttttctaaatgccgaaacaagtagagggtgcgtgcatcccttttaaaggggtgtattgtagaatcacccttattatttttaccgtttataaagattgggccaaaatctaatatctagggataagttgaaaattatccatttttattacacattaaccaaatataactctaaaataattttaattgataaatatcttttttttttataatcaaagtactataacctcacaaaacttatcaaaattagactttctaatgtacataatgaggatatagcttatagaagggggtataaattaaagaatagtaaaataaaggtaaaaattaaaatatgaaacaaaaagtgaatatagagtgtaattttgctctaatatatctatgtaagttttaccccaaaaaaaaaaaaaaaaaccactctatctctccgttatacactgttaattaaagggctaattagcaatttttccccccgaattttgttatgtactaaatcat

SEQ ID NO: 346431 - DNA, 938 bp, Cannabis indica
atctgtttgatcaactgaaaggaaagacactcttttccaagatctatcttcgctgaggctatcgtcagcaaagaatttgagaggaagatatcccgaaaaatacattctgtactcggtatggacattatgaattccttgtgatgtcttttggactcaccaatgccccggcggcattcatggatctaatgaatcaagtattcaaagattacctggatagatgtgtgatcgtgtttatcgatgtcatcttggtatattctgaatcacaagaagagcatgagttgcatcttagagcagttttgcaacgattacgagatcataagatatatgctaaattcaaaaagtgtgaattctggttatctcgtgtctctttcctagggcacatagtagataaagatgagatcatggtggattcggccaaaattgaagctattcgggattggccaacacaaaaattagctactgaggttagaagctttctgggattagctggctattatcgtcggttcattgagggtttttcaaagattgatgtacccttaatggagctgacctgaaagaacctaaagtttgtttggactaatcggtgtgagaaatgttttctggagttaaagcagtgcctgattaccgctccagtactaactcttcctttagataaggaaaagtttgtggtttactgtgatgcctcgagacaaggtctcgactatgtgtttacgcaagctggaaaggtaatagcatatgcttctcggcagttaaaggagtatgagcagaggtaccctactcacgatctagaactcaccgttgtggtttttgcactaaagatttggcggcattacctatatggcgagaagtgtgagatatacactgatcatgaaagtgtgaactacttcttcacccagagagatctgaatatgagacagagatgctggctagagttggtg

SEQ ID NO: 346432 - DNA, 565 bp, Cannabis indica
attaagtcttttccgggtaatttttatccaatgactctgtgagtaatagaacaccctgtaaagaactacaaccgaatcggtttgctaatgagttctgttccaaaaatacctctatttgcagcatgaaagtattgtttttctttcttctaatattccttaggaagaatatcagggttcattatcatatatgacgctcccgtgtcgaaaaatcctgacacttttattggcttggcgtatttttttagaagagcttgaatagtgataacaggggatggttgcattgtgtgaatattggacatttgataacattctagaacgtcaaaatcactccattatttgaatgcacaaagattttgagttgaattcatcatctgtggagaagatcgactcttttgttggatatgtgagataagcttgactgtttttttctttagggcactattttgcataatgccccttttttccacacacataacatcgatcatatttttttacgaaagttgcgctttctttgcaaaaattttattttgcgtccttcgtgctttgagaacttgaacgtcttgaa

SEQ ID NO: 346433 - DNA, 536 bp, Cannabis indica
ataaaatagattacattgaaatggagttttatttagggcataaaacctaacaaggagcacctggggatttgaaatctctacgtttgtgaaacatcaggtaagacagtagttagcacgtagagttatgcacagtggcgcttatatgaaaaagatatatgtgagtaattaggaaccggggttagggtcattaccctaacatgagcgatttaattgtctagggttattaccatagtgattattaatgtgtaaatgctatgtcatgttatatatgtattgagattaaggattatacgtttaaggtataattgggttggactcaataactagaaccaagatgaatcgttctaaggctttattgtatttagacgtgtgagcgtaatacgtaggtctatgccacatagacataaataagcgtgtgagcataacatccgggtctgtgtcatacagacaaatgtgaaatggcattaatgtttatgtgatatgttaattatgattattgatattttatactgtcttgctgggcttggctcacggat

SEQ ID NO: 346434 - DNA, 1002 bp, Cannabis indica
cacctttatccaccacgataatgcaagacttttttggttatcaacctgccatcagcttacaacatattgttgggtcgaccagcattaattggactaggagaagttagttcaattaagcacttatccctaaagtttcaaacacctttgggtgtgggagtagtgcgaggtgaccaaatgctggctcgcgaatgctaccgcatagagctgcaaaacagaaaggctggtcaccagcttatggcagttttgattgaagaaggcgagaagaaggatgaagatcttgatcctcggattcaagatgaaagaaatatattgaaaccaactgaggagttggaagaggttgttctagatttaggaaatcccataaagtgtgtatacattgggaagaacctggatgaacaattgaaatagcagctaataaacttttttagggaaaaccaagattagttcgcctggaaccatggggatatgatacggatcgaccctctactggaatgtagaacatttgcgaccctactaacagtaaactgatgtagtaactcatatttctgatgtaatattttgaacttcaaattattaataaagttgaatcatttttcaagtaattacaaagtgtcatcttttaaaattacttgaggggcatatgtgtatgattaattggaatctatctggaaatacatgatatattgcaaacccattactttagaattttttaaatttttaaagtttttgattaaagaacctttcccatgagaaaggaaaatcaaaagttgtaaatgagatataactcataagctacatgcgaagctgaatactgatagctcgcattttgtggaaaagtatcaaacgagacaccaaaatgcattgaaaaaatacttaaacctaatgtatgaatagaaggtctaactattcatataagcaatcaaaaatatacaaagggatgaatcattaaaagtatattcaagtttgcttaaaacagattataactgtttatgcgaagcataa

SEQ ID NO: 346435 - DNA, 674 bp, Cannabis indica
aaaaaaaaaaaaaaactttgataccatgaagaggtttttccagagtagagaaatagagcgagaggtctaaaggagttttttagaaaagaatcacaagacaagagaatggggaaaaccttagatcattttgaggtgttatcttatttatagagatcaagattacaaataactagttacaaaacaacttgacaattaacaacctctaacaaatacaactactccttaacaatactaacagtattaacaaaattagtgtctaggctattatggcttagtttaatttacactattttactctttttcttagagcatctctaacggtacattatttcactaaattggtataaaatattcacaccattttactctaatggtacaccaaattatgcaccaaattagtgtacatcaaattctacactattaatagtgttagattttaaatctataccaatttggtgtaaaactatttttacattctaactcttattttattttattttaaaaaaatttcttacattttaattctcaaattgaaatttatcacaaaaataatttaaaacactaacatatttgaaagtacaacataacaataacaaaaatattaatattaaacaaaatttgcacaacataacactaaaaagaacaacataaatgaaaataaacattaagtaaaa

SEQ ID NO: 346436 - DNA, 503 bp, Cannabis indica
attacagtattgtcaacacagtggaatgtgattgtgattatatgattcaaacactactacaaaattggcttttcccaacggttaataagaggatcaattataaaaaccgttggaaaaggtaagcataagtttttcccaacggtttaaaactgaagcaaagaaactgttgggaaaaaccaattccaacagtggagaaccgtggcaataatatatggaattttttttaaaaaaaaaaaagcgaatcccaacagttataaactgttgagaatacttattattcccaacagtttataactgttggaaatacttagtatttgccacagttattaaatgttgggaaatattatttttagcatgcaaagagtaaagacttattattattattattatatctctctcctacttatatattttatttattattattattatataaaattaaaaaccctacaaatctctttctctctccatcttatttacattttattttctaaccctaacaa

SEQ ID NO: 346437 - DNA, 694 bp, Cannabis indica
ttttatatttgtgtacgttataattatttaagatatcatataaaattttgagaaattcagaataatttacaatataaaatacaatgttcaataagtctatttcacacacgtataaaataaaatagtcacatgtgcaatacaatgtttgaaccctattttcagcatgttaatttttttgaattttttaaaattttgtaggatgtcttaaataactataatgtacataaccatgagaaaaaatttgataaaaaaattatttcggataccaaagcacagatagggatacatcagtgcattccttttaagatatcatataaaattttgagaaaatcagaataatttacagtatataatcagagtataatattaataactgtttgaaaaagagcattgctattgagtaccaatggtgtttaacaccatcaggtggcgtcttgcgatttgttaataatatttcttaaaagttattatattaaattatataggattcgatacttaattacacaaaaactaataatgtgaccgtcagaatcccgtgatccgtaagaggaaagatcgagagttgtgcaatcccacattgcattgagaagactaagtgtgatgattatgagactgtgtaagtatgtgactacacaaatgaagatgacttaaatagattgattgatactacatatattaacaatgtgcattttgt

SEQ ID NO: 346438 - DNA, 957 bp, Cannabis indica
cttggaaaaaacgcatcctttgactctatcggttgtacgattttgaggatcattatgaatcgtctcatcatattttgcccatctcccaaccgttagatttcccaatccttagctttcttgtcactgaaatttgtgtataaaagggcggctcaagcttgtcatttttcacaaacctctggctttttgtcgaaatctgttttcagaatggatcacctctttcctgctagaatgtcccttctgagttcagaagttcatcctttcaaactcatcttgcccagatgcaccaaccaatttccacttgttctcaaagacttcaagcctcaactagagccagaaacgatggattccaacgttaaggagcttctcacaaatccaaaccaggggaaccccgtagcctgccatggccgatcctcacaagtgatccctgagggtataaatcttgtgagaaatcttgaaggtcctcctcaggctggtaaagaattccagaggaaggtcggcatggttgcagatgaaactgggaagaaagttggcgtggtttctatcagagaatccagccaaccctggacccaaacctgcgccagaagatctttgcaccatcctctttctggtattgaggaatttcctgaggctgggaaagagatatcggctttaggaaatgggatcctttgatgatgaggagaatgaggtatgtgcagagatcaaggctctctacatgtagccggtctttctcgagctatgtgtagacggtctttctcaggctatatgaagacagtctatctcgagttcatcggcttctcctctcatccttggtttaggaggaagacttaatggtttgcccctagtggcatttttgtaaagaaaagtttgtaaccagttttaggttttttcttatcttaaatgccttgtactattttcattcgaacttaatacaattgtgtttgcttgcgtttttattca

SEQ ID NO: 346439 - DNA, 430 bp, Cannabis indica
ttgagttatttccagagggtacaaaattacccaagtcccattacgagtcgaagatgaaattgcataatcttggtttgggttatgaaactattgagaagtatgtcctatttgcggcgagagtcgtttgaaaaagagaaagggagaacggaaaaaagtagctagaaaagttttgcggtagtttcctttaattccgagactgaagaggttatacagttcaagacactcaacagaagacatgcagtggcacaactctaagatacctaaagaggatggcatgcttagacaccctgcagatgcagaagagtggaagcagtttgacagacatcttccatcctttgcacttgagcctagaaatgtgagattgggattggccaccaatgggctcaatcactttggtaacatgagtaacgcttacggtgtgtggcatgtt

SEQ ID NO: 346440 - DNA, 504 bp, Cannabis indica
gctccaaaaccaatcacattttgaggagttgatatcgctgcgtccacatacagtttatagcttagaacctctgtctctttattactttgctcactagtacatccagttgaaactcctttacaacaaaaactttgttgaatatgaatcaagtggagaattaatttccaacaaatgcacttttgatgaactagtgagaataatgatggaagaactacaatgcaaccgttgaacaacacaaatacaactgaaagaaagaggccaaccactacaaatcaaggatgacaaaagtctgttgttctacataaagctattaagcaaagaggttgatttcataaggtaccaattgtgtgtgaacaaaatcagcaacatagcaacacctaaccaagcaatggtgtgcaacaatatgatgatggcatcatatgacaacaactcagcacatgcacatttgcagcaagatggaaacaactcggcaataacttctaagcaacaactatttgcacacac

SEQ ID NO: 346441 - DNA, 306 bp, Cannabis indica
caaaccgggcaaaatggtttagtgtaggttgttctccttgacgagctgagtttagtggtgaagacgtctcgtcaaatggacatcggaggtgaccgaaaaatccgttcaaagtttgaactccaaactttgactttcgatcccgagctaacgacggtgagcaccgattggggggtgaggtcgccggcacctggggtttcgttttgtccgacgcatggggctggtcggtggccagaggtgggttgcgagagtgtggtggtgatggtggtttgtggttttctttgtgtgttttgaagagagagagagaga

SEQ ID NO: 346442 - DNA, 611 bp, Cannabis indica
tataaatatacatgttgtttactactttagtagcagttaactaaaaatcaggtttctaaaaattattcgagatgtaaatggtccaaaaggctatattatcctcgtcatgtcatcatgcatgtttgtactgttaattttcttcttgtcgttttcttgtataagatcattatgtgtaaaaactaaaatataactcatttaacaaaaaagtatattccaattatgtgccaaatcatgtgccataaagtaatgtaaatttgacacagcaaattttatactaaatttggcacaatatttactataatgtaaaatttacaccataaatgtactattttttcatttacatttatgtcatttttattattttattagtatatttactgatttcaaatttatatttaacgtattaaattatgaaacatttatattatttttttttattatcttatataataaaattgattataaaattattagattatatttttttaataaaatattaattagatattaaattttacattaaaattttgtaattatgtattagagcacaaaattaaaatttagtataaatttactacaaaaataattttgtgctaaatatagcacaattt

SEQ ID NO: 346443 - DNA, 592 bp, Cannabis indica
ttactctatagaacaagtacctcttgaacaaaactcaaatgttgatgccttagcaaggttggccaccactaaggaagctgatacactcaacgtcgtcctagtagagttcctctctaaaccgagtatcaatgtggaggagaacgaagaggctgacatggagctggtcgatactcaaatagcatggatgactccacttattgattacttaactattgggagtctcccttctgataaaagtgagacaaggaagttactgtataaggtaccaaggatcactctattggatggaaaattgtacagaaggggatactccatgccattattgaggtgtgtgacagttgaagaagcacaaggcatattgaaggaggtccatgaaggattttgtgaagccatgctcccggttgagacccaagtcccctcacactgaaatcagtactatgaacaacaccgtaaccacctactcctggaggaggccgtagatttactcgatgaaagaagaaaggagtcacaattacgtaatgccgctcaccagcaacgggtaaagaagtattatgactctcatgttcggagtagggagtttataataggcgac

SEQ ID NO: 346444 - DNA, 663 bp, Cannabis indica
ccattaagcataggaatagaattaatataagcagatattgaggcagcagaagatgaactagctgaatatagaacaaataaaacaagctcacattaatatgcataattaaataataaattcaaaaattagttaatctcatcacattaatattaagtctttggacagtaatattaactgtaagcggtactcttggtgtagcaatcaaatattgacaataaaactgtgtcaaacaataaattaatctttggactgacatattgttcacacaaaatagcttataattgtcacacatttattgccacaaatatgtttgaatttagcaaaatatttacttacctttgggtcagtcaatacatgcatcacttacaaacacacaaccatcttagtattttaaataaattaatctacacaaaagaggtcatttaggcgacatattatttcaattaatttactcaaaatattaaacataaaccaacactaaaatttaaattaaattgtttgaaccaaattatatatatatatactaaattacacatcaatatatatataaatattacaactgaagccaataaaaaaagtacaattacaaagtaatgaatatatatatatatatatatatatgaaacatttcttaatgggtaatacccattgatgggtactaaa

SEQ ID NO: 346445 - DNA, 739 bp, Cannabis indica
ttgcctataaatacttggagtactagcacattacctcatttcatcacccttcgttgttaagcaaaattcagagtgaaaagagagaacttttttgcttcaaagttgctgaagagttacagacaatttctggcttgctggaaaaccggacactcgaatctttgagtaagtttctgattccctttatgtttttgctttgcatggttatgctttgaatgtaactttgctgtagaaaaaacactgtaggaaaccctagggtttgaaacttctgcgactcttcttttccatgtccatgtgttagctttcagccgtaaggcttattttagaactgcattgtgtctgctttctattttacttttttcaagctttatgaacttttttgccctaactcaagaaaaactttatgacttcttgagtttagacttttctctgaacatgatcgttctttaatctgttgggtactcctggtcggtatatttgcttgttttttcgcttgatactccgtccaacactcatcttccgtgttgtcttttgtagatgaacccaggtgagtcttgggagcccgagcatcaaattgaccaggagctgctccaacttctgcacgaagtctgtccttgtcttcgtcctaattctccttcaaaagaaggatattcctccgattccgtacccagccagagaatgatggctcgtacgaagaaaactacgcgtcttggtgacgcttctgacccccaggtggctcggc

SEQ ID NO: 346446 - DNA, 719 bp, Cannabis indica
aaaaaaaaattagatgtagaaagaaaaaatttaattttttttaaattatattttccttttatataagaatataatatgtatatattttatttatttaaagtttttaaatatatttatatcatattgtatttatattttttaaattatttattttttatattaaaatattaaatgtatatataattttttaaaaatatatatttataaatatatgcagattaaatggatcgataatgtttacatgtcaattaacatttaaatacggattttaaattttccaattcaatccaatatacacaagtatatttgtgcgaattagattaaatttaaagaattattacataagaaatataaattgacactttatttacaaaaatacattcatagggtgtggacaatatttataccttttatgtgattttattaccaaaataccacttacactatcacttacacatgtcagacgatggttgcagagtggttgctgcgtggttgcgcggtggttgcatcagacaaaggtttcaatcagacgatggttgcaaggtggttgctgggtggttagccgaaggttgcatcagacgaaataactgttagtaaaatatttgtgcaattgtaatgcaactataatgtaactgttgtgaaacattaaaaattagaacaatgtttccacgtacgtaactctatctacatgtctctttatgatttaatatgaataaatt

SEQ ID NO: 346447 - DNA, 696 bp, Cannabis indica
aaaaaaaaatagtaacaatatagtcacacaagaaccaataaaagaaataaaagaatatagtaacaatatcagcattatccattaatagtgattgtaatacatgaaaaacaagaaataaaagagataacaagaatcattccaaaaaaatcattcctaaactaatacttgttttcaagtacattaaagaaaacaaaacaatgatctgtaattaaaagaatgtacaaatgattcgtaactaatccgaatgatggtccttattacccatacacgagaacttcagaaataggaggccgagatgggtagctgacacggaagcaagtcgagcaatgtcgtctattggctttggaaaaccttcacatcctagataatagacacagaagctcaccctgaaatggtagcacgccagaaatgacagtattgaatcgaagattatcacgcatattttgctgcagcagatgtacgccatgtcttcaccgtcttggttagtacaagcagtcttgtaaaaaagacaacctacatgaatcaaagcactcaaaaatgagaaaacgagtaggccgaaccctagcttttcagtcagtttagttttcttggtgtgatcgatatcttccagtgccagagtgagaaggaagacgacagcgcagatgatagaatcatccacatgaatattggtaattcatgttgtattgtaatacaaat

SEQ ID NO: 346448 - DNA, 557 bp, Cannabis indica
ttttagtatagcggggcagtataattagacattggaaatgtcaggaatagttgagattttagaatttcccaaaatacccccttagtgacttttagtggttttaagtgttgaaggggcaaaatggtcattttaccaatttttgttttgtcttatatgggtttaattaagttaaataaatctattgttgagttatatgtttggctgatatctatacattttactaagagcggatatgcccttctaagaaaatcgtataaccttttattaaaattccaattatatcctttttaaaatttcaattatatcattttatttttactaaaagctcatggtcatgtttatcctatctcatactctaatatctcatagtttgtttgatgctctctctctcttgtcagccactactaaaatcatcaaggtttggttctttattttttgttcttcttcttctcactttttagtttagattttggctcaatattgtcccgagctagtactaaaatcaaatcaaggtttatttttttttctttcttcttcttctcactgattagtttaga

SEQ ID NO: 346449 - DNA, 928 bp, Cannabis indica
accagtacgatgcctgtattgctaaactgacaaaatggttgtgtcattgtgatagcaccaattcatactttctgtggtgagtataactcttgatcagtacaatacccgtactgttgaaccgacccaatggttgtgttgctatgatatcacccaaacataaacaatcataaacacagcatgcacatatatcatacatatatacattcgcatatatatcacatattatacatagttcttacctactttccagattcaagtgagttggttgacctgaacataaagtcttgtgctaaatggatgccctaatcacataacataaccgggtaaatcacatgccaaaaccctaatccgggaagcccaaacctacaacctaaggttctgttattatcactaggaactacaatatcctaggaaataggaaaacacccaactaaggcattgaaatgggaaagaatttagaaaatgagttgtttggggaatctgtcaaaactggttaaccggttttacaggacctggcgaaccggttaactggtttgcactaggtttccccaaccactccaaaaatcgctcaaaacttacccgaatgccaccaaaccttccagagtacctaaacagggcatacacaacatattacaaccaaaaaaactcaaaaaaaaaaaaacacatcgaatcacaatatgccattaaagacctaagtttgagtttcaaagcccaaacttgtgcaattctaacacaatacactaaaaccagcatccaaaactcataatcaacctaaaatggacttaaaactgaatcaaaacccaattaaaccctaaaagcccctattctctaaaatcacaagttaaaaccaattaaaaccttgagaaaaacataaccaagagtgtatagggtttaccttgattaaaacctgttggatatattttaccag

SEQ ID NO: 346450 - DNA, 530 bp, Cannabis indica
aataccccccgcaagccccacagccggaaaaataatattatgataaaaatggagatatttaagagtacgtaccaaacttgtagcttccacttttaattcggaaatgaaaatgaaatcaggatcgcacgaccgaatcagggcttttaattccagaactgtagaggtctgcccaaaccctctacagttccaagccacacctctcatggctcctgtggaggaggaacatcgtcctcctccacaggggtcaaattcacctcattagcaccgaccgccgagcccacaacatcaatttgaaccaaatttgttggcagaattgagatatccgccaaacgggccttggccttccaaaccgtcagtctagaggattgtcccagagacactggcatgtcaacttgcagggatacatttgcggagatcatagaactcccctgcttggtcacttcatcactatccagaggctcatcttgttgaaaattaatctcttggccacctcccaaggttctaatctcatacaagtccaactttccaaa

SEQ ID NO: 346451 - DNA, 587 bp, Cannabis indica
agggtaaaatagtaatttagtccatattcaatgtagactatctataaatgatcattaattatttagattgtaacaatagataattcatagcgtatctatatttggtatatagaacgttctatgtaattgggagtgtaattccgaatctatagtggagtcaagaggaattaataagcaaagaaatttacttggtaaatttcaaatctacttatttggagcttgtttatatatgcccatgatccccgcactaattggaataatattaatttgtagtctcaattaattgatttatttaattaattaggattttaaataatgactatgtcttatttatgaattttaccaaggaaggctataattgagaagaaaaaaaagaaataggggtttatttggtaattagtacactttgcgggtctaattaataaaatattttagctatattttatttgataattatttaaaattattaaaataaattagtatttaaataattagataagaaaagtgctaaaaataagaaaagatacattgtttcatttaaatgaaataaagtggcataaatctaactctaaagcccatatgcaatt

SEQ ID NO: 346452 - DNA, 517 bp, Cannabis indica
tcaatacacaatcacatatttttagtgcctcgtaaatcactctaatcttacatccctataaacatgtattcttacatcctgtgaatcactgagactatgcaagaaaagaggctactttcataagcaatataaaattcattcattcacattataacaaagatgtatctgattacaactcatcacataataacatgcttaattcatttcacatcatcgtaatcacacaatcgtggtacttcataaagtatccttaccactcgttaaccacgagctacatatgtcactatcgttgcccgatacggcaaacgataagtaaaaaacctatctccgatttcaagaataattactcataacggtaatgatcgtttccaatcctcaccactcattatccacgagctgcgtatgtcactatcattgcctgataaagcgaacgataagtaagaaacctaactgcggtttcaacaagtaattactcataacgataatgaccatttctaaccttaccactcgttatcca

SEQ ID NO: 346453 - DNA, 908 bp, Cannabis indica
tttattagaccacaatacaccaaacacttactcttttattttatcactagacacctttactacacactttgtgtataactcacacttttgaaagactttagggacactttagaacacactctcacacttttgaacacactttgaagacactcttgttggatgcacaacttgaagacccatgacccctatttatactactcaaaagaaactaactataatattctagataattctaactaattgtgttactaaaatattcttgaaacttctaatgactattactctctatgattctagaaaattctataatattatcaaaatgatagaaagttctagatacttgtagagtaggtgttgatctttaacattatggatagagaggaactttattggaaatagagatcgagctcagagtggatgatgataggtgatagaaactctaaatactttcataacaaaggatcagtgaggaagaaggaaaaatgttattactaagattatgacagaaaatagcaaaagttgtgtgttgagtaagagattgttggtgagaggtattttacgaagatttttcaaatagccaatccgacatatgagcgaatccagtgtggtacagatgtggttatttcacatattttggtggctaataatgaacgtcttatggcaccattcactcgggaagatatttaccatgctattacggccattggctccactaaagctctgggaccagacggatatcatgctttagtttttaagagattttgagatattaagggtgtgagggtcagctgagtatgccttgtaataataaatgagggtgctttgttgtaacaatttagtaagtcaaatgtggtgttgataccaaaagtaaaaaaaccaagattggttaaagagtatcgacctattgc

SEQ ID NO: 346454 - DNA, 870 bp, Cannabis indica
tagcataaatctaactctaaagcccatatgcaatttggccctaagagttgattcagcccaagtctttattttaagtccaatctcatctaaacttaaccttaagtgaagcctataaatagaaagagaagagacctttatcagatgatgattttctaagctagaaaaccctaaaagctcacttcttcttctctttaattttcaaaaatttagaggctattttcttttggatttctttatgaaatttcgtgctccttagtgttgagaacttgctcacacattataaagcaatactcagcataggaagattatgtagttcaatcatcatcagaagaagaatctagatttagacctttgttatcccgatttctgtcctcctgacgtggcaatgctcacgtagataaaattagtgctacgtggtagtacaactcaccaataagaagaccaagtcagtatctaaggaaatggggagcccgacactcaaacaagcatcaaatgacagaccagcttcctcacaaaagctggtcggccagcctctggactacaccatggccagccagcctgctccctacaagtgtctgaccggccaagagaagctctgtagggtttactatgcacttctacacgtggacaacatgattgtggcttcgaattgggccctaaaagcccaatataatagctgaataatatctatattcaagggcattttggtctttggtaattaactaatttaatatataaatatcctagggttttagttgtaaatgagggttttaggcttcctatataaaggccttaactctaacctagagaacctaagttcaattcaagcctgatactagcctccaagctctaagcctaagtttgataact

SEQ ID NO: 346455 - DNA, 687 bp, Cannabis indica
gtcctagtcctagttcggttctagttacatttgtgattctgagttggagtttgggtttgagttccggttggagttcgagtcatagtctgagttggggttctggtccggatttcagtctaggtcaagatcaggctccgggtgtgtgttcgcgtcctgggtccttgtctaggttgggtccgagtccagggttccaatcccaagctgattctggattcatttcagggtctaagtccttggttctgatcctggtctctgttcgagttttggtccgggtccgtgtatagcttttggtctgattcttggtgtgggtttgagttcgagccgagtctgtgtcgggtttgggtccagctctgcacctatatctgggtgtaggttcgggtctaggtccaacttcgggtcctgagtgcgggtccaagtttcggtctgggtcaggatcttggtccaaatctaggtctagcatttcgatcccagtctggttcttggtccgagcccaggttcgtattgggatccctatccaggttagactcttagtttcggtctgggtacacgaccgtgtctgggcacgagttctagtctcagtttgggtctgaggctaggtctgtgttcggttttaggtctgggtccgggtctggtcacggtcctaatcttgttctagggtcctagttcggcgattcttgttcaggttct

SEQ ID NO: 346456 - DNA, 678 bp, Cannabis indica
tttctggcacaatttgtgagctcaaagaagaccacaagtctccatgacctggtggaaacgaggcagcaaattagtgagagcgctaatgagttcataactaggtggagaaatctcaatctccaatgtccagaaaggatatcggaacaagcgataatttcaatgtgtgccaaaaacctcaaccctgaggtggcaacttttgtgggcacaacagaacccaaaactttcaatgggctcgtcttgaaagcctgcaatgttgagatacaaatttctcggcaaaagggtggcaaaccctcatcgagattcgaaaacaaaaaaccatttaagaagggagaatcaatggcaatttttatcaatatcctctcaaagaaaggaaggaagttaaatattccttcgacgatgatgacgtcgaccaaattttcgatgagttgttaaaagctaaggcaatacgactccccgagccaaaacgactcaacgaggttggtatgacaaatgatccaaattattgtcagttactttccaaatcttcttcactatcataccagtcctccaaaatttctagattatgctctgtcatgagctcatacaatgtaggaatacttaggtttcctggttttggcatgtctgagtgagcttggactattgtaactttcatgtcaacttcaaatgccacagaaatta

SEQ ID NO: 346457 - DNA, 984 bp, Cannabis indica
agtaaccacatgacaaaaaatgaaagcatcttttgtagtcttcacaaatccaagactaaagtcatcggtaatggtgacttcatggaagcagtcgatgaaggaaccattgccattgacactaaaaaaggcaagagatacatcaatgatgtactcttggtacccaacattgatctaaacctacttagcgtaggtcaaatgattgaaaaactctttgcattttgaaggagattcttgcacaatctatgataagcaagataaatcctttcaaattgcaaaggtaaaaatgaaagaaaacagatactttcctatacaatggagatatgcaagcaatgtggcaatgcaagcacaaacagatgaatcatggctatggcatagaaggttcggtcactttaacttccatgggctaaagatcctcaagcagaagaatatgatgcgagacctcccagcaattaaggagatcaacacagtctgcgaaggatgcatgctcgggaaacaacatcgacaacctttcccatccggcaaaacttggagagccaaaaagccactggagctagtccatactgacgtctgcggggcaatgcgcactccatcaaatgaccaaaacaggtacttcattctcttcattgatgactttactagaatgacatgggtttattttatgcaacaaaagtcgcaagtcttcgatattttcaaaaagttcaaatcccgtgtcgaaaaacaaagcggtcactacatcaagacaattagaagtgatagaggcaaagaatacacttctaatgaattcaacaagttctgtgaagatgaagggatggagcaccaactcactgttggatacgcaccagaacagaatggtgtatctgaaaggaaaaacaggactgttatggaggcagcaagagccatgctgctagagaaaggtctcccaaaacgattttgggcagaggcagtaagcactgcagtctacttgctcaaccgatgtccaaccaa

SEQ ID NO: 346458 - DNA, 638 bp, Cannabis indica
taaaaccgtatatactcgatgtgacgggtcgcagatccttctcatgcaaccccatttgtttgaaggcttggaagtttaaaaggttcacataacttccattgtccacgagtatgtggtggacgttgtctccaccaatattggcgacaatgaccagcgcatcagaatgtgggtggtggatccatctcgcatcactttccatgaatgtgatgtcgtcgcactccctcttgaacagtttcttcggttgctcgctcaggttgttcacattggtgaatggcttttctttggcttctctcgcatattgctcttgcgacttcttggaatcacccgtgatatggggtccgcctatgatggtcaggatgttgctaggagttctcgaaccactcgcattctaattttcttctttgtcatccgctcgggcatgactttcctcattcttcttgtagttactgaactttcctctcctgattagctcttcaatctcgtcctgcaaaaaccaacactccaaagtagtgtgaccaatatctttgtgatacttacagaattttttagggtctctcttgtcgcggtttcccctgattgggggaggcttcttgaagaccccattcttttcttcgatggcgtagatatggtctcgaggt

SEQ ID NO: 346459 - DNA, 1721 bp, Cannabis indica
aaccaacttgttatggcttggattgtgaaatcaatatggtcgttggtgatggtattgatgataattcattaacctataaacaggcaatggcaagtccggaacgaaaacaatggtcagacagcattgattaagaaatggattccatgaaaaagaacaaagtctgggaatatgtagatgcatctgatgattatcatccaattagatgtaagtgggtctacaagaagaaaagaggtgctggtggcaaagtcaaaacttttaaagctagacttgtcgcaaagggttataccaaaatagaaggtgtggactatgagaatactattagttcagtcgccatgctcaaattcattagaattatactctccatagctgctgcttccgactatgaagttttgcaaatggatttcaagacagcttttcttaacagaatgcttgaagagaccatctatatggagcaaccagaaagttataagcttccaaggcaggaagaaaaagtttgcaaactcaataggtccatttatgggcttaagtaagattcttgttcttggaacaaaaggtttgatgaaataatcaaaacctacgactttcaccaaaatgatgatgaaccttgtgtttaccaacttaaggataatcaagtggtagtattccctgtcatttatgttgatgacattttgattattggcaacaatatcaagaaaatgactgacattaaggaatggcttaacactcaattcgaaatctaatatttgggtgatgctacttatgttcttggtattcaaatcatcgaaaactgaaagaacagatcacttgctttctctcaagcaactcacattaataaggtgctagagagattctcaatgaaaaacacaaaaggggcaatgatgccttctagacctggtatctgtctatctaaggaatagtgtcccactgatccttaagagatagaggacatgagaatggttccttatgcttcagcagttggaagtctaatgtatgcaatgttatccactagaccaaaaatttgttatgcggtaggaattgtgaacaggtattagacaaacccaggagaggaacattggactggagttaagcatattctaaaatatttaaagaaaacaaggccttatgtgttagactacaagggtggtgctttaagtctcgtaggctataccgacttagatttccaagcttgtcttgatgacaggaagtctacatctaggatggtatttactcttaggagtggagcagttatttagagaagtgataagcaagccgcaacatcagactcaacagtggaggccgaatacatagctgtcgatgaggctcctaaagaactagtctggcttagaaagttcttctcagtacttggtgttgttcttggaatggaaaatccattggttttactttgtgataacactggtgctatagccaacagtaaagagcctcgaagccacaagaaaagtaaatacatagagagaggaaataccacatcatcagggaatatgtggcaagaggggatgtactggtggagaaagtggatactagagataacttagttgatccattcataaaaaatttgactataactacatttgaaaagcacatactaaatctaggattaatagaaatgtactgattgtcttatgttagtgcaagtgggagtttgttgggctttgtgccctaaataaaactctattttaatgtattcatttatcaataaagaa

SEQ ID NO: 346460 - DNA, 537 bp, Cannabis indica
tgatgcaggaggggtaggagccccgccactcactggagtcctaaccgactccaacatacatccaactgcgccctcagctcgcagtgctttctccaccatctcagcataggtggtcttgtcgtcgttaatgatcataaggtcatactttatcttcacattaagtctatcaagatatttttctttcttactaaaatcggttggcacgattcccgaggccaacctcaccaaccgatcaaactgagttttgtactcggtcacactcataaatttcaatgtccccgcaataactgttagccactgctcggcttccatgacgtccggacctcccagaaaaactggaggtgtctgctcgcggaacctttcatacaggggttccattctttttgccgctactaccatctcggactgagcagcaggggcgggttccataggaacttttggcacaggcactgtaggagcaccctgctgacccaatctctgaatctcattatcttgctcctctattctggcttgcatttcagcaaacctaacttccca

SEQ ID NO: 346461 - DNA, 594 bp, Cannabis indica
gcttaagacttagggtttgagacttacagagttagggtttgactaatcccctttatatagtagatcttacatccccaatatcccttaaaaatacgtaaataaagctattatttacataataaattaataaagttcaaattactaaattatccctcaaaaataaggaagttgctaatattttccctctatttttttgggttgttaaggccgaactcatttcttgactttctatccacagatgaaagctgcgcaccaaaacctgtcaggcaaaaagttgaccatgcacctgcagagtgcatgctcttcggccatatagtatttggaagttggccggcctatgctggccatagggccagcattgaggttgttggttcatcactttgtcgtccctccttaatattcaaactccttgttagtttaagtgttgagtagatggcttggcctgcttgttggcgagctgtactgccacgtgacattaatgttagccacgtggacatgccatatcaggtgggaaaaattgagataatatttgctccctaagtccttgtgcagatagggactttccagcttagtcgggactgatgtagccttaac

SEQ ID NO: 346462 - DNA, 660 bp, Cannabis indica
cgtcccatattacactgggatacacttggtccatatcatcatttctgtgggactcatacagtgaacatcctgtttctatctctatctcaatcttcaagcggaaaattacatgtcagaatatttttttaaaaattacaatttttcatggggggctcgttatggttacaatgtcatcattgtttcaaaaatattcgaacagttaacaatgcccacaatacgtttatttttagcgatccgcgcatggcgaccaacacttagcaaattaaggttatcgcaacatgagtcatcagcacacgatcccgcaatcagtgtattcagcataaatcccacaatcattggattcaccattgatcccaccggattattattcgctatttattactacggttgcaatcactgcttctcactacaatgaacatcctgttactatctgtatctctgacacatagtaagtactcaggtaacctttggtgtaccggagtcactatcctcctcacgaactcactgaacccagtcgcgctagggctctactgagcggcagtcaaccgttcctagtactcacactctcactggcggtgtttatgggtcccgtgacatcaggttaccattggtgtaccggagtcactattctcctaacgaactcactgaaccccttcgagc

SEQ ID NO: 346463 - DNA, 794 bp, Cannabis indica
caaatatttatctgttgatatttataatgcccgtattttttttcataaattactaatttatttacaagcgttaaaatgcaaaaaaactgtaatgtcacttttatttataaacataaaatatattttatatttgagctaagtttggacttaaaagacataataattaataaataaaaataactgcgacattaataacacttaataacataaatgcagcgtgccctataccaccctcaattatatggtcctcagagagtacaaacacaagcctccaaggtctcacttaccactttctaagttgtataaccttaatctacacatggtaagtttgataagggtgagctactaaactcattaaagaaatgcttgtcacatagtcacataaaataaaaaaaaacatataactagaacttaaatacacatatttagacaaatagcaatatatataagattaaatgcacataataatggttacgctcgagttcgactttggcaaatcaacctgaactgttagactaaacggcggagggctgggttcagtaaaattgtacccactactagatgacccctatctaccatatagacccaataatcaagtatttaaccattatcttctcggtcaaaccatgtcacataatctacaataaatctaaattaaataatgtttaactattatacattatttaaatagcatatcataaatcatatcataatgatatcataaatatatcataaacatatcataacaatatcataattattataactacataataatcatatcgtaactatat

SEQ ID NO: 346464 - DNA, 454 bp, Cannabis indica
aaaaaaaaaaaacaacaaactacaataccttgtctttggagacataaaaaattgtagtctttaaaattttgaaagtcggctggctgctacaagtccactgaataatcgttggaataccaaaaatttccttttggtagtacttaccattcatgtatttacaacactcataaaaccaaactctcaatacatgaggacaaccaatcaaagtataaaatacactcggcacctttcctaaactctttgcctttataacactttcaacccaattgtcaagcttacccttcaacgacgaaatactcaatgcaaaagaactccgtccccaagcaaattcatcatacctaccactgtctacaacatccaaaatgaaacgaaaaacatttttatacttagtaccactagaaaatccatccacaaataaagaactgcaaacttaatagcatcctcatcagaatca

SEQ ID NO: 346465 - DNA, 487 bp, Cannabis indica
ttgtaaatcgtttttttttttttcatattttctatatgagttgtcttagtaaaatccaaatatatctttgaataatgatctgattctagcgttcttagtatcattgaaaagataatttgattttctaaatattttatgaaggaaccatttaccaattattggttattctaagtcaaaattattattttattgctgtagttcgaaatctgtttgtttcaggatttctaaaaaactatttcagtaaaatatctatatctcttacattataaatcctattttaaagattttactgtcattagaaagggaattcaattttctaaaacttatatgaagagagtattctctaatttggaatatttcagcatcaaaacgttatatttctaatgtctcctgtgattcgttactccatattcctgttgggttttatgccctaaataaaactactttacaatctgattagttatcaaatataaagaaatttagaagt

SEQ ID NO: 346466 - DNA, 707 bp, Cannabis indica
aatgtcaaaaaagttaagaaaggtcgacataacatcgacatcatgtcgatattcggtcgacattatcaaacatttagtgaccacctaattggtcgacaaaacgttgatatactatcgacatgctatcgacattatcataaaagcaatgacaaacgaccaacatcgacaaaaggtcgacattatgtcgacatcatgtcgacattaccaaacttaactaccgtaacagtcaactacaacttattatcgacaacttatcaacatacagtcgacaaattatcgacattataacaattaactaccatacgaatcaactacaacttcttatcgacaaactatcgacatacagtcgacaaattatcgacattctaacaattaactaccataagaatcaaccacaacttattatcgacaacctatcaacatacagtcgacaaattgtcgacattacatggcaaaactacacaaccacaaacaaggtgaaaccatcgacaaattgtcgacatgatatcgacaacctgtcgacaacaatgttcaaacacacaaacagaaaaccacatatatcgatatcctatcgacatttcatcgataacgctgttaaaaatacacaaacaccattgaaacatatccaacatatacaacctaccacaagaaagagcacaaaataaacaaaaattccactaatctcaacaacatgcaataattgacat

SEQ ID NO: 346467 - DNA, 1055 bp, Cannabis indica
ggctcgattttaatttttgttacataaggattgttgtataatggtatatatgtaccctgtgaaatttggaatgatttggataggttttgggggtatttcggtgagtgcaaaatttgagattttcgtgcccaaaaatggtttgccatttttgtcaaaacggcctgtcgtttttggaaattccactgagatttagaatcatatttttgtcataacttttcacttccgtgtccattttggatgttctataaaccattttgaagcttggaacaatctctaccatatgttgtatgttttagagacaaaatataagttttattttggtatatttatatcgcgggatttggtaggaaatcctagattgtcttatgtgaatattaagcagtgttttaggataaacacttattggtttaccgttgttgtgacaaagggttgagatcattggcgatagttctccacttaggttggccgatatgcatgaacctggattaaatgtaagaaaagtatattgtactacatagtacattgcattgtaatacaaataatattgttatataatgaaaagattgattggttaaggaataataatgtgatgatactatgtatataatatatgggctcacctgattaagtgatgcgatatacctggtaacgtatcgggcgttggtacgaacgtcagtgacatatgatgagtatcgagcgtaggtacaggctcacttgattaggtgatacaattttttgtcgacgtatcgggcgtaggtacgggcgttagtgacatatgatgagtactgagcgtaggtacagcctcacctgattaggtgatgcaattctcttggcgatgtgtagatatggcgtcagtgatatgaaaattgccaggttatggcatagaatgaaactgttgtagggtttcctcctgtcgacgtgtagatacggcatcagtgatatgaaaatttctaggttatggcatagaatgaaactgttgtagggtttcctccgggggacgtgtagatacggcgttagtgatatgtaaaatttccaggttatggcatagaatgaaa

SEQ ID NO: 346468 - DNA, 527 bp, Cannabis indica
tgctggacctagatctggaccgagatcctgacccagacacaaactgggacccgcactcgggaccccaacttggacctggacctgaccctagacccagatcggggtcaagacctggacacaaacccggacacagattcatacccgaactcaaaacaacacctagaattagaccacaaactagaccaagacccgtacccaaactcgaagccagaccaggatcagaaccaaggacttagatccagaactgaatcgagactcatatcaggattgtaacttgggactcgaacccgaacccagaccaagatctaaaccaaggacttatacccagaactgaatcctcactcagatcgggattggaacttgggactcgcacccaacctagaccaagacccaagacacgaacccacacccgaagccttatttggacctagactaaaatctggacccgaaccaaaactcagaccaggacttgaactccgacccgaacacaaacccaaactcgaactcagaatcgcaaatggaactag

SEQ ID NO: 346469 - DNA, 718 bp, Cannabis indica
attcagatattttatggtattgatggatgcatctactagatggtcacatgtttgcttactatctactcgtaatgtaggattttcaagattgcttgatcaaataattcaattacgagcacaattcctagactatgcaatcaagacaatccgtcttgataatgcttgtgagtttacatcacaggctttcaatgattattgtatgtcaataggaataaatgtagaacatcctctttctcatgtacatacacaaaaaggtctagtagaatcattcattaaatgtctccagttaatagcaagatcattatttatgagaacaaaactcccaatttcagcttgtggacatgctattttacatgttgcagcacttgtacacattaggccaacatcatatcactagttctccccattataattggcttttggttaggagctaaatatttcccatctaagaatctttggttgtaaagtatatgttccgattgctccaccacaacaaacaaagatacatccttaaaggaggctgaaaatatatgttgggtatgaatctctgtctataattaaatctcaaactcacaactggagatatatttacaacacgttttgttgattgtcattttgatgagacaaattttacaactttagggggaggggaaaagaaccagctggaaaaagaaattatatggaatgcacaatcaatatctcaatttgatcctcgtac

SEQ ID NO: 346470 - DNA, 394 bp, Cannabis indica
tcactataatcttcaagatgccaagaaattcccattgtcttcgagaaaatgggttcactcaggtgaaaactagttgaccatcacagtaagaaaatgccaacctctagttgctagagagggctagagggagagtaaccaaaatgtggacaactacacaaattctcaaaaaaggcccagatcactatgttactcgataatgacattggtggctaaccccatcgatagaagtattcaaatatcgaaaggaccatctctggtgcagtgccttctaccatttgtgccaccaaaccctgacagttcaaggaataggcctagaaaggaaaagcaagcgtagtcggtgagttgaagcttccaggcttactgctacaaggaggaaagtgttggaattatttta

SEQ ID NO: 346471 - DNA, 1042 bp, Cannabis indica
aataaccaaatattcattattttttttttattattatgatgatctagaaatctcgatgtggaaatagtgattgcatagaataaattaaattcgtaaatagagtatttttaagagttatataagatttatgttagtttttagaataacatgaaaatgagttattattattattattgttgtcgttgttgattgttgttgttgatgttgttattattatcttaattttttgaagataaacatagttatatattggtaaaattgaactattgtattttaagtgtttaaaatatatactagtaagtggcataatgacccaagtcttgggccatgtagattcgtccaagactatatatataaatgataagtgctatttgatttaaataaataaataaataaagagatagtattgatatgtgtgacaccttgttgttgaggagtagtgatctaagttacaaaatataataggtattaattagtgaaacacgtgcatgagaagctaatgggagaatgattcaaaatatgcattgttagaccataaatcttggggttagttgcttggagtcacatcctaaagcttttggggagtacacacgtggggatgttaagttggaactcaacaaataagccatttgaccgagcaaggtcttggttcggcttatacgagagagtttttctcttcaataacaaatgttgaccgagtatgttgggaagttaggaagtttattcatttattaatttattttaaattttaacttaggttagctagaggcctatatatagagctttaggtattcattcttcactcattacttaagctatcacctatcaaagattaccctctctttctcatctcttgctactactccctatttcgtcttttatgccataatattcattgcttattacctcaccccaccatcaataccatcatccttcatcattttctttatcatcatttttacaattttctttttatcatttcaccatcctctcaaacactattcccaaccaattatttcatctccatcattcttgtcatact

SEQ ID NO: 346472 - DNA, 600 bp, Cannabis indica
aaaaccttctcttcggaattccatgcacaattctcttcctcacgccaactcccattgcatctgggagatttggtcgaagtaaaacagcgaccaagcgagccactcctggcatacatcagcagattcatgacggaagcgaccaacgtatcacgggtaaccgaggatgaaaagttatccgcaatactatgggggaattgaagtccttggcgaactgtggaaggatataaggaaaaacggatcggtcgactcaatgagtgatttaattgacaaggccgaaggtttcatcaagctcgaagaagccattcagcgagcagaaggagagcaaaagccgaccaaaatgaaggttcctcctactagaacgtctgcctaacttccccattattccagcaattcaagtggcaagcgttcaggccacaagcacaagcaaggaaacgggaagaagggaaagctcaccgaaaaacccaaacagactccccgtgatcacgccaaacacactacattcactatcttaactgaagatatagaaagtgtgtacatagcaactcagggttaattccgtacaagaagcccgggcccatgaaaaaagtgttgggttttgtg

SEQ ID NO: 346473 - DNA, 1094 bp, Cannabis indica
gctagaattacagaggttaattcatatgtattagagccaatcacaaatcagagcttggttcttcgatcatcaagggagattcaaagatcacttgcttccacaccaagaactcatgaagaattcatcaaggaattctacaagaacacaaattgaaggagaatgtcaatggcaaggttcgaaccagagaagttcgatggatcaacggatttcgcactatggcgagaaagtttgaagggtatacttgtgcaccaaaaggtggcaaaggtactcagggatgaaaagttgtttgctgagaagaagccataggaaattgcagaaatggaggacatggcatactacaccatcatcatgtacctctccaatggagttagaagaaagctaatccaagaaaagaccgcaaaagaattgtggaacaaactagaggagctgtacatggcaccatcaatatcgagcaagattaatcttcttgaaagattatacgggtttataatgaactcttctctttctttagatgataatattgataaatttaatgaaataattgttggtttagctaacattgatcataaggtagacgaagaaagtcaagcaatcatattgctcatatcatagccaatggcatatcaagaagttaaagcagcaattaaatatggaaaggatgtgatctcgttggagggtgttcatgcgacattaaaatcaaaggactttgaattgcaactcgagaaggagactaggaaagatgaaacttatcttgcaagaggaagaagtcgaaagtgaggatcatcaaggaatagccagtcaccatcaagatcgaagtcaaaaataaaaaacaatcgacaatgttatcaatgtagaaagattggccacattaaaagattttgcagtcaattgaagacgcattatggtttcaaatccaactatgatgacaaaagatgcaacggaaaccagaaccagtacttaaaattaaatgatcatggaaatcaaagaaagactctgcagttgtggctgagagcagtggaaatggaagttcagatggggaattatttttatttcaaaaaatagtttcagtaaagagtggatccttgattcaggat

SEQ ID NO: 346474 - DNA, 699 bp, Cannabis indica
gtttagcaacaggaaaaaagtattacaatagtccagttcataggtttgagcataacccttggcaacaagacggacatttaagcacgcaattgttccatcttgattgaatttaaccgtaaacacccatttgcaccctatggcccgttttcttgaaggtaaattaaccaagacccaagtactatttgcaactaaagcattcatctcttttattattgcagcaagccaaccaggatgagacattgcttcacgaacagttttaggaatagtaatagaatcaaaagaagcaataaaagagcaagaagaagaggagagatgattataagaaacaaaagaagaaataggaaaagtacattgacgttaacctttacgtagtgcaatgggaagatgacgaagatgcaggtgcaggacatgaaacaggaggtggaggagggggacgcctggtgtgcactataggaggctgagagagtggtgaaggtggtggaggtggtggcattgtgggagttatgaccgagacaggtgaaggaacaagagacttgtcagaacatgtattaggcgcagaggatgtgacacaatataccaataaatcagcatcctcctcctgacaagtagaagtagttgaagatgaaaaataaggtgtattttccacaaaggtaacatcaatagaaacaagatattcattgagatcaggacaataacacc

SEQ ID NO: 346475 - DNA, 493 bp, Cannabis indica
ggggtacaatgaggctgggcagccagtcgatgctgacggagacgtccttgtcgagggcgtggactacgtcagtgaggagcttgctgcggcagttcctcataaaaggcaaggtgccttgggtgccagatgggtaagtcctccgtccaagattacggaggcgcgccttcgaactctcgaccagggcgggcacctgggcgagctggactgctatattcccgcccataataatcgcgccacaaatcctgacaaggggatgtgcgcctggtcgggggcccatggtcagcaaggagcgttgatgcccttgcataagtacttcaaggatgtggctgacttcttcggtctctgcccggcccaaatcactcctaagggcatttagtatttgtctgctgtcttcatcctttccgcttcccaaggatgggggtgctctttctgctcacgaggttgcctggtcttcgatttgaagtccaccccaacaaggcaggtcgcggtactt

SEQ ID NO: 346476 - DNA, 1024 bp, Cannabis indica
aatctgatcccaaagttataaggatttccttgatgactcactatgcgaaagctgaatttgctaagtgttggcgtgctgtgcggattgctcactactcggtctaggggaccttgtctgagcaaatgtatgaggtgccctgttcggcctgtgtcttgcgagcaggtacccagagtcgattccacgtgtcaccatcgtgtgatgtcacgtcagagtgcaaaaattgggataacatttgccccccaagtctgtataggacttccgaagttgcgtgtagacttcatctgagctgtctttgcatttggatgtgtgacacgtgttaggtgcgtctgttcgcgactcgatgtgaggctgactaggcgtctcttcggttttcggctaataaatgccctgacgcaattaatgcttcgaaatctaattttctctcaccacgtttgacggttacacttgattgcttttgatttccaatatttgcttttgggggaaccgagacgtctgaggtttttgaaatgattaccccttttcgttgttttacctataaatacggctgatcatcgtttacaaactcattttcaccaaccttctttgttaagcaagttcagagcacaagagaggtttttagcttcaagtttgctgaaaatttttcacaaaaaaccgttcgttcagctttgcaaaaactgaatccagacgtcaatccttgagtaagttctcaatttcttttactttgcacatttactttctgaatgcgatcttaactttgctgtagaaggtatgtagaaaaccctaggtttagaaactctgcgattttcctttgtaacgattcatgcgacttcgccatttataatgcttgctttttgaactgcacaatgcatgtctttcatcttgcttattcaaagcttcatgaaattttcgccctaagtcacgaaaatttcaaacttctgagttttgacttttcgtcgaattttcattctttaatctgttgagtactcctggtcggctatatttgcctgtttaatgttcgatatcc

SEQ ID NO: 346477 - DNA, 752 bp, Cannabis indica
atgatgctctaatgttgcagatttgttttttagggagattgtgagattacatggtatgcctagaaccattgtatctgatagggatgctaagttcttaagttactttgggaaaatattatggggaaaacttgggacaaaacatttgttttctactacttgtcatcctcaaaccgatggtcaaacagaagtagttaatagaactttatccactttattgagggctatcataagtaaaaatattaagactagggaggattgttgaccacatgttgaatttgcttataatcgttctatgcattttgctactaaattttcaccatttgaaattttttatggttttaatccttggactactttagatctatcacctttacctgtttttgagcatttgaatttagatggcaaaaagaaagcagaatttgtgaagcaaatccatgagagggcacgactcaacatagaaagaaggaccaatcaatacataaagtaagctaacaagggtcatcacaagcaggtttttcagcccagtgattgggtatggttacacatgaggaaagaacgattcccagcccaaagacgttccaaatttctaccttgaggagatggtccgtttcaagtgcttgaaaggatcaatgataatgcctatcgactcggtttacctggagaatataatgttagtgctacttttaatgtttttgatttgagcccttttgatgcaagtgaagatttgaagacaaatccttttcaagaggggg

SEQ ID NO: 346478 - DNA, 924 bp, Cannabis indica
aacatacttgtgagtagatctaagatcctggtaaaataaattccaacaagaaggagaccaactacattggttacctcgggatgctcattcaccggattcccgaggggcagtgttttgaaggtattgtgcttgagccaagcgatccctggcttggtgctcgggcagagcagtaatctgctgtgaagaggaatacttgggaatcttataatcacaagtatattccttcccactgatcacaggttaacctcgctccaaaggaaatcgtatgaccgaagaccgtaggaaagagttagtaggcgcctgtgcctacaactatctcgggggtaggagtatgcctcgtcaagagaactgtcaaaatagacaaaacattggtcataaacttgaaaaacgaagattgatgtaaatgagtaagaaaagaacaatcacttacgaagtttgcgaaatgtggttgttctgatgggggaaagagtactagacgtccagaacaagttgttcttgaaggatactttatttggcaagtctacaataattttaggctcgctaggatgagtaccgagatagaaaaagccccctgtggaattcttccttgacgggatggcctcaactgagtaaagatactcgatctctactggtgtgggacacccctagttcaggattttatataagactttcaaactagcgagaatcctgtaagagatgggagtcaactggaatggggcaactccaatgtgatttatataatctttgaagtagtctcgaagaggaagcgtggcccctgcattgatatgctcaaggctttaggcatccatactagtcgaaccactagtactagtctcaccactagtccccgggttgctgtttgtaaagcgcatagggcgggtaacaactgaactcaccctcccgtactgatctaacttggcatga

SEQ ID NO: 346479 - DNA, 562 bp, Cannabis indica
aaatagccgagttaggatttaaggaaataagtgcataagtgtggtattggtgcctaactcgctggggttgttgattacagagttatttgtgaaaatggaccctccgcaatcatctagaacacatggtgagcatgtagagtctggtgttgaccaaaccaatccaccgacactgcctgtgcctccgcagaatctaaggaatgatttgggggttgataatgctaatctgcctgctgattggcagcaaatgtttctagaaatacgaagtatcattcttcgtcaagaatatgaattgcgacgattgaggcaaccgacattggtagctcctatacaacaagtgttaccaccagctcctgtgccagtggtgggtaactcgagatttatactaccgcatagagattctgtattagagcgctttgtgaagctgcaacctctaacgtttctaggaggtaccgatataattaaggatgaataatggatgagcactatcacccgcatcctagattttatgggggtgacaggaacaaaaagagtaaattgtgctgcatttatgttacaagatcat

SEQ ID NO: 346480 - DNA, 512 bp, Cannabis indica
tttttaaaaaaacatagtttttcaatattaaattttaaaaagttcatttactacaaaaatacatgtgcatgctgatgtcatgggtttttttccccattacacaccatctttcccatcttcttccctttccttcttttttcgaattttttctctcttttctgttggtttttttctttgtgcataacccacaatcaataactcttctgctctaacctactaatttccaaccgcccatttcagccacgatctctcctctcttgcataactgcattttgtttttcctctttcagtttatttttctataaatgcccaccactaggttgggttccaagtccccttcacctgctcaaaaaatttcaaaaagtcattagaaacctccttcaaagtcctctaaagttgatcctaaaatgggtttgaaagacattgcaaaaagggaatggctaatgttacagtgccttctagttctaaaaaaagacctcttccagctaagattgaatctcgtaaggcaaaga

SEQ ID NO: 346481 - DNA, 488 bp, Cannabis indica
tttggaataaacaaaacattttcgaaactaaaaatttcttttgaaacttgaggcgagcgtttttcccttagcctagaccgatactaattcgccatttccaactttcaactttaactccccttgatttaaataatcccaagtttcaagcagctggaatgaagaacaaacatggttagtagatatagaatcaacaatcgaaaaggatttgtcattctctaaaacacatgattcaaaaacaaaagcattacctttgttcgaattgtctagaagtgtaggatatagttcctcctgatgtcccttctcattacaatttgaacattgaagagtacgactatcaattgtttcactatttgaacttgaagaagcagcattgttacaagcaccatacttaattcttttcctcttactcaagtctacaaaactggagggtggcctccttacaggcaaactccgttcgtaagcacgcaattctacttctagcttatcca

SEQ ID NO: 346482 - DNA, 666 bp, Cannabis indica
ttgaagggtgtaacggtaaattaatccctatacaatgtagatcatgtatagaggatcattgattattgggattataacaatggataactaatagcgtatctatatctaagctgagagtgcaattccactttctatggtagatgtaatgaggatttaataagttggtgaatttacttggtaaattctagatctgcttattggaagctcagatatattggcccatggtccccatactagttgagacaatactacttgtaagactcagttaattgattttaattaatcaattataattctaaaactagactatgtctagtttatgaatttgcactagggcttaattgtgaagataagagattctagggtttatttgttaattaagagattttgttaagtctaattcataaataaattaaatggcaatattatttaataattaattttagtcattaaataattagaattgacatttaagtggttaaattggaaaaatgtcatttttgagaaaatacgatggaaaatttgaaaaatggcaaaattgcaaagtggggttcaatatcaatccatggtcagccactccatagaaatttacatttaatttttttattattttaatgccaaataaatctaacctaaccctagctggttttctataaataggtagtg

SEQ ID NO: 346483 - DNA, 612 bp, Cannabis indica
aatattattttcgattattttttttatatattaaaccaattcatttctctcattgattattctgattccagttacattttagtaaacgcgcgatcaatgtaatttgtactcattacacacatacatagctagctagcaacatagaattgaattgaaccgatccaatccaatccaattacaaaaaattagatatccaattataattgtattgaatttgatgctaaaagttaaattctaataggattggatcgattattggatgtcattcttaaaatctaattgaaaactgatccaatttaattacatttatatatattttatatttatttatataataacaaataataaaaaaaatataatatatattaattatatttttgttggattttttatttgtggtgaatttgtaacacttggttgttttgtgtatttattttcatgatgttttgttatattttattacttagaaatgttgttgttttaattatttgaaaattttaattacattacattgtgataatgatatgttcatgaagtattaagcttaaataaatagtgatatttaattttacgtatttttcttctatatttttatgttaatattaaaatcta

SEQ ID NO: 346484 - DNA, 463 bp, Cannabis indica
aagagaaggatagcaattagacattaacattggtaacttaacaacaggattcgtctccctattttcttatcttgattaatcttcctttgctatttttaattttctgaattgtcttatttaattcataaaaagtattcttttaccagatagaatcaatagtataatttagtagtaattagtccaattccctgtggttcgacctcacctgtgtgagtttactacttgattgcgtatacttgcgtagtgatcataattttcgtaacaccaacactcttaaacctttgactctgatattacttgttgggtcccgctcttaccttatcgggtcgtcacctcaccttgattctcatattagtatgatattgtccgctttagggcctaaaccctcacagttttatttttagagacctacccaaaagattttgtactataatgaagtaggtggaacatttatattcactac

SEQ ID NO: 346485 - DNA, 1498 bp, Cannabis indica
tctgagctgatcaagagtggacctgagcagatgcggatccctactccacctttgtcagtgcttccaaaggccaagaaaggcaaggagatgctcgcccactatatgaaccagtttattcctgaggttagtgagcaattggccggtgctgacaatgactcttctctggagctgctgatgggtggagttttgaaggaattcacaagggtaagtctttcttgacgatttcctttaatcctctttacttggcttaaatactaaagttttttctctgtgcaggcctgtttgaagttggcctacacatactgcagggctaagtctgctgcttccaagaacgcggctctgtccaacaccatgagggcagaggtggacttggccaggaaggacgttgatgacgccagggtggaacttggagctattcgaatggagctgggtgaagtcaacaagaagctttttacagcccagaagaaaataactgagctgactaaggatctcgagtcttctcaccgacttgaagagaccatcgagactttatctgccgaagtgaacagccttcaagatgaaaggacatctcttcgagcggtcctttcgtatggtggaggaggagaagaagtctaaggaggaagagcttacggccgaggtaacgaggctgggagagaaagttcatgccttggagatagccggtcttgaactcttctatgacttttggaaggctaatcttcaagcaaactttgactgcttgggtgaagccaaggagatgtacctcaagttctgcgcttcccaagtggcttatggtgaaactgaggcgactgcttctacctccggccagaatgttgatgtacctcgcgttcaaacaacagatcctccagctcctaccagcctagaagacccgaaccaagagcctgagactccatctgtttaaatacttcttcttttattcttttatttttatattatcttattcggccataaggcccttttaaagacatcatgactaactaagtggcctttaaactgggaattatttttctttttacagacaacgggctgatggcgcagcctttaatcccgatattacttgcttttgttatctttaatgaatttcattctctctttataatcatcgtgcaattgtgactttttaatctttaccaaatgctttgtacaggtctgggtgccccccaagtggctgagcaaacctatgactcttggtcacttgtttcttacaagtatactttttatctgttcggtgctttgggtttgaccaaaccttttgtacgcactggatggtaaattaaaaacatgctgataatttcaactcaatttgaattttgaaataactatctttattcatttattgatcgaaaaatgtgtttgtaatcgcaataacttacatcagagctattagatataatctgatcttttagcttaacatgaaataaaataaattgcagaaatagaaattgtactttaaatggtggtcgcctgacctgagtacttt

SEQ ID NO: 346486 - DNA, 1330 bp, Cannabis indica
agtggaacaatctgctcggcaaattataggctcctaaatcacattaatcacaacactgataagtgatacgctaaatcacttcccggggacttaaacttgaaacttaaagtttccctatcgatgaataacatgtcaataccctaaataacacaaaaatgggaaaaactaaggttcccaaatttgccccaaccggtagaccggttccccaaccagaatttcgattctgggaggaaatcctgaaagccaactagaattccggttcctacaggcctctctgaacttgaactccggttcagtgcaggaaacactaaaaattctataactcgaccaaatcagccccaaaccaattcaaactttgcagaccagttctatacaccctagataacatatttaaggcaacaaaacaaagcttcatgcacatatacaaaaatcaccattgatgagccaagcttgagtttaaaaactccaagcttgctcatccaattaattagcccttaaaacctgcttaaatcactttaaataaacataatatagctgcagaaaacttcccaaacacaaacaacatccacagtagttaaatcaccatttcaccattaaaaccgaagttttgagttcaaactccaaacttacttaaatccaaccaacaaccattataacctgattaaattaacacaatcaaacatactttaacctctgaacacaacaacaatcaaccacagaaaccacagcaagcataaactcaaaacatgcgaaatttcttttccttacaactcaagaaatcaagaacaagttacaaaaaaacttaccaagaacttgagcttactaaaaccttgagaaaacaacttgaatttcaaaggaaaacaccaaacccttgttgctcaaagggggggccgaaagagagtgtgagattgagagaaaaaagtgatttttctttaacttagtttttccttgaaaatgagacaaatgtcctttgttttaatcaaataaaactaatcaattaaactttaaaatcagattttaacattaactagaaatcacaaaagacaaactaaggcttggcaaaatgacaattttgccctcccatactaatagtcactaaaggtcactaaaggggtattttaggaaattctaaattcccgactaatcctgacactcccaatgtctaacaaaactgccccgctatactaaaatactaaaatgtgattctactatgccatacaccgcgttccaatgttgctgggcaccgacatgcaaaaatatgaaatttttatatatgacatataaaatgcattctgaactcaaataaatcatcataaataattattttaat

SEQ ID NO: 346487 - DNA, 897 bp, Cannabis indica
ttgcagatcgttttacaaaatacaaatcaacaaaagataaagccaaaaataaatttcgaacatcttgaattacaataagaccaaattgtgaaggtataaaaataccactctgaatcgcttggacacaccaagcagtttgtttccaacatgactctatcccacgaatgagttacaatccaactcaaaacttctttaatgcctattatctcaagaatttcgggttgaacacaaccaatcttccccttcttaattgctcctaccatagcaccatgatgattccgagctacacaacccatgccaaagtgcccctcttgttcaaatatgcacccctgtaccgtcttccataatcgtacctcaaccagcagaatcccgaaagcaaaaaaagaaaacaagaaccaacaagaatggaaccagaaaaaactaaagggaaagactaaagaaccatgtcaaaagacaagactaataggaaaacttaattagttccaacacataaacacgatcacagtatataaatcaattaaagaataaactccttataattctaaccccataaaacactaaattgaactaaactaataaaagtgaattaaaatgtgaaaacaaaaactaaagaagatattttctgaatgcgcgttacttctttattgacggaaccgaaccaatctcataaaaacaaaaacacgatcacagtagcaggtgactgttaggctatttttagcctatgttttggatccaatttatgtgcattcttagctgtgttgggacggaattacgcttgttttctatgttttcaggttctttggagtaaaagaggtttcgggtgcagaaattcattgaaagacgtgctgagccgaagaaaaacctaatttctgagtttttgcatatctggccgcggcg

SEQ ID NO: 346488 - DNA, 538 bp, Cannabis indica
atgtaaaaaggttgtcttgacattcatctattcaagctctaactcatagattgctatcatggccaagattaaccttattgaggtatgctttaccactagagagaagatttctatataatctaccctttctctctgtgtatacccctttgccaccaacctagcctcgtttctacccttttcacctcttggaacagagtccttgtgcttgtatacccacttgcagcctatcactctttgtcctaacagcttcttaattagaatgaaggtctgtttttcttgagagatataatttcatcatccattacagcactccacttgtgtttatcaattaaccccattgcttcagcataggtaggggtgagcataaaatctagaaaactgaaaaaatcgttcaaaccgacctaccaaacaccactggaaccgaaaccgacgaaaccgaaaaaccaaaaaaactgctaacagttaaaaccgccattggacgattagtgttttttggtaataaaccgactgaaaaaactaaaaccgaccgttatacata

SEQ ID NO: 346489 - DNA, 931 bp, Cannabis indica
acatacatactcaaataaaaatttaggttatttcaacattaataaaatgccaatataaaatcccgaaaatgtatttcggtcccgaacccagttcggcctgaaataccaagttgtgactatactgcgctgacttatcaaaaaacacctacagaaggacaaaacaagtatactatataataatatagtccataagcacgtcataatatttaaattacagttttacctttctcatgtcaaaattacgaaaatgcccttggctcaccaacagggtcttaacatgtcatttatcaaattaattcacgtataataaattatataataatataattctacataaatatacatttaactagttagggtttgctaatccattactaatcttaggatattacaattatcccctccttatagaaatttcgtcctgaaatttacctgaacaactctggatatttctgctacatatttgtctcgagttcccaggttgcctcttccactttactgttcctccataatacctttatcagtgcaattgttttgtttctcaagactttttctcttctatcttgtacttgcactggttgttcctcgtatgatagatgtggctgaagttctaatgcttcataactcagaatatgggacgggtctgagacatacttctgaggcatcaaaacgtggaacacaccatgtatagctgccaacatgataactcttgagtaaagagttatttgatatcactttaagcatttttttatgtaattgtgtgtcatttaagttatgtttgtctcttaatttgtgaaagtttagtgttttatgtttgtgtgtgtaatttgaagttgttagtaaaaatctataactcttgtgcataaattggcaaagaaaatacaagttagtcatgttcttaattttgctgaaattctgtgaagtttttgct

SEQ ID NO: 346490 - DNA, 904 bp, Cannabis indica
acatggcatggcatttatacacatatatcacaagggtaataaccctaggctactaaaccgttcctattaaggtaataatccccaatcctggttactaaacaatcataaatatcaatttcaatataagcgccactgtgcatactctacgtgctaaccactgtcttacctgttgtcccgcaaaagtagagattctgaatccccgggtgctcctgatcaggcgccggtaatcctagtcacacaatctaggatttcacaaatcgggttaacccctcatttccaactcataaaatattttcatggaatttaaaattcagataatcacatagagctcggaacgagctttccaacgacataaataactcccaaatcggagtttgcattcaaaagttatgaattttcaaagttcaaactcaaaattgcccaaaaacttaagggcaggccgcggcatgcccaagccatgccgcggcacctgggacacatcccaggttccaccaaacaggggcgggtcgcgacaggcttagagaatgtcgtggcacctgggttgaaaacccaaaaaccagccaccaagaacacgaattttcagcctaaaactcattcgaactcattcaaattcataaccaaaacttccaaatcataaaccagagttgctagcaaacactagggattaaaaacacatactcacgcatcaaaatccaacaacaaacgctcatttcagattggattaaaaatcgaaaaattcatgacttaactaagcaaacttcaagcactagaacttgagcttcatctcacttaattcaattaatttccagcagcaactactttaaaaacacatggattcaagctagaaaacacttccaaaatctcaacgaaaacttaaccaaaatccaaagcatcatacaaacaa

SEQ ID NO: 346491 - DNA, 737 bp, Cannabis indica
aagagacggggcgacctcacaaagaggcgctctgtcaagggcttgagcaagataagccgatttattcgagaaccgcccattcccttccaacgtccaaatccatttatcgttgcccagtctagacgggttaccccctttcaagatattaggtacagtaaccttatcgaaagtactgtttaacaaggggatactccatcccccattatctaacaatagatcagcaactttggttacccaaaccgtggaggagccgttagaacgagggaggaaaccttttctatgatcgacccaagggtcatttcaaatattagtatccttcccgtccaccaccaacttacaagctcctttttttttaagatagttttagatttaaccacatttttccaaaaccacgaatcagaattcttggaagtacaaaaagaaaaggctttcctttaaggtatttcgcttccaggatctgacaacaaagggattggtttcctattaaaaggttccacccccattttgccaagaaggcgaggttaatttctctagttttacggaaaccaagcccccctaaagacttaggaaggcaaagtttatatttgagttttagtattttattggggttctaatgtttgagtttgtgtttatgagatctatttttatttaattagttatttatttttatagattttgagaacttgaaatttgatgttgtttctattgattattgagattgaaagtttaatttttca

SEQ ID NO: 346492 - DNA, 524 bp, Cannabis indica
ctcagatttccaagcttgtcttgttgacaggaagtctacatctgggatggtatttactcttggaggtggagcagttgtttggagaagtgtcaaggaattcgtaatatcagactctaccatggaggtcgaatacataactgccgttgaggctgctaaggaactagttctgctaagaaagttcttcacggaacttggtgttgttcctgaaattgaaaaaccactgttcttactttataataacactggtgcaatagccaatagtaaaaagcctcaagcataagagaagaaaacacattgagataaaataccacatcatcatggaatatatagcaaaaggggatgtactggtggagaaagttgatactgaagacaacttagctgatccattaaccaagattttgacagtcactaatttgaaaagcacggaatgaatctaggattgtttgaaatgtactgattgttttatgttagtgcaagtgggagtttgttgggttaattttgtgccttaaataaaactatatttc

SEQ ID NO: 346493 - DNA, 606 bp, Cannabis indica
acatgcatactatataataatatagttcataagcacataaataaattaaattcacagttttacccctctcgggtcaaaattactaaaatgcccctagctcaccaacggggtcttaacatgtcatttctcatattaattcacatataataaattataatataatataattctacaataatactcaattaactagttagtgctttgctaatccatttccttaattccagggtattacagccaatatgtgcactgcaaagtcaagttatttgatcaaaagaaggctttttttgtcacagcgatttatgggagcaattctatggaaacccgaaaagatctttgggataagcttgctggtttggggaatttaaatgagccttggatcatctttggtgatttcaatgctatgtttaattaccaagacagatttgggggaagacagattcttagcaaagacattttagatgcccaatcttggcttgctttgggccaagttgaggagctaaaatgttctggttcctattctacttggactaataaacatgaagttggggatataatttattccaaacttgatcgtgttttttctaacaacatttggttggatga

SEQ ID NO: 346494 - DNA, 412 bp, Cannabis indica
ggaacttggactgagtttaatgtgtaaagtttaagtttgagactctgatttttgattctcctcattgtgttttgaatgatggtgaagcatgttgtgattttcaagttcttgaatttacatggtgtaaagatatgctcatgtgtgagcttatgtttgagtttgtttaaatctgattttagagcatgttattgttggattttgatgcattttatatgtattttaatgccctgcttgagtacgtgctagtttgtgaaggatgattttgaatcatatgtaaatttggcttgagttaggtgtgtttaagcttgaaattcgaagctgatagtgggttttgttggtatttattttaccacgatcttagatctacccacaagtatgtttattaacatcataaataagaactttctaaaac

SEQ ID NO: 346495 - DNA, 959 bp, Cannabis indica
acccacctaccgacaatgatacaaggtgcaaggccacctctagcacctacaacccgcagccacaaacaacgaacttgtcccttgaggaccacaagtgtatcccaggtcattagagcctataaatgccccattctccgatgtgagaggggattggaaaatcattgtaacacttcacctagagaaatatacacttctatctttctccatagttatttggcacttttctttacgttttcatatttctagatcttcatcttaatcctaggtcttgcatctaagttttgattttctagctataatttggttggggggttttcgtcgtcaataatagctcaattacatatcggtccatatcatatataatctctattatatacaacactttcacttagatgtcatactttattagcaatctgaattaagatggtttgtatcgataatggggcatcagtgaaccgtactagaaacatttgattaaagtttccataactttaatatattactgactattttattcatggctaagtgatcttaactctctgtacaatacaagtcacaaccttgtatatgaataaagaattttttgatatttgcatataaattattccatataaaatattaataatttaatattcaagcatatatcaaaatgtttaactaatatttataatcaataatgtcattacaagatttttagcgcacaagtcttaacaatctcccaacttttccaaaagaaatccgggcatctcccttaatcccatattcataatatgacccataaaagattttgatggtagtgcctttatgatggatcagccaggttatgttctaacacaatcttcaagaccatcacatcacatctctatattatatcttctagtagatggtacttcctctcaattttcttgcctctctagtggcttcttagttccttggagttagtgttaggttataattag

SEQ ID NO: 346496 - DNA, 862 bp, Cannabis indica
atgatgcatgaatatcaccctttggaaaaatgtggtttgtaaatggcataggaatatgttatttaccatgtatgacttgaaggaattgtgcttaaattgatattcttaaaattaattgggcataggaatatgttaattaattagagaatcaaaccataaatactttggaaaaaggattatgacattttaaattcctagttgacatcatcaatttgcaacaatactcatttgcaccattatatcaactttgcattttttaggtcaatttaatagttctagcttgttttcttcatagtttgtgtttgttaatttttttttacatattctcatcactttattttattttattttttgttgaaaccaatttgtgagtaattagttttataaatcaatttccaattttcaatccctgtggagacgatactcgatttatcactttattacttgttacgattgcgtatacttgcgtacacaattttcacaacacccgtcccaatgtggacaatattgaagatatttcgaaaatgtcactgtcgtacaaactaagcatcaacatgccaccagcatgcacctcaacatgtgctaccacttgaccaacttgtaggcatcacctagcttgtaatatgccatcttggcatgcacgtggtgccttgggggcagtttgagtggttttacacccctcaccatacatgacaaaccattgtttattagtttttttttgggaaaacgacaatatcataataaaacgacaatgaagacacaaaatgaaaaaattacctcggaaatgtgtgcagattgcaattactcttgtcttgtccttatcaaagtcccctaactaaactaacaatcaaacaacactatt

SEQ ID NO: 346497 - DNA, 1339 bp, Cannabis indica
cctttctttccaaatctacgcaccctttttataggtgatattcgaagaaatacagagtctcccacttgaaattcaatatccctacgctttggattagtgtagctattctgtctactttgcgaagcaagcatacaagattgaatcttttcaatggcttcactggtcctttggaccaattcaggtctaagatatcgtctctctctagcttcatcccagtggataggcgatcgacatttcctaccatacagcatctcgtaaggtagcataccaatggtactctgataactgatattatatgaaaactccatcaaggataagaacttgctccaagatccctcaaaatctatttcacatgctcgcaacatgtcttccaatatctgaatggttcttttagactgaccatctgtctgagggtgaaaagctggactgaatctcaacttggttcccatagctttctataaactctcccaaaacttggaagtaaatttgggattacgatttgaaacaattgacttcagggcaccatgaagtctcactatttccttaatgtaaaattcagcatactgttccacagaataagtcactcgcacaggtaagaagtgggctaacttggtaaatttatccactatcacccataaggaatcatataaccaagtagtcctaggcaaccccactacaaagtccatagttatgtcgtcccattttcattcaggtattctcaagggttgaagtaaagctaccggcctttgatgtttagccttaacctgctgacaggttaaacactttgaaatgtattcaacaatatcactcttcattcctggccaccaatatattgccttggtgtcatgatacatctttgttgtccccgggtgtagggaatacggagtagtatggaactcatcaaggatttctcttctgatctgatcatttgtcggaacacaaattctacccttatatcttagtagtccacttggagtcacaatgaaatcttttgtagcaccaatctcaactttctttctgagttcaatcaattcaggatcattttgttggccaatctttattctttccagtaaatcagactgcaatgtaatatttgccaacttcccgactacaaactcaatctcagccttggccatatcctcagccaatcttggagagatttccttcaactcataaacctgccctgggcctttccggctaagtgcatctgccactacgtttgctttgccgggatggtagaggatttcacagtcataatccttgacgaactctagccatcgtcgttgtctcatattcaaatcttttttagtgaaaaagtatttcaaacttttgtggtcgg

SEQ ID NO: 346498 - DNA, 767 bp, Cannabis indica
aaatccagtgaacggacaaatcaaggaaataaacatttgaacatataatcatgattatattccactatgttgtttacactataatcatgaacaaatacatatgttctggacttaatagaatttatatattaaataatcatgaaataaattatgtgaaccatgcaacataaaatgcagtttcatatctttattaattagtaaatctgattatattgaaatgggttttatttagggcataaaacccaacaatagtttcatccaactagtggaagcgagaataacaaccctggcaagtcagtagatttccttatatccatgatccccgtatgttgttaatcttggattgaagaatggttctagctcaccattgggaccactacaatcaagtttctgtcgagacatctctagaatcaacaactaaaggtgtgtttaatacacaataattctgaccctgagcagccaggtgtgaatgcgaccaaggcagtcaaggaaaagtttgagcggttgcaaaatgctaacaacaaagcttgataatttatgctttctagcatggtcgacaccttaaaaaaaaggttttccaatactctcatggctgtagatatcatgaaccagttgactcaactgtttgggatggtgtcaagttaagctcgttttaaggctacgaagaattttatcaatgcacggatgaaacctcatcagaatgtgcgtgatcacctgctccagatgactagtaacttccaagaggctgagaatcatggagctgttat

SEQ ID NO: 346499 - DNA, 810 bp, Cannabis indica
cgtcttccatgtttctatgttgagaaaatacatttcaaaccctgctcatgtacttagctatgaaaatcttgagctgcaaccagacatgtcgtatgaagaaaagctagtacagatctttgacagaaaggataaagtcctccgaaataagactatagctttggtcaaagtactatggagaaataacaaggtggaggaacccacctgggagttagaattacacatgagagcccaatatccagagttattcaagttagatttcgaggacgaaatccttttaagggggatagttgaaaagaccgcttagctttaatttgcaaattagcagataattagggtttaattatggaattatttattaattttgaattattaaattatggtggtttatttgattcagaatgcatttttatgtcacatatagaaatttcataattttgtatttttaatgcccgacaacattggaacgcagtgtttggctattagaatcacatcctagtatttttagtatagcggggcgatatagttagacattgggaatgtcgggtatagtcgggattttagaatttcttaaagtaccccttagagacctttagtggctattagtatggaagggtaaaatggtcattttgccaatctttattttgtcctttagtgagaatgaagttgtttattaaatcagattttaattgatttttaagctgaaattaattggataaaaccaatgttatttcattattttacaaaaaaaaattaaaaattatcaaaaatcacattttcactctcaaccctttctctctttcgaatccacct

SEQ ID NO: 346500 - DNA, 717 bp, Cannabis indica
tactattccaactgatatattttagggggtatttttaactacacttataaattaaggggcatcatagtatagtgttataagtacagggactaaaaaagctaattattcttaaatcattcttcaacgtgcttcgaggaaataacaaatttgaatggacagcagaatgtgaagtagccttccaacaattgaaagaacatctaataaaggctccaatactgtccaaactagttgatggagagccattgttcctgtagctgacagtgtcagatcatgctataagtaccgccttagtgcgagaataaggaaaagtaaaacttctagtatattaagtaagcaaaaaactactgggcgcagagtctaaatacccgatgattgagaaactttctttttgcttactaattgcttcacggaagttaaaacaatactttcaagctcacgccataagggtactgaccaaccaccctcttcgtcaagtatgttgatgagtaaaaagagagaaaaaagattatgtgtaataaaataaaataataatagcaaaagaagtaaaatagtaaataactgtctataaaaaaaaatgaatggtagctgcacaaaacctgatatgaatatacatctgggtttatgtgtgaatgcataaatgtaaaagcaattaccaattgatttttttacgaagataaggttcaccttgaggaggcacgacaagctacctctataaat

SEQ ID NO: 346501 - DNA, 1180 bp, Cannabis indica
ttgatcaatggcttggaagcaaagttttttgtgtgtcaaacatcatatgtttttgtctgttgtgcatggtgtgtttgaagtctgaattctgggaatgctttttgtttcgtataatttttaagttttggaattcatttaattgaaatgactttcacatcattttaatgtacttgaatgtataacaggcaagaagcatgaaatgtctgttaatctgtgattagggttttcttgttttaggattataatctttttgaaaaagtatttttgttgtaaatactatttgaattaagttgtttttggtgattttaggtgattcttatatacgattttacttgtcttttgctcaattatttttttttctatagtttatttgctgacatatgtagtcgttatctgttaaatttatttttcttttacttgattaggttcatcaaacatggttgggaaacgaaagacgaaaggggcagcagatccctcaaagaaggatgtttcccctcaaccgaaggataatgccgtagcttcgagacatttctcgtaagtcttgagatatggatagttgtttactcgtgtctgacatgtttaacattattgtattatgtttaacatttattgtttactatatgtagcaatgcaaactataaagcccttcgagcagctgagaaggaattaagtgaaaagaggtatgatcttgactgttactcattttttttttatcaattgtccttaattcgtcgtacttgtttgacatgctttaacatgatttccatttactctggagttgatgtaagtttgccccatatttcaagttactggtaaattgaaaattctatttaaagatttcaccgacgatcagaagtctcagtggagaaactatgaccctaaccctactcccgccaagaagccagtgcaaacaagagggaagaaagcaaaggcagttgagggtaaggggaagaaggtggaggtggatgaggaagaggttgctactgaaactgaagaagcgtctgtgtacggtcgatgctccttcaaccgtttaattcagatttgcaagaacctgaagttagagtagaaagatgtgatcctaaatgctggatttggatcattcatcagagaggatagcccatacattgacattcgactagtgagttggttaatcaaacatgttgacccaaccactagcata

SEQ ID NO: 346502 - DNA, 762 bp, Cannabis indica
atatgttctggacttaatagaatttatacattgaacataatcatgaaataaatcatgtaaaccatgcaacataaaatacgatttctgatctttattaattagcaaatttgattatattgaaatggattttatttagggcacaaaacccaacaaactcccacttggactaatatgaaacaaaaggtagatttcaaataatctcaacatcttaatatccagatcaagtgtagtatgtagtattctctccataataggatatgacaagttgtattcaatataaacttttctctaccattacatttccttaatcacaaaatccttgatattgtgaaattcttctctatgtgtctactcctctagggatactagattccttactttttggcaactacttctgtgttagtcaggaagtaacactagtagttaataaatttttagtacaatgcgaaaaactatatagaactttccatagacttaataattatctttcctgtaactttaacattcagtctctctggtacagttagagattcagatcagtttttacacttctcaaaaattacaactccacccctagagtaatcaccatctcatcagtagacattctagcactaagcaagtctagaaacctgatttggtgtagtctaagagtattaaataccacccttatcaactaacatatagttactcttcgtgatcttaagatttacttgattatcttcaaattttctttccgggattaatttgatacctactcattac

SEQ ID NO: 346503 - DNA, 671 bp, Cannabis indica
tgatttagtttttcattcttttagctatatttttgtataaatagaaattcactcattagaataaactactcagaaaaatctcattcactctatcattttcttcttctctttgtcttctctcttcttgtattaatgtatttattccatattattttataatatgttatcagcacgagcatttgccacggtaaatatttttttgttaaagtatttcaaagtcataatagactaaatatatatttatatatatactcacttgactaaaaaaaattcagaatcgttttacttttttctcctttttctttgttatttattatatatatatatatatatttttgacgtagtgattagaatcactcatgaatatacgatggagatatccacaaactgtgcaagaatctcctcaaactagcatagctcatcgtctaactgaagggcatgcctgtcaaaccatgaactttaagcgagcaacatgggacaaactgctcccggagatttagataataaaactataacgtcctcaaacagcacaccaatggctagagctttaacttgtaacatcgaaaactacacgccaactcgttaatatataaaatttctccacaaaatatctacaagaacaaaagataaagaaaagtggaattaacacttgatgatgaaattaaaaccaa

SEQ ID NO: 346504 - DNA, 527 bp, Cannabis indica
acttaaacctttaatactaggaacaggaagttttgttaagtctattgaacagacttaatttcaaaaattcctttcttgtccttctaatagaaaacttttggttactccatatgaatggttttaaccaaagttctcttggcttggcttctttgttccttatcctgactatccattacttgttaaaactaacaatagatttttaatcacaagtgtcttccaagtcataacacggtgagttccttgaaaccctcccactacgacaaggtaccgtgacttactgtctaagaacactaaatggtattaacctcttcggttgtgtcaagataacagaggcaatggggccatcttatatagaataagatgatagaacacttttggaatcaagaaaaaagttatataatctactttgctactttactttcaaacttagtcattttcttagaaaagtagtatttgttctaacaaacactttcttatcttaatgaccatgggatggtccacccctaatcacttagaatagctatcaa

SEQ ID NO: 346505 - DNA, 630 bp, Cannabis indica
cacgtgtcattttttattggtatatttaaattaattttaaaaaaaaactaaaaattcaatgacttggaccaatcaaggattgccacgtggaatttacttaacacttaacagctaagtacctacaaaaattttaaaattataatttaggtattattaccgttaaaaattaaacttaagtatttacttacagctagaagttaaatttaagtatttatgccgcaaattactctttatagtattattgtcacgtaattaattagaagttttatttacattattaatataataattgtgatgattttaataaattaatataacaataaaatgaatattttattttattaaataaaatttaataataaaaaatattatttttagtgtaattttattgtaacctaaatgagtttttgacactaaatttaagtattttgtggcaaaaaaaattggtgttgagattggagatgccggaccttaattggctagttggttgtccttttggagcataagtcaactttttgggcattcagattggttacaacccaaaatataagaggaaattacgtagaatatggtattttttcctttaaatttcataaatatggaaaaattagagatttacttaacttatgg

SEQ ID NO: 346506 - DNA, 768 bp, Cannabis indica
ttttttccatcttcttacactcgttagtgttctgctaaaatctcaccttacacatctcaaaaaatcatgaaacttttcaaggacgaaacaaagactattgtgcatcacttttccattgtacacgttgagatgtaaactagttttcatgcaccaacaatcatattaatcgaaatagtgaaaatcttacaattctagtagtggtacccctttttgaaatgtggccacgccccatctcgaaatatttttctccactagtcacaatgaattcttactactaagacgtgaatatgaagattggattcgcgttaaatttggttaaaatggatccataactaaaaaaattgaaaatattcttcttttcaggggaaattttaacaagttttttcgttactcttacactcgttagtgttctgttaaaatctcaccctacacatctcgaaaaatcatgaaatttcacaaggatgaagccaagaccgttatgcatcacttttctatgggacacgttgagagaaaaattagttttcttgcactaacgatcattttaatcgaaatagtgaaaatctcacatttttgatagtggtaccccattgtgaaatgtggcccggaccaatctcaaaatattttttgccacgagtcacaatgaattcttactactaggtcgtgaatataaagattggattcttgttaaatttggttaaaatctcccctaattaaaaaatttgaatatatccttcttttaaagtttttcttactcttgcactcgttagt

SEQ ID NO: 346507 - DNA, 1037 bp, Cannabis indica
tttacatttgatcaaaatatagttgtttacattatgaataaaaaagcaagcaaacgcaattataataagttcaaacgaaaaagtacaagacatttaagataagagaaaacttaaggttgtttgcaaactggtctttacaaaaatgccactaggggcaaaccattaagccattttcctaaacaaagaatacaaggttattcatggggggttgatgcactcgagaaagaccgtcaacaaatagctcgagaaagactgtctacacatagctcgagaaagaccgtctacacttaaaaggtctcgacctttgcatagacctcattctccgcatcaaaagatcccatttcctacagccaagacctcattctcggcctcaagaaatttttcaacatcaagattggctggtccataggtcttcttatgcaagcttgggtcttgggccaggtgggttcattagtataatccatgaccacgccaactaggactaccttcttcctggattccttgtcagcctgaggaggacctctgaacttgctctcaaaatctatgcccattcctgtggagacagagataaaatatcaatagagcaacaaaagaaaatatatatataataatcaagaccagaccaccattcgcgagggatgatacttaccctcaaaaatctcttgtgaggatcgactgtaacaatcaactgcatatccttagtttggattgatcgggagctcctcagtcttggaatccttcatttctaatttaaattgaggcttaaagtttttgggaacgtacggagaggaaaagcggttggtacattctggtgtttcgagttttgaagaataagtttctgaacattgatgggacatcttagcaagagaatgacaatccaatctcaagatgaaactcaccaaaaactaggaatttatggaagatggcaagcctaagccaccattttatactcaaaaccaagtaaatgaaaaggccaaaggttgggagatctaacagttgggagtgaggcggaagatgaaaagacggttcataatgac

SEQ ID NO: 346508 - DNA, 737 bp, Cannabis indica
atgtttttaaacagtcgtttaaagtgttcccgtcggtttctataactatcgcctatacgaacctcgtaaaacgggtaaaataggcgatagttaaaaaccgtcgctaatgtaaacttcccgacgatttaaaactgtcgcctaaaacaggatataagcgacagttttaaaccgttgagaatgtgaaaaaaaaaatacaaatttttctgccattaatggcagaaaaatctgtattttcccctatctttttcctgcattaattagtttcataattttacctaaattaaaataaaacaactaattaattttattacaataacaactaattttaaaacacattaaatttatacaataataaaataaatatatataataaataaaaaaataatataaataaataaatgtatttataccgagcttggagagagagagaaagagagagaggagacagactggaggtggtggtggtccgacgtacgagacagagatgagagggacacggacgagaggtggtggtggtccgacgcatgtgacggagaggagagggagaccgacgggaggaggggtgggtggagatcgatggacgagagagacgacaagaaagggagatcgagagagggaggaagatgacaagggaggagggcgatggtgcggaggcgtgggtggggttttggagagttaagatttttgtttagggtgtgaaaaatggagaaaaattaagtgagaagaaataggtgggc

SEQ ID NO: 346509 - DNA, 601 bp, Cannabis indica
tatatttttaatacactcgatcccaacaccaactagaggtctgagtataggtccgagtctcgggttcgggtccgagtccacatcccgggtctgggtccgtggtccggggtcggggtctgggtctgggtccgagtccgggtccggggtcggggtccgagttcgggtcctgggtcggggttggggtccgagtccggggtccgagttcgggtcctgggtccgggtctaggtttgggtcccggtccaagtccgggttcgggtcccgggtccaagtccgagtccgggtctgggtcggattggtgttgaccccaaatcttttgtaaaatattataatacaagctaatacagaccatttattatgtattaaataatacaacatacattgtattaaaaaatttggtcgtaataattaatacaatacattgttttatccaaacatagtgtcatttattatttactactatacgaccattatacggcgtaccaaacgagcccttcaagtacttcagaatatgcttaactacagtccaatgttcctctcctagatttgtctgatacgtgctcacaattcctactgcatagcaaatgtcaggtctagtgcata

SEQ ID NO: 346510 - DNA, 813 bp, Cannabis indica
gttgagaagcaaccagtagggcgacccaagaagcaaaaggttggaagaattaagtcaaaccaaattgcttgtaatggtgaaaggattatcaaaccacgaaattgtggcaagtgcagtgcaaacggacacaacagaggcacttgcacctaccgaggttaaaaataaatttttaatttagtcgtaatgttatgtaaaagtactgttatgtattgttattaatatttgtggtgtaaaatatttttaatttgttattaaaaatgaacatgaatgttgaattttatattattatgtgttgtactgttatgtatttcttggtgaatttttttcagactttgttaaacatctgtggcaaaaataaaataattttactgataagtagattgttcaaatcgaaaagcgtaaatgtaaagattgttcaacaaatataataaataaaacacccaaagttcatgacaagttctggtagaataaatctactccccatccctagcggaagagcgacatatggtcatcatctactccatcgaatggtcgatccaataacttatgctctatgacgtacattccgcaatcgccactgcaatagtagttaaatgtaaaaatttaataaaccatagagaataataataaaaaaatttaatttaattagtaaacatattttcaaaaatacatttaaattgcctcaattttgtttgagtttacaactttattatccatgagatcccagtcaaattttctgagccggctttcgaaggtctgtcatttgagggaccatcaccatgtaatgggtgtcacatacaccacactggtcca

SEQ ID NO: 346511 - DNA, 1205 bp, Cannabis indica
aaacccgtcatttcaatttttttaaattcaaaggttctggactaaacctctttgacgaaagtggagttgaaccgttataactccctgaccaaacctttttgacgagagaggggtcgaatcgttataacaccttgatcaaacctttttaacgatgaagggatcaaataactataatttttgatttataacctatctcatgggaaaggaaaatcaaaagttataactcgcgtataaaactgaagactaacggttctcgcgagctatgaaagtacaaaacgaggcatcacgatgccttgataaaagtacttgaacctagaaaatggatagataatataactattcttacaggagaattaaaaatatacaaagtgataaaatccttaaagtatatttttgtaacgccctgtcccatagggacaccacgtatactattttataaactaatataatactaatagattaattagttataaaaaaacagcgataatattaaaaacttgactaaaataaatgactaaaaacggacattataacgatagtaaaaaggggttccgggaatccctgttataaaaagttttacataaacactatatacaacgcctcaaaaatataaaacaaaaatatacaatagatacaaccagtctaaaataactcatgggaacccgacacactggccggtgggatcaatatgtacattgttggagaaggccgtcacctcatggcagctctaactttgccttgcccttacctgcataacatagctttcgtgagtcacaaggactcagcacgaaaagcaataataatgattatatagtttattattcgaatattatcatttatacacaatcagaatcaaaccattacgcattattcataagatgaaagccaaatcactattggcatctgccacgaataaggatcagtatacagatatcttgttatacaaaactattacaccaataataggaatcatattcatataaaaataaaatttatatatatgttacctcataaagtaaccatcttcattacattacattgcctaataaggcaagtcgatgctttagtgtgaaaatcctgtatggcattgcctaataaggcaagccagtgcaatagcttggaacccatataccgcataactgcaccacctaatcaagtgagcctatgcaaaaaacctgcacccaaatatcatataattgcatcac

SEQ ID NO: 346512 - DNA, 691 bp, Cannabis indica
ttaattaatttaatatataaatatttgaatttaaaaagtaaattctctggttgagagatttcttcaattagttataagatataaatattttataattgaatttggttatattatttattcaaataattaaatatgatttaattaatagatttaaatttaaatgattaattaaataaataaaattaaatagattttttatcaatataaaacttaataataacacaatgtaaggatgttatgataaaattagttacttttttttacatctgtttatgctactaattgtctttaagttggttatattaaaaaaatattaaaaattaaactcagtgtaatattgtgcacatgaaagaattatttcataaatatacaaaaatggcaaaagttatacatttttttatggatatgttgtttttttttttcaaaaatacatagtgttatttttcattattttcgaaaaatattagatttaacattactgctatatacttaggtacgctgctcatctttttggcaggtatatacttaggtacgctgctcatcttttttcttttttcttcttttcattttgtatgtataagctaacttttttttattatctacacatccatctacctcatttatattatttttctttttatttattttttttactttttctttaaatgacatgacattaacatatcttttt

SEQ ID NO: 346513 - DNA, 1247 bp, Cannabis indica
aaaaggggggttacgccatctgtcatgtcgtttatggaggtttcaatacgtcttcccccatgcggcattaaatgcgaagtgactgttcaagagatctctatacctcccggaactgccttagcatgcctctggcttcccgaagagtaaagatacttcttatgccctcctccgggaggcaccttctctgggatgttccttcttcatctaagactaaattgattttcataagtgatggttcttacatatccacgtgtcgtccttttccgcgttcacgtattttgggagaaatcaaatgcaacacctaaaatccaagccatggacgaaccctataggaacgacccatgaatttaattttttccactttatttcaatttagtttaaatgaaataaattgtcttttttctaattttattatttatctcatttaataatttaaatatcaatttttatttgataattataaataattatcaaataaaaatataatttaaacatatttattaattaaaaacttagaatcattcagccatataaatcaaattaaatcaagtatacataataaaaaataattatttattaaaactaatcatgggaaacttacaactcgaaacaacacgtgttacacataacatattagagttgtacataaatttttgtaaactggccaacctgaataacccgcccaaactaaattgagataacctaacaaaaaatgcaaactgaaaaccccgacgaaaatataacccgctcaatctatatattggacgggttaaaataataccaacatgcccaatcaacccgaactaactcgaccaatctgattaagaggattttttttatatatatttatattattaaaattaactaaaatataacaattgaatgtaaaaattaaaaaaaatatatattagtgctttgtttggacgggttaacccaccaaactgactaattttattggcgggctattatttttttttttaatgtaggcgggtttacacttagatttttataacctgatttttatattggcttgaacaaaatgtagcacaaatgtacaccccttattaaatagtgacaataaaaaaacgtgctataaaatgttggatattaattttaccaggatttttagatcaactcacaagtatgttgttttaacaccctaaatatgaactttctaaaaacgataaataaacacatataaatttaagaaaacctttacattggtaagcagcggaataatgtctctt

SEQ ID NO: 346514 - DNA, 1270 bp, Cannabis indica
tcagggaattaaacttttgaacatatattcatgattatattccactgtgctgacgacactataatcatgaacaaatacatatttcctagacttaatagaatttatacattaaatataatcatgaaataaatcatatgaaccatgcaacataaaatgtgatttctgatctttattaattagtaaatctgattatattgaaatgggttttatatagggcacaaaacccaacagtcttcacactaaacaaaccattcgttgtagtgtttccctctggattcacacactaaaactgaacaagtacactaattcttcaaacatatgagctagtgggctcccccacttaaacttgggaagaacttctctctcttagaaatacctctcaaggtatagctcgcaagctaaccacatactcgcatgcggtccctccattccaaatgtcactttaatgaagatgttgaatgcctcgatcattctgactctttgcccctcgacatttcaacgttgccttagtaccttagtcctgctgactttcaccttaggtaaacattaccatggtgttatcttagtacctgagtcctgcagatttttaccctagataattggcactgcctgtgtcctaagtcttcttgactttacaatttgaacaacaatccatctccatgacactcttctcgatgcttgtaatgaatacctagtctgctgagtgaaccgtgagggtctctcccccacttcatctgttggcatccttgacaacatgcccacacgtgaatgcctgaccgcctaactcttcatgcacaccatgccatctaaaagtgcaccccgtaggatgtgactcttgagtcaattgtctcatatagtatccctgtcgatttccatatgcatgccctgttcactaaaccatccaactaattcacattagcatcactcccattcggctcccacgatgtactaagttctaatgattggaccctctagccatcatgcaaactctagcacccctcttagctttagcaagctcacatgactattgagtctcacggcacagccctttggcctccactcaaactctagcgccatcttaacacttgcgcttagtctttttagctctgctcacttctttgatgcattcattccacaactccacatctctattgatgtctttgtgtgacttacgcatacttgcacttttacaagcgaatacatcccactaaattatctcagcacctcccatatggatcaaataaaagtcacatgcaaatgcctccaagta

SEQ ID NO: 346515 - DNA, 630 bp, Cannabis indica
ttaaaattattttaattaattaaaaggatttaaaaaggtatactaaattaaaattattttaattaaatttgaggcttacgaagatcctacaaatttacaaaaatatcattgctgctatggagacataagtttcgtaatttagtttctaattttaaaggttgtaaaattagaaatacccaattagtactcgattcatcatcactatttatttattgcttttaaataaatattcattaatagttgattaataacatgttcatgcattagtatgcatctcatattagaaacatgatatattagaattgtcctatgtgtatgtatttactatttttgaaaccgaaaacatgtaaactgactaaatttaatttagaattaacttggtaaattataaaattaacctattaatttaaaaaagttttaaattacgaattaaagagttaattcatatttgataattatgacacgtaattttttataatttgagtcttttattataaataaattaatcataattattaaagtagttaatatgtattaactctaagaattaataaaccaaacacattaacttaaaatagtaagtgggagaaggagtacatgtcaatgtaacctacgacctccattattggt

SEQ ID NO: 346516 - DNA, 657 bp, Cannabis indica
tgcgactaaacgggtcgcatatcaggcattcatgtactgacaacatagaactcgcgggttccgatcaagttgtcgtgcacattggtcatccggaccaaatgctggtaaagatgcagtctttacataagcttgagggagaaacaccgggccatcgcatatactcgatatatgtcgcgactgtgctaacttctctctacgtcccgcttttattatttttactatgcgatgcatagtgtgcgactagaccatatctcggtcgcaccttctcgcaagttttgatcatgcaaagaaatactgtgggaattgctcccttatcatgcccctagttcttacgatgacatgttgctgtctaatcgttgaacttttcttgagggacattggatctggctcctaaatagccatgcaaaaatgagcatagacagtgctcgccaatttgtgattagataagcataatcgtgggcaaaaatgaacactattttcgacttgccaattatttgggagcgtatgcaaaaatgagcagtatagttggctctaagtatcatgcgaaaatgagcacacattgggctcgccaatttgcgattatgaaaaataagtattgcaatgcgcttataaataattatgcaagaaataagtgtcatttttcactccattttgcaa

SEQ ID NO: 346517 - DNA, 1173 bp, Cannabis indica
gttgtgttattagctgagaaaaattgttattgttttttcttgagttgctgaaagtttgttggagtcttgaaatgttgttatttacttattgagttgttattgtagagagcttataagatttaagcctatgaaacagaactgactactccaagagttataatggtctgttgagccttgtaaaagatcttactttattttccttgtaaccttatttaaggtattttccatgtgacaattagtatggagatttatccaacaattttcacctaaatttgcatactaacagtccaaaaaagtctttgtctttgctatattatttgttgctgtctttgagggtcatagcttgattaagtttccatttaccatcatgtgtcaactcccaacaggttcatgcaatgcttaaacttgttgagagttatcaccttagttcccatatctgatgggttctcctcagtaggaactttctccacttgtatctcaccttgtgttaccttatcccttataaagtgatatttaatctctatgtgtttagtcctgtcgtggaacacaggatttctacaagtgtacacaactttgactgtttgaataaactctaggaacctctttaagtagcttgatcactgttaggagtcctttcatccatatggcttctttaatagcttctatggttgatatttactcggattctgttgttgagagtgcaaccacaggttggagttgggcttatcaactcacacagttccctcctattaaaaacatgtaagatgaagtagactttttgctgtctctatccctggcatagttggcatcactgtatccctctatattggtgctgaagttttgttgtttgtagatgagtccaaccttaggtgttcctactaggtacctgaaaacccatttcattgcaagccaataaatttttcctgggtttgacatgtatttgctcaaagaacttatggcaaagtccagatttggccttgtacaaactattaagtacataatagtcccaacaacacttgagtaaggcactttactcattgcttctttctctgctttagtcttaggacattgttccttatttaaagtgtactagctggttattggctgagaggttttctttgaatctttcattgaaaatttctctatgatcttttgaatgtagtcctcttgtgt

SEQ ID NO: 346518 - DNA, 834 bp, Cannabis indica
aaatttaaggtcattttgtatcttggccctttttttttagtgtagcgtaatgatatttttacaatcaattaatagcttgtagcttaaaggtcttagtccctcaccactaagctagccttagtggcttaattgttatattgccctaagctagaaacataattgctatactgaacgtaaaataaataaatcaacaaaataaaacattttgcaataacttattcttatctccattgattatatcaagaggagtgctaaagagattcgtgtgttattaatcaaacaaagtaaaactactaaatttgtggtaaaattcattgaaaaactaatatgtggtatttgtgataatattttaaagaaatcgataattaatttccccagaaaaattcaaagctaataaacaaaaacaaaaaacatggagcgtgtggagctaccaagtggccccaaaaagctcgctaacaaataacaatcctaaatttgagtttattaattgggaaaggaaatttttaaaaataccattttttatatttcattaaaatttttatttacaaaaatatgctaataaagtttcaaaattacataaatacacttttctcagcaaaaaataaaaaaacaaaaaaaaatcaatctcgcgacaactataaataaactctaaaacaataaaaaaatagctagagaaacaatatcataacaactattaataaactatagaacaataaaaaaaatggtctattatttttactgaataagtatttttgtaaataataaaattcaaattgtaaaaataaaaaatatattgcgttgacctatttttgtaatttttttttaaaaattatt

SEQ ID NO: 346519 - DNA, 571 bp, Cannabis indica
aatggataaaaatgggagagaagtggaaaagatagctcattaatgccaatgatgtgcctcgaaaccacaaaattgccaaaattaaaggcatgcatattttcaaattggattatgacagaaatacccacggtaatcatttaaaaagaatttttatttaaaaaaagacttttaaggggcaattgttatacccaaaattcgattgtacttcagaaagtgacatgtgtcagtctcaaggaatatgaatcaacaaatatgatgataattatatcattaatggaatgactcattaaatatagaataaatagagtatgctcgtaacttgatggttgtatagtcttaagcgagacaaggatgtacaaactatcaatttccgtattgacgagaaaccgttttgcattagaaggcgtaatcccgagggagacatagacaatgcatagcgaggcatctacctcgttgtatgtaaagaggtattgacaaggcgaattggtcattagaacacttagcgtatagtatagattataataactaagtgtaataacttgaaggacatgattgtctagtctgcaaggcc

SEQ ID NO: 346520 - DNA, 560 bp, Cannabis indica
aactaagcggtctttacatatcacgtagtataaatgcaatttatgatttgaaatcacatagctgtaattttcccccttttactgggtcaaaatgatcatgtttcaaatcacgtcttcaattattgtttctggagttgtctcgacagaagcttggttctagtgatctcaatagcgagctggggccatttttccttgcgaggtcgacaatgcatgtctgatgtcgatcgtggttcttatgtacaatgaattcttcggagctcatttgaatgttagcttctgacttgccagggttgtgagcctcattgacactaacgggatgaagttatatgaggtcttcccataacgagacaggcaactcgcttacttagtctttcgccgatcagtctgtaacacttagtttgtacactaaggactttcgcaattgatatatgtcactttcgttttccaatgtgtattgtccttgatgcctcgcaattcgcattcagtgtcgtatgatttctcgccaatatgctaagtaccagtttgatattagttcctcgcctaagaccttacagcctacg

SEQ ID NO: 346521 - DNA, 916 bp, Cannabis indica
tataatatcttgaatttaaaattcagatattcctaatattatattcttaatcttataatttaatgaattaaatataacaaaataaacaatttgaaaaataagatatttgatggttaggatattatcaattttatttaataattaaataaaacaaaatatcctaagtttaaaaattttatggttagaaaccctaaaatttctattcaaacctaaattaacaaattttcaaaaatttcatattattttgcaaaaaaagattaatttaattttcaaaataaaaatttttgaaaaagtaatatggttagcaaattttaaaatttaaaatagactattctaaattttattaatattttaatataaaaataagatctttcatattttaataataaaataagtaatatatgatcttacaattaaaataaataaaataatcaaaatttcaaaattgaccataaggctatttttgtggaaaaatcaaaatttcaaattcaaaggctactaatatttaaaactaattttaattaattaaaaattaataaaaattaattttattctgatatttagatttttaattgaaaattcagattgtacacaaaattctacaaaaatttgaattttgtttcaatgaaaaacaatttttgaatcaaaagttatgttgaaaataagtttggtgcacacgggtatgcattgcatacccctgcgcgcggaacgacggtgatggtcgagacaggaggctgcgtgcaccctctgtcgccgagaaacctcggcgtgaagagagacaagctttggacatgcccctatctgaaggggttttgtccgagcaacccgcacatgtcccccatgcgcgcgcgtatgtgcagccgatttcagatattttcatccaaattcaaaaaatcataactaattcataaaaaaa

SEQ ID NO: 346522 - DNA, 817 bp, Cannabis indica
taataagggcatgataaatgacctggggtttgatcctagtcctcttctcatatgattaggtgaaaatgttttgatttctcttgaagcaagccttgagcatctctcttaaaacctcatcaggtgtgttccaatcttgacaaccttggtcgtgtcgattatgttaaggggaagttttttgagttcctcagtcagaccaactcctaagttaatttccctaaaatggggtcaatgtcctccccgtcttggccgcactttcaagtggttttaggttgtctctttcttctacatagttttgcataccataggtcgttgtcatctctctggattttgcaaaagaggtcttgttcgttcccctagtgccaaagtagaagaggaggtcttcttggcaagagataatgaagcgttataacactcgtgggaagttccttgattgccaaggaaataatagataccagctgccattgggaacttgacggtcaagtggtatattgacgagatagctcaaaggtcgtatagggctagcctttcgagcatcacattgtacggagacttcacatcaaccactatgattgttgctgtaaagaccgcttagtttaatttggaaattagcagttaatcacatttaattatgaaattatttatagctatttaaataattatttatattattattattgaattcagagatgcatttttatgtcatatagtagttttcataattttgcattccggtgcccggtattttggaactcggtgtttggctcagtgaaaatcacaacttagtatgttagtagtttgggacggtttattagacatt

SEQ ID NO: 346523 - DNA, 545 bp, Cannabis indica
gtgacactaccaacgccagctgatgccccccgccagtacaatgtcgaccccacccaatttcttgcagatacgcatattatgacacatgtattgggtgagcgatcacgccacttgagaagagtcggctcgttgccaagacttaaggagggggcaaaaagagcaactcccatgctaggtgcatccgggcataccagtgtcactcaagaggaatatgaggcactgaagcgaagggtgtaagaacaagaggcacggaacgagtggcaacaacagatgatgatgactcaaaatcagatcatgagtgtgttctaacaacaaatgatccaattggtcggcgttgttccaggatttaacatgccgaatctgccttcaattccaccgattccaccattttagccttctggccatgcagttggttcctcctaacaggctgcccctctcgctaatgaggaagatgatgctgttgatttgtagtttttttgactttacagtgtagatattactgtttatgaattcaaatatttttacttagtttatgacgtttaata

SEQ ID NO: 346524 - DNA, 618 bp, Cannabis indica
tgataattttgtttaccttggagaaggagagtatgatattgatcattttgtagattctgtcacttatagtgaagcacttaatagtccataatcttcaaaatggataaaagctatggattataggattaagttcatggacaaaaaataatgtatggaagttagttctattacctgatggtttcaaattaataggttgcaaatggatttttaagaactaaatggataaaatgagacagattgaaaggtataaatcacgtttagtgacaaaaggctttactcaaagagtgtattgattacattggaaaatttttcacttattttcactaaagattcattcagaattattatggatttggttgcgcactttgattcaaagtttcatcaaatggatgttaaaactgttgtcttgaatggagaattgactaagcaaattttttatgtctcaacctcagagcttggaggaaaatggaattataatttactttgcaaattgaaatgatctatttattgtctcaaacatgcatctcacaagtggtacttgaattctgataaggttataagactgtttggtttcatcgagcaagtttgactagtgtatttatatgaagatcagtggga

SEQ ID NO: 346525 - DNA, 633 bp, Cannabis indica
aaacaacatacaaatctctcaaattatcacaatcacaccaacatgcattaagaacataattactagcaaaacatgcattaacacctttaatttacagcagtaaaataaaaaaggaaagaggtagaagctacctcaagctctttcacaaaatttaagcaccaacttcttcaaaaatcaagcttatccgaaggtgaattttcaaaatttaacaaagcttgaggaaatgagataaagagagattgaggggatcggtttagggctgatcaaaactagaaaattctttctctattttgtcaaaaattctatttattgcaaataaaacaaatagtcaaaatacccaaaatgcctctagggccataatatagcatatgcacaactcaagggcataaatgtcattcaaccacacaccacacttaaataattttcagaatattcaattatcaataaaattccaatacaaaatcccgaaatacctgattgtgactatatcgtgtcgacttgtcagaaaatacctgcagaaggataaaacaagtatactatataataatataatataaatacacaacaatattaaaattacagttttacccttctcatgtcaaaattatagaaatgcccttagctcaccaacgg

SEQ ID NO: 346526 - DNA, 557 bp, Cannabis indica
tctggttttttttctttgtgttttaataatttttagcaattttgttagcaataagcgagtgtgttgaaggttagagatgacatttcacgatactctacgatgctgatagcgatatttaacgacaagagagtgtattaaaggttaggaatgacttttaacaacaagtagtgatgtgtagcgatgtattttataatatgttatacgtttgttgtctgtatatgattttggcgatgcttatcgacattatttgcaatatttatcgatatatttagaaaagagtgtttggggaagtcagaaatgacatttaacaacaagtagcgatgtttggcgatatagttgccgatatgttgcaatgttgcgtgcgatatttcatgaaatatttgtgatctaaattaattttttgttcatttttgtttgcagattcaactgtctttgtagttgtactgtatgattgggtttgggcaattgaaggtttcaactagatattcaataacccaaaaagtaagatgatgtttgagactgacactattttatagaagatgcatgaaattttatat

SEQ ID NO: 346527 - DNA, 531 bp, Cannabis indica
actggaactaggacttggacttggaatcataactgaaatttgacctagatccagaaccgtaaccgaaccagggtccggacaaagaactgccccccaatcttgatcccgaacccaaacttagaaattggacctcgacctgaacaagaacaagacagtgatccagatcttggctcgggattcgggtaactgggcctggaataaaccaatagtcggtgtctagatatgagactcagactaggaccagaacccaaacgaagaaccaaacccgaacctagacttagacctaggacccaaaattagaacctgaacaaaaattactgaaccaggaccctcgaacaagactaggaccgtgaccaggaccagaaccaaaacctagaaccgaacacacacctagcctcagacccaaactgagactggaactcaggcccaaacacggtcgtgtacctagactggaactaagacccggacctggacctgaatcttggacccaatcccaaacacagagttggacctagatagggatccagatac

SEQ ID NO: 346528 - DNA, 711 bp, Cannabis indica
gagtttcctctctcgttacaatgcgcataaacagaaagatcgtgtgatcaatgctgaatgcaaggatcgtgggattgaggctgaatacactgatagtgggatcgtgtgtatgccacatccacgtaagttgatccctgagttgtagggattgagctgatgactcatgatgcgtcaagctgaattcgctaagtgttgatcaccctgcacggctcgttgaatatttcattctggatgtgccagcgaggcgtcctgctcggctcatcgttccgagcagatgctccaagtggagtccatgtgtcaccattctcgtgatgccacatcagagtgccaaatttgggataacaagatccattgacaaaaaaaggatattaatgacttgtgaaagtttaactgtattgtattctcgaaatataaatataaaatttctatttggaatcttaaatttaaagtcaaagacttaaatttataccaaatatacaataagtaatgattctagcttggacaaccactactaatctaactctaagtctaatctgcctaaagtaagcatatataagtaggagattctaagatcgaggattatatcatttcgggattatagtcatttgtgtcattcaatttcctaaaagaaaataggatgacattataagtcagatgatttataaaaccattcatccaaatgatatactatgtaagaaaaattcaaaaatg

SEQ ID NO: 346529 - DNA, 558 bp, Cannabis indica
acctcaatcatagattggaagactgtgaaggatcacacataaagagaaggacattcgggctcagatcttgataatactctgcggcagaaaggatacaagggttagagatctgagtggaaggagacattattccgctgccatcaatgtaaggttttcttaactttatatgtgtttatttatcgttttagaaagtttatatttagggtgttaaacaacatacttataattagatctaagatcctggtaaaataaattctaacagtcaaatcaaaggtattaggcaaaggtaccattgatttgtttttcacctcctgtaagaaagtcacattgatgaatgtgcttatgtgctcgacatgaataaaaacttgattattggtgacttactttgaaaacccaggctgtttatgagtttggtaagctcatacttaccaagtctgatgtattttttgacaagggatactcttgtgagggaatggtgaaattgtgcaccaatgatgtaacttttagttttagcaataataaagcatctagttctacttatatgattgagcatgattc

SEQ ID NO: 346530 - DNA, 743 bp, Cannabis indica
atgtatttatattttatgcaatagatataattctcttttacatttagtttctaagttagttattttttttcttgtataagttaaaaatttataattttgtgtgtttaaactttctatgttattcctatctcataatttttattttacattaaatatatatctctaattgtatttagttttttttttttttttatttttcttccaaatcatctttttaaaaaatatacctatcaaacataaataaattatattatatattttatacaaaaaaaattaaaaatatatatgtgaaatttgattagaaaaaaaatatacataatttttaaaaatatatgaaaaaaaattaatataagtactgaaaaaaaatattaaaattaattttttaaacattatattaagtttatttttaaaaaaaaatattaggatatacttattattttgtggactgcaaatagaacttccttatctcatatcgagggcgaagctagaaataaaactgaggtgggaagattacatatttttatatcttgtccagactgtaaaatttcaataagaattatagaattagatataataaaatgtaattaattatgttaaagtgacttttatagaatgacattttatattttcatcttacacaatttttatgtagttcaaatcctaataatgatattttagtctttttcaaaaaaaataaaaataaaaaaattaagatgtggagtgttgaatttgtgacctcttac

SEQ ID NO: 346531 - DNA, 623 bp, Cannabis indica
cttttctgaggaagttgaagaaggtaaagaagagcaaggagctcttcctgaggaagttgaagaaagtgaagaagagcaagaagttgctctcattcgcaagcgcaagggcaagatggttgcctaggaagagcccaaacggcagcggagagctgatactccgggccctggtcttgatggcgggatctctcccgaggtggagaaacacacagcctctcccaacattgtgttgactcctattcctggagatgaggcgaggcaggaactccggatagctaaacacaactacgccatggatgagtactcccgggggcacgctgacgtggaggctctgaggagggttttgcgagttgaaatgcaaaatacccttaacgacccaaactacaagaatccgtgggatctaaacttggaccccatgtcggattggttcggtcgcttcctcaggcccacactagctcccttggccgcggagatgaccagcgagtttgcatctcagcttacccggtgcgcacccaagcggttcgctgcttgtgcatccttgaactccatcttccaagttcaggatctcagccactccctcaccgtggtaagtattttgtagtttacttttttcctcatcattttct

SEQ ID NO: 346532 - DNA, 729 bp, Cannabis indica
atctgaacgaaatgagtcatatgattctgttgcaaccaatgtaaggttttctataaacatttatgtgttgatttcattattttagggaattcatatttaggatgttagattatagtgttataatcatacatgttagtaaatcgagatactggtaaaataacatccaacattaatgacttaggatctaatttggtgacatgtagacatacatctcgagcaaaacaaatactgccaaatacttaggagcaatgggaaacaatgacttagtaggaaaaagaattttaaatgggatctcaccattaaatactgaggatggcatatgattaataagaaagtatgttttggaaactgcatcgacccaaaaaggtctaggaactttcatttgaaactagagggcatgtatagtttcaataagatgcctgattttgcgttctggtacaccattttagggtgcagtaacaatgcaaaaagtttcatgaatcatgccattagagatcatataagagaaaaattacgcagatgtgtattccttggcattcacttcgcaaagtactaacagtcacattaaattgattttgaatctcacaaaaagcacaaaatatagtaaataacttagaacaatttttcattaaatataaccaagtaacatgagaataattatccacgaaagttgttgggaatattttaccaagatctagatttactaacaagtatgttgaattaacatcc

SEQ ID NO: 346533 - DNA, 752 bp, Cannabis indica
aactcgtctattcgcaaatggatcaaatccacttgccttgcaccaagttgtggcaagattagattttttctgttcaagcattctcataggtcggattggacatgacagcttacggttgtcgttccacccatagaccgtattcttccttcttgatcattgttacaacgagtattctctcctcctcacattgattgagtataggttatcgtgtgcctcgtggtaatactcgcctcatcacgcctcgctcttctctcttaggtatcattcgtctcgttccccctattgagatttgtgcgagctcctttcctataagtatggaaagaacgttggtaatctcttaacgatgacccatgtaccccaggtcgtgtccctagatttcccttatttctacaatgaatttttggttccttggttcctggttgatcatttggcatctcgtcatcaaggtatcccccaatttcccaaggttgtctttcctgagcattctggggattcctttgggctgactcctgccccctcattcgcgagtctcgaggtttgcctcgcggttctctctctccaggttcaggtttattttgggagctattcccttatgtcgccctggctgcagctgcctcacgctctaattcagcattacaccggtttgcctcttccaatcgacgcttgagatggagattttctaattcaacgatttgtatatactttgtcgaatcacaggtgccattctcatcaactagattgggaagagacct

SEQ ID NO: 346534 - DNA, 560 bp, Cannabis indica
aagaatggcaaaatttagcttttgctgaagaataaagtgcatggttgaaaactaaatgcaagtgggccaaagagggtgatgctaacttgaaattttttcatgacatgttgaatgcgaggaaggaaagcaacacaatttcatgaattgaaagggtggacggatcgtttatcgatgaagaagaatatgtggttgaagagattttttttaagacagagaagtattgaaggaattgagtggaaattttttttgaattacttggtgggacaactagaaagtccttttgaagaagatgaagcggtctttaggtgtgaaggtaggaagactctaggtcatgatggttttagtattgcagtctttcaagctagctgggaagttattaaagagattatgatgaatgtcttcaaatcttttgaggaagatggaacgattcaccataaccattgatgcaacaacttagttatatggaacaatggaatggacacggaagaatggaagattgataagaatttgtaaaagtatgactgtaggggatttcattgtccgaatggacatggaagatt

SEQ ID NO: 346535 - DNA, 526 bp, Cannabis indica
agtgggtatattttaaaaaaaatgaaaatggaagtaaaaatcaaaacaaataaagtaaagtaggtatacaatgtaatttcaccttagtgttaggaaagtatcgaaagtgaagttaattaagatcgagttttatgggaatatttcctcaatacaaacaaataataaaaagaaatacaaaaacaaggttctattgatttttaaatatttttacattttttaagattttatttatagaaaatatggtcttttgatatttttatgttgtacttttgttattttgttgttggttttctattatatgtatattatttttatgctatttgaattagggctgaacatcgggcgggtttatcgggtttcgggttggcgggtttcgggttggcgggtttcgggttcaaaaaattgaaaccgaacccggacccgaatagggcacgggttggcgggttggcgggtttcggttggtcgggtttagcgggttggcgggttgacccagtcaactcagtcaactcggtcaactcttaaaaaa

SEQ ID NO: 346536 - DNA, 566 bp, Cannabis indica
aaccaaattacaccaaaaataaagaatcaaaagaaaactagcaactaaaaaaaacaagaatgatgagaaactcctaatctggctccaactcagaagctggaagcacacgcccctcaaactcttcgaagattatctaaaagccatgatctcagctgtgtgatgctagtagagcttgaactaacaaaactaaatcatatatatatgcctcagataaataagcacatccttccaactaacaaaactaacatccaatcacacaccttatctcaatctttcttttcttttcagctccaagtcacaacagacttatggtctgaccagttataaaattagattggcatgtttctgcacaaaaatacatgagttatatgtcaattcaagcaagaaattagaatgaaggttaatactgctaagattggtattcaatttttgtctgatgacaaataattgtatgaagattaatgcagataaggttatacctttcaggataactttccagaccatcctctgcaacatggatcgactatagaatcatattgttctctgattgtcgtgacaacctcctt

SEQ ID NO: 346537 - DNA, 505 bp, Cannabis indica
atgtatcatcatctgtgttctcaattgccatatttcaaatctagcaatatgccatagcaaaaattatcttcctgtgtatgtaagtctaaaattctaagttataccaacaattctacataacctcctatcaattaatttaaaaatctcaattgcacttgcagcaaacaaaaacagtgttttggaatcatcactgaaatcataatcaattttaaagtcatgccttctcttgtaaacaaatttccatgtacatataacagtatgttgtttatttgtatctggaaaataaatcacttctttatagcaaagtaatgtaactcgtatattttggtttataataataaaaagcaagtgcagaaaatattgcaacccatattttatttcatacagtactcagaagttgaaccaaaattatctagaaaaatttacaatatgatttgaggaaagacgcacatgggaaacaaacaagatatgataagaacctgctgcaaaatactcaaaccaatag

SEQ ID NO: 346538 - DNA, 1628 bp, Cannabis indica
caaacattgaaatagggaacatctcggtaagtactctcactggccaacttgtcaattaagttcctctaacatttcatcgtgcaagaatccataaaagcgctagtacccatggccttcttggcgtggtctcccaccattcttcaacggtggcctctgcttcgataagccgcgtaagggtagccactacataatttcaaaagcggacactaagttgtaagcttttgttacacattagaccgaccgtgtctaaaccacttgctcacaagattaacttcttaaagttactcttttagttccatatgcatactatggacaccacccctaggaagaacccaggcaaagtttatgaaactttgtgaatagcaagtgacaaagagacttgcatgcatggtcgcttgaggggtgcccataccgtacaatgcatcgaactggcacaatgaacttattctgagaaattttaaggcttaaaataagctactaaacctacctctaagtcgtacaggcatactttggctagacaaagtaaatccggacccttacctttcatggccataagaagacagtcaagacgatcatatgtccgtcatagatggctttaaggctaaataatagtagtgttcaaaaacaaagggcctataggccaaagcaagaacatgaaagccttgaggccagatatgagatcggttcgcatgcatgaggcaaaggccctactagaaccgcatagctagaaaagaattggacagagctcctatatgggccacgtactaggctacggttaaggcagagttccttataggaaccaagccatgttaggaaccaagccatgttgagtcttaagttgaatattcaactataatagactcaccattaagaatcatacagagttaaggaaaccacatatgaggctaagttgtatatgcctatagagctagattcttgccaaagtcaagagaggacagaaaacttgccacctacttggaaccaaggcccatgacggccaaggttcgcaagccttgcggccatggtcccatgactcagccaagagctggctagggtcatcaaacccaagcatgaacaggcaagctttataagggaaaatccctaaagctggccaactcccatgatcaagaattatggttggccaggtctcaagcaagacctcctaggccgatcaaggtaagttttgaattctaatgtgtgtctaaaactcgattatgagcctcgtatttcttatgactcaaagactctagaattatagcgaaggccaaaatcgaatccttcttatataaaagtcacacattgcacattccaaaattgtcatgaggatcaatataccaaagtgattacaaactaacatgaatcaaaaagtttccaaaagcttgaaacttgttaatggcagttacaaagaagcgatatccaagaaaagaagatgaggtgtatataaatagagaagatcaaatatccaaagcatgtcagccaaaaagccaacacttggctagataaggttactcaacaaagactactacagacaagataacagctagaaagtctctatccaaccagacatttgaacagggacttggggggaaaatgttatcccaaattttgtccacctgacgtggcatgtc

SEQ ID NO: 346539 - DNA, 297 bp, Cannabis indica
gtcccatagtataccatgccaggatcacctagcatgaatggtgttgctgagagacaaaataggactcttaaggatatggtaaggagcatgatcgctcattctaccttacctgagtccctctggggagaagcattgaagacagaagcttacattctgattagagtaccaactaaagcagttgcaatgagaccttatgagctttggacaggtcgaaagcctagtctaaagtattttcacatttggggatgtccagctgaggcaaggccttataggccacatgaaaataaattggactcc

SEQ ID NO: 346540 - DNA, 646 bp, Cannabis indica
tttttgaaatgtgtcataaaatgttctttttcttactaaattaactaaatattttttatgtttgaataaaatacattacattacttttataaacatattaataattgtttaccgtaagaatttattagctcaactttagttaaaaaataaaaaacaacattaacactacaacaaatttaggtattaagggcgatttttgtcgcccctaataataatgaaaatcactcctaataattattaggtgtggtttatcgccttaaaaaagtcacctctaataattcactataaattagtagcaaaagtattaagtgattggttttgctataattaactattagtatattaacaaaatttgtaagtaaaactattttatgaaaataaatacatatgtaaatataatttaaattaattcttaaaataataacaataatttaaatgaaaaattaatatttttattaattattaatattattttattttttaaaataaatatataattaactattattataatatgtataaagttttaattgcatacaagcagtcctatcgtaatagtatacaccatatattttaatgatcacatgatctaaaatcaatggtcaaaaattttttcctaccgttaggaaacttatgttaagtccta

SEQ ID NO: 346541 - DNA, 550 bp, Cannabis indica
atgctctgagattccaatttgacgcatcaaataacgaggctgaatatgaagccttgatcgctggcttaaagatagcagaggccttgaaagtcaaaaatatcaattgtcgtagtgattcacagctgatcgtaaaccaggtccttggggaatactaggccaaaggcttaaaaatgatgaagtatttagagaaagttcaaaagaacttggaaagatttgattactttaaaatcgaacaaattctgagagaacggaacttcaacaccgatgccttagcaaagctggcctcgcaaaatgacctggatgagctaaatctggttcagatagaaatgctgagcgagccaagtatatgtgaaactgaagacgtcgagatgatagatagctctccaaatggatgacgcctattatcaactctttactcgataggaaacatccaaatgacaaaaacgaggcgctaaaactattgtatacagtgccttgctacacaatgatcaaaggcaaactatatagatgagggtatttaatgcccctacttcggtgtgttcctcccgca

SEQ ID NO: 346542 - DNA, 803 bp, Cannabis indica
aaccatgcaacataaaatgttatttctgatctttattaataagtaaatctaattatatgaaatgagttttatttagggcataaaacccaacaattagagggttgaggagcaaagggtccggtaaagttatcattgagattcaagaaggatggaaaattgatggcgtgaccagtaaagttttggggaggtaagttgagattcacaggttgataattcatcatgtttatggtagggggtgagggtattgaaaaggttgagacttgtcagtgattttttccttacctctaaggagaatggtataagggtatagtggttcagagaaaagctcatcacacttttgaagaaaagcaacacaatatctcttagtgtgatcaagctttccacagaaaaaacagaaatctggaagtctttcatacttaaaatctaaccatttgacaaactccctgcccatacggatgaatttgatattcattcccctccttaaaggcatattgacatccagaaggatgcgaatacgcatgtaaggaccagtgccctcattaatggtgtccttatcaatctcaataagatcacccacttccatagcaataaacctagctagatcatgagacttacacataaaagggataccatacacttacccaaaatgggacataatgcaggttatcaggggtaagagggaaagtgctatcagtagcagcaaatatggtgatgctctgagcaaaatgccagggctgaccatccaaaactctacccttatcaccctcacagccaaaagtgacaagaaacatgccatcagcatg

SEQ ID NO: 346543 - DNA, 1910 bp, Cannabis indica
attattggtaaaggacatgaatctggcagcctgaatgtttttgatccactaccctcaacccctattgcttgtttgagtttcgcttccgattttgaggttcattgttgtttgggtcatccatccctttctttgctcaagaaactttgtccccaacataagaaggtgtcctcattagattgtgagttatgtcagtttgtcaaatatcatcgtgttagttttagtccttaagtcaataaacgtgctagtgttatgagttagttcattctgatatttgggatccttctcctatgttgtctaaacttgggttcaagtattttgttactttgtgggtgattattctcatgtaacttggttatttaactttgagtaattttttatattttgtgttttttgtgctaaaattcaaaattaatttaatgtgtctattcgtactttgggaagtgataatgtcaaagaatatacatctgctcaatttcaatcttatatgatctctattgacatgcttcatgaaacttcctgcgttgatactgcaccccaaaatagtgtagcggaatgtaaaaataaacatcttcttgaaactccatgtgccctcttgttttaaatgcaacttccaaaatctttttgggttgaagcagtttccacaacatgctttcttatcaatcgcatgccatcctctgtacttaatggtgggatcccatttaaaattctttttcttggtaagtcattatttccagatgctcttcggatatttggcagtgtttgttttgctcgagatgtttgtccacatgttaccatttcagatcctaagtcattaaagtctgtctttcttgattattctcgtcttcgaaaagggtataggtgctattgtcctgatcttaacaaatatcttgtttctattgatgttactttggtagaaaatacacttattttttgtctacatctactcctattgatgtaacaaatatcttgtttctattaatcatttgtcttcttcttcttgctcatttattgcttctcttgattctttcttaaaattgttcatgaagccatgtctcatcctggtgagcttgctacaataatagaagatatgaatactttaattgcgaatggtacttaggacttaattaactaaccttcaagaaatatttgaaaaatatatatatatatatatttaatttgaaatattttattaaatatgtaattatatgaatattagagtaagattatagtcttactggagtcaattatgagataaatagtgacttctgagtaaatgaataattaagcgtaatttattaattacaaagattttattaaaatatataagtattatatatactacttttaaaataaatatttttgtttctggcgaccatagaaactcgataaaatagccaaggatgtcacgacggtaatagaatgagttttattgagattgtatcgaattgttttagtattcttgagttgtcaaattattcagggtagatagcattgaccaaaatacccttagagtataaactaacaagtgtttaattgagggtaaaatagtcatagtgttaagatttattattttattgtatttgatattctagtaagccataagaaatagaatttaatttattaaagttttattagattactattattagaatagtaataaatgataaggttattagcaccacattgaatcgctcaaacctgatttatatttaatattaatttgtaaatagcggcataagtacctaaagttttatgtttgtaaacggcataaacccaatgtttatttttagcggcataagtactcaatatttgtaaaaactgtaattttcttccagttttggagtacaaactctgttttgaatttattaaaagaacatttgaaagtaactgatactatatatttctatcta

SEQ ID NO: 346544 - DNA, 895 bp, Cannabis indica
gactaattattttggccataaatctctcgatattgcttagaattagacgattcaagatgtttcgaaaagacaaaagagagatctagaaattttagttttgactttttcaaaaatctgatcagaacatagtcaaatttaagcttgaagttttagctttactttttgcacaattttttctattttatagatcatctttttcttaaatttgaccaatttatatattcaagtgttgtaacttgaaattaaagaaaacaagcataattttattccaaaaagtgacaataaagaagaaaattaactctaaaaaaacataaataatagactaaaaatatcctaacaaatttcctcaaactacatccttactcgccctcgagtaagactaacaactaaaaacaagacaacataaatgaaacaagtcaatcaatcgaaacatgagcaatttttaagtaagataaataacatggttatgaacaaaaatttcacatataataatctagaattttaaatcaatcacaccctcgattcacctcaatcttgtttaattcatgaaatcataattagcacttaacttacagttgaaacaatttatgcatgccaattacaactatcaatctactatcccaaaaatatctcatatgcttgctatacttactatcatccactaatataaatcaatgtacaactaagaatcaaaaggtctttctagacttgtaatgttaggcttagctacgggtagatgaaatggacatttaggctcacctataccataagtttctctaatcaattcatcccataaaataatctcgttatcccctttcattgtaattacatgagagattttttttttaacagtattgcaacaattttatttttatttatttttttcctttttttt

SEQ ID NO: 346545 - DNA, 552 bp, Cannabis indica
ataaatcaaataagagagtgactatgtcatatggaacgagaagaaacccaaaaaattttctatgatcgacagatttcgaaaaatcatcaaaaatatttttaataattttttaactacataattatcattaaaataataataagtattaaaacgagtcaaaaaattaattaaaaatcatagaaaaatcaaaaatttaattttaagcacgctggaaaaaaacacgtcaagaaacgacgtctcacgtggccccacacgcccccacgggcctcctgcgcgagtgggctttgtggctggactgctccttcaacctccagccgggtctgaaaaacgggtcacgcgacccggttcgtccagtcgggtctggtctgattttttccgaccaaaaaacaacgaaatcacgaaataatgtgtgggtttcgatcgagattgaatttctaattgatctacggtactaattttgagtattaaagactaaatgtgtagatctattgctaaaatcaatccaaaaattgaagaaattaaaaaaaaaaattgattgtgttattaattctc

SEQ ID NO: 346546 - DNA, 299 bp, Cannabis indica
tttttttttttttgaatatgaaatagcaacttcattgaatattagcactcagaatacaagagggaagttaactcatcccaaacattatactcaaaaatgctacgaccagagagaaaacaagagtgccttggaacaacatgggcaactcgatttgctgatcgtctgataaaacaaatcttaacattatttagagaagagaataaatcttgatagtcatgaataatcaatccaaaaatagaattcaatgattgattactacgaatgccttgcacagtgagcatgctatcagtctcaacctc

SEQ ID NO: 346547 - DNA, 508 bp, Cannabis indica
tcgccgcaaattgctcaaaaaatatatataagatgaaataacataacataaagataatgtaaaagaataaaaggaagtgatattaaaaggaatgccaaaccaactcttttcttttgttggtcattctatctctgagtagatgtatgtgtattcttggtagatttgcaattgcattatatacaattgctaaccacaatctcaaaagatgaaaaataaagaaattaagattgataaaaatataattttaagttatatataattatgtttagcctattttgtttttaatatatatatgtctagcaaaaatttataaattaaaaaatggttatatatacacgttcatgccaaatatcttagttatatatattttttaatattaattaattttttaattaataaaatattaaaaaaaaataaaaatagagtcaaaaagctaagaaggtgtgataatatttttataaaactattaaaaaattaaaaaataagataattaaggagagaacaaata

SEQ ID NO: 346548 - DNA, 453 bp, Cannabis indica
ttgagggaaacaaactcctcagcaaagatttgtggtggaccctcatcctcactagcatattgttgtggagcatacgcctgatcaaccacctctcattcttcctcttgtttggcaatgtttttcttctatttaagggattggatttcggctttaatttataaatctccttctgttgccgagccacaacatcagaaacttccattttcttcctgccgaacagtttagatgccctggtcaagaacctgcaaaacatgaagtacaaattagttatgattttttttgtataactaaagaaacaacatttcaagtactagcatacccagcagctgtgacacgtccaggatgctctagtgtcccaagcgcctgcgtcaggatatcattttggccctggacttgaatttgtccctgagtaagttgctcctctaattgagcctaatgcacgcatatattcaa

SEQ ID NO: 346549 - DNA, 612 bp, Cannabis indica
aaacccaacaaaaagtagagagtatgcatcaacttcaccaacctgaacaaagaatgtctaaaggactactttttgcttcttagaaccgactagcttgtagatgccatagctgaccatgaaatcttgagtttcatggatgcatattcaagttacaaccagataaagatgcatccacctgatcaggagcacagtagcttcatcacaaagttaggcctgtactgctaaaaaatcatgccctacaagttaaaaaaggtaggggttgcatatcaaaggcttgtaaacatgatgttcaaagatcttattggccacaacataaaggtgtatgtggacgacatgcttgttaagtcaaaaaaggatagggcacatgtggaggacctagacgaatgctttaaaatcttctacaactacaacataaagctcaaccccctcaaatgttctttagcaataggctctggaaaattcctttgcttcatagttaatgccaggggaatagaagaaaacctagacaagatccaagcccttttggatatgaaaatacccaaaattgtaaaaaaagtacaaagcctaacaaggcgcattgttacattaagtagattttgttggaaattattt

SEQ ID NO: 346550 - DNA, 692 bp, Cannabis indica
ataaccgagctttcaataagtagatctagaattcaccaagtaaattatgaacttattaattctgtcttgcgccactatagatttggaattgaataaactcttagttttatagaacgctctatatgtaccatggtataaatatgttataattatccattgttacaatcctaatagtcaaagatcctctatagatgatctacactgaatagggataaatttaccgttctaccctttaatgtattttgtccttaaaacacttagcaacctataaatgatatttgagtaaactaatataattactaaaaatgatatctcaatcatttatctctattcagccaagctcgaaggaaattattgtttgacttctaaatatctatagaagctatagattccatatctatgatcagtgctcttactcaattgaacttccatgttcccaagatgtaagtatccaccagaaccaaaatttggcttccacgaacaactcaaagaacataaataatacaactgtgctgaacctaaccatctgatcagtagactttctagcactaaggcaagtctagaaacctgctttggtgtagtctaagagtattaaaataccacccttatcactaacatatagttcgtcttcatgatcttaagatttacttgattttattccaatgttcttttcttggattaatctggtacca

SEQ ID NO: 346551 - DNA, 688 bp, Cannabis indica
tgacaaagtaacagcctatactcggtgcgctagtcatactctagccttatcgataaataacatggcaataccctaaataacacaaaaatgggaagaactagggttcctaaatttttcccaaccggtagaccggttctacaaccggaattctgattctgggaggaacccaggacaccaactggaatttcagttcctataggccatactaaaccggaattccggttcagtgccggaaaccttaaaaatttcatttctcacacaaaacaaccccaaacttcatgcaaccttccaaacctactaattagaccctaatgaacaattccaaagcaataaaaccaagctttaatcacagaaacgagtttcaccattgaaggttcaagatcgagttcaaaaactcaaaacttgactaacccttcaaacaacccctaactcatgtattaaaccacataaaaactcatatctaaactgctgaacacaacaacaataaccacagcagctacagcaagcaaaaacaacatatcacccataaaaacccaagttttagtgcaaaactccatacttgcttaaaatcaactaatcatacatcaaaacctgctctattctactcaattaaacatatttaaactcaagaagacaacaataaacaataactgtaacaccctaactagcataggcgtattacgtgatt

SEQ ID NO: 346552 - DNA, 689 bp, Cannabis indica
tccacgagtcaatcttattcatatttgatttgatttttaggcctctcgtgtatgtagtttttttcccctttttcatcttgtttgccattatttaaaattaaatagtggccagtaaattacaaaagttgacaataatttttacagcaattattcccttaaatcatgggattttattacaaattaggctaagtaaatgcagattttatttataatccacacaactgtgagtatcctgctttcattgggctgagatgaatgcatatttagggatatacggtaagcattatctcatggggatgcttcgctaggtattgagccaagttaactttgatggcgagctgtggctcgtcatatgacttcccgaaatcaatattgctttaattctaataactaaattttctagtgtcgagatgatctttctcgtatgcatgccatgttcaagcgagatagacgcctcgctgtctgtcatcttgatccaccaagctgtttatactttgtttgtataccatataatctacgctaagtgtttttatcgttattatttctcttccacgtgatgaggttgaggcatcgtcattcacagttgcactcacatggtttctcgttgatacataagttagcagtttgtacgtttctgtctcgcagaagactattcagccagccgagttataaacgtactctgcaaattg

SEQ ID NO: 346553 - DNA, 641 bp, Cannabis indica
atgaaagccgagcaatggctaaaagtgattaatagaatcttgaattttatgggcgtcactggtaatgatagggtggcctgtgccacttttcagtttcaagaagatgctctggtctggtgggacatggtgtctatggttcatgatgtgacaactatgacctgggaaaagttctaggaacttttcaatgctaagtattacaatgaagcagtcaaaagtgctaagagaaaagaattcacccaactgactcagaaagaaaacatgagtgttacgggagtatacaactcaatttgaccgtttggcgaggttggcctcgggaattgtgccaaccgacttcagtaagaaagagaaatacctagatgggttaaatgcgaagatcggacacgacttgatgatcactaataatgacagtaccacctatgctgaaatggtggataaggcagtgcaagctgagggcgcattgggatgcatagtagagtctcgtggaactttggttgtttgcggggctcctacccctcctgcatcaggttttagcaagggaggtagtggctcggccacagatcagaaaagaaaggcatctactgcaaccagtggctcgggtcaaaacagaggttccgggggaaccagggtcgaggcaatcgtca

SEQ ID NO: 346554 - DNA, 731 bp, Cannabis indica
caagcctcttatctcaaccataacggctttcccttttcctagaacgggagaaggcggccaagcaggtgaactgggctccctaatgcaaattgcatgttcaatgggccttggctgggctggaagtttcttcctccttttgagtggagtcgcctgctcttcgtcagcttcatcttctggatttcagggctcctgagcatatttcttggcccttgcacctcccttcaacttagcctcactcttaagttgaaggagttcatcctcctgatgagctctctcagctcgtccagcaccagatttccttttcctccccttcactggcttaggaatgaaatccttcggatagagcctgtacttcataaagttatcctcggatgtcaactggatgatattatggtcatcccccgccagttgagcaagctcttgagctctatccctaagagtaagagtgaggggaaggcggtgatatgtagggatctgctggaaccaagtgtgggtggtgcccatgccatccaccatgaagtacccatcatcgaaatgcccaattttgctgatggccgaatccccggtgcctgtcaaccactttatctctggttgagagaaatagaagtacgcagacctgccttgcttagggggacttcaaataaaaaaaccagctaaccttgttgggagaaggcatatcccacttctagagggatagagaacaaagatggcagacagatacttaatgccct

SEQ ID NO: 346555 - DNA, 1021 bp, Cannabis indica
agtatatgtgaaaccaaagacgtcgagatgatagatagctctccaacatggatgacacctattattaattatttactcgacggacaacttccaaatgacaaaaacgaggcacgaaaactattgtattcagtgcctcgccacacaatgatcgaaggaaaactatatagaagagggtattcaatgcccctacttcgatgtgttcttcttgaagcaaataaaaatcattagagaaatttatgaaggcttctgtggggatcatgcgggctggcaaagtctgtccaaaaatattattagataaggatattactaccgacgatcaataaggacacacacgattttgttaagagatgtgataagggtcagaggttttcacatgtacctcgcgtaccgccaatagtttttagaatgatgacctcaccctacccattttctatatgggggatcgacctaattggggcattaaccactgggcgaggaggagctaagtatgcggtagtagcagtcgacttcttcactaaatggacgaaggccgaacccctcgtattcataacctgtaagaaagtccttgactttgtcgtcaagaacattatctgttggtttggaattcccatgaagatagtatccaataatggaacccaatttgatggcgacttgttcactgaattctgcaagaggaataagattatcaaaagcttctcgtcagtatccgggcctcaggcaaaaggacaagtggaagtcgttaataaaaccataaaggatactatcaagaagaagttagacgctaccaaaggcagatgggttgacgagctacctcaggtactctgagcccacagaactactgataagacagctacagggcacactcctttctcgctagcatttggctcgaaagtcatgctgcctattgaagtcaacatatcgactcatagaagagagttttataatcaagaagaaaactaagaacttttaaaattatccctagatctacttgacaaaaaacgaactgagtcgcaaatcacca

SEQ ID NO: 346556 - DNA, 1305 bp, Cannabis indica
attttctattttttttttaatttaaaatcaaaattggaaacataatttttatcattttgaaatttttaaaaacacttttttttcctcccatgctttatattattttattttattttgtttcactttcatttttatttttagtttttaggtggattttacacttagtttggtgctttaggtgtatttagagcataatttgaattgaacttttgtatataatttggaggtttgtagtttttgctagattttttattgaattttactacagcaaaattggacatgaacaaatggctttttgcgttgatttggagaagttcgtctactgtagtaattttcaagtaaaattttaacataagtagtacaagttaaaggagcaataaacaatatttttgctggatttttacaaaaatattgctacgacaggtgtaagttaggattctttacgagctgtgaaggaattttcgaaaaaaaaaaacaaaccaaaacaaaatttctcaaataatatcataaccaaaacaatcttaattaccctgaattttctttccgcagaaaattctattttctcatcttcttccttttctgtcctaaccaccatagccaccttgcctctactctcccctcgcctaaaccacaaccaccctgaccaccatttacccttctctacctccattggccagaaactccattatcagaccacaatcacatttctcctctcttctttctgtaccatcaccaaacacagaaattgacctgagcctaaaaaaccctctgcccaccttcactctcatctcatcatcatcctcaacttctcttcacgtgaaccatagcctcatcaccatcttcgcatgaacccagttctaccagtcccaacccgcctcattcatcatcattgtaaagtcttttttttggcaatttagatgccaaaatattttttatttattgtgagatttgcttgtgttaataaaccgattttctcaccttaataatatgtttttttagaaaagtttgtacagctgtggaatcgactttgtagctatctccagggctcctatgttctataaatagaacctagagagcaagcaatcgattcaactcttctagctttcatttttttttttggcatattctcatttgtgaagagagagttctttttgtgagaacctagttgttcatctaggttttagtgtttatatatctgtccctatactgctcttagggttggttagacatattgattgaacaagagaaaagtcttcaagagaagacttattcaagccttacttcgggaggaagtaagcactcaca

SEQ ID NO: 346557 - DNA, 581 bp, Cannabis indica
aatatctcacaaaaagatgatatttaaaatagagaaaattgtgcaaggaaataaagctaaacttcaggcctaaattctactatcttttggttagattttggaaaaagtcaaagtataaaaggtctagatctctcttttatcttttcggaacatcttgaatcgtccgattcgaagtaatatctagagagttatggcaaaaatactatcaatcgacgcaagagaaaaatcacttccaacacgagccgcggcatggctttagcatgccgcagcccgcccccctaaacagtacaaaaatcgtatttttgtctcacctaggtgttgggggtttcctagtttgaataggcattttacctgtgcgtttttctatctttttagtccctgaaagcctatataaagggtgaactggagttgatttcagtcaagcaatctcagagagaaaaaaagtgagagttcagatacaaagtagagagatcaactgcaatactggagacatactgctcagggttttcagcattcttcttttcttctcttctctattttcatctcttttctttaagctaatatgtgtaattgtgctacaa

SEQ ID NO: 346558 - DNA, 974 bp, Cannabis indica
cacatttttaatggtaaattcataacttactataaaaataattgacacaattagaatgatgataaatatctttattcatttattggtgtgaatgattttgttaccgtagtaacttatatttattaaattatgaaagctattagatgatctaaccgatctttagctaattgaaacataaaagaattgtatttttttagactgtacttttagaaatggtcgtccaacctgagtaccagtcactttatctaaacctttgaatgagatccgctcagaaggccacctatttaagagtagatgttcgagcatcgtgcacttggagggggtcataagagataaatggaagagcttttatttcagtgattatattagtttactgaaatatcatttataggaagctaagtgtcttaaggataaaatacagtgagggggtgaaacggtaaatttgtccctactcggtgtaaatcatctatagaggatctttgattattgggattagaacgatggttaaatgctcatagcgtatctatatcgtggaacatatagagtgttgtatataattaagagtgcaattctaaatttatagtggtgcatggaggaattaataagttaggaaatttacttggtaaattctaaatctgcttattgaaagcttccccatactagttgagaaaatattgcttgtaagactcagttaattaattttaattaatcaattataattctcgcataaatgggacaacgccggattgtcatcttgattgaataaaaggttgctagaatgttttttattttagatgagctgactactctattcaatgaatgatatctttgactctcgcctatacgggacactgtatcggtttgttggaaactttgaaaattatttaggattgtatgtttttgtattttcacttgtcattcctgttagtttttatgccctaaataaaactccatttcaatgtaatctattttat

SEQ ID NO: 346559 - DNA, 682 bp, Cannabis indica
tgagatgatgatccctttggtgacgatagaagaatttaagatgtgtttcagtagattttttttgtctctgtttctttttaaattttgttgaatttgcctttttgtttaatctctgtttctttgagaactccagcaaacagattgtttaagatctctcagagagagctatcctgctaggggtgatttaactgaagaagtatgtcatcgggcagatggttataacctaaatgacaggttgtatgagaaaccacttctcagtttctttgatgtactagatgattgaaaattgacaggttagttttcttgcccttggcgtgataacatcatatcaagttgaatactttttttttttctttttttttttcttcattataagcagaaaaacaactacttgtattattaatgaaaagaataagaacatacatttcacaattcttttcccaaatggccttaactaacaacacctttggtaccgatttgctagatgttgtgatgtttggagatgttgcggaaaacatattcttatgtattgcagtttaattaaagttatattcagaggagataaatatataaaatttatacattttcataaataaaagtataataaatcttattactaattatttttacagaaacataggttgtttgtccaaaaaaactacggagaaattatcgaccaaaa

SEQ ID NO: 346560 - DNA, 477 bp, Cannabis indica
aaaattttttagtaattacacagtataattacatccaattcttatggggggcatgagaattggaaagtgtaattggaacccctcaattacttctaattacacagttacactgtaattacatagtcagacaaacatgccaaattgtgtaattacttccaattacacacaaatctaattacattgtggctttccaaacacaccttaaatacctattatgtattttaatcaaagctaattaattaataacaaaaactaatttttaataaaccattttttttattcaaaaatgctttgaatttgaacaattttttaataaaattttgatcaaacacacgcacatcatgctcaatcaaaaaaaaaaaacgtacattcaaccattctattttaaaatagaagaagagactattataatgcaatttaataattttttttattaaaatttttattacacattttaaattttattccattccattc

SEQ ID NO: 346561 - DNA, 550 bp, Cannabis indica
tttgtttttttttttttatatagtatgtaagatattgctctttatatgatatatgtatttctttttattaagggcaatatccacaatatatatttttatacttttttttttaacaagaggcaacatgtgtgataagaaaatataaagataatagatttacaattaggcttgattctaacaaaagtatccctttagtaattgtcatattttcaaatttcacaaatttcgattttaccaattcagaaaattaatatatgttcaaaaatttgttttctcaattctcacttctcacaaaaaaatgaaagcttttaacttaagatttttctcaattaaatgtgttaaaaacaatcaaatcatatgtttggtttgtgtaatttttactagaattactatataagtaattaaatatagtataaactagtctaacacaatattaatttattcacataattagcagcaaaatttgactcaaaattttcaaaaaggtaagaaatttatcaaacttaacgcaagaatatactcagtacccccaactaaaatgagacagtgt

SEQ ID NO: 346562 - DNA, 558 bp, Cannabis indica
atcgaaggcaaactatatagaaagagagtatgtaatgcccctacttcagtgttttctccctatagaagcaaataaaataatcaaagaaattcatgaaggcttctgtggggatcatgcgtgctggcaaagtctgactaaagagatcattagacaagaatattattgaccaacgatcaataaggacatagacgagtttgtcaagaaatgtgataagtgtcaaatgttttctcatataccttgcgtaccgccaacagaacttagaatgatgacctcgcccaacccattttctatacggggatcgacctaattggggcattacccactgggcgaggaggagataagtatgtggtagtagcagtcgacttcttcactaaatgaaagaaggtcgagcccctcatctccataaccagcaagaaagttcttgactttgtcgtcaagaacattgtctgtaggtttggagttcccatgaagatagtatccgataatggaacccaatttgatggcaacttgttcactgaattctgcgagaggaataaaattatcaaaagcttctcgtta

SEQ ID NO: 346563 - DNA, 902 bp, Cannabis indica
ttggttgtcccatcgagggtttcgaaaatgagggctgtaattattttgttttatcttatttatggtgccacgtcacgaaactcttcgatttttgtgtaggcgtgcccatgcctgaccgttggatggaatgaccttaggcattcctgctgccacgtgtcacaatcccaatttatgagggatattggtatttaagttctctaatacgaaatgattctctcatttccttctcattcttaacttcctcttcccctttttctctgaaattttagagatcctcatccatccttcacccagatttactttttcttcctgaatctctaagattcagaagagatcgaaaccaattacagggagcaatcagaaaaactaaaggttagtttctaatccacttgtgtatttggttttttgaaaaatgaaaactatctttctgggttttttgacattttgagaggtttgaaaatgtaggttcatagggaatacacatagggttgtatttttctgtttagaactgggtgattttagaagaaaaacagacctaaaatttgtataactgtgaactttaggaagaacactttgaatattcgcaccttccttacttgtttatttctggaatactcgcgggtattcgtatgaacacgtcgaatactcgcatatctgtctcctttagattttcctagagactttatcatttttacccgttgtttagaacttagggttttattctgttgtgggaatattggttaagtctttcaaatggtgggtgtgtcaccgtattctaatgttcatgcgtgcgatcacatgttccttgaagtactgtgatacacccagccatttgcgacatacgccagttgtaaagcccgcttagttaatttggaaattttcagttaattatgattaattat

SEQ ID NO: 346564 - DNA, 671 bp, Cannabis indica
tttgtactattttagaaaatacagggtccattttgtcatttaacaaaacacatggtccaattggtaacttttgtaacacagagggtccaaaatgatatttacccataatattttaattaaggcttgacctgaattttaatgggcctaagaaaaaattatcttttagactattatttaaaaaaaaaatatatatatacgtggtatttttcaaaatcataaaaaacattatgtgtatttttaaaaaggaaaatatttttttagacacttggactaggtgggctctaggcgcgggtctaactctctttcatgaaaaatataattttattgaaagaaatagaaattttgtgaggaaaaagataaatatatctaggggtgttaattggatcacatccaatatttttaggcttatccagatccaatctaattatatattggatgatagattttaccatccaatttgatccaattaatttcagtcattcaatcgatccaacatccaatggatattagataggattagttctatccattagatgtattttatgtatatctattggttcaatttaggtttatccaaaatttacatggtatactaacttttgtcatttttttacaaaaatactgttaggcggaacttttactttttactgtgttttttataagtttcatac

SEQ ID NO: 346565 - DNA, 1380 bp, Cannabis indica
attttctattcatcttcttttttaaatctgtaataataaaagataaaaagcatgaaaatgctccaaacacgatgaaaactaaattaaaaatatactaaacataatctacacttaatactaaaaataaccgaacagttcccagacgaatttacttcaaatttagaggagaatgttaatgagactgaagacaagatttttggcctaaagtctcacgatttccatgtgttgtttcaacgcttgataacagggggcatgagaaagtttttcaagaaagaaggctaggatacaataattgaactgtgcgtatttttccaaaaattgtgctctaaacattgaatgttcaagacttgcaaatcatgcaaaaaaatattctagacattctttgtaaattagaaaccatttgccactagcatttttgacataatggttcactttgtgatgcatttactaaaagaagtgatacttgggggaccagtgcacttcaagtgtatgtatgtaattgaacaagccatgtctgtgtacaaacagtatgtcgaaaattgatctcaaccagaaggatctatttgtgaagcttatgcagttaacgaagtgttaagcttttatgaaatgtactttcgagaagtagttaacccaatttaaccgacaagatcgaaatagtgatgtactcccaaataagcctgaaagggaattctctgtatttaagcacgtcgtggccaccaattggtaagaggaccatcgttctttaccaatgcaagataaaattaaggaagagtggtacattctaaacaattgtaatgaagtggagaagtagatcaattaagatactttttgcatacttaatatagttatcttcactgacgacattctctaacatgataatatttatgtgtagtgagcatacgagctacaacttaggggtgatcaaaatcttgacaaaattcaagagaattagtttcctagttggttcaagtctcgagtaggtattgctttctactaattttgtcattcaaatacggtttattattctagtattgattacattgtttactcaatgatagatcaatcaactctgagcagataatcctgcagaagtatcagatgagttgtacgccattgcatattcctctaatccaacatgttattgttatccgtgatgtattgttaacggtattaaattctaagtggaggatcgggatgaaaatcgtaacacccaaaatagtggtattttggtgcctggaaaggatgataacaatgtttatagtgtactcaaacaagtgtacgagttcatttacttgaaggattgtagtgttgttatttttaggtgcaagtggtgggacaaaaacggtaacaggacagaaagtgatgatttttttcactagt

SEQ ID NO: 346566 - DNA, 678 bp, Cannabis indica
atcgttataactccctgatcaaaactttccgatgagaaagggatcaaacaactataatatttgatttaaaacctatatgacgagaatggaaaataaaaagttataaagaacatataactcataactcgtgcataaagctgaatgctaacgactcgcgctaaaggaaagtattaaacgagacatcaaagggtctggaaaaagtacttaaacctaacacgtgggtaaaatatctaactactcatgtaagcaataaagatatatacaaagtgacaaggtcattaaaaatatatttgagtttgctaggaataagatcaattctgatgatcacgaggcgatatcaatgactgctcacaaattgagggtagggcaaaagataagctactcacgcgtaaagtaggttattaactacttaacgtcagagagaaatacgagcaatggaaacctctaataaaatttatgcatgtgattatttaaattgtgaataaagcgcaagcaaacacccacatgttgaagtatgaggcatcagaaagcaaagttggccatccaactttgcaaatttgtctttacaaaaaaaaagtgccattaggggcaaaccattgtctcggtcaaatggccattttaaaaaaaaaaaggaaagataaataaaaacaaagtgtacatggtgggagacttggatgg

SEQ ID NO: 346567 - DNA, 611 bp, Cannabis indica
ctttgctgcaaacaataccaataacaatggtttcaagcttattagtgacacttttaatgttgactgcttccccaacctgcataaaaaattataaatcaatactaattattaactaaaggagaagaagtagtgttgaaagtgaatgatcaggtaatgagttgaagattattgacattattgaaagaaatgtgcactttaataatctcattgcatccctgcaacatgcaacctatatgatgatatcattttctgtttatatgctttaacaaagctaatagaagctaactataagatatacatatacatacatatagacaaactgacaaagcaagtactgtagagaatatatattttgagaataaagtgatgaaaattgttgtgtacgttcaagttttaaatgtgatgcaaaagtaatgagataatattttataaaattgataacataagagtactagttacctcaataacaagagtatcatacgcgggagatgaaaaccaaagttgacgtctagtttctttattaagtgaggtactaacatttatgtcctacatatatatacaataaattaacaaaataagtatatagttgatagaatagtaagttaaaaatc

SEQ ID NO: 346568 - DNA, 1030 bp, Cannabis indica
taaacaaagctaccaaaaaaaaaacaaaacgaaatacaaatatctcccccttcattgaatatgagttgttggatcctgttctgtgccaaacttcccctgggaaggtggctcagtcgacaccaaaggtgttacagagattactggaggcgagttagctggaggattcagatcaggttgggctgaactggtgacatgatcaaatgctgaaggctcccccaaatgctgaaggctccccctacatgtgtgcattacttccagacgtattaaatgatgcaccaaacgaatctcgatgaaactcaggcaaagagatgtcaggcagagaatccccaagaaaatggtgcaaaagagtcgacttgatagagcaaactatttgatacatggaggcctcaaaggcaagctgacgcttttgatccttcttataacgtttggcaaaagattgaaactcagaaaacatttgtacctgccagctggaatccgaaagccctttgaacataggagacttgcctttactcactttggaaccagaggacaatgtcacgacagggattaggtagtgcagtctcgactgtaggatcaacagtcgttgccatggatggaacaaacatagcaacagggggtactgcaatgggtgtggtgttctccattttagagagaaaaaaagttgaatgttgtagagcttagggtttatgagaggaaagtgaaagagtgagactgatcactttccgtaggccttaagtataggcaccctgacacaactgaccaggcaaaaataatgatgatttttttttaaatttgatctttgccaaagaaaacgtacgcgcccaaattgaatatttgccaccacataatacggcacacaaaacgaaacaaaccaacgtcatcaggtaaggagagtaatatagaaaccagaaatgtgacaaatataccaacaatatttgcactcagcccacacttagacaaaacagataataataaaaaaacttagagatactcaaatttcaagaaaaaaaaatggtatcaactgatcaat

SEQ ID NO: 346569 - DNA, 501 bp, Cannabis indica
ttggactcggtttgaagagtacattacaatgatgataattatttattcagttgaagattgtaggacaaagtgacttttgagtgactaagctatttggaacttaagaatcgggggcttaggagcatgtcttttagagaaagtttgacgatcctaaagaggtagggactcaacttgattattggacttgattttatatgtgttgaataacattagacatatcccatttttttatgaattataaaatgtttgaaaaattgaaacataatctgcatatttttctgaattattttggggcactgagtgccaaatatatttttgtacaaatatttatgtaggttatgatttttgggtttattctagaatacaactattatgctgccatattttcttaaaaaaaaaaaaaaaatgtgttcttttattattcttatttgcttatttttggttgtattgatgagagtcatgtgatcataatttgtgcatattgttgtttcaggacctagt

SEQ ID NO: 346570 - DNA, 481 bp, Cannabis indica
ggaaagaacagagagtgaagaagcaagtgtgacctcgaggcggtcaagaacccacagtcaatcaactcgaagaggagaaagtactcaacaagctaatgatcgagaaagtatgggaaccagtaaattcgcgagtcactcaaagccaaagactatgagtaggacgaaatctttgagtaagatgaggtctatcagcaattactcccaaccagatctgcaggagcacttgaatcagaagaaacctgaccttcgccaacagctcggtccaaagcaagaggatcccatccaagtttaggagatatcaagtgagggaactagggagacaatctggatacgactcatacgaggagcttgagtcgtatcatcctaatatcatgagtaccccttttccttcgggattcaaaatcctgcatgtctcgtcgtatgacgcaaccactgatttggtctcgcatttaaacaactttaatacaataatgcgagcgag

SEQ ID NO: 346571 - DNA, 772 bp, Cannabis indica
aaaaaaaatagtgttaaaaaaaataaatatcttcaatttagttaaataattatacaacaaaatactaaaaagctcccacaaaatatttataattttaatataaagtaaataataaatattcttataacaattaagccctaaagattaaaaattctgagtccgtcctcttccttgttgaaaaataagaagaattccctctaccatcttctttgagtctccaatgcccttttctttacgaaacacctctcaaaattttttgagccacacatggtggcatatccttttcttcaatgcccttttcttctaatcaacactgttttgtataccaaactgtccagggaaggatcctccaaaagctcaacaatgtctgaatgatgaaagtcctcatcatcattccttttccctcggctcaacccctctagggtaatcaaactcctcaatcaccagttcaaaccaagcaagaagggagaatcgcaagctcacatagtcgcacaccatacacgactctaatcagagccattattatagagtctatagattaatatttggacatatcattttttggaataacttttttagaaattgcttggacgacttcttaacagtaattttttcaagcactggtcttaatttttacaggaaattttgccataaattttttttttttttagcgaatctaattttaatttgaaacatttttctttcattttttttgggcattttacaaaaatactggatttggggtaatacttttcaattttactgccacacg

SEQ ID NO: 346572 - DNA, 538 bp, Cannabis indica
tagcatggacatatatgataaaaaatttcatgtgtcgaatgatttattaatagttataagataaggtatatgatattgctagaatttaattagtacattaatgatatacattattatatgtatggtatattgtatgaaaaacattttttttattgggcttttagctcgcccttttatttttctcgaagtgtagtgtgtatagtgagcagagtcagttctagtatgtatactgtgtgagattacaaatgggaaaacaatctagaacactagtgttgccttagttttatttatagcaattgattattctaaacacaataaaaatgtattatttaaaatcatttatttattatatttttttttataaatgaaggatcattctatgttttattttgatttttgtaacccatcattatatttcaagtagttttgaatcttttcaaattgttaaaggatcttttgtaaaggcaaaaaattgaggcgttgtattttaattttattttcgaaagtagtagtatcatgaagtggttattgttagaag

SEQ ID NO: 346573 - DNA, 1026 bp, Cannabis indica
aagaaaaggaaagtgggagtgtcctatttgtcatgcttacgtggctcaatttgattgctcgttgattttaaataataacgttaaaactttgaaatcaagatgccttgtttgttggtgtctagtgttaaattaattttattattattattttttttgaatgggtgttaaattaatttaattcctttccgattatctaaaaatgtaataaaaattatataataatattatgttatctaaaaatgatgtattctttttcttttttaaaaaagaaattacaataataatgatgatatatattaaataggaaacaaactctacttcgcttacggtagtattttatttaatgataattagtcataaaagtctattaaatttaaaattttgatataaaggataaataccattttagacaatgtgttttgcaaaaattaccaattggattttttgttttgttaaatgataaaatagaccgtatattttctaaaatggtacaaatagaaccctgaattgattttttatcaaaataaaatttaattataatccgatctaaaagtgttatgacaaaactgtttacattttctatatctgttcgtattaaaaattgtcttcaagtttgttatattacaaaaaaaagttgtcaaaaattaagctcaatgtcctatttttaccattttagaaaatacagggtctattttgtcatttaacaaaacagagggtccaatcattaacttttacaaaacacaagatccaaaatggtatttaccatttattttttaataatatgaataactattttagttaagggtgttcattggaccacatccaatatttttaagcttatccagatctgatcaaattatatattggatgttagattttaccatacgatccgatccgatccagtcatccaatcgatccaacatccattggatgttggattagatcggttctatccgttggatgtatttcatatatatttcttgttagacatttatatatatagactaaaatgtatatgtttaagta

SEQ ID NO: 346574 - DNA, 927 bp, Cannabis indica
tttagttgttgtatctggagatgtctcgacgaaaacatagttccagtgatctcaatagcgagctgtgaccattcttcctttaaggtcgacgatgtatgtttggtgtcgatcgcggttcttatcctcaaagaattctttgaggctcatttgaatgctatcttgtggctcgccaggattgtaagcctcgctgatgctaacgggatgaagttatatgaaatcttcttataacgagatggtcacctcgcttacttgttcttgagccaatccaacttttacacttagtgtgttcattgtatgctaacgactttcacgattgatacgtgtcactttctttggtgcctcgctattcgcatttagtgacatattgtttctcgctaatatactaagtgcccgtttgtacattgactccttgcctaagaccttacaatcagagggttacaaatatactctgatacttacgtaattaatgagttattccataagaagcaattgcatcgattcacattctctttatcataacacgtgtcccccagccgaattttatatataacaactgtgaagaatccaaacaagagaaggagtttcgggctcagatcttcgtgatactctgctacagaaaggatacaagggttagagatctgcgcggaaggagtcatttaattccgctgcaacaaatgtaaggtttctcataccttttatgtgtttattttatatcgttttagaacttcatgtttaggatattaagaacatacttgttagtaaatctatgtcctggtaaaatatattccaacaccgacatggtcaaaaatgagggaggagacctcgtcctcaagtttacaagccttgaaagtatcaaaaacaaaattctgaaagctcagtttaaagggctttgtaacaccctaactaacataggcgtattacgtgatt

SEQ ID NO: 346575 - DNA, 905 bp, Cannabis indica
ttgagaaaatagcatttgtgaaaaggaaaaaataaaaagatgataaaaatgtggcccaagcaaataaaaaaaacggcatttttgaagcacaaacaaaggtccagcccaataggcccaactggcccttttttgcatttcaaaggacagccccgccacgtggcgggctgtcattcgtgcggcagaagcataaaggagcagcagctcctttttccctctcccttcctcacgcgcgcgtgaagcgcacggcccgtcctgggcctttcgtttgctccactcgccagccacgcggctggctctccttcggtccggcaccccaacaacacaccaaaagtcaaacttgctccactttcagccaataagagcgagacacgtgtccaatgacacaacaaattcagccaacaccacctttctccacttgccacgtgtccacatgcaaccaatccgacagtgacacgtggcagctccggattagtttattttatttgcaaaaatacccacatgcaatttgtaataagtttaattgcgcattagtccttttacccttctataaatagaagcttaggtttttagaattcagttacagtttcagtttcagacagaaaaatccagagaaaacgctcagagcgctcagtgttagtttaccgctttcttagttaattttcttatgggtttctaagttcccttattattaaggaggacgatgaaacctagtgtatttaattaagtatttatttttattttgattctcagtacaatatatgcttatgattttcgcttcttaaaataatttctttcatctttaatatcaagtatttttgatagttagaaattatttatgcttggttccatattttattaaaaataatattctttgattttttgtatttacattaaattgtttcaca

SEQ ID NO: 346576 - DNA, 659 bp, Cannabis indica
tttctttttttttatatttgtccgaccataaggcctttttaagacaaagtgaccggccaagcggtttttaaacttggaattatttttcatttttccaaacaacagctgaccaggcagcttttaatctcagttttacgtacttttgttatctttaatgaatttcatcctctatttataatcatcgtgcaactatgtttgttttattttttaccaaatgctttgtccaggtttaggtgccccccaagtgacggagcagacttatgactcttggtcacttattttttttttttgcaagtatactcttttgtctgttcgaggttttgggttcgaccaaaccttttgtacgcactgaatggtaaattaacaacacgctagtaaatttgactcaatttgaattttgacataaacatctttattcattattgatcgaaaatgtgtttgttaccgtagtaacttacatcatagctatttgatctaatctgatattttagcttaacatgaaataaaacaaattgcagaaattagaaattgtactttaaatgatggtcatccgacttgagtacttcgtaatttcatctgaacctttgggcatggtccgcctagaaggccattcacttaagagtaaatgttctttttgtttagtacttgaggtggtcatc

SEQ ID NO: 346577 - DNA, 546 bp, Cannabis indica
cctcccaagaaactgggtgcctccttgcggaacctttcaaacaacggttccattcagtttactgcagcaactggtcctaactgcacagcaggggcaggagctaccagtatatctggaacaaggattgcaggagcaccctgctatctcaagcgtcgaatctcttgatcttgttcattaatcttggcttgcatgtctgcaaacctattttcccaatcttgggcagtctgggcagcttgggcagcatgtggcgtgttaacatcaccccagccacgtgccctgcctctagaacctctacctcgactacaaatatttaggggaatctaaactcccagaccaccactggatccaaccgagttactctggctcttggtgtttcacctggcgtccatactattagaacagcctgcgtatccaacagctagtctggtctgatcgtgatcaagtaaaacttattaattgctacttatttggaaatttaaaacatgcacctattctactatcaggctacgaagatgcttcctaataggattttcttaaatcatacta

SEQ ID NO: 346578 - DNA, 729 bp, Cannabis indica
gagttccagtctcagtttgggtctgaggctaggtctgtgttcggttcaaggtcagggttcgagttttggtcatggtcctagtcttattctagggtccctgttcggcgattcttgttcacgttctaattttggatcccaggtctacgtctgggttcgtgtttggttctttgtctgggttttggtcgtagtctaagtcccggatctagaaaccgactactagtttgttccagggcccattacccgaatcctgagtcaagatcttgatcactgtcacgggtctaggtatggttcttgttcagggcctaggacctatttgtgagtttggcttcgagatcgaggcaggggtgcggttctagctcccgaccttggttctttgtccctagtctggttccatgtttgagtctgagttcaagttcaggttcgtgtcctaagtgaacccgggtccgtctcccaattagggtctaggtcaaatttggaatcttggtccttgtccggttatggtcctggatcgatgtccaatttccgttatgtttccaagtccaagtcctaattctagtctcggtcaacttctcgttttggttcaaattttaggtcacagggtacgggttcaggtccactttttggttggggactgggttcaggtccgggtgtgggttcaggtccttatgagggttcaagtccagggctgggtcccaaattcagacaccgactacgggttttgtccaagcc

SEQ ID NO: 346579 - DNA, 611 bp, Cannabis indica
gtttgttcataccctgagtacccctgagtgatgtaccacacatactcagtacctcaccgtacttatgctggtatcacggtactctcggacaacaatcactataccaatacactctattccttaaccgtataagtgttggtagtgctactaacattttaagcatgcatatacacttaacatatacataaactcagatatttacatcacacattatattcagttcctaccttctttctgaaattaagtgtgttggccgacctgaatggaaagtctcgtgctagatggatgctctaatcacattatgaaatcgggtaagttacacgaataaaaccctaatcccgggaaacccaaagccataaccctaggttctgttatacccccaagaggttacccaaactctggaattagggaaacacacaaccacgacactgaaatggatgaaaattgagaaaatgaactgttcgagaatcctgccaaaatctgctagccagttttagaggtctgacaaaactggctagccggttttagaggtctgacaaaactggctagccggtttgcaccagttctccccaaacatttcattctttgctcaattttccaccaaatgctac

SEQ ID NO: 346580 - DNA, 596 bp, Cannabis indica
ccaatccgtgagatattaaccaaggaacacaggctgatgaagatcctgaacgacgcaatcctcgcagtcgaccattgagagacaatgacgcagaatctgcctcttcatcttcgcatggtcgtacaccaagcaggtacacaaggtctggctctatcgagacacagcagggaggacactatcaagtacatcgaggtgatctacgtgatcatctcaacgcagtttttagagcgcgctctcgtgccccccataacgaggacacaccccgtgatccccatgtgagcgatcaaggtgtaaacactcacatcaacccgtctaacgcactggtagcggctactgcgatcactatcccagcgaacctcgccgcagtagtcgtggctcctgcagtcgcagcagtctcgactcctgtggctagaggaatcgatcaaagcatgcttttgcaagccttaaaaatgctcgagcagcagagaaagcccatatacaagctgcatgggacctctcctttcactacggaagtgcgacaagctcaactcccaagggattttgattatccgaatccctaaaatataaaggtacctctaatcctatagattatcttg

SEQ ID NO: 346581 - DNA, 515 bp, Cannabis indica
tggattaatctgatacctactcataactcccactcaacagtaggtgtctggtctaatgcatagcagggcatacctgagacctctcacggttgatcctaagaaattctttccttggactttatcttttacggaatagttaaaactattcattagagaaataaaatctatgtctaggattcaaatacttcctatagatagctgttgacctcgcttttacccaacgataaggagtctattttataagcgataaatgatttataatgacaaatatatgataaaacaataaaaagacacaggaattttatagaggttcagccccgagcagttcagtaatagcctaatcctcgttacttgtattgacttaagatcaaggagaaagattccttttcttatagctcttacaacagtatctctgaatatataattcttagataatatatttagggtatattcttagctcaactgctttttgactgatatcttgcctagtgcatatgcatcactatttatagggc

SEQ ID NO: 346582 - DNA, 466 bp, Cannabis indica
tattatttatttaatcaaaatatttgtgatccaataataaattatatcaatagtcaggagcggagccaggattatatagttgggagccaatatcagtaggttcatacgtaaagaataaatttcaattgagaaaaatattatagtattttatttttataaatattttaaaaattttgaatcaagtaattaaactgaaaaataaaatgtgagttttaaggtacgttaggaaggccaacaaaaaattacaattggtaattgaaggtaattataaagttttgtgtgtttgactaaccacacaattacactcctacgaaaattgagtgtaattatactatgtaatttctaaaactttttattttaaatattaagtactaaaaattattatttttttcttgtaattactagttatttggtcaaaaaaaatattaaaatttaataaataattattaacttatatccagatatg

SEQ ID NO: 346583 - DNA, 991 bp, Cannabis indica
agaagagacagtaaccaacaggaaacataattcgtaccttgaagcatacaagaataacttattcccattagcacctttcgtctcaagcccccataaagataggcatgacaccctatgaagaaaatctccaaaggtgaaatgcgaagttacaggtaagaaagaaagaaatataatgttcaatttaaatgtttaccaaacacttatagcacaatttttttagaaagcaacttttagttttttcaaagttgtgccaaactagctttaggtgtataaaaataaaaaataagagaattttaccgacccccaaattatacctaaaaaattccacatattacataactaaaaagaatgagaaaaatacgagtaaatactattttagatcttgtatttgtagaagttaccgatcatactttttgtttagttaaatgataattcaaaccttgtatttttcaaaatagtacgcaataataccctgagctcaattattgtcattttttttttaatataataaacctaaagtcagcatgaacaaatgcaaaaaatataatcagtctggtcatattactatttatataaataaatatatatgtagtattactaattaattacaagacatctaaattgctaagttcagtagtaatgctcttattagtacttgcaaatctttgtatttattttatgtaaaatatttgaccaataatgttttatgttgaccagtgtataatttttttcattgttgaataaaaggataatctacaattgtacataggctaaaaattttagagcaaaaagaacaactaagaggttgtttggcttcataatttaaaaattgttttttgttttttaaaactgaaaacagtttttaaaaataataggattcgcaaaaattttaaaaatatcaaaaaggttttttaaaaatatcaaaaatttttaaaaaacagaaaatatcaaaatgttttttttttaattttcaaaaacaatttttttgtct

SEQ ID NO: 346584 - DNA, 529 bp, Cannabis indica
tatatatattttttaaaatatgataacatattttttgatacgttatttatgaaattcaaatgttatataatttaaaaatgttaactataagatcatttttttgaactacaccattttttattagttttttttttttttccaaatatcatataattttaaaaatgataattcacacatttttttatggctaattatgtaatccctcatttattagtgagggattgcacacctcaacatattaggaaccattagattatggtacaatatcgatttttggcatctaagggtagtaatttattaatgggataatttcacaaatgcacaaaatcaacaaaaaacaacaaaaatacggtttcacggaattttaaatatttttacgaattttttgattttatttacataaaatacggtctttttatgctgaaattttgttcatttgttgttaattttttgttatctgtatgttattttttgttttttttttgttgttattttgatgttattttcatgttacttttatgttgttttc

SEQ ID NO: 346585 - DNA, 594 bp, Cannabis indica
gtttaattgattatgtattgtatgtgtatatttttgaaattgtattgcatatgtatgtataaaatattgtaattatattgtatagttttttatgtattgttatacgtatatattgcatattttaaactaataagtttttttaaaaattgtgaatgagaacgagataggagattattaaatcaaaaatttagaagttaatttctaaaaatttagtttagaaattaattctattctttatcatttctttctatttttaattttattcatgtacatttattaaactttcgtcattaattaatgatgcttagatgagtttgaacatcttaagtatttatcttgtagtaaagtaggttgtattgtggtcgaatgtggtaaattttgtattgctagatgttattgtgattgtttatttgttttgaattgtgttttattgttattaataacttttttttgaggaaaatatttaattatgaactagttactacttagtaatttagttactatttagtaatttagagtattagttaatatagttagttacaatgttagtaattagtagtgtaataattaggataaatattatattgttatact

SEQ ID NO: 346586 - DNA, 1042 bp, Cannabis indica
agttgaaacactgtaaaaagaacatgatactcacatctcatccccttgaaacttaatcaaactaatgtcaaacttgactattcaaccaacctagatgagagagttccttccttagtgatttctcacttccttcattgttcttccatattcgaaccttgagtgaatgagtgttgtgcccacacatagcaagtcaagtactcaatcatagtgagtaagtcggtggtaaccaaacccgaaggagagaaagagatgccggttcagatcttgataatgctctgctacagaaaggaatcaagggctagagatcttgaacggaaggagtcattatattccgctgcaatcaatgtaaggttttctcaagcccttatgtgtttatttcattattttagagaatttatattttggatgttcatcaacatacttgttagtaaatcaataaatgatcacacaagcagtaaaacatttactctcaacacttattgcaccatgagtcgagcttctctctgacgatgattgtacatgttcgtccggtttataggaagtttaaaaaccttggtactttgataccaaattgtaacgccctaacaattatgcacgctaccaaagatgtttaagaaatcctaatcccctaaatgggattactaataaaattaacgcgggaaattaaactttaaacaaaacggaatgaaaatgaacttgttacaattttaactttacaaccaaaatttacatgctttgggatctcaaacaaaataatccaaaaaatattataagccttttccccttagccgacttaagcagcgaaacagagttacaaaaatttcaacattggtagaccccaacccacttggtctagtgcggcccgaacatgtacatacatcgcccaactcccgcactcatggctgatcagaaacagatttaccctttcctgcacagtagagcacccatgagccaagcccaacaagacattataattatcaataatcataatgaacacatcacataaatattaatgccatttcatatttgtctgtatgacaca

SEQ ID NO: 346587 - DNA, 771 bp, Cannabis indica
ttaaatagctataaataattttataaataatcatgattaactgctaatttccaaattaactaagcgggctttacatttactaacttaagttacagactcatgataaaatctttattataattatctattacattttgtaaaataattaatctttaattttttttattcacattataaaattaatgtcaagataaattatgacgaggacaatagacatatattagcaatttatttatgaattgtaaacaactcatggaatcatgaaaattgtaactaacttgatcataataataagagattttaatttgaaaattgttaccatctttgaaatgaaactaataagataatcgtaagagactaaaatcaaaagacccaatcgtaaattagagacatacgattgacaaagaaaatcatataacagataagatttttctttgataagaattttcaaaaaacaggcaaaaacgtgtctatgctatattatacgtacaattcaatcaaagaagaagaaaatacaaacttaaatattataaatcatatagtaaaaactgagtttgaattttgtaatgacaaacctttaaaaatcttatatttgggccgcatccaaatatatataaatatataaataggggctgtctgttgtcacgcataggatttttgagtgactagtgctgcacacctttaatagccattagattgtattaattttgatctaaaggctgatattacacacttcatatatcatttttatataatattatatttgataaa

SEQ ID NO: 346588 - DNA, 1173 bp, Cannabis indica
ttttgtttcactgaaaaatgatttttgaaacaaaaaatgtcacaaaaagaaaattagacaccaagagtacgcacaacatactcctgcgcgcgcatatgagggttgcttggtgtggaaatgggcaccatgcagcctagcagaccgagattactcggaatgaaatgggctgcagacagcccttgtccaagaaatctcagatagggcttgtatgaaggctcggtaatgaccgaggaacactcctactcagtgcgcgcacacgtgtgcaccaaaattagatatttttatctaaatttaaaaaatcataactaattcataaaaattcaaattgagttatgtaaaattctaattttattaatttttcatctacattctagaaaaatatatttttagaacgaaattaaaaatattttgcatcgtaaaaaattataattttcatacaatcatcaaatatgcacataaaccaatatgaacacatccaaataaacacaataattatttgaaatcaatatttcatgaagtaaatcattaccatggctctatggccaattgttggagattattttacaagaatctagatttactaccatgtatgttgtttaacatcttaaatatgaatttctaaaacaatagaatttaaacacatataaagtttaagaaaccttacattggttacagcggaattaaaagactccttctacttagatctctaacccttgttcctttctgtcgcagagtattatcaaaatctgagcctcattctccttcaggtgttggattcttcacagtcttacacactataattgagtactaaactttgtatgtgtgtgcatgtactctatcactataagggatgaaaattgtcgaagaaaagagggaaaaggattcaaaaattagagagagacgacagaaggctcaaatttcactgaaaggctaattttcatcatctgtcagtattgagtctatcactatctatttatagaaatccttctaggtttagatttgaattatatggcattaaaaagtgataaataaatggctaaatatagcttaagtggacaaccattaggatgccgacccaccaattacaatttttccattttatacaactatttatctttctcttttacaaataacttattttccaattcagccatttaaatgtcaaaactattt

SEQ ID NO: 346589 - DNA, 794 bp, Cannabis indica
acacattttgattagacatggatataatataataaacgaactagcaaactaatagaacatatttttcatcctataagtgttccaataaacatgttactatcgtaatagtaactagacacagattcaaagtccatggacatagaatcacactactttatcctagttggaggattttaaaattccagccaattattatttggaagacactagtgatagtctactatgatatgttcaagagaggaaccttagaataaaacaaagaaaagttaatttaaccattcacatgaatagtaataacttatcaaaattatgagaataagatagaaaatttttgccatgtctattcaaaaaactgaagcacaatttctagtccttatgaaatgttttgtggtatctatagggattacttaatcttaagcaagtattttacatttatattaatactagaatgctattttgatgacttagtctaaatggaagttattgtttcagactaagacaaaatgtcacaacaaaaggtccctaagcataaatagtaggaggttaaatgcacacttgtgtatgaatttaaccaaactcctagtgttgagtgggagccatctaagatacaatcaaacaagaaacattgggagacaatcaagaaagaatctcagaaagtgacatatattttagatgataggggtgtatattaaatccttatatctataaaaaaaatcggtacttattagagatggtgcttactttgggagtggaggaattattatagaaggatgtaataacccatctataataat

SEQ ID NO: 346590 - DNA, 736 bp, Cannabis indica
ccttaggagtgatttgggccgagaagaaatcgaagaagtcagccacatccttaaaatatttatgcaagggcatcaacgctccctgctgaccatgggcccctgaccaagtgcacatccccttgtcagggtttgtggcgcggttagtgtgggagggaatgtagcagtctagctcgcccaggtacccgtcctagtcaagagttcgaaggcccgcctccgtaatcttggacggaggacttacccacctggcgcccaaggcaccctgccttctatgaggagctgccgcagagtccacaccctcgaccaggacatctccgtcagcatcgaatggctgcccagcctcattgtacaccctaaaatttgggggttcaatctcatccgacccctccgcctcggagggactgccggtacacacatcgtctagctccttaacttcctgaacctcagcgtccccctcgcgatcctcctctatcaggacagccgaatcctgttcggtgctgggtactgtggcaagccgagccacttgaggatcagtagcgtcggccagacgcgtagttttcttcgtacgagccatcatcctatggctgggtacaaggtcagattaatgtccttcactagaaggaggactagaacgaagatgagggtgatcctcgtgcagaagttgaagcaaatcctggtcgatctgatgtccgagttcccaagactcacctgagttcatctacaaaagacaacacacgag

SEQ ID NO: 346591 - DNA, 1034 bp, Cannabis indica
aaatgctcaaacgaagccgatttctgaatggttcatcatcaactgcttctgaagatgatgcttgtgtgactgatgtttctgcaaatgcagattcagaagccacctttacttcaacagcggaggttggtatgcaaccccgcccctcgccatgaaaatcttaagttggaatgctcggtgtttggggaacccgaacgcatttagaaatttacgattgcttgttcaacaacaattgccccatgttttgtttcttatggagggaaaactcggttctaattcatttcgtaattgtcttcattttttgaatggtttagaggcccctagagttggattaagtggtggttgattgcttttattgaaggataatgtctctgtcaagctctcccatcttggacatactttttttttattgttctttggcttttgaagatggcccctcattccacttcacggatttctacggtgcacctgctacacaagacataatggcttcttggactctcttgaggaggcttgatgatatttctcctcaccagctgtggcttgtaattggagattttaacgagattctatctaatgttgacaaagaaggaggcccattgcgaaatgaacgtttgatgaatgacttccgtgcttgtcttgaccattgccatttgaatgatacaccttatgagggtgattctttcacctggattaaaaatcgtactgctgccacaactttaaaagaacgtctaggctggtgtttcattaatcatctatggaacaatgtgtttggggtcccaaaagtaatttggactattttcactctgatcacagagctattactgctgtgtttgcagctcatggtgaatcagtgcagcagcccaaaagaagaagtcgctttcgctttgaaaagctttggttagttgatgctgaaagtagggacatcatctctcgttgctggttagatcaatcttctcataacccgattgataatgtgctgaacaatcttgatgcttgtgctactaccttgcaaaaatggcacattgggaagtatg

SEQ ID NO: 346592 - DNA, 632 bp, Cannabis indica
tgagtcctctattttactttatcttgtgtatgtcagtaccaattatataatatgttttaatgttgatatgtgtatgttgttttattattgatacaaattctatagtatattcaactctgcaaagagttaatactacataaacacttagaatttcaattctatgtttatgaataattgttaattctaaaacaattattaagaatttgtttaaataaaagatcttttgatctgataggggtggaaaaagttaagaataatatgcagttcaacgatcttttatatctattgaactctggattatattcataactccacatgatctctatatcacttagggatggaccatgatctctatatcccttaggggtggatcatgatctctatatacttaggggtggactatactattgaaatatgtagttcattttgaactctagactatactcaatacaccacagtactctatggcacacatattttaattaaacatggatgtaatataataaattagcaaattatcagagtatattcttgatcaaattaatttatgttccaattaatatttactgttgtaatagaagttgataccaataaaagttctttgacattgtatcacagtaccttatttgagt

SEQ ID NO: 346593 - DNA, 551 bp, Cannabis indica
tcttgctttctgcgagaagaccaaaaaggaagaagatgatgaggaggcagccaaagaagcagaactatcccattctcctactatgtaggcttggtttttaattatatctaggttgatggccctaggccgagacaatagttttcccctcgtgacattttttgtaaagacatatttgtaaggttggatggccaactttactttttatcttatctttattgaattcttcatattttatatttgaacttaatatatatgtattttcttgcattttcgttcacaatttaaacaattatattttgatcaaatgcaaaatacttttagcatttccattgctcatattttcctttgatgatatttaagtagttagtaatctactatatgcgcgagcagtttattatctgtcatgcttatggtttgcgagaagttattaattctacttcggtacatatagagcgttctatataattgagagtgaaatacaattctaaatctatagtggcgcaaggcagtacttggtaaattctacatctacttattgaaagctcggttat

SEQ ID NO: 346594 - DNA, 593 bp, Cannabis indica
ttcttagaaaatggcctatcttttttctggcagtttcccctttcgttgtttttctcgtgtttcctcgatatttatggctttggcatgcgatttattgatagggaaacttttagttttgagtttagatccccaaaaaggtttagaatgttgtttactgtttaatgtgattgtgacataaggcctccgtttagcacgcgacttcccattcaggtcgactgacacacttgaattccaaaacaaggtaagactagcatagaacttatttatatatgaatgtgtatgtgtaatgtatggatactaattgtgatttgtatactaccaaaactagtacggtagcagtactaagtgtattggtacaatatatgatgtttagaagggtacaatccggtgttaccaacactagtacggttgagtatgtagtgcatgtggtacaacactcagtagtacttggggtacatttcaaccctaccaaaactggtacgaggtgagtacttaatgcatggggtacagaggtcatacttttgttaagaacgttcttaataatctcttaagccttgtggataggtgtatgggtgcctaaatacaagtcggta

SEQ ID NO: 346595 - DNA, 547 bp, Cannabis indica
gtcagctgtattgatcgctacatcaacattaagcttcagcttgttgagtaagggcggcttccatggaactcctgctgtaggccgtgccttcattgcagcaacatgtgcatctgtagcaggctgtgaaggattggcagctgaaggtgaagatagagtagcagtaggatgtttagtgctatttgctttaatataatttgtcatataagttattgcatatagagccataacagtagcatccttattcctatctccatgtatgatcttattgcgatctgtctagatcacccacattatgcagagcagcagttcaaactcttcctggctaagcagagttgctatatggaagagataatcaccatttgccaaatgtcgagcctttgcaaaatcaatgggaaatagaaattggttccaaacatctttagcatgccgacagcagaacaaggaatgcccaatcgactcccaagcttgtgtacacaatgaacaagctgctgaattcagaacctttttttgaaacagagcagttgcaaccggtatagcattatgtatc

SEQ ID NO: 346596 - DNA, 600 bp, Cannabis indica
atttatttatgttatcatattcacagtacacgggtactcgagtcttttgctattttgattgcgttattatttacagcttggtgtaaaaaggataaggtgaaatgaatttcttaaagctcgataaaaattaaacttttataaaaaagaagttaatcaagagtacaaagcgggctatataccccctatacttagaacatttatagataaattgactaagtataaatacataacgagtacatatgatacactgcgagtactattgataattaaacttcaaacttttaccgttccaggctctttggattgcagtaccatcgagttttgcaagtcgatatgttgcgctaccaatatttttagggatgaggtatggtccttcccaattgtctccgaaaaccccatgcgctgggtttttcgtgtttggcatgacttttcgaagaaccatatcccctactcgcagaatcctctctttgaccttagagttgaaataccgcgcagttcgctgctgataagctacattttttaggtgagcctgatcgcacttttcttctaaaaggtcgaggtgaatcaactgtttttcttcgttctgacaatgttgaaaaa

SEQ ID NO: 346597 - DNA, 1040 bp, Cannabis indica
gaaacttttgattctcatcagattgctatcctattttgttttgtttgggcaatttggaattatagaaataaagtgtttcatcagcataaaaggccttggcctcaagatatttttcaatctgcttgtaattttttggatgaatttcagttagctcgtgtcaagaatttcaagcaggagactgtaacttcagagggtcaagatctagttcctattccgattgtaggaacctggcaggtccatactgatgcagctattgatgtggctactcaaaagactactttagcttcaatcgtcacggatgagtgcgggatcattaaagctgggtttatgcttccattgcaaggagtacttcctccggatgtagctgaggctaaagccattttaactgcggttcaatggttacaagcttctaaactgccagtttctatccttttttcagattgtaaagtagtggtggacaaaattaataatggtttttgtaataattctattttaagtgatgtaattaattgtaccacagccttgctaactcaaagtcctggtctcgttgtaaagcatgttcataggagtcataatgtgttagctcatgagcatgctaaaattggtctcaggcttcttagcgagtgcgtctggaatggttgtttgccttccagttatacctgttgactttgttctttctttgggtgtaatgaaagcattaggtttatcaaaaaaaaaaaaaagaatataattaataatttttgtataatacaaaatccatcctttaatttatattatatttgtacaaattgtgtataaatctactatatagttttgtattactccaattcaccaaaggacagaaatatatctttcgcttaactcttttctaattgttagatattagatatatattagctgtaaaagaattagatatttagtagatatttagtctcctagctttgtatctaaatatgtattattctatgaaatcgaaacacataattcgaatcactattttctacatggtatcagagccattgtgattcaaaattcgaaat

SEQ ID NO: 346598 - DNA, 555 bp, Cannabis indica
ttcgaatagacatttaacatgtgagttttcatatctttttagtccctgaaaacctatataaagggtgaactagagttgatttcagtcaagcaattcagagggaaataaacagcagaatatagagcacgactttcagagatcaactccaatactggaggcatttttcagagggttttcagcattcttttttttttctctattttcttctcttttcttaaagttgatatgtgtgattttactttcataaacatgaatagctaaacacttaattaggtttagattgatattgtttgatattgctttatggtattaatatgatttattttcctcccaatttctatgtattctatttcattcgtgcttaactacttttaattgcctgattaccaattaactgtctatgattttgatgcgagatttgagaagtgagtgtcaattatgctatagtgaaatagaactgaattctgatataggacgagagtacctatatagtttagatagctcatagggtttctatgtttaattcctgttgcatgttaaatttatcacgagagt

SEQ ID NO: 346599 - DNA, 1134 bp, Cannabis indica
caactggtagtaactaatcatagaccttatacatcatcaatatgcaaatcgaatttctggggagataagtttgaatacaattcaaaatttaacttaatgatctttgaactgcatatccaccaaattttctccacccatatcagtttggaagatccctaaccacttaccttaatgtttttcaacattgctagaaattcatgaaatttttcatacatttcaaatttctttgcactaacgtaaaatctagagtgatcttctaaagaatataacgaaaactcatacccacccctgaatgtacatccatattcgaatatagatgatcttactttcaagtggatataggcatattttctctttgcagggaatcatcttgtcaaaaccactatgaacaagatgcaaatgccatagatatattaaactatggttatggtcttttgatgaaaaaggtttagttataacaaagagttcttagaatagtccaagtggatcctggtcacagaatacaaaactcttattccatacataaacatatagtttggatccattgatagaaaatggatattaataacttgtgaaagtcatactgtattgtccaatgtattctaggaacagaaattgaaatttctatttggaatctaaaatttaaagtcaaagacttaaatttataccaaaaatttcttgagttattattctagcttggaccaccactactaatctaactctaagtctaattttcctaaaataaacatatacaagttggagatttctaagatcgaggatttatatcatttcgggatagaatgtcaagaatataatcttctgtgtcatccatttcataagagaaattagagtgacatcataagcagatgatgtattaaccttctgtccatgatatactttataagtaataagctaagaggaaactaaatgataatttcgattaaaataagaatccaatgatgtcccgtttaggtgagagtcaaagttattcttattttatgaatctcttcattgtttcatattgtaaacagtaatctaagttgtaatctttggatgtacaactagatattgcatttataaatacttatctgttgagatctaacactgttatgtttgtctaatagatgacaatcc

SEQ ID NO: 346600 - DNA, 333 bp, Cannabis indica
ggttggaggttgtgccgtcagactttattgcgtgtagcagtcccaacacgcttcctcccatgcggcattaaatgcgatttgattgctcaggagaaacctgacaccccgcggagatgccttagcgttactcgagcttccgggagcatatggggttccatatgccttctccgggaggcacgtcccggacgctgccttatggcataaagacttagccaatatttcgaattataagttgcttgatccacgtgtccctgtctggttggtccacgtatattgggcaaattcaggggcaacagtgctgtcaacacattggaataaagtttcctagattta

SEQ ID NO: 346601 - DNA, 660 bp, Cannabis indica
tacagaaatggtatagagtgcattagtatagtgtatattctttaaagaatacattacgttgttaccagcacaagtacatgaagtacagggtgtgtgtggtataataattagtggtactcaaggtacgaaacaaaccctaccaacactcatacatttttggtacgaagtgtatgtggtacagtggttgtaccctagtatggaacatttttactcatttattaagccttgtaaataggtgtatgggtgcctagatacaagtcggtgttatatgatatgttatattcttttcttactgagtatgttgattcacagctctactttcatgtgtagttaaaggaaaggccatggctgaacaggagtgagcttaagctaggatgaggttgtacatgtcatggcagcgcgacctggagtgttctgtctcgggacatttggggttatcattttgtagtcgctgtgctatttgattaatgtattttggaatattttgtaaaaagtttagaaacgggatcccagcttttgtagataattacgtaaagtttataaagtttaatagtcaatactaaaagttttaatttgatacaattttcaagaaaattctttaattatcaaagatagcattgcaattgaaaaatcactgtagcgtgccttagcattagggcg

SEQ ID NO: 346602 - DNA, 745 bp, Cannabis indica
tttttttttattaaaatgttaataaattatgtaatatcaacttatatatatatatacgattgaatatgtatatttgtcactaatactcaaccatatatttttaatttttgtaggtcttaatggtactttaggaaaagatgatcgtaaacctgtttcatgttgccatagcacatggcgtacagacttatgtcctcattcatattcaaaacgctctaaatgcaacaccgaatgtaaaaagttgtcttgtaatgtgaaaggaggtatttgtaaaaaagaaggtcatcgtcctgtttgtcactgtttatgctaatttgatcgtttatattcatagtaagagtgtttatattgaatcacattcaatacttttagaggtaatgaaatgaaatagaatggaaatgaaaaaaaatttattttatttttttatttgattgtattttaaagtattagaatgtcatttattttactattttcgtggaatgagaattttatttgaaatggaaagaaagacaattctaatataacatgagaaaaaaaattaatgatttttttataattttttttatgtattttgaattttattctattccactcttatttttatttttattctcattctatttttatatttttatttctatcccaacctaaacaacaccttagagtttgaaaaaagaaaatataagaagaatgtacaatgtttaagtcttgatgtcttatctttttgtgggtagttctcatatagagg

SEQ ID NO: 346603 - DNA, 1019 bp, Cannabis indica
tgatggctcacacttaaaagataatgaaaatttattgccttcagaaaattttcctgagccattctccttctattttcgaaccagccacttctcttccttcttcataattttcataccttgagtgatagagtgagtgcccacacacatcaagtggtatctcaatcatagtgtgtaaggctgtgaagaatctagaatcaagagaaggacattcgggctcagatcttagtgatactctgctacaaacacgatacaagggttagagatctgagtagaaggagccattaatattctgctgcacccactgtaaggtttcctaaactttatatgtgtttatttacattgttttaaaaattcatatttaggatgttaaataaaatacatggtagtaaatcatcctagtaaaacatattccaaaaactggcctcagagccatggtaatgatttaatttcataaaatatgaattaaaacgatgttttgtgttaatttggatggtttcatgatggtttatgtgcttatttaatgattgtttggaaatcgcagtatatgttgtaaaaatatttttttatttcgatttgaaaatatttttactagaagtagatgaaaaattaatgaatttaggcatttacagaacctaatttggattttttatgaattagttatgattttttgaatttggatgaaaatatctagttttgaatgcacatacgcgcgcgcacctagaggacagctggcatccccacgcgtcttcagacaacctgaccgaggaaactcggacacgggctgtctaaagccgtgtcacgctgagctccctcagccaagtaggctgcatacagcctcgtctcttggccagacgctccattacgcacgcgcaggggtatgcaatatgcaatgcatacccctgtgcctcaaacttatttttttctcatatcttttgattcaaaaatcgttttttattgaaacaaagtcaaattttggtagaattttgtgtagaatctgaattttcaattaaaaatctaat

SEQ ID NO: 346604 - DNA, 609 bp, Cannabis indica
acgcgcgcgcgccggcgccggcacagcattagagaaagccggagacggaggcaagagagtggtggagctagtcggagctttcaaccaactgacccacagaatgggttcaacaacttcatcttcaattctgttcaaagcccttaaactgtcaatccctcttctccacgcgcttccactcgccccagacggccgttcacctctctccaaggctttatcggtagctttactcctggccgatcttcacatggacgcagaagtaatctccgcctcaatcctccggcatttggttcagtccggtactatttcgattacccatgttaggaatcggatcggtactggcacagctcatcttctccacgagagtctgagagtgaataatcttccttcgactttcaaagacattgatgctttagacgaaggagacgcttcggcaatcagaaaattttgcctaacttattacgacattagagctctgattcttgagctcgctcttaagcttgatacaatgagaaatctcgattaccttcctcgttatcaccagcaattgatttctctccaggtaagggaaattcaaaaatttaagaaattaccatattgaatttatactgt

SEQ ID NO: 346605 - DNA, 1001 bp, Cannabis indica
ttacatggtaaattctagatctgtttttttagaagcttgattatacaggccataatccccatactagttgggacaaacttcttgtaagactcagttaattgatttaaattaatcaattataattttaaaattagactaagtctaatttatgaatttttcactaagttatggcttgattgtgaagaaataggattttaggatttatttattaattaagagactttgtggagtctaattaataaataatataaatgacaattttatttgataattattttaataattaaataaatagttttgacatttatatgattaaaattgcatgcaaaagttgtatttgtgaaaaatagataaatgattgagactagtggcaaaaatctaactagtgatggacccacataggaccggccactgagtgtatttctttccattattttatcattttttattccaaataaatcaatcctaaccctaagtgaattagtataaaaagaaaagaatggtctcaaaatccaactaatgactcttgacctagttttcttcttgtcagacaactagagagtttgagacttcttcttcttcttttctcttctctaattcgaaatctttagtgttcttcataaaataaaaatcagcctttaataattgagtgcatgcccatccatagtaagttagtcctcaatcatagtgtgttagactgtgaagaatccaaacaactgaaggagtttcgggctgagatcttagtgatactctgctatagaaaggatacaagggttagagatctgagcggaatgagtcatttaattccgctgcaaccaatgtaaggtttctcatactttatatgtgtttaattttcatcgtttaagaagttcatatttagggtgttaaaaacatacttgttagtaaatttaggtcctggtaaaagatattccaacaacgggcctgatagccatggtaattggtttattttcaagaaatatggatttaaaacgatatatgtg

SEQ ID NO: 346606 - DNA, 626 bp, Cannabis indica
ataaaacaatgtcaaataatatccatctaaccctgatcaagtgtttagctactcatgtttatgaaagaaaaatcacacatattaactttaagaaaagagaagaaaatagagaagaaaagaatgctgaaaatcctctgaagaatgcctccagtattgcagttgatctctgaaattcgtatctatattctctatttatttccctctgaattgcttcaataaaactattgaagtctacttcttttatagccaaaaaatgataaaataagataaacttcgctgaagaaaaaacctaccctccttaggattagaaaacctattctgcttaggactgcatttactgatagtattttggccataactctctcgatattgctcggaattggacgatttaagatttttaggaaagataaaagagaaatctagaactttcatgttttgactttttccaatatctaaacagaacatagtcgaatttaggcttgaagtatcagctttattttcttacacaagttactctattttaaatatcatctttttgtgagatatttttatcttttttcccattttttttctttgatatttttctaatcttcttttattttaaatctgcaaaaataaaagataac

SEQ ID NO: 346607 - DNA, 844 bp, Cannabis indica
caacataatttaactaattaaaaacagagggtaaatttggctatatcaaaagattattgaccaaaatcctgtgtaaggtactttttttttactaattttacaaatagagggtacctaataaacatttttcatattagagggtaccaaagttttatttatgtaaaatacagggtaccaaataagtatattccctatttaatacataacaaatggtatgtattagcttgtattataatatttactaaagatttggcatcaacaccaatctccaacccggatctggacatgggaccgggactcaggacccggacccggacctggacctgagacctggacccgagactgggacccatacccagacccgcacccggactcgcgacacggaccaggacgcacccgcacccgcacccgaactgagacccgcacccgaacccagacccggacccgaacccagacccggacccagactcggaaccatagttggtgttggggtcaagtgtattgaaaatatactacaattttacacaatctattaatacaagtcagtaccaaacattctattgtataaaataatactaatacaatacaatacaatacaatacaatccaacacaatacaatataatacaatacgacgtaccaaacgagcccgtggtggatgagatttgaattcaattttctttttatatatgaaagggtaaatattattttggaccctgtattttacaaaagttatcaattagaccctctattttgttaaatgacaaaataaaccctgtattttctaaaatggtacaaataggacccttaattgattttttgtcaaaataaaatttaattataat

SEQ ID NO: 346608 - DNA, 614 bp, Cannabis indica
taatcttacctcaattctgaatttaggtgtgccggtcaacctgagtggaacgaactacactgcggtttacaggctcctaaaccataacaatcacaacactattaagtgatacgctaagtcacttcccagggacttaaactagaaactaaaagtttccctatcgataaaaagcatggcaataccctaaataacataaaaataagaaaaactagggttcctaaaaatttcccaaccggcagaccggttgcacaatcggaattccagttttgggaatccctgaaccccatccggaattccggttgcacattcggaattccggttcctcgcaggaaaatttcaaaaattcataactctttcaaatcaaacccaaaccaaaccaaatcttccagacatgttctaaatatcccaaagaacatttctaaagcatcaaaacaacccagcaagtacagatacgaaaaatgccatgtgagctcgaagctttgagttcaaaactcaaacttggctaaagctcgcctacaagcatctaaactagaataaaactacataatcatgcatataaaaactatagaaatcattctcaaacttaaataacaaacacaacaaccaatttcaca

SEQ ID NO: 346609 - DNA, 768 bp, Cannabis indica
aggaataagatgaaaaaaagataaaaaaatctcacaaaaagattatatataaaatagagaaaattgtgcaagaaaataaagctgaaaatttcaagcctgaattcgactatcttttgattagattttggaaaaatttaaaacgtaaagttctatatctctcttttatctttccagaacatcttgaatcatctaattccgagcaatatcaagagagttatggccaaaatactatcagttaacgcaatagaaaaatcaccatcgaaacgaagccatgtagggaaactccaacacgagccccggcccagcccttgtggggccgcggaccgcccccctaaactccacaagaattgttttattctctcacgtgggttttggtggttttccaattcgaataggcatttaacatgtgcatttttatatctttttagtctctgaaagcctatataaaaggtgaactggagttaatttcagtgaagcaattcaaaaagaaacaagagtacgaatttcagagaccgaagtcagtactggaggcattctacagagtgttttcagcattattgtattctctatcttcttctattttctaaagttaatatgtgtgattttgctttccatgaacatgtgtagctaaacacttgattagggtctagatggatgttgtttgacactgctttatgatttattttcccaataatttctatgtattctattttattcgtgcttaattatttttaattgtctggccatcaattaactgttttatgattt

SEQ ID NO: 346610 - DNA, 481 bp, Cannabis indica
attttttaaatttaaacctcaaaatatcataaattaataataatctattaaaaaaattaaatattactaatttacaacattgatatttatgtttatattaaaaataatattttattttgatttttacggtttgaaattgggaaaattcaaaatttgcagaaaaaatctacaaaaatcagattttggtgttggctgcccaaaaggcttaacgtgcaacccagataggctgcaagcaaccctatgcgcgcgcacaggtgggagcccgcagcctccctaactgagaaacctcggtcagctatagggtttgggcatgcgggtggagtgtctgaaggaggggtgagcgagtgcttctaatagggattttgtcccccatacacgcgcgcggaagcctccttgtccgagatgctggtgctttctcgtttttcatcagaattgagttccgtaacaacaaaaattgcttttttcacaaggaatccaaata

SEQ ID NO: 346611 - DNA, 761 bp, Cannabis indica
aagctgtagttggaatcgaagcttacaaattagcttgtctcaatggcttggtaataaagaaccattggaacaaggcacatttacggccatattaccagtaatttattttgtaataattaaagttcatctttgtaattttttacatatacaataactagattctacctagaggtatatgcaaaaaagaactaggttcaaacctagaaaatattcttttttttacaaaaataaaggatgattgacaactattctaggacagtataaaatcaaatattttgaaacctttctttaagtagaaattaaaatagctgttgtaagtgagatttttctcataaaacaacataaagctaagtgcgatttgaataactaacaactcgcatattatagcttgtattataaacgagataccagtgtgtcttaaaaataaatatgcaagctaaagtatgaatagaagattaactactcatatgagcaatcaagaaatattcaaaacagttttaaaacaagttgttcaaaatatttaaagtttgctcttaacatggcagaatattaactgctcgtgaataacatggaagaatattaactgctcgcgaataacatggcagaactgctcccatatgaaatgacaggatattaattgttcatgaacaaacatgcacttagctaagtgaacatgtaaacctgagatatattccaagttcaatcgagaaaaatgttttgttgtgatgaaaaaaaacacaataaataaacattggcaactc

SEQ ID NO: 346612 - DNA, 299 bp, Cannabis indica
ctgattcacattgccttgtgtaaggatcaagatacaatagtgatggttcacaccatgtaatatcttcatgtagatttttcttttctccccctaatgttgggaaaagttcctcattaaagtgacaatcagaaaaacgtgcattgaaaatatcacctgctaaaggttctagatatttgataatggaaggagattcaaatccaatgtatattcccagcctcctttgagggcccatctttgtgcattgtggtggagcaatgggaacatatacaacacaaccaaagattcttaggtgagaaatg

SEQ ID NO: 346613 - DNA, 822 bp, Cannabis indica
ttcctcaattatacataattatctagttagggttttgctaatccatttcttaattccgggtattacagtttccttttgtccttcttcacttagttcagattttaatagtttttctctgtatacaccggtctgcagatggcttatgcttattcccgagctaagtcggctgcctttaagatgccgccatttccaacactatgggggcggaagtggacttagccaggaaagatgtcgatgaagccagcgttcaacttggggctgtccggatggagctgggagaggtcaataagaagcttcttgctactgagaagaaggtggccaaactgaccaaagatctacaagccatcgatcagcttgaagccgccattgcctccttatctaaggaagtgaccagccttcaagaagaaagggaggttctccaggctgtcttcgttggagagaagaagaccaaggagggggagcttaaagttgaagttgagaagtataagttagaggccgggtagcagagtttcgaagtggagaggcttggagggaaagtgaatgctctagagacagctggtctcgagattttttatgacttttggaaggccaatcctcaggcgaactttgattacttgggtgacactaaagacatatttctcgagtactacattgctcaggtggcctatggggaatccgaggcgaccacttccacctctccaactggtcaaaatgttgaagtgccccctgctcagacaaacgatcctccagcttcagctcctttttatctattcggccataaggcctgtaacaccctaactaacataggcgtattacgtgatt

SEQ ID NO: 346614 - DNA, 1036 bp, Cannabis indica
catgttcatcaacaagatgactattcaaaaattgtaaaagactggttggagtgatatgatgatgacaatgggtgagatacgatatttaatggtacaatgatgacaatgagcgagatacgatgagagataacgggtgagatacggtgataacaataggtgagatatggtgttgaacgattatatttaaaaataatacgttatattatgggaaacacttaaatttttcctaaacaaacctatttacttatttttataataataatattttttaacaaagcaatttaaaattctatatgtaatatatatacattataatataaatttaaattttataatattaaataaactaaataataatcaatatattgtgaataaatatattttattatttttttaataaattaatgatatgtaattagatgatacaattttagtattattatatatataataaaatatttttctaagtatattaaattaataaatagtttttcattataacactaaatgaaattaaactagccgcgcgaagagcgactatattatctagttaatagtataaataaattatctatcttatattcttttaagtaattttatttttaatttaaatatctttctagaaaaataaaataataatttaactataaattaataattgtaatagtatattagatataaacgtgtaaatttatatcaattttgtgtcacgtgtgttaatcctaaatcaatctaaataataattgagtcattcgggttcatatctaatttcgacttatgtttattcttcatgatccaaactagcaataatttatattaagttgatgtcgtattgttgtgtcatgacttgaattaccacccatatagtctcgagatgagtaaccagcaactacctcccaggggcggagccacatacacccctataggggctgtggccccccctcaacttttaaaaattttacactacttaacatatatatatatatataatctatctaacaaaaaaaaaaaaaaaacaatatatataatacatata

SEQ ID NO: 346615 - DNA, 792 bp, Cannabis indica
gaagttgagtttcgatatgaacaacacatggtcgtaattcaagtcccatggcctacttcttctgaaatgtctattgttaactacacattctaaatttggaagagctactatctttatacttacatataactatatataataaatatttatcgtataatatgttcttaaggcaagtcaattaatgtctatgtttatgcacgagtgatatgtgtcatcatttgcaatatgtatttgagaaggtagcaagtaaccaaagtgaatggatgagaaacattcgccattacaatataaatattgtatgaacattgctattatattatataatcatatccttgcatagaatggagacaaaactcaaaacaaatctttaattgaccaatgtcaattcacaacacttaatatcggttgttattaggtaggtaaggatgatgatgctttgtcataaaacaaaaaggaaaagaaaaaggtattaactattaaagctgatgcgctattatctatcaaaagaaaaaaaacaatgtgatgctctattgggcctcaattggcatatggaagttgaaaaatacttatttttttttttataaggcactatttttgaaaaaaaaaattattgtttttgtgggaaatttacaaaaatattagattttggttaatttttacaaaaatactgtcacacgaaaatcttttaaaaaatattgtgtttttataaaacaccagtagaacacaaaacaaaacatgtcaaaacaacagtataacaactaaaaaacactagtagaacaacagtgaaaactt

SEQ ID NO: 346616 - DNA, 756 bp, Cannabis indica
acatgatctgctcgcacaattaaaaagctacggtcttaggaaaattccaagagaagaaagtacaactgcagacgcgatggctcgattgacgagcaacaatgtatgtgacaaggcaaacttggtccctatccagttccttgaagagcctaacatcactgacacggaagagatcgaaatgatcgacacgtccccaaactggatgacgccaatagcagcctacctcaactttggggaactcccagataaccgaaatgaagctcggaaaatgagaacaaaggcgacacggtacatcattgtagaaggggtcatgtatagaagaggattctcaatgccattacttagatgtgtcacacaagatgaagctgcacggcttctacatgaagttcatgatggattctgtggaaatcaagcagcccgacagagcttatcatagaaaattctaaggcaaggctacttctggccaacgatgattgaagatttgagagcctatgttaagaagtgccacaaatgccagagattttcaaagataccaagacctccgcccaacgagctaacacagatgcaaagtctgtggccctttgccatttggggaattgacctaatagggcagttgcctaaaggtaaaggcgcagtgcagtatgcagtggtagcagtcgactactttactaagtgggctgaagctgaaccacttgcaacaatcacatcaaagaaggttcaagactttatagtgaagaacatcatatgtcgattcggact

SEQ ID NO: 346617 - DNA, 585 bp, Cannabis indica
ggaaaaatatcctaattagccttaaatgaatatctccaatggagatgtaaaatggtgctctattactaaaatatacactatcttgtaaaaaatttactccaataattgatccaaaattttcttatagcaaagtctattgaatttggttcacactatgacatgatgcaaattttacatgacgcattaaattataaaccttttacatttattttttattatttaatataaaaaaattaatgataaagttattttaatcaaagagattaaaatatatcataatgtaagtgcacatttgactttcacttctgatgaaaggagcttgatacaataaatgctgagtttattagccttgtgttctctccagcttgtacagaaactgataggccattctccacgggaggtaatggcagctcttgcttctccagacacaggaatagttaacaacatcaatcaaggaaactctgtgtaactttcaaaacttcttagctagttttgaggtaatgaacactatgtttggtgcttgtgcttgttttagtaaggggcctgtatttttatctcatcgtgttgtaattctttttttagggg

SEQ ID NO: 346618 - DNA, 726 bp, Cannabis indica
atttaagctctcttcaactgtgtagttccatacctatacagtctcagaatcatcccacttgacattccccaggcggtgtgggattgtacagcttatccggtatttcccctttacggatcacgggactattgactgttacatgaaaacatctgatcaatctaattattgattcaacgattataattgaacaaaaaattttattgtaatttactgaagagttataatgattttgatcaatgtttttttatcccgaacatctatcatttatttatttttatagcatatcgtatggtaagttataaattaagaaatttgcacccactctaagtatttgagtattagcttcttaaattaattattcactaataataacaagaaggaaaactattcacataattcatacatgtgatttggttatatgaagttaggtaggatttgacctattgaaaaatcacattggattcttttaaagaccatattatatggttgatcaattcaaatcttataagacaagtctataaaattagttatatatttttataaaaagtggagcaatcctttcttagaatcttccctttatattactctcttaagtataagaaatacattgttcaaacgtacaaaattgaagttgttatgtctgaaaatgttgccataagtgctcccttaccaattatctttacttttttctctaatgtcaatcactaaattattattattattatt

SEQ ID NO: 346619 - DNA, 520 bp, Cannabis indica
ttgatggatgatgttcgagggtgataagttatgtcaaactgccccagttcaattgaccattttatcaatcttccaaaagcgtctggttttgataaaacttgtctcaagggttgatcagttaacacttttattgggtatgcctggaagtaaggtcgtaacttacgagacccatgtatgaggcataaagcaagtttttcaagagggggatacctcgactctgcgcccagtaaccttttactgacatagtaaataggttgctggtgctttccctcttctcgtactatagctgcattaatcacgtctttcaagattgccagatagaggagtaacatttctctagttactagtttcaccaaaactggaagcgtcgccaaatgcctttcaatattcagaaaggcctcctcgcattcttctgtccactcgaatttcttgttgcctcgcaatacattaaaaatggcaaaaacttatcagtcgactttgaaatgaatctgttaagtgcagccatccttcttgttagggc

SEQ ID NO: 346620 - DNA, 826 bp, Cannabis indica
agagatgcaagagattggagatggtatcagtagcacctcgtgtggcttgggaaaacaactagttgtcgtctgcgaagaacatatgtgttattgaaggtgcacgttgagcgacacagcatccttgaataagtctattggcttcaaatttttggatgagagctgagaggccttcggcacatataatgaagaggtaagtggaaagtggatcatcttgacgtattcctctagacggggagatagaatcaagtacatgaccattatgaacaactttgtagcgaaccgtagagacacagcccataatgagatcaatccatttgctagcaaagcccatacgattcataaccactctaagaaagctccattcaacccgatcgtaggctttgctcatgtcaagtttaagatccatgaagccttttttacctcttcttttccgtttcaaatagtgcatgacttcaaaggtaaccataacattgtctgagataagacggccaggaatgaaagcactttgggtttcagagataatatagtcaatcaaatctctcatgcggtttgccaaaactttcgagatgatcttatagagaacattacacagtgatattggcctgagatcacccataacagcaaagtttttcttttttgggatcaaaacgagactggtgtcattaagtccatcaagcataacttcagtgtcaaaaaaatccttcacaaagttgataactgaaaagtttagcagtgttgaattctttacgtatgttttaacatttttatactgatcttaacatgcatgaaactaaacagaaaacactcaaatttacaagcttcatcg

SEQ ID NO: 346621 - DNA, 702 bp, Cannabis indica
acggaagttaaaaaatcaatcacggaactactcaaaattaatctcagcaaaaaataaattaaaatcaaaggtaatattaataaataacatgaacatattttccttcttctttattaattattttggaaaatgaaactgattataatttactaggtcaatgattatagactatctaaaattctatcaacaatttaagcactacaatagttattgctaaagaatatctgaaacattatatttcttctccggtaaaactcaaattgtaaaagaaccaataaatatttattagtatctatattagatagtacgattataaaaacttacttttatgttatttatgaatctataagaattaattttttattaaaaaattgagaattacttgatatactattttttaatgtgattttagttactttgttgtttactatgtagatttctttagaaatgaaaaaaaaaaaaaactgttttgaactgtaaaaataataataaaaaaaaataccacctttatttttttggtctggtttgaacaaactccttctactatttctagatatgatcaagggcgaagatacaaaatggccctaaatctaacaactaaggtggcgtttggtaacacttttttaaatcagttttctaattttaaaagttagaaaagtaaaaatattttttaaaaacaatgttctataaaaactgttttta

SEQ ID NO: 346622 - DNA, 507 bp, Cannabis indica
gccgtgctaatcaaagaagaaagcgtaccagaaagaaaacccaagcggtacaaacacctcatgtaaataataatgtagataaactgacttggaaactacacgtagactagtcggctacagattgactatctggtgtaggaattgcgcttgtcacgcctaggggaaagacctgcacactgcagtcaagttttgattcgaagcatctaataacgaagcccaatatgaagctctaatcgctagcctaaagttagcccgagagatgagagccgagcacattgaaatctgtagtgattcacagcaggtggcaaaaaacgtatccgaagaatacgaagctcggggagaaaagatgatagcatgtttgagcaaaatacatgacctgcttgcacagttcaaaagctacggtctcaaacaaattccaagggaagaaaacacaactatagatgagttagcacgattggcaagcagtaatgtaagtgataaggagaacttggttcctattaagttcct

SEQ ID NO: 346623 - DNA, 734 bp, Cannabis indica
acatacttgtgagtagatttaagatcctggtaaaataatttcaacagatctaccatattgtatatgttttagaacaaaaatataagttttattttagtgtatttgaactatgagatttggtaggagaccataggttgtcctttgtaactgttaagtagtgttttgggataaacacttattggtttattattgttatgacataggactgaccccaggatgatagatcgttctccaagcaggtcagccaacatacctgaaccgagacttgaggtaagaaaagtatattgtactgcatagtacgttgtattgcaatacaattgatattgttatgtattgagtaatattgagatcaaaatatgattaatattgttattgttgacttcgcttttagccaacgacaatgagtctattttataagcgataaatgatttataataacaaatatatgataaaacaataaaaagacacaggaattttatagaggttcagccccgagcagttcggtaatagcctaatcctcgttacttgtatttacttaagatcaaggagaaagattcctttcttatagctcttataacagtatctctgaatatataattcttagatatatttaaggtatagtcttagctcaactgcttttcgaccgatcctttgcctagtgaatacaaatcactatttatagcgctagtaagcttggggaggaagagtttcccctctcgttacaatgcatataa

SEQ ID NO: 346624 - DNA, 335 bp, Cannabis indica
aaggggcggaggccgaggtgatggtcgacgcggaggctgatgtggaggccaaagcggtaggggaagtagacaaggagcatcggtagcaccggtagatgaagtaacactcgaacaacaacaagcacctcccaatgctcaagctgagatactccaagaaaacgctcgtatacgtgaggagctaactcaagaaattgcaaggctacaagctcaaaatgaggaattacgccggaatcaaaatccacccgttagaaacctagctcttcaaccagctgcattgaatccagaaccaatacaaagcagccaccaatattcaatgggagttcggactcacatga

SEQ ID NO: 346625 - DNA, 489 bp, Cannabis indica
tagccacgtgctctaatcctctgagctacaggccccacctagtctccactggatctgttcccgggagtaccccgtggttttgtagtagcaaactgttcactacaaaaaataactacttttagtgacaactttttaatcataacataaatttttgtgactaaatgtaatttttggtcacaacaaagaactagtacttgtgactaaaacatagtatttagacacaagttgtcactaatttacttttagtcacaataaatattatgactaaaatcacatttagtcacaaccaacactacaaaaaatcttacttttagtcacaacaaaatttgtgactaaaagtgaaaaaaattatgactaattataaatcatgattcctatgttgtgactaaaaggtccatggataaatgtattagtcacaaaaattacaatttgttgtaactaaatgtatttctagtcacaatatttgctgtgactaaaactaaattagtg

SEQ ID NO: 346626 - DNA, 669 bp, Cannabis indica
ttctttaaattttttaaagtttctctattttagaaaaactgttgtgagtaatcttatatgtaaaatactaaaatttataagataatttttcttagtttattttatgcgaccacttaccacgatagttgcacaacgtaaatctataatcattttgtaaccataatgattatttataatagcacagtgtaattcataatcgttttttcgaccatacaaaattattttccacacctagaaaaaaaatatttagcctaattttttttattaattatgtacattataattatttagactcatttataaattttcaaaaacttcaatataatttacaatacgtttaaatattttgttgcacgcacgatagttttatttaatatatttttacgtaaatttatataataatcaatagagtaatctaaatcgcaactaaaactttcatagcaatttatataaaaattatagaagcaacttaaacaacatttttaaaaataaaaaataaaaaaatagtacacgtgataattctctttatacgtgtagtaattatttgtttaaattttatttttggcactataaattatttaaatttttttaaaaatttataggtgattttatataattactgaaattctgtattttaatattcccagtttaattatttaattaagtgat

SEQ ID NO: 346627 - DNA, 792 bp, Cannabis indica
agttttaggaatataggatttacagtacacgttaatatttactagtgttgttgataccagtcgagattttggacacaatagagcaggataagacaacggaaaatataaaattaggaatttaggataagcacaacacaatgtgttagaatggcacgacatgataatgaaaaaatatcatctaagacacatgtatgcccgaattcactagtgtagaaaacatagcatattaaagtgtgatgatttgatgataaaataataattaatattcatttatcaatattaaacaaaaatatatttatttattaattatgtataaattaaaatgataataaaattgaaatataacatcaaatatatacaattttatataactaaattattaaaaaaaaaagaaaataaaaattatatataaatttattttaagttagaaatatgagtattttttttaaccagaatttattaaatttgaaaacattacactggatttggcgagtcatttcgaagaacatgactcgcataaggaggattaatctcaattcacatggtactaattttattagtcaaagtttcatttgctaaaacataagcaacttaattagttttcgaataaagctatatagcccgagccacttgaattgaaatttatcctgatccatatgtaacttcctatggtagcacacgtgtgtctatttaatatattgatttaaatttttaattacacatgttactacatttttcaaaaaaaaaaatacgcaaaaagagaaaaaagaaaaagaaaacaacttactttac

SEQ ID NO: 346628 - DNA, 518 bp, Cannabis indica
tagaaataattatctagaaaatatctcaaattaactaagtgtttttctaaaatttgaaaaagaaactaatttaaattgttatagcaagaatctaaaatatccaacttaaatatttttcaaattaaatttaattaaatatcaaaactaagttaaaacaacctaatttaaaaaatattctattttaagtaaaaaaaaaatatcaacttaaaaaaaataatctctagaatcttcaataaccaattcctagaatttctcaacttaattttaaattcaaaagatattcaaatttaagttgatatgaaaaattagttagaaataactaatttttataacttaaataggaatatttaatgaaataattaagataaggttcagaaagaatctagttagttaaaatttttatttaattaaatacaagaaaaatataaatagtttatctagaaataatatcaaaaaactaagagtgtttttcttaaaattaaacttaaaatattaaaatgaaaataaatttcatatat

SEQ ID NO: 346629 - DNA, 447 bp, Cannabis indica
ataaaaaaaaaaaaaagagattctaggttttatttattaattggaagactttattatgtataattaatggttagataattgtttaataatttattttagttattagataattggttttggtatttaaatggttagaagaagaaaattgacgtttttgagaaaatagaaatgagaattgtcaaaattgcaaaataccaaagtggagcccattaaccctatggtcagccacttaatggtgattttccaattaatattttcattattttaatgccaagtaattcctaaactaaacctagtggttacctataaatatataatgatggctcacagttaaagagattgaaaatcagatgaatttttgccttcagaaaaaaattgagccatcctctatccttctatagccaaacctctctctccctcttttcttcttcaatttttcgaaacctt

SEQ ID NO: 346630 - DNA, 558 bp, Cannabis indica
gtctatagtatatcatttatttatgataatatttatattttattttattgtatataaattttttggtatgtatacgtattttaatagtggtatatataattttgttcacataatatatatagggatatgattttgtcccgtgttgtactttcacggaatgtattccgtggtacattagatgggtcgcagggtacattaaatgagtgtcagggtacatttctattttttaacctgaattacctctagatcaatctcagccgtcaaatcaaatgactgcctcatctgacggctgccgtacatcacggattacaatccgtgaaagtacaataacgggacaaaatcatatcccaatatatatattgagtattaatttagtattgttataatttatttgtggtatataattttattactacggtatattacttttcagtgatacaatatatcaaatattgttgtatatatttaatgatctaatatatttattcgtttttgttacaatataataatatgcaatactaaaaaaaatataacctaatttaattattatttattttt

SEQ ID NO: 346631 - DNA, 1085 bp, Cannabis indica
gaacatgaatagcactcctgagattgagcctaagcatatcaggatttagattcttttaatctaagatcaacttctgatattgacttggaaagatacaacggtaagtttataatatctttgaccaagttcaatatcggtccagtccaatgtatactccatacattcgaaactagtatactttaccaatgtcctggaaagaacataacacttactccaagtgtaagtatacttcatcgctgattatcacatcagtgtaaatccaaaacactgatgaacagggacttagtcttttgaatcatataatcacaatcacattccactgtattgacaatactgtaattgtgaatgaatatatgttctggacttaactgattttgtgcatatatatattaaaccataagcatgtaaaatacatgtaaacataatcacttcaaaattctaaattgataactatcagattgtaatgggttttatttagggcacaaacccaacagttaaaactctgcatagtccacgtgtccatcttattcaaactattctgatcaaactagggttctttctctcaaggatttttttgcccttttttttggacattctgctcctatttataaaacatagggtggttaattacaatcagattcaaattccacaatcatatttccctgaaattgtgggccttaattacgcatcacataaataaatgcggttattatttaaaaatcatacaactgtgatttatccgcttttactgggtcaatgctgacgtggacttagatatgctacaaagtgtatctcgctggggcatctcgctgggaacttgaatagcaaaaataatcctggcagcgagctggagcttttcccatatcttttcgaggttgataatataaatcccgtcgtttcttcgattgaagacataacgctccatctgtcaatcgcagttcttgatgacaaggtgaacttcagtagtcaacatcatttgaatgtgagcttttatctgagagagctgactcgacggagcagtggatctcattgaaatatgtctggagctgattaataaaggtaccatgagtatgccttcctatagc

SEQ ID NO: 346632 - DNA, 593 bp, Cannabis indica
tgagtattttttttagggcctctttcataagagttttattttgtttcgtcccccctcttttgatcttgtctgccactatttataattgcatagtggcagttaattacaaagctgaccaaaatatgtttacaaccatcatccctaaaattgtgggatctaattacaaatcaagccaaataaatgaggtttttacgcagctatgagtatcccgcttttattgggccgagatgaacgcataatcaaaaatatacggtaagccttatctcatagggatgcctcaccgagaatggaaccaagataactttgatagcgagcagttgcttgtcatttggcttctcgataccaatattgttttaactatactttctggtgtcgagatgatcttcctcgcatgcataccatcttctagcgagataaacgcctccctgtctgttatcttgactcgtcccactatctatactcaatttgtatatcgtataatatacgctaagtgtttttagtgttgtcgttttctctttcacgcagcgaggttgaggcctcgtcatgaacgcgtgcacccacatagtttctcgtcaatacataagttagcagtt

SEQ ID NO: 346633 - DNA, 760 bp, Cannabis indica
ataatctggattacattgaaatatagttttatttagggcataaaacccaacaatcctgctaatctcttaaaaatccatgataaaggaacggtatggttgagtattttggaaaacgattattgggatttgtcttcaccgtcaataaatgggtgtaaaagttaatatatttgtaatgaatatatatttactgtattgaattgaaatgtgtcgagatctggttttagttttgtaaatctagttccagcggtgagatacggtttaagatttgtaattttttaagggtataggtgactgttttaaacaatcacctatactgctcagtaattgcgacagttttgcactgtcgagaaaaaaaattcccaacattttctaccatcgcctattctacccaattttcttaacagtcgaataggcatcagtcttagagaccaagggaaatactttgcccaactatttaaaatcgttgggaaaatctagttttctagtagtgttgggtgttgagtgctaaacaaccttcagtaaaatggtcataactcccttaatattgatttgattgacgcgattcaaagttgtaaagatctttcaaatcatgtctcatacccatatcattctaaacattttaagtccacatttcgttcccaagacaagtgtattttttttctatggattaatcaaaaacggttcaacagacgagatttgagctccgaaaattgacgatcaacatcgagagtcattttcaccattagatcatcatcaatag

SEQ ID NO: 346634 - DNA, 504 bp, Cannabis indica
cataagcgatgacccgttaagtctgcatcaatatacaccccagaccctgtctggatgcatcatagtaaactacaaactttttcttataaaattgtaggactaataccgaagctgttatcaatctctatttcagctcctgaaagcttgtttcacacttgtttgtccacacaaacgactgattctttttagcgagttcagttaagggtgttgagatcttagacaatctctcaacaaatctacgataataaccagcaagaccaaggaaacttctaacctctataactaacttcggtctcggccaatccctgacgaactcaatcttccctagatccactttgattccatctttactgacaatgtgcccaagaaagacacctgaggtagccaaaactcacacttcttgaattcgacatacaattaatgttcttgtagtcattacagaaccattcaaaggtgttactcgtgctcctcttctgactgagagtacacaaggatgtcgtcgat

SEQ ID NO: 346635 - DNA, 612 bp, Cannabis indica
gatgatcacatgaaccaaataacacattaaacaagtaatgaattgataattgaatagaaaagattacatggaaatagagttttatttagggcacaaagcccaacaccttgaaaccttgttctttgattcccaaaacccaagaacctgaccccctctcccctcctcaccatctttccctttctccttctcttccattttcccggtgcaattgcagctatatagccgtccacgatcatgggtggtccaacaggaccatgggatcgtgttccctaggtcccaaatctaaaaaccctaagtttttgagagcgagagagaagagctttaatggtggcctaggtcgcgcgagaacgagagagaagagagggtctaagagcgagagagaaaagggaggcggctgcaccatccactggccttctgcctccaccgagagggaggaacaaagagagacgggggagcagctgatggaagagatgagcagctagggtttttttttttggtcaattaagaagaagaaggaaagaaaaaggagaaaagaaaataaaaaaaaaataaacgaaaaataattttttttaataatttatttattttataattttaaattattttcataat

SEQ ID NO: 346636 - DNA, 1025 bp, Cannabis indica
actggcaccatggcctcgcacccgtaggaaagcgagaagggtgtttcgccagttgtggatcgaggagttgtattataagaccacaggacttgcggtaactcgtctggccaagtccctttgcgttcttctagtctccctttaatggtgtgttttattattttgttaacagcttcagtctgtccgttgctttgcgggtaagcaactgcggagaacgcctttttgattcctagatcgtcacatagttgtcgcatctctttacaatcgaactgttttccattgtctgaaatgagtttgtatggaataccaaatcgacaaattatggaattatagacaaactcgcgcaatttagttgctgtgatggttgcgagtgctttggcttcggcccatttcgtgaagtaatctactgcgactaccgcatatttgactccacctttccctttaggtagctcgcctattaagtcaatcccccatactgcaaagggccatggacttgtgatagaatggaggttactcggaggttggtgggtatatgtggctattcgctggcacctgtcacacttcttcgcaaatgcgagagcatcttgtcgcaaggttggccagtaatacccttgtcgcatgatttttaatgcaagggagttacctccggtatgattgccacaaatccccccgtgtacctcacgaagtatataatcacaatcttccccgctgatgcatttgagtaggggttgactaaaacttctgcgatacaacctttgatcatatattacataacgggcggctcgctgtcgcagctttcttgcttctactttgtcatcgggcaagagacccttttccagatatgcgacgataggagtaatccaggtgacctcctgaacggtatctatctccatgatcatttcacgatttatagttgggtgagctaacacatctaccggaattacatcgagcaattcggcttctctggttgaggccaaacgggccaatgcgtctgcgtgtgaattttgagcacgcggtattcgagacac

SEQ ID NO: 346637 - DNA, 605 bp, Cannabis indica
tgtctgattttgacagaatcctgggaatggagtttttttatctaagtatggggaactgatcgattgcaaacgaaagatgatggtgtttgagcccgatagtgccaacccagcggtgtttgtgggaaaaattcagggggcacgcgtaccaaggataacactgttgaaatctaaggacctgatgaacagaggttttctgggattcatagtcactgcagtggacaccagccaacctgtgacatcagggcctgagaatacaagattggtatgcgagttgcttgacgtctttccagaagacttaccaggattgcctcctacccaggagattgaatttgttattgagttggttccgggagcggatccagctaaagcaccgtatcgaatggctctagcagaattgaaagaattgaagatacagttacaagagttactgaatatgggattcattagaccgagctactcaccttggggtgctccagtgttatttgtgaagaataaagacgggactctgcggatgtgtattgattaccgggagttgaacaagcttactatcaagaacaagtatcctttgcctctaattgatgatttgtttgatcaactgaagggga

SEQ ID NO: 346638 - DNA, 802 bp, Cannabis indica
ttgtggttactcatggcaaacaaggttcttttaatctcttcgcgggaagggcaacaaacaacatcagcttgattctcaatagaaatcttctctcgaaatagatgaccacaatccatcagctgattactatcagaaccagaaaaaatgctattgaaaaagtccaggaattcctggcctatcagtgttcggtcattaatccattcattgtttttattcagaatgcaatcaatggcattccttcttcctcttatagcagcagaaaggaagaaaaatttagagcatttatcaccatccttaagccatgaaatcctagccctttgcttccagtaaattgcttttttggctcgggcttcattcaatcttcgtctaacttcgatctctgaattccagtctctggcaccagctggtagttgttgcattttgtccagattttgttctaactctcgaatgacctcgtcgattttaccaaattgggttctattccattgaaggagggcaacccgagtggcgccaatctttttaaaaactcgagcaggggcccaaggatgggccaccgaatcccaggcattggcaacaataaggttgcttctgcaatcccgcgtccaactttcctcaaacttgaaacatctggagattttaggaccgattccccccgtgtccaagcataaaggtctgtggtcagaagtactcgtctgaacagaccacagaacagtttttggaaacagatgaagccacactccattcacaatgcctttatccagagcagatttcacatggtttttttccagaccgatgattatcc

SEQ ID NO: 346639 - DNA, 697 bp, Cannabis indica
gatcttgtaacataaaggcagcgtagttcactctttctgttgccgtcacccccatgttatcaaggatgcggatgattgtactcatccactactcagctttaattatattagtacctcccagaaaagttggaggttgcaactttacgaagtgctcaaacactgaatctttgtgcagcattataaacccctagttacccaccatttgcacaggagctggtggtaacacttgttctacaggagctactggtgccagtttcctcaaccgatgcaattcttattcttaacgaagtatgatacctcgcatttcttgaaacatccgctgccaatcagcaggcagattattagttccaacccccgcgttatcccccgaattctacggaggcacaggcagtgccagtggattggtttggtctacactaggctctacttggtcgccttgtggtctaaatgattgcgacggttccatttcttacaaataaccctgaaatcaacaaccctggcgagttaggcaccaatagcacacttatgcacttattgccttaaaccataactcaattatttcattccaattaaataaacatttatcaattaatactctaaacatagtttcatatcacataaatacactagatgctcacatactgtctaaaatggaaagtggtaaataaataatcacataagcagttaagcatttact

SEQ ID NO: 346640 - DNA, 535 bp, Cannabis indica
aaataacaaacttttccttatttaaaggaagagttaacaccggagcggtaataaagcgctgctttaacactaaaaaacttttctcacaccgatcagcccagacaaacttcaaattctttcaggtcaactctgttaaggttacaacaatctttgaaaaaccctcaacaaaccgacaataataccgaactaaaccaaaaaagcttctaacttctgtagacgattttggtgttggccaatcctgaacagcttcgatcttggccaaatcaaccatgatcccatctttatccactatgttacctaagaaagagatgtgagataaccagaattcacactttttgaacttagcatacaacttgtgatctcgtaacctgtgcagtacagatttgagatgtaactcatgttcctcttctgattcagaattgacaaaaatgtcatcgatgaacacgatcacacatctatccaggtaatctttgaatacccgattcataaggtccatgaatgtcgctggggcattggtgagtccaaaagatatcac

SEQ ID NO: 346641 - DNA, 831 bp, Cannabis indica
cctgtcaaatcttagcgagagagctaaaagtgttaagaaatagagagattccaatagtcaatgtcttatgaaaaaatcacaaataagacgaggctactaaggagttagagtctgagatgtatatgaagtatcctcactggtttaatttttcaacatgagattgtactttaatattttgggacaaaatttctttaagaaacggagaatgtcaagactcagtttgaccgagtaaaaaagagaaatatatatatgtataataataaataaacaactatatatgtatataaaaaaataaatagaacccattttccacccgtcactcactgactctctctctttctctctctttaaacgacaaaaggaaacccacaaaaccccatcaccggcgtgactccggcaacctctctccggctactgtctggccccatgcgctagaccattcaaaccccaggtccaacaacctcaaccccaagcggcaccgcccttttcgccgtcgttagcccaggattgcaagtgaaagttttgagattcaaactttgaacggattttttgaccacctccggtgtctgtttaacgagtcgtcttcaccacaagactcatctcgtcgaggagaacaacctacactaagctattttgcccagactgctacttttttcagtgacatttttgtagttctgcccctttctgacgactttctggcaatatcgcgtactatttttacaatatcgatgtggtcattttgatatatactatccctattttcaatgacatttttggtacactaatttttaccgccactgatagttaatgtgcaccgcttaggtgaggttt

SEQ ID NO: 346642 - DNA, 803 bp, Cannabis indica
gtcgtttgattcgtcaatttgtgttagtttcagagcctggttgagtgatccttgatacttagggtactgttgtattagttatatagcagaccttagttggagggttgagttttccagattagtgttttggcgtgtgtttacccatttatgtaatatgattagggcatccatgcagcacgagatttttcgttcaggtcggccaactcacttgaatttggaaacgaggtaagaatggcatagaacatatgatatatatatatatatgcgaatgtatgcatgtgtgatatatatgcatgcttgttgtgattcgaacactaccaacactagtatggtagtggtatagagtgcattggtatattgtacaatgtttaaggagtacgttacggtgttaccagtgccaatacggaaaggtacggggtgtgtgtcgtacaacacctaatggtactcggggtacgaaacaaaccctaccaacactcgtgcagtagtggtatgtagtgtatgtgatacagtggttgtaccctagtaaagaacgttcttactcatttgttgtcttgtaaataggtgtatgggcgcctagatacaagtcgatattatatgatttgttatatgcttttcttactgagtctgtcgactcacagttgctactttcatgtgtaagtaaaggaaaggcgaaagttgaacaggagtgaactctgagctaggatggtgtttgtaagtacatgtcatggcgacgcgacctggagtgttcggtctcaggacatctgagattttattttgtagacgctgtgcgaccagattaaaaa

SEQ ID NO: 346643 - DNA, 498 bp, Cannabis indica
cgatttttggtttttcttctcgattctttcaccgcgcattctcaattcttgtacatactttctttaaacacccgaggacctgaaacaaaagaatcaagcataaaatagccctaaaactagaaacaagagtgaaaactaaccgaaaatatgaccggaaacttagactaatttttagcctaacatttgccctgaatgaggtgagtgtatcttctttagtcttttcaaatcctagcatttaatgctattaaaaaattgagagctgaggaaacgtattttgatggttacacacccccactcctttaatgagtgtacttctttgcacttttttgggagaaaaccccaatttcaagtgcatactgatactagcctttggtgggtctataagaggaatttttaaattcattgagaactttcgccagttcttcaatcttcgaaacataaaaaaaaggaagagttccttacaggatccaagccatgttgagtctaaagttaaacatt

SEQ ID NO: 346644 - DNA, 652 bp, Cannabis indica
aattaaaaagatagaagagaaactacaaaaaaaacatggctacatttattgacaatttttcactcataacataaattttttgtggctaaatgtgacttttagtaccaacaaaaagttacttatgattaaattataatatttagatacaagttgtcactaatttatttttagccacaacagtcacaataaattgtgatttttgtgactaatatatttagtcacggaccttttaatcacaacataaaaatgataatttataattagtcacaacttttttacttttagtcacaaattttattgtgactaaaaataaaaaattttgtaatgagatatatataacaaataaaaaggctactattttttaaaaaatatatatataaaaaatatagaaagtagaatttataatttgttgatatggttggaatttaattgacctacaccaactaaaaaaattattcttctaatttgatataagttatttatttgggataattgcggcaaaagtccccaaaaatttagagttgatgcagattaatccccaacctcgaaaattggcgataatagtccctaaggtcacattttttgttagtccgttggtccctaagataacagtccgtttattaattttaaaaatgccacgtgttgaagtatt

SEQ ID NO: 346645 - DNA, 618 bp, Cannabis indica
ctctaaagggtgtttttgtagtagtgtgttattctgtattgtttcttgttgaaattgtgcaggttgaacaccttgaatattgttcatcaagctttggcagaagtattgttcgtcagtcactttttgggaggaaaagtgcaagtgagtcactctttgagaggaagattgcaagtgagtcactctttgggaggaagattgcaagttagacactcctcgagaggaagatatcatgtgagtcactcttcgggatgaaatgtgcaagtgctacgatttgaagcgagttaaaggtcttgacactttagaaatttgattagaagaatagattacaacagctatggcaaattcaaaaaggagtctgaaagtacaacttattgattttaaagatccaaattaccaagttgattatctttagattgattgatttcaagatatgaattatagacttgaattgataataaagcagtaaatcacacaaagatttacaagcttcatctacactgagaacacatctcagccgactagtgcttgggttccccgaaccagggtaaattcatctactaattctcaataggttcatattacaatccctaattctctctaaaggaatcaaatacaacc

SEQ ID NO: 346646 - DNA, 678 bp, Cannabis indica
gtctatgtccttgatccaaacactgagtactggtcgggtccaagcatcgagccccggatcccaggtctcgatgtgggtcctatgtccaggtttgggtcttgggtcgggtcctcgatcctcatccaagttctgagaccaagttctggtcctagtccagggttgggtcccccatctaagttcaggtcctaggtcctggtccgagtccaagttcgtgttcaggttcaagttcgggatcaagtcgaacttgaacttcggaaccgatcccaaacccagactcggacccatacctacaccgggatcaaaacttgggaccttgattctgactgagacctagacaaaatctagacccgtaccaaagacttggactcgaacctggacccaaacccagacccaagccgtgatccggacttcgacccaaagcaaaccctagactcagacaaggacccaaaccccgacccagacttagacccgaacccgaattcggacacagaatcgaaatttgaactgggaataggacccaaaaccgaacatggaccaaaacatagtgggtgacctggactcaggcctcgaaacccagacccagatcagaactcaagactcagacccccacttggatatagactcgaacttgggactcgaacccagatctggacctggagagggatcaaaaaccgaacc

SEQ ID NO: 346647 - DNA, 688 bp, Cannabis indica
ttttaattatttttaattaaaattatgatttggattaataaaaattaacatgtgataaattattagcatctgacggatccgttagaaaaaagagtgatagacttaaaaaaaacgtgaccttggggactattactgtcaatttttaaggttggaaacttatctgcatcaaaaataaattttggaatatatatgctgtaatttttcttatatataataatattttaatatataactttttataggatatatttttgttttttttttaaatctattaacaaataataggataagtagatactaaaaagaaataactcgattacttaaaaataaaattaataattttaattttgatttgctcttattactagaacatttaattattttgttttctaacttgttggttaacaaaatattaaaaaacaccgaaataaaaacaaatttgtgagtttcttaattttgtggttagaaataagtttaatgtgagtgaataagaataaatgaaatatacttttatctttgttaaaaaaatagactcgtagtacaattaataaacctttcttgtttgcctaattactataatttctcttctatttttcaatgtaatattcagataagttttattcttgttaatagaagaataataaagcataaatatggatagagatgagaattttttataaaaagttat

SEQ ID NO: 346648 - DNA, 559 bp, Cannabis indica
cttgctctccaggtgttctctttccctattcttttaatttttatatctttagacattgaggacactgtcttattttagttgggggtggtgagcatattcaagcatgtttcttaatttttgtcatattaatattttcatggtcaaatttttcaaaaattactcatttattcttgtaaaatgttattttcaagccaatttttgctatctttgttacttagaatttttctagagttacaaattgcacatgccaaactttgtggtaagatggttgttagcacatatttgcttagaaaagctaccaagtttaagtgtttatgtttttgtgagtggcgagatttgagaaaataacttttgaatttttattgattcttagaaatgattataattattttggacatggtactagggtttgattggatgttgctttaagggataatttttatagacaaatcttattaaggagcctttttgtaattattttctttatgtgcaaaaaaaaaaaaaaaaaggaaatacaagagcaacatttccattattacatgttgcctcttgttaaaaa

SEQ ID NO: 346649 - DNA, 662 bp, Cannabis indica
ttcgtgcgtcaagttcccaacaaagaatggggtaagatgactgagagggaaccaacaagttgcacgagaatgttacaaccttgccctaaccaaggctaaaaaggaataatcctccagtcaatgttcagacaagggaaagagcattgccaaatagggaaccacccaaggcagggacgaagacgtggatccccgacttggggaactaaatacaaatgttgggccggtggaagaattagaagaaattaaaattgatccaagtgttccaaccaaaaaactcaaaattggaaaacgtttattgcttgaagtaaaatcagctctgataaaatttctaagagcaaaccttgatatttttgcctggtcacatgaggatatggtcgaaattgatccctttataatttcacatgccctgaacatcgatccaaacttctggcccgttcaacaaaaaagaagattgttggtcaaagaacgagccctagcactaaaagaagaagtagaaaagctgcgcaacagcaatttcataattgaggctttctacccagcctgggtagctaaccccgtactagtgcccaagccgaataaaaaatggctagtatgtattgctttcaccgacctcaataaggcgtgtcccaaagactgttttccacttccaagaatagatcaac

SEQ ID NO: 346650 - DNA, 547 bp, Cannabis indica
atatatcacttcccaatataagccccccactgcgcataactctacgtgctaaactactgtcttacttgatgtcatgcaatagtagagattctaaatctctgggtgctcttgactaagtgccggtaatcctagtcacaattccgagatttacacaaatagggttaacccctgattccacatttataaaatgtatacatggcattcaaaatacagataatcacatagagtttggaacgatctttacaacggtatatagaactccaaaaacgaagttcgaatcacaaagttatgaattttcaaagttaacacttgaatctgcccagaaacatgagggcgggccgtggcatgaaaaagccatgccgcggcacctagggccaactcccaggtctcaaaaaataggggtgggccgcggcatgcaatagccatgccgcagcacctgggttccaaacctagaaaaccagcaacatgaacttaaaaaatcagcccttaaacacacccaattcaatccaaaacttaatcaaaacctccaaaccaacaaatagatttt

SEQ ID NO: 346651 - DNA, 814 bp, Cannabis indica
ttaatttgtgcttttaacatatatatatatatatatatattcgagttgtaattaatggtgtagaattgcaactgtgtttttggattaatattggtattagaatagaatttgcataactacatttttaccttaccaagctctttatctgatcaccatctctcatctctcattttattatttttaattcattcacatttttatcattttatttactaaactaatctttagttgtaatttacctccctgtggatacgacatatagctcgtttactaccgcgatcgcagtgtaactaattgggcgacatcatcgaccctcaaatattagcacacaacctataatataatgcaatatacaatcaaatcaaaattttaattattaaattacttactagctattaaaaaatataacaagttactagttactaaattctatagttaatttttttttttaaaaaaaaaaacatatacatatacatatataatcaattatatatcacactaacataattttaaaaactttaattctaaactaattaaatccctactacctcattcttattcacaacaaatatatacacaaaatacacaaatagtatatacacaatctatataaacacatattcaataataaaacacaaaatatatatatatatatatcttatatcaagttaataaatatttactttataaagcaatccgacaataaattgcgacaaaaatgcgaccacctatagcacacacacaatataatattaataaaatgaaaaaattctaaaaaaatttataaaaatgaaataatatcaatgtacataaa

SEQ ID NO: 346652 - DNA, 763 bp, Cannabis indica
atatgcacaaggattttgggatctaaatgagatatgaaaaggcttgaaggtgcagagagaaggcactacacctagttcgggtacacctgaagcttcatactcgaaattacctagttacttgcacatgctaaagttggaaaatccaggtaccatcacagattttttgatagaggatggtcacttcaagtattgtctcttctcgttgggtccttgtatgcgtggatttaggttttgctgacatgttgtatgtgttgatgggtttttcttgaagactaggtatggtgggtaaatgttgtgtgtagtggcactggattcaggcaaccacgtttttccaatagctttcacgatagttgacagcaaaaaaccataactcttggacctattttatgagaaacttgaaagaagctgttggtgatattaagaacttagcctttgtgtctgatagacatcaaatcattgttcatgctttaaagctcgtgttccttgatgcacaccacaatgttaccaccacattactatgaatgtcaaccataagttcaagactgacatattcacaaatttatttacacatgtgcctacacatattaaaaaaaagtttcatagagaatttgagaagattcaggcaatgaatgttgcagttgcattatatcttgaggaaatgggatttaagaaatgggttcagtcatactttttagggatacgttacaatgtaatgacgagtaactgggttgagagcttcaacaacactgttgggttttatgcc

SEQ ID NO: 346653 - DNA, 569 bp, Cannabis indica
aaaaaagacagagattaaatctaaacaatcatgctccaaagaaatgagaggaagtccaattctagcaaccaatccaatgcaaccattataagagctataacttctgcctgaataactatgagatttccttgagtccattttaatccaactaagaaagcaagaactgctgttagaaaagttgatacctacacaaaaacatcaaataaataaatttagtaacttcctaaataaatgataaaataacaattttaaaattatgtcatataaattaatactatagtaaaattttgaagaaagagaattataatgaaacttatttaattagtaaaataaaaatataccgatataaaatatatataatttaattagtacactacttactggtaatattcaaataagaatttttatttaaacaaaaatattatattatgaagaaaaattttatctttaccgactgcggaacaaatcttgtgtaactgctacttcatgacattcttacgataaacataaaacagtcaccgccaaaaaaaatgataccaaacaaaacacactggacacatactactaaa

SEQ ID NO: 346654 - DNA, 790 bp, Cannabis indica
aagtatgtcaaggccgatcaaaacggggtgataacaaccaagacttgttaccaccaccagtagatggacatctgcaagtcattattggaggcccacacatagctagagattcaggcaaagctcgggagaggtatgcccgaacagtacaggacgagcaagaagaagtaatcctggtcgtagaagagagaaagccaaaaattccacgggtaggagagcacaccataacattcaatgatgaggaagctgtcaaaataagatttccgcacaatgacccattggtcgtggaagtccacatagccaacaagatcgtggccagaactatgatagataatggagcctcttccaacatcttatttaagaccacatatgaaaagatggggctccaactcaaagatctaaccccctgtcttctgcctgtatatggtttctccggccaaggagtcgcacctctagggaaaattcgcctacccctcattgttgggcaagctctgacgagcataactataatggcacaatttctggtattggacgttccatcagtctttaacgtcatgttaggccgaccaacctatatgacttaaaggctattgtgtcgatatttaattcatgcctgaagtttccaacaaagaatggggtagggtgtctaagaggaaaccaacagattgctcgggaatgttataaccttgccgtggccaaggctaaaaaggaagtatcctctagccagagcacagacaagggaaatgttgggattttataccctaaataaaacccatttcaatctaatctaatt

SEQ ID NO: 346655 - DNA, 1170 bp, Cannabis indica
aatcgtaccttgtacatctgctatttgttggtacccatcaactgaaattcctccataatttttaaactatataaatcgataggcaactataaggcaacgccaataaataaaaacagacttatacgtaacatgtcgttccttgattagaattagatcttgttattgtgtttaaaaaatagaattgcctattgtaaaccaggaatcaaccagaatgcaactgtatatcacgtagatttattatttaaaaaaatttcatatcataccttgttttggatttgagggggagcttcagatctgtttaatacagatctacattgcatgaatctagattttcgattctggagggagttattttgaacgattaaaaccgaaatcaaacgttgaatttcagtttcttcccagtttttctggttttttttcataattttctgtttagatcattgcagttcttcttttccaattaatttttgtcagaatttatggttgtattaccatcgttttaatttcattctggttgtgttgcagatttgaacgatggaggtatgttcatcttcttcgttcattccgtgcggcttaaggtatagaccaggtggtatttttgtaatttttttattctgggctgtataaatgttgaatgggccgacccgtagtaattttgtaattttttaccctttttggaattttcctatttttttttccctattattttttacaaaataaataattactatttttgttgggttttttgtcctaaataaaatccatttcaatataatcaaatttactaattaataaaaaataaaaaattattttatattccatggttcacatgatttatttcataattatatatttaatgtataaattctattaagtccggaacatatatattagttcatgattatagtgtcgtcatcatagtagaatatattcatgattatatgttcaaaagtttaagtcccatgatttgttagtacactggatttagactgacatgataattagcgataaggtatacttatacaccttggataagtgttatgtccttttcagagcattagtaaagtttaccagtatcggatgtatggagtatacattggattggagcgatattaaacttggttaagatatcataaaattactggaatacctgttggaatatgttttacc

SEQ ID NO: 346656 - DNA, 503 bp, Cannabis indica
ttaattaaagctcaatatgaaagttcattagggttttataaaacatatattagatttaattaattgtataagtgtattaaatatcattattatctaattaatgttaagaaattcataggtttagagaaattcgcaggttggaaaattattttactaaaacgaccatatctagagttttataactctaattgaggtgattccaatggcgttggaaagataattcaaatatttataaattttatagaaatagctatatcataattcaaaattttttttaggtccgcgcgttgcgcggtcttaaaaaaaatcataagctatatatattattgaaaaaagtttattttttaaatgtgaattttttacaaagttatatcatagaaaaaactgaagtttctaaaaaataataaaaatgcattgaaaaaatatgatttatcttatcattcttagtcttacatatataaatttttttaattattaacaattaatttattaaaatatctttt

SEQ ID NO: 346657 - DNA, 988 bp, Cannabis indica
tgttagttttttttagttgttagacaattttatgttagttttgcaacttttacttttttttttattttttaattttctctttcaggttccagattccattccaaatattattgttgaaaaggcagatgacattgcttttgatgaagaagagaatgacactgttacttgtactcctctgttggataagagaaaacgtgtcccgacattgaaatctccttttgttgattttgggtcggctgatgtgagcagcagccaatggaggtaatgtcctcaggttctcaatctagaggagatgagggggattttaagatagttacatatgtgaagggcctttacgctcttaacgattcattttctgatcccgtctctcctaaaattgaggctaagtttgatgattggattagcaaagaattgctaaaatatcctaggtgattattttctttattctgttttttttttgtttgcatttctttttattttgccaattatttgaattcaatattgtttcttagtcgtttgttttttgatataggccttacaatgtttacgagggtggtgcgaagaaatttttcccagggttctgattaggtgtcgattatgttgaagataaaacttggttttatcatttatcttgttgtgacatgtttatcaatgactcggtaacatttcttattccttttacattttttatagttgtattatagttgttttattattgttttttagtttagctattgttattaagtttttgtaatatttgttcacattttttttttgtatttctttattgtgttgtttcagcatatgaatactatattctattattttagaaaaaaaaaggtaattatgcttttgttgttactgtgaattttgctacaatagattaccttttcgatgattctattcaatctttataccacaaattctgcaaagccaagtcaataaaaacaaaaatgtctcacatccatgttgctcacccaatagcgca

SEQ ID NO: 346658 - DNA, 658 bp, Cannabis indica
tggtcggtcggtttttggattataaccatgaaaatcaaaaatcaaagttttggagttttttgtgtaaaaaaatcgaccaaaccgaccgttgctcacccctaagtgctcccactcaattgtactaccatgctcccaagatgtaagtattgggccgacccatttggtcagctttaacgaacaagttaaagaatacaaataatacagttaagctagaacctgaccatctcaagattaagatctattgatctaagatcaactaagtgatattgacttacaaagatataatagtaagtttatgatatcttatccaagttcaatatcggttcagtccgatgtatactccataaccaactccttggaaatgacataccacttatccaagtgtaagtaaactttgtcgcagattattacgtcaatgtaaatccactgcactgataaatcatgtgactaaaactttaaagcatataatcacaattactcttcactatgaagacatcactgtaattgtgaataactatatgttctgaatttattagaaattgtaaattaaaccataattacaaaaataatatgtaaaattaaatgacttttaatcttctattgatagaaaataagattatattgaaataagttttatttagggcataaaatcccagca

SEQ ID NO: 346659 - DNA, 666 bp, Cannabis indica
ctcaagaacccggagtgggggtacttgggccaaattgggaagggccatatgaaatcgaggatgaaatcggctccagaacctataagctaaaaaggatggagggaaccattgtgccaagggcctggaacgctgatcacctccggaagtattaccaatagtccacatatgttaacttaggatgtgtaaagaatttgtatcggaaaagcgtatgcaacctctaaatttcaaataaaactgagtgccttaaaaacagagttttcatgccactcagggggtagtaaggcataccgcacgaacaaatgtaaaacaggccaaaagtaaaaacaaaatatcctgacccaaaaggtaggtccaactcctctaaggacctcaccttggcggccatttcgtccatggcctccttagcctcccgaagctcacgcctggccctggcgacgacctcaccttccgccttcagtgcctcccgatgcctcgcctccagctcagcctccctccgttgcacctcctctcggagcctcgcctccgcttggacttccctctgtttggcctcctccttgagctttgccttagcaagggcctcctttcgctcggcctcctcctggattgcccgcctttcagcagacaagtcccgaaggatcctcacggcctcgtccatgcccccgaatt

SEQ ID NO: 346660 - DNA, 957 bp, Cannabis indica
tgggtggctgtgagagggatgggttgagcctcggtttgaaatttttttggctgtgagagatgggtttcgtgggggagggttcggctgagcaagaggaagagagaggatgattgtttgaaatgtgaggggtagtttaggaaaattagaaaagttgtcatataggaccaattttaataactatgcatttagaaaaaaaaattaaatggtattttaagcataaaatttcaaatttgggtatgtattataatgatgatattaataataatgtatgtatctgctcacgaccacgcttccaatcaaaatttgtacctttttaggcatgaatttgtataagaataattatatgaacgtgtgtaatttaagctaattagaatttttaatttttaaattttaatatatactaaattatgttttttgaactttttttaccgttaaaaattctctctaaactattgaatttgttagatttaaggacttttatctaatttcattcaattttactatttcggtgattgttttatgtactaaattatatacaaaagtcttcaaatccaacaatctcaatagttcaaagagcatttttaatgatttttaaagttcaaagagcataatttatagtacatattaaaatttgagagtaaaaattttaactagtctataattcatagacaaacatgatgaacatatttatatgataaattatttttaataagtaaaatatatcttaaataaagataattgagaataggggtgttaattggatcacattcaatgttttaggtccatccaaatccgatccaattatatattggatgttagattttaccatccgatccgatccaattgatttcagtcatccaatcgatccaacatccattggatattggattggatcggttctatccattggatgtatttcatatatatttattggtttcaatttgaatttattcaata

SEQ ID NO: 346661 - DNA, 927 bp, Cannabis indica
attactcataacggtaataaccgttcctaaccataggtcataacctaggctcaacatacatccaatcagaatcttgttaataatcaaggctatatcattcaactgctaacatttagccacatatggtgcttacaacttttcttaccttagttcagaactcaagcgtgcgggctgacctgagtggaaaacaaattgggcgatcccggtcctatgtcacgacaattgaaactcaatgaataccttaatccaaaattttgaaataaaaccctaactcaaaaccaagcataacctaactcccaacaacttcaaaataggtcaagcatccaataaacaacctaaaacaaatgatacgcaactccctgggccaaaaactaaacctgaagaaaacctggaaatttcccctatagggcaaccggtcgactggttttaatgcaccagaaccaaccaatcgaccggttctggcagaccagaatttcttgggttctctccttcaaatttgacccaaaatacctccaaacctaactaaactttccaaaacagtataatatcataaatataatatatccaagcttcaaattacagtagttcaatctctaactcaaaatcacatgttcaagtgaaagaaacttaatttctttagcttcttctaacacaatacaatccaaacagccatgaaatcgactaaaacatgcataaacaaacttaattcaacttagaaatcatgcttagatcttatctaaacctacagccctgaaaactcatatagaactaacaaaacctagcttaaaaacctaggaaatcaccaagaacataaggaggaaacttacctcaagattctaggttgactcggggttagattcagcttgaaatgaggaagaataactgaagaaaatttccccaaagctggctggttctagcttgctcgaa

SEQ ID NO: 346662 - DNA, 526 bp, Cannabis indica
atagtgggacactatagactcccacatatataggatagcatttagtgttctattggaccaattttgtgtcaagactccactatatttaggattttagtgtcccattggagaagcccttagcttggaccgatactaattcgccattcctaactttgagcttcaactctcctggatttagataatctcaagtttcaagcagctgtaatgaagaacaaatatggttagttgatctaaaatcaacaatccaaatggatttccagaattaacaatccaaatggatttgttattctctaaaacacatgtttcaaaaattaaagtgttaccttctttccaatggtctagaagtctgggacatctttcttccaaatgtcccttctctccacaatatgaacatagaagagtacgcctgctcgtttgttcatttgttctcaaaattgaacttgaagaagcagcattgccagaagcatcattctcaaccactacaactttcctttttctcctgtctgcaaagctggagggaggcctc

SEQ ID NO: 346663 - DNA, 518 bp, Cannabis indica
ctaaaaaagcattagactttgttatcaaaaacatagtgtgtcgatacggcttgcctcataagatactctcagataatgaaaagcaatttgactgcgaagaattcatcgacttttgcaaccaacatgaaggcattaaaagtttcttcgcggtggcaaggccacaaacaaatgggcaagcagaagccgttaataaaatcctaaaggtcaccctaaagaagaagatgctgccctgcaagaacaactggcgtgaagaattgccaaaagtattatgggccctacaggaccactccaagaaccacaaccgggcactcgccattctcaatgtcgtacagttgtgaggctatggtcccggtggaaaccttgttcccatcccacaagagaacgacatacgatccagtaacaaacaaggctttattacaagaagcactcaatcaaatttaacgagcttcgggatgagtctcaagtacggatggcagcttatcaaaaggaggtggctaaacactttaactccaaagtca

SEQ ID NO: 346664 - DNA, 522 bp, Cannabis indica
ttttaagtcttgtaaaaattggtattgttaggtgtgtttttccaattaattgtgcttgtttgttgttgaaaaaagaagaataaaattgataggaaaaagaaaagaaagcaaggaagaagtggaacacaagctgaaattggggcagattactgcagcaatgctcaagcgaattcaacattctggcagtgacgtggaaacacgagtttcacttatccacatcagcaaatttgtcccagtcactcacaatacaccagctggctgctgtggaaggaaagagactaaacctagtgggccaaagtagaaaaagattgggcttctattttggggtgtgaattttgtaccctaacaacccaacaactaaaagaaaagaaggaggaagtacacctccatcatcctcaaggacgtgagcagctgttgcaattttttttaggagtaactacagcagaaagtacaacagagaagaaagaagaggggaccaagccttagtgtttgacttttcttttactctttcttaatagtttt

SEQ ID NO: 346665 - DNA, 711 bp, Cannabis indica
tcatgggtggattttttgagagaaaaatctgatacttttgaagctttccaatctttgtgtttgaaattaagagttgaaaaagattgtaacattggtaaaattgttaggattaggagtgatcatggaaaggaatttgaaaataccatatatgatgaattttgtaaagctaacggtatttctcatgaattttctgctcctaaaactcctcaacaaaatggagtggttgaaagaaagaatcgtactctaacagaaatggctagagtaatgctgaatagcaagaagcttacgaggcgtctttgggccgaagctattaacactgcttgttatacgatcaacagagtattcttacgtccaggtactcacgaaacaccatatgaaatacggaaaggtaaaaaaccaaatgtaagtcactttcatgtgtttggatgtgtttgttatcgtgtgtataacatgagaacccaaactgttatggaatctgctaatgttgttgttgatgacctaaaagatttgtctgatttttctacagaagaaaagattgaagatctgctagaaaaacctactgctgtggaaaaggaacctgacaaagctatagaagcagttgtcgaggctacaatgcaggaatctgttgctacagaatttccaacaacaaaagaatccgagcattcttcaaattcaatcactgatccattacagagggaaccatcctccagg

SEQ ID NO: 346666 - DNA, 369 bp, Cannabis indica
ctatttataagcagttcgaaaaaaaatgattttcaaaaatttaaactcctcgaattccccctgaaagcatacgttatgtactcatcaggcagagtaaccgtcatcacgcacggacatcaagtcgtgattcgaggcagaactgtcaatcaacattaatgatccgaaattaaagagacccttggttagggtcacgtcagttcgtcattcaacgcctaggacatttttcactcatccggacaagactccaggctgagtgaagtccacgcgcgacctggaaggtgttggaatatgttttaccaagatctaaatttactaccatgtatgttatttaacatcctaaatatgaatatctaaaacaatgtaaataaa

SEQ ID NO: 346667 - DNA, 615 bp, Cannabis indica
tttatgattaattataaattaaaaaaatatattaattatagtctaggttttaaaagtaatttgagtcattaaattaattaaagactataaattactattcctattaattggtaaaatatttaatccttatcataatagccccctttattttatttattcaaacctattgaataatgacggttataagtaagatacaatgataacaatgactatgaatgcaatgacaattattaaatggacgtactgctgtaacgctctatttcatagggacgtcacgtgtgtgattttataaattaatttaatactaatatattaattaattattaaaaactgtgaggataataaaaatttgactaaaataaaacactaaaaactgacattataatgacagtaaaaaggtgttccagagatacctattataaaatatttacccaaaagactatatacaatagaaattcgaaatacaattcaaaatacaacagatacaattagtccaaaacaactcctggcaatccaacacgcaggccggtgaggtcaatatgtacattgctggagaagactatcatctcatggttgttctaacttttccttgcccttacctgcaccacagagcac

SEQ ID NO: 346668 - DNA, 607 bp, Cannabis indica
ttattagatttaattatatataagtggtattaaataatataattatttaattaatggtaaaaaatttgtaagttgagaaattcggaggtttagaaactgttttactaaaacagccatatctgaagttttataactccgattgaagtgattttagtggcatttgaaagataatttaaagatctataaattttgtagacatagctatatcataattcataatttttctaggtgaaaactaggccctaaagttaatagattgagagcttacaatttagatttaaaagttagatatttgtttatttaataagttatcatattattattgtcattatattattattattcataaaactaaacctaatagattcaggatagtataggtttcattcaactctaaaattatatcgttctattcttctcaccatctaagcaataagactcaccctaaattttgaagtcatctttccattacatccttagccaaatctataccactcttcactctcatctttgatcaccatcatctcatgtgtattgatccaagcaacttgatgtaattgaggtaagaaactctacatttacttatttattgatcacaataggagaa

SEQ ID NO: 346669 - DNA, 237 bp, Cannabis indica
ttggaaaggtcaggcactctttcatggggctgggtctattgcttggaaatgtttgtcaacctaaatctgcaggtggtttaggaattaaaaacctggaacattggaataaagctaatatttgtaaatatgtctgggcaattgctaataaacaggagaatctctggatgagatgggtccatagtgtttacatcaagaagcaggagtggtgggattactctgcctcgattcacttgttgg

SEQ ID NO: 346670 - DNA, 1634 bp, Cannabis indica
ttttattattttttttatgttactttcatgaacactgtaaaaatatatatataaaaaataaatgtaaaaatgtaaaaattttataaaataaataataatttatgcagattttcactatataatctactcctatatggctatacatattgacagctgcaaacatgtgatatttttatataaaattaagaaacaaaccgtgtttcgtgtacagttgtattttgtttagtaagataataatttttaattcttttttaatatttttttaattatatgagtaactatatttttttatttttatttcaaaaataaatttaaatatagtaaaagaaattcataacaattgaaaaagacaactttaataatcaataagtgtcaaaaaaaatttaccataagtctacctttatggtttacatgtcatggagtactcatatatttatatattctcattctccttcataaatatttggaatgatacaacaataaagatgtatacatatatatatatattaataataagatagataaaaaatttataatcttaaataaaaaaatgaatgacaataggagtaaacttgttctcctttatcctagttatgattttatttttcaagcgattgaatgaaagtgaaggaacttattatattgttaggttggtagataattttgtagtttttttaaattttaaataattattaattgtgtagtattttttttttaataataaaaaaaattataaattataattgatttgattcataaaaaaataactataaattatgttatacccgaaattcggctaacattttagtggaggacacgtgtcaagataaggggaatatgggtcgatgaaatcacttttaatgaataactcattaattacgtaagtaacagagtatacttgcaactcgctgactataaggtcttatgcgagaaaaatatatacaaactattgttcagtatattaacgagaaaccatacgtcattggatgcataaagcgagacatcaacttcgttacacctgggaagacacttagcgtataatgtacaaactaagtataatagtcgggtgggctccagacctaataagcgaggcgcctatctcgccataggaaggcgcattcctgttactttcaccaattaactccagacattttacagagacttataatcttgacgagtcaaaagttgatatttaaattaatgactaccgaggaactctctgttaataagaactgtgattatcagaatgaagcattaagccttcattcaaagaagcagcaaggtgtacatcatcgacctcagaaagatagggaagaaagctctagctcgctatcaaggtcattggaaccaagttcctgtcgagacatcctagaacgctacaattaaagacgtgtttaaacacaagatcattttgacctagtaaaagtgggaaaatcacagctgtgtgatattcaaattataaccgcatttatactacgtgatatgtaatcaaaccccatgatttcagggaaaaaacgttgtaaagattacaatcaactttgtaattaactgcctactatgtgattataaatagtggcaagttagatcaaaaaagggacaaaaaaagatcataagagaaaaaggccctgaaaaac

SEQ ID NO: 346671 - DNA, 1547 bp, Cannabis indica
attgaattaaaatttaattatttaattaattttggaccaacttaaattaagtaattttcataaagtttattgaaaattaatactaaggatggaaaataaatttttattttcagatctatccaagtagatctttataaatattaaattaaaagttatatttaaagttgtctaaattagtaattttaattaaataaatatattaatattaaaataaatagactaaaataaacatcaaatgaaaatagactctcttaaaataatgagctttaggtataaggatattcgatgttcattcattagcaatttagcgccgtagaatcttaaaagataagtattattgtatgtactcttttattcttagtaacaatcacactaatagtgactgctgagagtagatcttacaaagtatgaaataatggtagaagctcataagatagaatggccttgactctcgcctaaatgggacaatatcggattcctgtcttaatcgaataaaaggttgctagaatagtgaccaatttagataagctgactactctattcaatgaatcagtttgttgaaaaccttagaattatttaggatgtgtttatttttgtactttcacatgtctttattacgtgctaaatgtatgataatttctgaattatgtttaaatttatattgtaccttcaatttgttttctattattaattgtaatataaattttgagtcttcattgttggtctaacttaatttgttgttttaatgggacaaatcctaaaagattgttatccgttagacaaatataaaagtgttagatcttgacagataaatatttgtaaatgcaacatttagttaactcatccaaagatgaaaacttagactagtgttcacaatatgaaacaatatagaagtttgtacaataagaataactttgactcttgcctaaataagacatcgttgattcttatttttatcgaaattattttttatttttcctctgagcttttctattatgaaattgcttagatagtctatcattggattgatggtttatagtaaatcatatgcttatgatgtcattctattttctcctataaaattgaatgacgtagatgactatattctagacattctattccgaaatgatataaatcctcaatcttaaaaaatctcctacttatatatgtttattaaagacaacttagtcttagagttaaaatattagtggtggtccaagctagaataattactcaatgaatatttggtataaatttaagtctttgactttaaattttagagaaattttaaattttagtttctcgaatacattagacaatacagtataacttttagaagttgttaatatcaatttttatataatggatctaaactgtaggttaatgcatgtatagagtatgagttttgtactttgtaaccagaatctacttggactattctaagaactctttattgtaagtagacctacgttatcaaaagatcacaaccataatatatatttatggcatttgtatcttgttcatagtggttttgacaagatcaatct

SEQ ID NO: 346672 - DNA, 1062 bp, Cannabis indica
acaacttataaaaaatcatatctaacttttaaaaaaaaattattttgaaattctattagtaataaatcattaataagtgtcaaaactgtcctgaaactattatgcaactactagcaaactatttaaattttgccaattaatagcaatctatcaaatataacatttcatcctgtgtaaattctcatagaaacttaaacaattcaaataatcctgatgtatctattttattgcttgattgttgcatgtctttcagttgtgactgtgttaaccacatttgctacatttgttctatttttttgtatcccaattagctataaatcttcttttccttggtcttccagatcttattttctggtttggtggtagaacaaggatatcttttatgctttatggtacatcccatgttctgtgattgtgtatcggatatgttgagccgttgtatgtttcaagccatgttcttgtcgtgtaataacttgaaccgtagttgtaaacattcaagtttatctcttttatcacagcaagcgcttgagcacacggtaattcgtcaatttggaattaattgcaactgcacccatgatcttgttagttctatcacttcgaacatgccctcatttattggctttacctacaaattaggtcaatataatcaattgtcaatatgtacaagaaactggaaaacaactattaggaaactgtaatgcaacttaaagttcaaagagattttacattttctgttaatgagtccacaaagttgttgactagcttcttctctgctgtaggtgttaaatatgttatggttttctgtgcttttttcctgtttgtgtatgtccattgttgtatcaaagctctcaatgactccattagtgttgtgattggtagttctattgctgctaagtttgctgcatttagagattcaacaatgttagaagtcatagttggatacctgttgtgtttgttgtggtattttgaccatttatggtgtgcaacttattgtaaatttggtctaacatgaatgtccaagcttgctctctatgtatcaaatttcctctctatgtatgctct

SEQ ID NO: 346673 - DNA, 790 bp, Cannabis indica
acccgaactcggactcagactcggacccgaacctggacccagatctgaacctagacctaggacgcgatcccaaacccagactcaaacctagatagggatccagatacgaacctggactcgaaccgagacttggacccagaccgggatcaagactcgggacctagatccggaccgagaccctgtctataactagacctagacccgaacctgagacccgatctcggacctagacctgaatctagacccaaacaaggatctagaactggatccaaacccgaacccaaagtgggacaaggactcaaacccaaacccgaacaagacactaaatcgaaattgatattgggactaggacccaaacccaaacatggacccagcccgagacctacgacccggacctggataggggacttggacttggaccttggaacccagaccaaaattgaaactcgggactcagacccaaacatcctagactagaacctagatctggacccagatcgagattagaacccgaacccaaactcggacaaggacttgaaccccaatcgggtcttggactcgaaccgggacctagggctcgaacctagatgggggacctagactcgtgacacgggcattagaactaggaccgagacccgggacccaaattagaaccctaacctgttgtcagtgtttggatttgggacccatacctggactcaaacccaaacgtggactcagacccataccccaaacttgggtccaagtccgagtctaggtttgagttcgagaactggaatctaactaggac

SEQ ID NO: 346674 - DNA, 838 bp, Cannabis indica
ccattagatcagtcttgccgaaatatgtttgagagtgtttgacatgtttacattttctttaataagttgtgcgggaagtaattagaacttgatcagttagatgcattacatgaacatgtagtcaaaacattgtgcaacctagaaatgttttttccaccatctttttcgacatcatgatacatttaatggttcatctagtgtgagaagtaaggttttgtgggccggtttgggcgagatggatgtatccattcgaaagaaatatgaaggtaacttaaaatttttgtgcctaacaactatcagccaaaagcatctgttgttgagtgctacatatctgaagatgttgtggaattttgttcagagtacatggccggagttgaggcaataggaattaacaaaccaagaactgacccagatgaagttgatagaggattaagtgggaaagggacaatggtgacagtgtccaagcttgaactagataaatctcaattagtcgtgatgaacaataatgcagaggttgagccatatataacataaatagcttttcatttgattaacatttcttaagtcacgataaacaataacttgatttacctcacttgttttacagtgaccatatggagttgttacaatcaatggttccaagaaatcataaaagtaaacgaaaatgggtcgcagaccatcattgtcaaattttcattgggtggttaaggaatgccattatagcaaagttgaacaaaccaaatcacagaatatttgatgtgttgagtcgtattgccctttgacaaacttttgcggtagcaaagcatgaagcgtacattgtaaggggtaaatgtttcca

SEQ ID NO: 346675 - DNA, 547 bp, Cannabis indica
caagtatttggcctgtgtaacttttttctaaatactcgattgatcagtgagggccttccaagcgcatttaagggtgaaagctagattaatagtttccacacgtctaaatccaaggccacccctcatcttcgattgacacagtgagctccacacaattgtgtgacaggttttctgcttctctgtatcaccccaccaaaagcgagccccacgcaatggtgtgacatgtttttcgctttggttgacacagtgagccccacgcaattgtctcgcacatatatttgattcagtttataatgtttgattcataacatattccttctataataataaaaaaaaaaaaagcactcttcttatattttgcaaagtaaaaaaaatcttcacacatatatagctatgaatacttatatataaataatttaatattattaatttagtttatatttattatattgtgttttttttcaaaaaaaaaaccaataattaatttataatttatatttttatgaaaaatttattaaaataatagtaaaatatcaatttgtaaatt

SEQ ID NO: 346676 - DNA, 572 bp, Cannabis indica
ttcaacaaataaataaaaaaaattaaactgaaaaatttgatatacattacacaagcataatattcaaaacagttaaaactatcaaatggatacaaaatccagaaattaataaaacgcattttgaactataaaaaaaactacacaaaaaaaaatcaaatccttgcacagatctatgacgctgtcaaacgccaaaatccacagccgtcgaacacgaaagttgagagccacagcgagcttcaaatatcgtcgacaacggaatccaagatccctgcagataagaaagaaagagagagaaacagagaaatgaaagaataaggaaaaattgaccttggatttcgaggttggccggggatctgagaacttcggtgctggtttcttggtgagaacttcagtgatggtttcgaaggagggtggggcactggctggcagcagcgatcggcgaagaagaacaaaatcgacgagaccaacgaagaagaagaggaggaggccttctagtcattcgtcgtccgtcgttcatcgcccgtcgccagagatggactgggcagaaatcgaaagaagaagaagaagaagaa

SEQ ID NO: 346677 - DNA, 935 bp, Cannabis indica
tcaaggcattaatagacatgccgtccccgacaaagcctaaggaagtacaggccctgacaagtagaatggcggcacttcacagattcatttcaaagtcaattgataagtgtgtgccattcttcaacacattgcgaggcaacaaaaagttcgagtggacaaaagagtgcgaagaggcctttcagagcataaaaaggcatctcgcaacgcctccagttttggtgaaaccaattagtgcagctatagtgtgggaagaggacaagcactagcaacctatttactacgtaagtaaaaggttactaggggcagaatctggatatccccctctcgaaaaactcgcgttatgcctagtccatagtctcgaaaactacgaccatactttcaagctcaccccataaaagtgttaaccgatcagcccttaagacaagttttatcaaaaccagatgcttctgaaagattgataaaatggtcgattgagctggggcgattcgacataacatacaatcctcgaacatccatcaagggccaagctttagctgacttcttcatagaaggtataactctagaagaaatcccacctgatcagcgagacacggaaacctagaagttatttgtggatggcgcatccaacgaacagggttcgggtgcaggggtaatattaatactgccggaaggctttaagtttcactatgatctgaggttccaatttgacgcatctaataacgaggctgaatatgaagccttgattgccggcttaaagatagcagatgccttgaaagtcaaaaatctcatttgtcatagtgatttatagctgattatgaaccaggtccttggggaataccaggccaaaggcttaaaaatggcaaagtatttagagaaagtttggaagaacttggaaagattcgattactttaaaatcgaacaaatttcgagagaac

SEQ ID NO: 346678 - DNA, 581 bp, Cannabis indica
tttaaaataaattgaaaaaataaaactaaaatcaatattctcacaaatatttattatgcattcataattcatagaagataaaagataaacctacctaaaaaaaagcataacctagtagaaaataaaaactaaatatgtctcaaagtttgaaaaaaaaaaacaaaaaaatcataacccaagtataggatcatagtctcatacctctcaagcctcccaacaaattaaaaagtaaacaaagatgaaattaagaatcgagaagaaaatatctttacacatgtaatccacaatgatcatcagttcactatcgtcattagatcttcataatttaagcatatgatatataattttgattatggatgataatcaaaataaatcatatatatactatatatatatgttaagaataaaaaagaaattatatatatctatatcgaggtcggatatagtacgaatagtattattcccgcccccgccccatccccgcttcgggtactaaaattgtcccccaccaccaccccattaaccaccaagacagggaactccccaccccacttaggagcgggtccccgcggttacctatc

SEQ ID NO: 346679 - DNA, 1509 bp, Cannabis indica
tactataaaactatttttctataaatttatatttaggactttattaaatcttaagttgtgtaaaatacggtgattgaattatgtgttgtgttccatagaataaaatatatttatatacaaaggtaggagactaaatagaaaattgctaaatacaatttaccttaatttttacaattaatatacaactaatattctaacactcctcctcaagctaatcatgcctaacttgttacaaaataatcaacccacaccccattcaaaacttttgtaaaaatatttcctaattgttcttcgatcttcacatatcctgtggagataaggcctttttgaattttctgacgaacaaaatggcaattaatctcaatgtgcttagttcgctcgtggaacacagaatttgaaacaatatgaagagtagtttgattatcacactacaattttgctggaatagaaatcttaaacccgaattcagtcaaaagctgataaattcatattatctcacacagactgtgccatagctttatattttgattcaacactggatctaaacacattatttgtttcttaatcttccaagagatcagattgctcccaacaaatacacaatattttgaagtggatcatttatttaccttggagcctacccaatttgcatcagagaaacactcgatctgggtatgtccatgatccttgtaaactatacctcgtcttggtgctcttttcaagtaacataaaatttgctctactcctggccaatgaggaattgttggagaatacataaactgactaacgacactaattgagaatgcaatatctggacgagttacaattagatatttcaactttccaaccaatctgcgatattctaaggatcttcaaatggttccccatcacgtgtaagatgcacaactagattcatgggagcattacaaggttttgctcccaatattctgtctcagttaacaaatcaagtgcatactttctttgagatagaaaataccttgtttatactgagtaacttcaacactcaagaaatattgagcacccctaaatcttttgtgtgaaactaggtatgaatgaaagactcaaggggcgagataccttcaatatcattttcattaataacgatgtcatcaacatacaccactgacaaattaatactagtagttgatcttttatagaacacaaaatgaatagaagtactttttcaacaacctgactaaatttaccaaaccaagcacgaggactttgttttaatccatataaaaatttgcaaagacgaaaaactcgtcctaactcattttgagcaacaaacacaggaggttgttccatatacacttcttcctaaagatcttcatgaagaaagcattcgtaatatcaagctgatgcaaagactaatgatgagtaactgccatagaaatgaacagtcgaacagatgtgagtttagcaacgagagaaaaagtattacaatagtccacttcataagtttgagcataacccttggcaacaaga

SEQ ID NO: 346680 - DNA, 530 bp, Cannabis indica
tatatcaaaaggtaaaataactccccctcgatgatcataatcaatcactgctagaatacgagaccaagggaacacaggaaccaagaacccttgagtcaccaccagcaggagcagaggatggagcttcagtggaaatctccccctgaacaactgccacatgtgaaggctccccctggacaactgccacatgtgaaggctcaaggtgatgaacatgcactcgaacgaaaacagagctgggagaagatgaatagagccactggcagggtaggtgaaattcaaatgatggtaaaaaaagatttttattaccgatggatggaaaagacaaaacaaccctttgggtccaacataaaagcccaagcccattagcagatttaaaaacccattagcacaaacttaacacaaacaagacgagaacaaatatggtaatttttaaaaatgtgaatatacaacatggactacacgagctcaacagtgaagaaagaaagaacaaaaaaaacattatatgcttagtggacacacacaccagtgca

SEQ ID NO: 346681 - DNA, 582 bp, Cannabis indica
atggaatttatattagacttatattatagctacaaaacttgataacgagatcaataaatactatgaatgtgaatgaaatttcactactacaaaacaaaattttagagacgctttttcagcataataataaataaccgacgctataaggtcgaaattttttagaagagaatttaactccacttttggcgtcggttatttggaaataactgacgccaaaaggatttataaccctagcccatcgcttcgtatttctcattcgaccagccaacccagaaacccccaaaccagagaaatctcaaaccctctccgccaacaaccatgaaaaatcacctccatttcaccattttatttttaccattttagctcatttttgtttctaaatcttctatttttcatacctaaaactatatacctgaaaagatcatatttttcctcattttttaggattaaccgaaggtagaggtagtggttgtggtggttatacctccgactaccgtttttagtggagaaaacattgtatctcaacgtctattaaggtgtaaatctagtttctactaattttaataatgtacattattttat

SEQ ID NO: 346682 - DNA, 864 bp, Cannabis indica
caaataccctttgtaatcattaaaaagctctttttattaaaaaaaacaaaaaataactttttaaggggcaattattatacccaaaatttggtgagcacatcagaggaagacacgtgtcgagctgggaagaacgaagaactcaaacatgcaatcataagtacacttggcatggaacaactcgttagaaacacaatttgcagtgtatgtttataactcggctgactgaatagtcttctacgagacaaaacatacgaactgctaacttatgtatcgacaagaaaccatgtgggtgcaagtgtgcatgacgaggcttcaacctcgtcgcgtggaagagaaacgataacgataaaaacacttagcatatactgcatggtatacaaactaagtataaacagtttggtgaatcaagatgacagacagcgaggcgtctatctcactgtaagatggcatgcacgcgagtaagatcatctcgacaccaaaaaatgtagttatcagaattaaaagcaatattaatcttaggaagtcatatgacgagcaccagctcgccatcaaagttaaaccagctccattcctaacgaagcatctccatgagataaggcttaccgtatatctttcaatatgcgttcatcttggcccaataaaagcgggatactcacaactgtgtggattctaaataaaaaccgcataatttgtaatcaaatcccatgatttgagggaataattcctgtaaaatttatagttaacttttgtaatttactacccactatgtaattataaatagtggtagacaagatcaaaaagggggacaaaaacaaactcatacgagagaagccctgaaaaataatcagaaatctaaataagatt

SEQ ID NO: 346683 - DNA, 738 bp, Cannabis indica
taaaataatttccaacattggcctccatgttggttccccaaaagaacttgttttcccatttttgatgaagacgaagaagatgcatgagtcaaatttttggtttgatgcttgaaaatggcccaggttggcaaattgtcaatttgagcgagcatgaggttctctgggtgctcaaaaattaaagttctttgattctgattctgatgcctcaaatatgtttgttgtatgtctagttcatgtcccagtacaatgtttgacccatttccactaatatgatcttgaaaattgaaacgcttgttgggttatcaacctaggtgcttagtgaaaccctaagtgcttgagttgatttcctaggtgatgtttcatgcgctttcagattttgggtcctagatttggatgcttcatgtcttcatggtatagaatacagaaagatagtgagtttgaaacaactttgggggatccaaacattgattccaaagttcttgaagtcaacctaggcgtaggactagggacccttcccaggtcaactgctatgactctggactactcaactctgagatgttatatttcttaccacgtgtcaaacattgatgtccacattaccagagaaagtttttgggttaacaataaatgtcaaataacagagcacagtttgacaatgacccctttattgatttttgtgagggacactaaatcattaagttggcaagttgaagtcattaaccaaactcttaaagatac

SEQ ID NO: 346684 - DNA, 1319 bp, Cannabis indica
acacctattgttgagtgggagttgtgagtaagtatcagtttaatcaaggaaaggaactttggaagacaatcaaataaatcttaagatcaaaagaagaactatatgttaatcgataagggtggtattttaatattcttaggctacatcaactcagatttctagacttgctttaatgctagaaagtattattatgggatggtgattactcttggggtagagcagtgatttgtggaaaagtgttaaaacttatataaagtctctaactctaccagtgagactgaatgttaaagtggcctacaaggctactagataattaactactagtgccatttcctgataacacagatatagttgccaaatagtaaggaatccaataccctaagaagagtaaacatatagaaaggaatttcacaatatcaaggattttgtgactaaggagatgtaattgtgggaaggttggtaattgattacagcttgtcatatccgattacaaagataatactacatactacacttgatttggacatcaaggtcttgagatgaattgaaattcacttttaagttttatattagtgcaagtgagagtttgttgggattttatgctttaaataaactcatttcaatataattagatttaataattaataaaggatcaaaaatctttttatgttacatggttcacatgattactttcatgattatatatttaatgtataaattctattaaatttagaaaatataagtattcatgattatagtgttttctacatagtggaaaataatcatgatcatatattttaaagtctttagtcccatgattcatcagtacactggatttacactgacgtgataattagctataaagtttacttgcacattgatacggggtatgtcctttccagggcattagcaaagtatactagtatcggatgtatgaagtatacatcaggttggaccaatattgaaaatggaaaagatatcataaacttaccgttatatctttctaagtcaatatcacttagttgatcttaaataagtagatcttaatcttgagatggtttggttctagcctaactgtattattcgtgttctttgacatgttcgttaaagtttatcaaatagatcttcccaatatttacatcttcggaacatggtagtacaattgagtgggagccctaatcatagatatggaatctatagcttctgtaactatatagaagtgaaatgatgatttcctttgagtttggcttaatagagataaatggaagagctcttatttcagtaattatattagtttactgaaatatcatttataggaa

SEQ ID NO: 346685 - DNA, 458 bp, Cannabis indica
ttaaacaacatacttgtgagtagatctaagatcctggtaaaataaattccaacatatgatgtggttcaaatttagcctatgataaaagttgtgctaattttagaacaaaatattgcaagagttaaattttataccacaataaatatcatcttttttatttattcttttgccactcattactgtaagtgataattttttacattttatttataaatttgatagagttttgccacttattaatataattaataatttttttatatttttatttatatatttaatatagttttagaaaatttaaaaaaagttgcattgatgcactcatgtatatttttggcatctacaataattttttagttaatttttttttaggaaaaactttcaaaaaatactgaaattttggtaacttttacaaaaatattgtcacacagaaaatcttttcaaaaatactgtgtttt

SEQ ID NO: 346686 - DNA, 706 bp, Cannabis indica
tagatgaggacatccacacaacaacatgactactcacatcgtagaaggggtctcgggaggtcacctcgagatgacaattgacaccctcctcatgtagggtctcgggggtgttacccctaagtgttagcttctatcctcaaaggtggttaacgatcgtgtcacaccctcgagtgatcctcatcgtcagtggctatttcaaatattcaaatctcataagaagctagcgagatattatcacaaaaattaaacttcaaccacctcagaaaaccaaggagatggttgagatagctccgcgttgatcgcaattcctgaagcgagaagcaccgaccttttctctatataaggggtcacccatgacctgggaaagagatccacaattttgagcacttagagaaaaatactatctttttctttgcattcaagagcctgttcttgacttttgcaactctgattaataaaatacaaggggagtaggctattaatatttaggatgttaatcaacatacttgttagtaaatctagatcctggtaaaatattcccaacacaacagtggtttaccaaattacccccaggaatgatcacttcctgggacgagtttgaagggttattctatacccagttttcttcaacccgacagatatcggcagaatcgtgttattcatgaagaaactaaggtggaaaaatctaagtgatgatggaaaacag

SEQ ID NO: 346687 - DNA, 565 bp, Cannabis indica
aaaaatgtccacgtttgctctcagtaaattttatcagtgctgattttacttcgaccaacaaaccttttcaaattttaagctttctagccagaatatctgggtcgatctcaaactcttctagttcttccataagtccaacattgctgcttgagtccccaagtcaaggatccacaactttatccccgccttgggaagttccgtacttataaatgttttttcccttgtccgagctctggctagaggatacttccttcttatccttggctatggcaacgttataaaattcatgagcaaactgctggtttcctcttagacaccctaccccattctttgtcaggaacttaaggcatgaatggaatatcaacgtaacagcctttaagtcatacaaagttggtcggcataatatgacgttaaaggctgatggaatgtctaatacaaaaaattgggccattatacttaagctggtgtgagcttgtccaacagtgaggggtaggcaaattttccctagaggtgcgactccttggccaaagaaaccatacacgggctaaagacaggggttaaatct

SEQ ID NO: 346688 - DNA, 693 bp, Cannabis indica
attctttccctgatacttttgtgggacttaatctgatccaacaagcgcatttgtaggcaatactattgcgctgcaagtcattgagttttttaggtaagaaaatgattggaagaggaaaatgggttaaaaggtgttacagattagaggttaagaattagattaattcgaagcagaaatagagtaatcaaactaagagcttttagccataacaccccaaactcaagactacgagtggagtggagtggagtggagtggagtggagctgggtatatatatttgtaagaaacaaaagaaacacaataaacttttgttggagcaaatctgtacatgtaggttgacttgaatttagtttgattatattcatagacgcaagagaagttagtgaaggttcaactttttacttaagctctcatcatctgatctatggttctttagcctagtatatccctagcaagccattttatggtcagtggatgggaaaatcgtgggagctccgatcagaaattcagacaataatttacatgtggatgatatatttaaaaattgaggctaagcatacaagtgcttcaatggaagaaacgagagaaaagaggtgggagagagagtaaagagactaatttattttttgattgatttattaaataatttttttaaaaaaatattattaaaaaataaatttacaaataatctagt

SEQ ID NO: 346689 - DNA, 1031 bp, Cannabis indica
ctaaagacattctataatactaaaaattcaattatctcataatttcattccataataaaggttattttgcaaacaataattaaaaatattccaaacttcaattagtttatgatgttctaaaaaatcaaatttttctaataagtttttgtaaaaacaaataaaaagttagcaataaagtatcgagtaagtttattgtgcacttaaatttgatagattccttatttattttagtataaaagagagcttttagtcgattttactttttataatcgcatacattacaattatttaggaccacatataaattttaaaaaaattacgagtaatttacaatactaaaaataagatttacttattttattgcatgtatgccaattgttaacctgaaaactttttctagtgacatggacatcaatgtttgacacgtgacatgaagaatgatgtcacggagttgagtaaaccctggacctaggtatttcttctcctctgttacatcccaatggatgggagatctacactttcggccatataatagttcatagggagccatccctatcgtactttcataactgttattgtacgagaactctatcaacggtaggtacttactctaggagccttcaaaatccataacacaggctcgtaacatatcttctagtatctgaattgtcctttcggactgtccattagtctgaggatggaaagctgtactgaattcagtttagtacccatagcccgttgcaaactctaccaaaatttagaagtaaacttcggatctctattcgaaactatggattttgacacaccatgcaatcttactatctctttaacgtacatatctacatactgattcactgaaaaggttttcttaactagtagaaaatgagcagacttcgtaaatcggtctaccacaacccaaattgaatcaaataaacctgtggttctaggtaatagaaccacaaagtccattgtgatatcttctcacttccactcaggtagggttaaaggctgcaacaaccctgccggtctct

SEQ ID NO: 346690 - DNA, 1287 bp, Cannabis indica
gattctgcgtcgttgtctccttgatggtcgactgcgaggattgcgtcgttcagggtcttcatcagtctgcgtgccctggttaggatgcctcacggattgatctctcgatatcggatggttcaggtccaaaccttcagggttggttcttcattccctgcgtacacggttagtacgacgtctagaatttgttacctgagggttgtccgtgcgagtagtagggactcgaggggggcgtcgggcccggttctgtccatccacttcggcctgtagtgcacgcaattggtcctgaatcgcagtatattgatcagtggtgagctggatgattccctcggatactactgccggagtgacagggggaaaatgcatggttgctggtggtgtggacgtatccccgacttgagggtcggttgtttctgggaacaggttgagaggtctgatgttgctcctccctactccgccattaacgacgtccacaggcggcgttccagctccggataacggtacgttcatcatcccaatgttgatggacccgttgttagttcctccgtttgtttgatttccagccatgattcgctgatttttgaagtgaataagatcttaattctcgttcccacagacggcgccaaatgttgtcgagtgaatttcgcaacaccagattgtatgatattattaataataagaagaaatttacgtgaagaacaagtgcgagtattcaacctagaatggcgagtactcaactgggaatgagaaataatcaacaaaaaactggaaaataacaataagacacagaattatagtggttcagtcagatcacggtctgcttagtccactgtagcaagagtttcgtaggtgccatttcatggtggatcacccctttatatacaaagcaggtgtccaattagttatacaaggattgcattcattgtcaatccgtttttaaacattgaattacaataattaactaaacaacgttaacattaataaatgaacggcagttactaagttcatcaacgtatgcgtcttctaaatctgcgagttggctgttcatattctgatgataaactcgcgggttcatcgattatgctcgggatgtctgcgtccttaggtagtcgcctcttgtggacatcgcatgacgggctgataggacctagacatgcaagcctatattacattataaaggctgcagggttcttaagaccaactcgcatttatagagaatcgttctcctggtttatacaaggacacggggaggatgctcgcatatgttcgatatatgcgagctactct

SEQ ID NO: 346691 - DNA, 545 bp, Cannabis indica
ctgtgctgacaacactatgatcacgaacaattacatatgctctaaacttaatagaatttatacattaaatataaacatgaaataaatcatgtgaaccatgcaacataaaatgtgatttttgatctttattaattagtaaatctggttatattgaaatgggttttatttagggctcaaaacccaacaacccatacctgtaccgagattggaacccaggacccatacgcagacccagattcagacacgaacctagacctattcttaagacctgaacccagacccaaacccaaacccaaaccagaacctggtccgggacatagaccttgactgggactcaaatcaagaccccaacccatacaagaacaaggacttggactcaaaccgagactaggacccagaatcaaacctgaacccgtactgggaccaagactcggacccaaacatgggatccaaaccaaaacttgaacttggacctagatcgggacctaggatctggacctagatgggtgacttgggccccaaacccagacctagacctagacctg

SEQ ID NO: 346692 - DNA, 817 bp, Cannabis indica
tctagtttttttttgtttttttttttttttttttacatttgtataatggttggtcggttttcggattataaccatgaaaactgaaaatcgaatttcagatttttgtgtgtgtaaaaaaccgactaaaccaaccgttgctcacccctactggctggccttgagcagcagctaagtgtaggcctggccagccaaagccaacactcgtacctgggaataactggccagggtctgtaattcaatacaggtctggctgaccttcaccatacactctcccatagtgtggctaactagcccctatctcaccagaatttgtaacccctctaggagggccagtcagtcaagtccccacaataacagatcattttgtgcaagcacatttcgaccaattcagggacatgattcaagacatagctggtctgaagcctttagatcttgaactcgatcagtcaaggggatcaccattctctacatacattaatgccttgcccttgtccaagtttaaggtgccggtatggaagatgtataccgggcgagaagacctattggctcacatcaaatacttcgagatgaaactcaacctacacctaggtggtttcaccatgtccaatcaccatacataaaaatatgggaattattttcttctacgagtccactatattacaataatattatgacaaattttgggggcaaaagttaccccttataaaaatccaaggagattttttgtttggttgtggaaaaaggagccaaaaggctcgaaatccttgcaccatgcccaatgacctcaacatacacctaggtggtttcaccatgtcca

SEQ ID NO: 346693 - DNA, 1032 bp, Cannabis indica
ctatctccattgtgagatttattgaacccttgttgctccttgtacttcttgcagaatctttgcaagtgtccagaccttccacaaaagtaacacttccttgtttccttctctctagacttcgattttgattgagagtgatggtgtttactattcaaacttactttcttaggcaatcctcctcttgccaagtacacttcttctttcttggattcattctccaattatagtttgaaatctttcgacttaagtacggcaagaacatcctgcaatgcaatcacgtctctgccatacttaatggatgccttgacttcttgatatgtgattgggagcgatctcgacaaaatgatggccaaacttttgtcatcaaccgtatgatttatgttagccaaacctagaataatttcattaaatctatcaatattatcatttaaagaaagggaggaaatcattctaaaatagtataacctttctagcaaattaatcctgctagcaattgatggctttaagaataattcttccaatttattccaaactcctgttaccgtcttctctgtgatgagtttctttcgaacattgtttgacagatacaagatgattgtgtagtacgccatctcctccatttctgctttttttctctggtttctttttccaataacttctcatctccaagaatcttggagactttctagtacactaggattcctttcagacttttttccatagcgcaaagcccccagttccatcaaatttctccaatttaaatctcgccattgacgacattcaaagttttcttcaagaattgcagcaaaaaaaactttgagtctgcgttcttgatcgattaccaagctctgatttgtaaaaaaattacgactagcagtgcagaatcaaatcaacgaaaaacaatcaaataattagcaacgacaagatttaacaaatgcaaacaataatcggagaaaatatggatgaacaaggtatggaaaaccagaaacaataaggaaaaaaaataaagaaattaacaccaagatatatact

SEQ ID NO: 346694 - DNA, 598 bp, Cannabis indica
taaaataatttccaacagattccgttaagagtgtagaaattttggcaaacccttcaagaaccttctgtactatcctgctaatcctagaaaacttctaacttcggttgcagacttgggtcgaggctaatcccaaactgtctcaatcttcaccgggtccaccaagatgccatctttgtttacaacatgccctaagaagcttacttgtggcagccagaactcgcatttcttgaatttggcaaagagcttatgctcccagaaatgttgcaacaccatctgaagatgtaattcatgtgcctcttctgaatcagagaagatcataatgtaatcaatgaagataattacaaaatcatctagaaaaatctttgaatactcggttcatcaggtccataaatgtcgccaaagcattagttaatctgaaggacatcactaggaattcatagtgtccctactgttggaatatgttttaccaagatctagatttactaccatgtatgttatttaacatcctaaatatgaatctctaaaaacatgtaagtaacacatataaagtttgagaaaccttacgagtgggtgcatcagaatataatggctccttcca

SEQ ID NO: 346695 - DNA, 656 bp, Cannabis indica
agccatgccatggaacatatttttcagttcgtctagctgtgcctgtacaactgggataccctgctcggcattctggtcaatttgaatcacgtcagcatctttttgagcgggaatttgagcacaggctccgggctgcatgatcgtcgtgacattcttatcgtctactcctctccttctgttcagatcattccttaggtcatgagtcaccccaacctttcgaatatagaagcacctggctgccttagcgattgatttgcttggttgacaggtggactggcaccgttaacctggttggaaccatcaggtataatgttaggctatttttagcctatgttttggatctattttatgtgcgtttttcgctgtgttgggacggaattacgcttgttttctatgttttcaggttctttggaataaaagaggtctcgggtgcagaaattcaataaaagacgagctgagccgaggaaaacacaaattttgaagaattgtgtatatctggccgcggctagacacagcttggccgcggctagatcacgaaagaaataaggaactctgggatgctacagtcgccgcggcgagggggagtctcgccgcggccatttaagagatacagagagagcccaaatttgcaattatctcgccgcggcgagaggaag

SEQ ID NO: 346696 - DNA, 620 bp, Cannabis indica
acttatccaaggtacaagtaaactattatagattatcctatcagttataaattataggaatacatttaatcacacaatcttgattactttccattatgttgacagcacaataaacaagaatatcagtgtgataaggatttatatgaatttataaatcaaataaacaaataaatgatcacatgaaccaaataacacattaaacaagtaatgaaaataaatctgtttctttattgataattgaatagaaaagattacattgaaatatagttttatttagggcacaaaacccaacaaagtcaccaacgaagattaatgaagtgcaaagtttgactggtcggatagtagacctcagcaggttcgtgtcaaaattaagagataagtgtgttacttttttcaatatcccccaaggaaacaagaaatttgagtgggccgagaaatgtgaagaagttttccaagaactaaaaaaattacttccacaatctcccatacaatcaaaacttttggacggagaattattatgataaaggattaagaattatttattgttattgttgttatatttgatacttttggtattttgatttttttttctgtgtatatatctctatttagttataaca

SEQ ID NO: 346697 - DNA, 557 bp, Cannabis indica
tagttggatatttattttgaattgagatattttaggatattgttagatttaataattttaatattatctaactacctgttatcctgatttttgtcatcctgacgtggcatgcttacatggacaaaatcagtgctacgtggcagtacaactcaccaataagaagaccaagtcaacacctaagcaaacagagaccccgacactgaaaccggcatcaagtgacagactagctccttcataggagctggtgagctagtttgtcctccacaaaggcttggctggccaagacatgttctacatggttttttgtgcactttttgacgaggacaacatcctttgggcttcgaattaggccctaaaagcccaacagaatagctgaataatatctagattcaatggtattttggtcttttgtaattaactagaaaaatatacaaatatatagggtttcaagttgtaatctagggttgaggcctcctatatataggctttaactctaaccgagaaagcctaagctcagttaagccttatacttgcctccaagctctaagcctaagtct

SEQ ID NO: 346698 - DNA, 993 bp, Cannabis indica
agggcataaaacccaacagggtaaaccctatgtcaagcaacccctggagttgaattttcaattctttaagttatgctgaaccattctgtaaggatccttggaaaccgattctgctcaaggtgccaagtcaataagaaaatcaatttctctttgagatggtaaacctggaagttcgtcgggaaaaacatctagagattcccaaacaaccttgatgtcttctggccgaacagagttaggccgagtggtatccaataccacagctagaaaccctagacatccctctcgtaacaattgcctagcggttagcactaaaattactgggatccgagatccctgaactaaactgacaaagacaaaaggttcttcaccttcaggttggaagattaccatcttcctcttacactcaatactggctgagtacttcgacaagaaatcccttcccagtataatatcaagatccactaaattcatctttatcaaatcagcactcaactctctatcttctattctgattggcatagacctaatccaccttttggagataactaactctctgccaggcagtagggttccaaaccttgtttcataactatcatgcggtctatcaaatttactaaaaattttggccgccacataagagtgagtggccccagagtcaaacaacacaaagaaataagagttgttgactgagagctgacctgttaccacagaggggctggcttctgaattagtccgagttatcacgaacaccctggccggaaggtttcgctactttggtgcttcgattctgagctggggacaatccctcttgtaatgccctagcataccacactgaaagcacccctgccctttacactcccccagatggtgctttttacaactggggcactctgggtaggtgtatcgggtttcagtgccaccctggcgattgcctcgaccctagttcccccagaacctcttattctgacccgagccactggttgcagtagatgc

SEQ ID NO: 346699 - DNA, 550 bp, Cannabis indica
ggtctgcagagggcaaaactccaaaaagggagtcttggccctctggatcgagaggaccgaaagagggttttcgtgcaccaagagcccggagggagaggatggcggggcctaagatgtcctctcattgatctgagaaatcagattaacgaaaaccacggtgatctccaggatcatctggacaaaaagaaatacggacccgcagtctctacgggaacgttaaacgaaggaatcatggcagaacttgccatacttcgaaaagacatcgcccgggtctcccggagacagaaaggcgacgactccgactctgattgtgaggaccaggagccatgtgctaagcacatcctggaagcagaactccccaaaaattttacgatgcccgaaatggcagcttacactgggaactaagatacaagcggtcatcagctcgctcttctttaggcgggcatccgtacagggactccattctggaacgagttacagcaagaaggagcttctgttgggttttatgccctatataaaactttgtttcaatgtaatccagattattcta

SEQ ID NO: 346700 - DNA, 622 bp, Cannabis indica
acaggggagaagaaatatctaggtttgtaatcagtacaacggactaatgaagcaatagagatgattaaagccagaatgcttgcctctctgagtaggcaaaagagttatgcagatctgaaaggtagaaatgtagagtttcaggtaggagatcatgtattcctacgggtatctccaatgaagggagtcaagagtttcgggaaaaaaggcaaattatgccctagatttacaagacctttcgagattctcgagaaggttggacaagtggcatatcgtttagctttgcctccaactctttcagcaattcacaatgtattccatgttttcatgctacgaaagtacatttcagaccctgctcaggtactaagttatgaaaatcttaagctgcaaccagacttgtcatatgaagaacaaccaattcagacagaaatgataaggttcttcggaacaagaccatagggttggtcaaggtactctggagaaacagcaaggtggaggaagccacctgggagttagagtccgacatgagggcttagtatccagagttgcaaagaccgcttgactttaatttgggaattagcagatataggtttaattatgaaacttgtgtattagttatgaatta

SEQ ID NO: 346701 - DNA, 499 bp, Cannabis indica
ccaaacaatcccactaaatgtgtatttattgggaagaatttggatgaaaatctaaaatagtagttaattaactttctgaaggcaacccatgatcaattcacctgaagccattcagatatgatagggattgaccctaaggttatttgtcatcatttaaatgtcgaccctaattacccaacaaaaagacaaaaacagagacccttagactccgagagacaaggggtacttaaagaagaggttgacaaattattgacaaatgactttatacgtgaggccttttatcccttgtggatttcaaattctattcttctcccgaaactaaacagcacctagagaacttgtattgatttttcaaattagaataaggcatgtccaaaagattgttttccactaccaaggattgaccagttagtgaatgcaaccacaggacacgagcttatgtcatttataggcgtgtactatggatataaccagatcaaaatgcatgtccctgatcaag

SEQ ID NO: 346702 - DNA, 502 bp, Cannabis indica
aaatgcatgtccctgatcaagaaaacacaagctttgtaataaattttagactattgttataaagttatgccatttggtttaaaaaatgctggggcgacgtatcaacgactggtgaatgggatgttcgaaaaacagattggacgaaatatggaagtctttgtcaatgatatgttggtaaagtcgataaagagtgaagatcatacgagggaccttgaagagtgctttgggatactttaaaaatacaatatgaagcttaacccgaagaattgctcttttggagtctcctctataaaatttcttggtttcatagttaatgcgagaggaattgaagccaatttagaaaagatcaaggccctaatcgagatgcctttaccaacgaagccaaaagaagtccaggccttgataggaagaatggcagcatcaaacagattcatttcaaagtcaacagataaatgtcttccattctttaatgttttgcaaggcaataagaagtttgaatgga

SEQ ID NO: 346703 - DNA, 960 bp, Cannabis indica
acaaaataaattgactaaactaaaatgacaaaataaattaagtaaactaaaaaaactcacatctaaatttcataaattgacaaaataacttcaccaaaccaaaaaaaccttcacccatctttatatatatgttatagatatagattatatgtgagtaaaaattacataatttacataaagttatgaggttttttaattttttacatttatatgtgattttttatgccatatttttgtaaagaacgatagaaatcctatatttttaaagcaataataagtttcgccgaaaaagtcgtcggaaaagtcacaagtgccgaaaaagtcatctgaaaagtcaccgaaaaagttaatgtcgctgaaaagttcactgaaaaattactggaaaagtcaccagaagtagatgtctcagatataaacaaaaatagaacaaattctataatataatgaataaaaataaataatacaaaataactcaaagcgattataattgaaatataacaggttctttaacataatgaataaaaacaaataacacaaaataactcaaactagttataattaaaatagagccagttctaaaacaatgctataatgaataaaaacaaataatacgagataacttaaacaggttataactaaaatagaagtggttatataacataatgaatgaatatttttggggtagatatggtatgagtgtgattatttggtgggttggagcatgtttaatgcatgtttttagaggaaattagactctataccttttttatattgtcttcttttatttttaccctctttttttaaattttatcatttttacctctttttttaaatattgtaccaattttgcccctgtcatttcaagatactctctatgtgactcccttatgtcagggtatttagggtacaatacatataaaaagaggtatattttaattaaataaaaattagaggtaaatt

SEQ ID NO: 346704 - DNA, 573 bp, Cannabis indica
acatagccgaccttaaccacatcccgagtgccaacattcacagccgaactcagccctagccacctctactctagccccgatattgtcaatcggcttagtccccaccgtcagttccttcatgttcacccagatctaacaaaacggaaaattaaaaaaaaaatagtgtttgggtagaaagaaaatgagaagagaaaatgaatcatctacttcgggagtggctcatacactataaaaaagtgggtcttaactgagaatgcagacatgattcgcaacaagatggaatttttttcatttctgtgaagatttagcgaaatgggtatttgagaacaagctcaaaagatcccaacccagaagagaaaatttaagaaagttattctgagaagccaaacatgaatttggggatatgggtttggagcgtgaaaaaaaaaggtcaaaatttaaaaaatccatatggatttgaagagaaagtttggttgttgattgaagagaataacaaaggactaacaggtagagatgatgatgatgatgatgattgaagaagagtgactgtgaagaaataagagagagagagag

SEQ ID NO: 346705 - DNA, 948 bp, Cannabis indica
ttttcaaattttttaaaattttaattctctattgaaaaattgaaaaataaaaacaattttatagaacatgattttaaaaaatatttttatttttttaattttaaaaacaaaaaattgattaaaaagtattgtcaaatgcactctaaatttattgacatttaaatagtttatgttagcgcagattttcgttaactaaaattaatgagcctttatgtaataagtatatcacataaataataacaaataattaaatgactccagatatttttacgtaattttgcagttaaatctgcatactccatgagtctatcttattatgatatttttgaatacaggatacaatatttaattgataatctcttttctctcaaattcttcgtccctttttctgtggaatctgccctatttataatgcccctatttataagaatataggttggcagttattaacttgggatcagcttaaaatataactgttcatgaaacgtggacaattcccacgtttcacttaattacatgtaggataatacttgataaatgcttaactatttcttgttcttatccttttcgatagttaatgctgatttggacaattatatctcgcttaacctgagttattctccttgtccatcttgatgtgaaaaaaaatactaagtgttagtagatggttcgcttcgtcaagtctcttcagttagaatcacgaggtgactatctcgctatacgtaatttgaggttgccctgtgtgattgtatttattctacttcaaataaatgagtatcttctttggtctgcgtaatacgtacattttgggaacatgatagtacaattgagtgggagcgctaatcatagatacggaatctatagcatctagctggatatagaagtgaaactccttcaagcttggctaaaaagagataaatgatagagtgctcattttagtgattatat

SEQ ID NO: 346706 - DNA, 576 bp, Cannabis indica
attagtttattttaatttttaattttttttaatatgtaataaataagaaaatatggttttagtacaaaaaaattattatagtcttttaatcaaaataactttttttgaaagttgggttggagcagcttcagcttttagctgcagcttctctaaaaaattcttccaaaagctgttttttgtactgtttaccaaacacatttctataacagctttttcaaaaaacaagcttttagctttttctaaaaattagtgccaaacgagtccaaaatcgatcacataattgtgacactatatacgtatggagagctaggtaagggagttataattaataaaatcaataaaaatagaaaaaggactaatgctagctatcttccaacaatgctatttattaagtatcacaagtgcatattctatatatatggtccccaatttatatacacatctatcattaaatattaatccagttatatacatacatatatatatatatatatatatatacaacaaacaaaaaacaacatattattgttgcattataggttccacatcaaagaacgtgaacataaagctaatatg

SEQ ID NO: 346707 - DNA, 572 bp, Cannabis indica
cgagtgaaaggcctcttctgctgcgggtcggagtcaacttgtacgaaggatttaatggcctgtaactgtgaggcgatggacgtagccatggctctgtttcctctctaaagcagaacccagtcaagaattaatggagctttcgattgtgctggatgggttgcttcagtattctcagagtagggaaacggtaaagagccgactttgagaaggctttagggtttatttcatcatcgagggttttagagtttttctttctttttcattttttaatattaatattttttttctttaacataggtcctcaataatagcaaattagtctttatttttacactaatttaggcgaaaatacttaagtttaatttttacattttttaatcaaattctttcgtgctcttcttgctttcgagtcggaaacaccatcaccccaaccctatcttccttatcagtgaaccgaaaatagttcataggtacttttcaatgcagcagggctgagacgacgctcgatcaaactagaaatttcataagagaagaaaaatcatagcattcaaaaaaaaaaaaaaactaactga

SEQ ID NO: 346708 - DNA, 586 bp, Cannabis indica
taatctattgatatatcaatataagtagttcgccttccaattattagttcataattagagttggtaaaaataatcattttattcttctaattatctcttgaattccttatgtaccattaattcaatgtgaattgttaatctataatccaattatagtttggattcaactattagcactcccagaattaacactaaaagagaattaatattcgatcctctcgaaaattttggatttcattattgtataacatgtttccacccactcatgttattaagctcccaaaatagaataagtaagaactatcttctctgagaagctttaacgagtgaatcaaataactcaatgtacacaaataggtattcatgtatacttaggattcagattgatctactaatgatcattgttgtgatatgaattttatgataaacgacattgttgcccctaattttgcccaatatacgtggaccaaccaaacaaggacacatggatcaagcaatgtacaatccaaaatatttgctaagtctttatgttatagggtggcttctaggacatagctcccggagaaggcatatggaaccccatatg

SEQ ID NO: 346709 - DNA, 798 bp, Cannabis indica
attttcttctcaataaaaaaaatatattttttttggatcacaccatcaacaacattagcaaggtatgtgtttttttattcatatatgtatataatattattgtatcattattatatatatttttttattttgtgtacaacttatttttcttttgatttttttagatgttttctgatgaagattggatggctgcactaaataaaacatttgatcttaatgaagcaatacaacgtattgagaacaatatattgcctatcaaaaaagagataagtttaattgttatattttattgtatacaaaaattatagaatttaaaaaacatagtgtataagagtttcccataataataagtttaattaatatactatcataaaaatataaaataatttacttctttgtacaatcttaatgtatcgacgaggtataattttatgatgacctgtcttgctacatgttacaattttgattgcatgtcatacaacccaaaatttgggataacaataatattatgcaattgttgatcttaaaatataaaggtagcaattcgatcattctatacatctgaaaaatctcacagttattcaaagttatcatatactatctaattttaatgagatcaactgtaatcgagatcatttagattttttttagtgcaaaacttcttatctatttattatgcataattttctttgacaaagaaccataacttttcatttgaatattatttattaatgcatgtattattttattgttcactattataattataaccttaaattttttatagtattttttttt

SEQ ID NO: 346710 - DNA, 592 bp, Cannabis indica
cataaataccttgaagaacacacgagaatacccactcttactcgaagcacaatgccaccatcagggggcggatgtaggctataatatgaagaggtcatggcccccctagaatatattacatgtaattggtttcttttgataattagtataagatgacttctaaaattataaatatgatatgttctataaatttaattttacttatttgcttatttactttttatgaaaatctatttgcttcattttttgtcttttaagatattaattttcttctttaataatattaatttgtttttctaagatatgccactttagatttttccaattgtatacaaagtgataatttttattcttattctttcaatttttatagctaccacaaagtaatttttttcaattatgaacatagttaagactatactctctataacaagataaaataaatttttaaataattatttgttagtgtatattaaagaaaaattgccaaaaatttcataaaaattcactcgatgacttttatgatatgcaagaaagacgttttgtattttaattttaattataaatttaataagggatatttacggcaaaa

SEQ ID NO: 346711 - DNA, 808 bp, Cannabis indica
tagtttataaaattacacacgtgctgtcatagattagggtgttacaacttggtatcagcagcagtcatggttttaaagggcctgaagactggtcgaatatgtacattttctgcgaggataggtcgactcatggtatagtaagtatttatattatttgctattggataacctggctaggctattataaagtatgttggataagtagcatagtgataattttgtaaagaatatgtgtatggtatatgcatattgatatgatatccgtctgagttttaaatggttagaaaatgtggactaaatgtgtgataagctatgcagtaagggaaatcaaatagtttgattagcgagcaatctgggctcagggcaagcggtatggaagagaattctttattgccataatgctgggaacatgtaaattttgttatacatgatatgatttgacaacaagggaaaatagattcgagatctgaaagaacaataggctcatcttgtgtctgttcttgtactactgacacttcctgttgtaccactagatgtggtggaatatatgaagtcaaattactagtagatcaagaagcgaaaactaaatgaaccaccaattatggggcatggcgaaaatgttccagggtggttaagatagcggtcaagaagaaaataagaaatggtgaccttatcttgagtgttcaagatgtaaaaagacaccatttgaaccaatgtagagccagatcttgttttattatgggggtagtgggtcatctaaaaagaacctacccgtagttaagaaagactgatgttaaaggagaaaagt

SEQ ID NO: 346712 - DNA, 795 bp, Cannabis indica
gatatgtacccggagctcagctcacaggaaccttaccaacaaccgccccaccgatgagcggcatacaattttccgatacccccggatatagtcagagtcaggccttagcccctgcatcttctcactttgggaatctttcagggatgagtggacaagtcccgtcacactccgctccagccgcaagcttaggaggtccctctcaaggttctcggagcaagaggtcctcaaaaggcagcaactggacggaggataagcggcagaaaagggggtacactccccagtatacccagtttacggagctaacggactcccaagagcgtgtgtatttcgctaccaggcaaaatacgcactaccggagacctcctcctctgtacagggatagctcccggagggatcccaacaaaagatgcgagtaccacaatgacattgggcacagcaccaacgaatgcaaaaacctcaaggacgagatcgaaaacttgatccgattggggcatctttacgaatggatcaagaaccggttgcctcacctcaatccggttcaagcaggagggcctttgcccaaggagcaccaaggggtgtagccggagcattagccccagttgctcccccaggagaaacccagtaaattcctggcctgccgctgagacccaacggaagaatagccatgatctcaggaggacctcacgttggaggaactacccgaaaggagctgaaacgttacgcaggggccgtgaagcacagtgaggtttaggaggttactcaactcccagctcaaaggccccggctgatggatca

SEQ ID NO: 346713 - DNA, 660 bp, Cannabis indica
agtacttcttcactcaaaaagatataaacgtgagacaaaggcggtgattggagttagttaaagactatggctatgaaatggagggataggtcatcttttctagatttggtctttaaaattgtctcatctttgtcttcttttctaatgtttccctttatcatgtatctagaaactaaaatattttagctcaaagggctttaaaaaaccgataaagagattgtttggaacggatgtatttcaaaacgtttatttgtgtgattctcgtaaattgaattctattatataagtttaattattacagaccatttttcaagaaaaaaaacttttttattaaaaaaaccatataactattttggagggttgagatgcaaaatggccctaaatttggtaactaagttagtaaatgtccactttttaaaaaaactaagaaaatggccaaatctaataaattagctaataaaaattataaaaatagatttatcacatatttcttttaaaaaaaatatatataataacaaaattaagttacataatttttttagtattgcatattattatattgtaacaaaagtatataaatatattagatcatttaaatatatacagcagtattagatatatcgtagtcaagaattaaatataccgtagtaataaaattat

SEQ ID NO: 346714 - DNA, 670 bp, Cannabis indica
ccttctgaactcagaaattagtttggaatatgaagttatgaacgtattggtttttgatttggtattagtattgattggagtgtaaaaattatgttaaatatttgttactgaactgtgttgaatatcactcatcatttttttagacaaaatatcactcatttatttgattctttatatattagcatggattcctttggttattaagggatagattattatttattttgttgatacttttcaaaaggttgaagtaattcttagtgtcggtttggttggtatttacagttaattatttttatctaaaattaattttttttcttaagaaccatgctaagtgtaattttttcttaagaatatattcataatacctaaaagatagcactataaatataaaaggatgttaaggagcctcaccccctttttcaaatttttttagtggtttggaacaaaaatacaaaagaaggtatctacctttattattattattattattattattattagtttacactttgtgttttgcaaaagttaaggattagactccctattttgttaaatgacaaaataaatcctgtatttttctaaataataaaaatgaaactctaagcttaattttcgataactttttttaaacaaatataatcaacttgaagacaattcttaacacgaa

SEQ ID NO: 346715 - DNA, 871 bp, Cannabis indica
ttggcgtcattattgactctcatgaccgtcattactcggttaaaccgagacaaatgatcgctggggtccgagtccccggtgtaagctgccatttcgggcaacttaaagtttttggggagctccgcctctagaatgtgtctggcgtatggctcccaatcctcacagccagagtctgagttatcccccttttgtctccagaagactcgggcaatgtccttgcgcagtatggctagctcagccggaactccttcgttcagcgttcctgcggagactgccggtgcgtgtttctttttgtccaagtgatcccgcaaatcatcgtgcctctcgttgatctgatttcttagatcaattggagggtatcttcggttccctcttcctttttccttgggttcctgatgcatagaaacgctctttcggtcctctcgatcctgagggccaagggtccctttttggagttttcccctctgcggacctttccctttcgggaactctgagcggacctttcgcgaatcctccatctttttctttttccatgggatggaagtagggtttttctgttggtttcctttagagggataccgtatggggctaggctccctggacttttgctctgagtgcttggtgaggactcttccggtgtttccttgagtgctgcagggatggctttagggtgtatgtggatccctgctatctccatggctttttgcatggagatcatcacttcttgcatctttttgttttgctctttttgggctgtgatctcagcttcatgataagcagccttttgtcttaagagcaatgctctgtgtaactgtctttgttgtaggcgtcgtctcgtcaaggttttcctcgtactcgtcatcattggcct

SEQ ID NO: 346716 - DNA, 1097 bp, Cannabis indica
tctaagatatctaaaaggaacagctagtgctggtttgctatagagagacaatgcaaaatttgaaactgaagttgcagggtatgttgactcagattatgcagggagtatcgacaccagaaggtctattactggttatgcatttacagcttttggtggatgcatcagttggaaatcgaatttacagaaagtggtggctctatctaccacagaggctgaatatatggctgctactgaagccattaaagaagcaatttggttgagaggtttcacagaagaacttggtttcaaaggagaagacatcacagtccattgtgataatcaaagtgctatacacttaatgaagaacccaatgtaccatgaaaggtccaagcacatagatatcaagctccattttattcgagaagtgattgcaaggaaggagatatagatcaagaagattggaactaaggaaaaccctgctgacatgttaaccaaatacattcctcaagccaagttcagacttgctcagcattctcactgcctgagattgctcaagtctagaacagctgcaattcatctctatgcctctgctcattttgatatgtgtccaaggtggataattgttaaattggttggccaaatatcaaatgacacttgtacccttaccaaacttaaccaacttaacccactgttagttatgacagttggtgttgggatattatgaaacactactgcaacatcagtatttaaggggccattcttccacactacagggactaatcttggagaagaatagaaacagagagagataaggaattcaggagtgattgagagagagagagaactgccttgagtgttgtaattggagtgacattgtgtttaatgttcactgccattcgagaagcaaattactgaagcttttcttctgagtttagtgtattttgcaactattgtaatctctctttgtgtagctcaatcaataaaaattctaaaagccatagttgtggctgtttctgggcgaggatgtaggcaaggtaatgcaatgttatcttgttcgaacctcgtaaaattactttgtgttctttatgatttatcctagctatttttctggtttgatc

SEQ ID NO: 346717 - DNA, 883 bp, Cannabis indica
ccctcttaagcgacggacattttgattcaactttccgtccagccaaagaatgatggctcatattaaacaaacaatgcataaagccaatgcatccaaccctcacgtgggccagcacgctaccttgcccaacgccgaacaggatccacccgcacaagaggagggggatcatgaaggggacgctgaggtctaggagatagaggagcagggcgatgtccgtcctggtactccttccgaggaggaggctgcacccccaaactttgggggatacaatgaggctggggagccaattgacgctgacggcgatgtcctcgtcgaaagcatgtacttcattactgaggaacttactgccgcggttcctcaaaggaggcagggtgcattgggcgccaggtgggtgagccctccttccaaggtcaccaaggcacgcttacgggatctcgatcaggatggctacctgggcgagttagactgctacattcctacctataacaatcgagccacaaacccagagagggggatgtgtgcttggtcgggtgctcatgctaagcaaggggcactgctgcctttgcacctgtactttaggaaggtggaaaacttcttccgcctctgtccgacccaattcactcccaagggcatcaagtatctctctgccctgttcattctctacgcctccgagaagtgggatatgccctctccccgtgaggttagctagttttttggacctgaagtctacccccatgcaaggcaggtcagggtacttttatttctctcagccagactacaagcggttgacgggcatcggggataagatcgttagcaaaattgggcattttgttgacgagtatttcatggtggaaggcattggcaccacctacactcagttcca

SEQ ID NO: 346718 - DNA, 1385 bp, Cannabis indica
aaggaaaatcgcagagtttctaaactttgggtttccaacatatcttctacagcgaagttaaagttgcattaagaaaataaatgtgcacaataaacgtaaaagaaatcgagaacttactcaaggatcgaacgtctggattaaggttacgccaagctaaatgagcagtttttgtgaaaacacttcagcaaacttgaagctaaaaacctctcttttcgctctgaacttacttagcaaagaaggttggtgaaaatgactttgtgaacaaatgctcactggtatttataggcgaacaacgaaaaggggtaatcatttcaaaaaacctcagactcctcggttccccccaaaagtgaatatgggaaatcaaaagcaatcaagtgtaaccattagacgtgttgagagaaaatcggatatcgaaaatataaattgcgtcagatcatttattagccgaaaactgaagggatgcccagttagcctcacatcaaatcgcgaacaaacgctcctgacacttgtcacccattcaaacgcaaagacagctcggatgaagtctacacgtaacctcggaagtcccgtacagacttgggggaacatgttatcccaatttctgcactctgacgtggcatcactcgatggtgacatgtggaatcaactccaggtatctgctcgcaagacacagcccgaactggacactttgtacattcgctcggacgaagtgctctagaccgagcagtgggaaattcgcacagaacgccaacacttagcgaattcagctttcgcatcgtgagtcatcaagaaaatccctataactttcggatcagattacagagatatggcaagctgtcccaatcccatgatcagtgtattctgtatttactatggaatctttttgcttctagcaattgtaacgagaagggaaatatttcctctccaagctcatagccctataaatagtgatgcatattcactgggcaaagggtcgaaaacattttggtcaaaagattttgtctaagaattcatattgagagatactgttgtaagagctctaaggaaaggaaccattctccttgttcttaagtcaatacaaataacgaggattaggctattaccgaactgctcggggctgaatctctatatttcagtcgttataaactacttgtcacttacaaaatgactcactatcgttggctaaaaacaaggtaaacaatgaatacaaataaaaagatcatacgaccaattagaacaagcaataagttgcaaaatatctacaaaatagagttgttatgtacctgatgacgacacattgtctggcgcacactataggcacttttgtagattctgagaaaagggaagaagtcgcaagctactttaaatatttaattcttcaacga

SEQ ID NO: 346719 - DNA, 736 bp, Cannabis indica
agttttaccagcatacatttgtagtggctaaaatctaacttttaccagcgcatttacgcgctggggaaagtcatttttgccagcacttttcattttatgctggcaaaagttctaataccaacattgatttgccaactcccttttgccaacacatcacaaataaattctattttaccagcataataccaacttttgtcagcacaaaaatgtgctggcaaaagtgacatttcttgtagtgatattagtgggcttggaccaaataaaaggtagcagcacattagaaatgaataaaaaaaaagaaattaagaggagttgattgtggtgaattgcaagaagtagcaaagagaaaatgaaagaaaaagaaagggaaatagaagactaaaactagagagagaaagtggattttgccactttgcattgaagatgcaagtagttgattctcatttattttagcttaaattttaggtggtaaattcttgcaagatgctttactagttctgatttggcgattgttctctctaaagtgcttttctacaatactcatttggtgagagctaaactttttctttgtgtatctatcttttgagatgatgattgtattgttgatccaaaattattaaatatcgatattgttgtgagcctctagttatagtagcgaagaacattgtaatctcattattgaactttggtgatagtgatgatttgagtggactacagttccgtgatttttttccgt

SEQ ID NO: 346720 - DNA, 875 bp, Cannabis indica
gtgggttgatatagcatgaaaattggtatttttggatgcattttcgtggctggaaactgggtttcctgggtttttaaacccagtagccgcggccatttttggcagcttattgtatttttttcgtttttttttggtcataacttttgactcgggactccgtttgggacgttctttatatcgttggaaagctcgttccgagctctatctgaatatctggaatttaaatgcccagtttttaatttgtggaaatggattttgggattaaccctatacttgtgtatcccggaattgtgactaggattaccggcacttggtcaggagcacccggggatttggaatctccatatttgtgggacatcaggtaagacagtagttagcacgtagagatatgcgcaatggcgcttatatggaatgtgatttatatgagaaactagaaaccgggattagagttattactctaaagtgagcggtttattggcttagggttattacccaagtgaattgttaatatgtaattgttatgccatgatgtatatagctgtatattgaagtaaagggttatgtgttcaaggcataatcgggttggactcggtaactagaaccgagatgaaccgttctaaggccttattgtaattagacgtgtgagcgtaacacgtaggtctatgccacatagacataaataggcgtgtgagcgtaacacgcaggtctatgccacatacacataaataagcgtgtgagcgtaacacgcaggtctgtgtcatacagacaaatatgaaatggcattattatttatgtgataagttatatatgattaacgatatattttactgtcttgctgggcttggctcatgggtgctctactgtgcaggaaaggg

SEQ ID NO: 346721 - DNA, 577 bp, Cannabis indica
tgctattaattgttgttgttgttttctgtggtttaaaaatatttaattaagtgagataagataggttttgatgcatgctagttatccctgttcaagtttgtgaatttttactcaaaatcttgattttaatggtgaattgatgagtttagttgctgtggttgttgattatgttagagtttgttttctggggttacattatgttgatatatggtgaattgagcaggttttagtgcttgtaagtgagttttaaccaagcttgagttttgaactcaaagcttggagctcgcatggtgatttgtgtatttttgcatgaagctcagttttgatgttttgaaaatgtttagtggggtatttagaataggtctggagagttttgcatggtttgggatcgaattgaatgagatatgaaattttgtttgtttcctatactaaattggaattccggttcagtgaagcctgcagcatccggtctaccagatggggcttccaggaattcccagaatcggaattccggttgtagaaccgatctaccggttggggaaaaattgggaaccctagttcttcccatttttatgtt

SEQ ID NO: 346722 - DNA, 499 bp, Cannabis indica
aacaactataacagaaaaaacaagaacacaaacagaaaaaacaagtgaaaaataaatactaagctgaaagaaagagtactccctctgtctatcccttggggtcatcctctaaggagctagaatcttcctgagtttctagatcagtccatcgagcaaacacttcttgtgggaactctgggaagtcaactatttgcctcggtgcaattcgcttcagagatttagctaatgcagtatcacgcgcctgaacatagcgagagtaagtcattggtttctcctcaacgtgtgataggcgattcatgatttgttcctgctgagtgtgaggaagactggcgggcgccggctgactgctagatggctttcgacgttttggagtagcaatcgaggatgtgcaatgagtggcaacacgctgaatcgaaaccaaatcaatgccgatccgctctcgcagaagttcttcatcgcccccaatagcggcattacccgctaggcaaatttgagtgat

SEQ ID NO: 346723 - DNA, 581 bp, Cannabis indica
ttagcaaattgttattcatggccaagaaagaacaatcaattaaaatgaaactcacttgaatgaacaaaggcaaaacaaatgctaaagtaagcttaaaaaataatcatacccaacttacaagttcatagccattcaagcctcaaaagtttacctcatattcaagtaagaagattaaatccaagctaaaaacaattcatccatggctgctgcccaaatttacaatctcacaaagtttttgatactaagtacaaacaacaataaacgagagtaaaggaagaaaactaatgagaaagggtacaagaaaagacaaacactaaggcttggtcccctcttctttcttctttgttgtacttcctgctgtaaattaaagctcctcccatgaaaaatgggagttgccccgtactgtacatacatgatgatgatggtgtacttggttttcctcttcttttagatgttgggtttttagggtactaacttcataccccaaaatagaagcccaaacttttccacttttgccgactagggttagtcccctttcttccacgtcagctggctggcgtaatttgagtgattggaccgaa

SEQ ID NO: 346724 - DNA, 745 bp, Cannabis indica
gtgtgttttgtggttgagcttggccagtgattatatggtgttcctaggttggaatttcaggttttaaatttagtgtttgtggctggaaaatgatttgaatagttgaagataaagctcttgttcttgagcttgagttttgcttagtttaagcatgattttgttgtgtttgctcaatctgaattttgggattttgatgcatgtaatgtgttaattgagtatctattacgtgcttataatcctatatgttaatttgtgaattggttgtaaaattggagtgaaaagattgagttttaggttgaaaattcgaagatgggctactggttttctgggttctgcacccagatgccgcggcatgctctggagcatgccgcagcccgctcctttgggtggacctgggaatcggtcccaggtgccgtggcatggtctgagcatgtcgcggcccgcccttgtgatttttgggcagtttgtgttgaaactttgaaaatgcataacttttgattccgaactccgatttgggagttctttatattgttggaaagatctttccgagctctgtatgattatctgaattttaaatgccatgattgaattttatgagtatgaaaccaggggttaaccctaagtgtgaaatatcccggatttgtgtgactaggattaccggcacctgatcaggagcacccggggattcggaatctctttctattgctggacaacatgtaagacagtgattagcacgtagagtatg

SEQ ID NO: 346725 - DNA, 694 bp, Cannabis indica
tccaacgatcgtacagacctggtattttcatggggagttgttcacgcaaccgaatgtagaaatattagacaacgaagaagaagaaatggcagatgtaatggccgatattttaagagaagatcctagttttgacgatccaagttctaccactgcttcctttaatgagcccactgtgaatggtggtggaaagtacgacgatttgttcaaggatatggaaactgaattgtacccgggttgcaaaaaatcagcgctcaacgctttggtgaagctgatgcactgcaaagttctcaataagtggagtaaccattcttttgatatgttactcgccatattgattgagttatttccagagggtacaaaattacccaagtcccattacgagtcgaagatgaaattgcgtaatcttggtttgggttatgaaaccattgatgtatgcaagtataattgtgccttattttggaaagagaatgaaaaaaagatatatgtccgatttgtggcgagagtcgttggaaaaagagaaagggagacggaaaaaaagttgctagaaaagttttgcggtactttcctttaattctgagactgaagaggttatacagttcaagacactcggcagaggacatgcagtggcactactctaagagacctaaagaggatggcgtgcttaggcaccctgcaaatgcagaagagtggaagc

SEQ ID NO: 346726 - DNA, 816 bp, Cannabis indica
ctctttcccaccacaggcaacttgggtcgcgcagtactcgaggtacatgcccttagcgtcgcctaagtagtcgaagttggcctagggattagccttccaaaaatcaaagaagagctcgaggcctgcagtctccaaagcatcgactttctccttcaagcgatccgcctcggccgcctgagcgtccttatcttccttcagccaaagaaggacctgccgcagagaactcctctcatcctgaagacgatcaacctcagcaaataaggtctcgatggtttcctcaaatttatcagcaacctcgaggtccttagtcagacagtgatcttcttcttagcggtaaacagcttcttgttggcctcacccaactcatggcgaacagctgcagtcttcgccctgtcctcctcagcttccttcttggccatgtctgcctccgccctcaaggtgtcggacagagccgcactcttggaagtagcagattttacccgggagtaggtataagccaacttcaaatcggcctgcataaaggaaaaggtcagcatatgaagctaagtatgaaaagctaaaagggaagtgtcgaaaagaaaagactaaccctggtaagctcctgcaagactccgcccaccaacacatccagagatgagccgtcagcaccagccagttgctcactgacctcaggaatcagccggttcatgtgatgagccatcacctccgtgtgcttcttgaccttaggcagcacgggcatgggtggagtaggtgcctgcgtccgctcaggaatcctcctgaccagttcggacccagatgttgttgggttttgtgccc

SEQ ID NO: 346727 - DNA, 657 bp, Cannabis indica
aaaggattctgaaaaggtaattatatttataatattttttgaagagatgaaaaatacattaaaatctaaaatatagtaaagctcaaataatagattcatggtactacatttgttttcgtgaataggataggaggtttcaattcaaactcttttttttctctctcttaattttaatagaaaaaattaatggattaagacacatattaaaagtgacacacaagaaaataaatggtacgaaaagaatataaaaagaagtcaaatgttattattatgagagaaaaatctaaaaatcagcttaaaaaacaaaagtaatttaatatgattttgagagggcgagaaagaatgaggtgaacgtaagcgcttacgccacaagaatgaagctaaggtggctcaagctcaactcaagggaaaaccagcagcaaattaaagtgcagctgaatttggtattttcttgtggccaagccaaacccattttggctacttaccaaattcattcttttgggccctcaattaatgcctaccccggttgttcgtgggacaaaataatatcctaccatgtctcaaataaattcacacttattgaaagttcccatttctcccaattggtaatattttttaatcaattttttatatttaaaattaaaaaagttaaaatat

SEQ ID NO: 346728 - DNA, 837 bp, Cannabis indica
aatcatagtcagttaattggtgatcagacaattaaaagtaattaagtacaaatgaaatagaatacatagaaactgaagaaaaataaatcatattaaaaccataaaataatgtcaacaatctccatctagaccctaattaagtgtttagctaaacatgttcattgtagcaaaatcacacacattgacttaagaaaagagaagaatataaagaagaaaagaatgatgaaaaccctctgaagaatacctccagtattgaagtcggtctctgaaattcgtactcctttttctgcctttgatttccttctgaattccccctgaaatcaattgaagttcactccttatatagccattgagggactaaaaagatagaaaaaaatgcacatgctagaatcctattcagctttgaattaggccttcacaataagcccgcgttgagaaaaataatattttttctgcttcagataggggcaggccgcaacatgcctttcctgggccgcggccagtgtgcattgatcacatgaggatgctactttttcacaatactggccgtcacatgcccattcctgagccgcggcccgtgtgtaattttcacacaaatttctaacacgtgccacttcatattatccttttcctaggcatgaccagcttcaacttctgttctcctgctaggactagttcctacctatcatattgattcagtctctattccctaggggtgttcatccaattcaatctacactatttcgctcatagagcatcccatccgcattaagtgcggattttattttttggatccaatctaatccgcacaatagctcaaatccaatccaatccgca

SEQ ID NO: 346729 - DNA, 1293 bp, Cannabis indica
tcgctggaacaacgttgacagagtaaagatactctatttccaaagggagtcggggcactcccattttcaagtattttgtacataaccttcaaacgttgcgaggattctgtatgaaatggggcaagcccgagatggtttaggaagtccttgaaatagtctcataggggggtaattgctccagccctgatgtgttcgaggcttcaagcgcctatcccagtcgagccacttgtactggtctcgccacttgtcccctcagatgcttcgcgagtaagtcgcactggttggtaacaactgaactcaccaacaatcaccgatctaacccggcagtctcgcttatattcaataccataagttctcagggtattgcctacatagtctccgatggctcgcacctttgactctattagctcagcctcgaaggtgacgttagggtcctggggagtctttgatttacgtagcttggaagacataatttcaaagtccaggtcacctggttcaaaagcaatcgtgaccttgggtaaaaacaaaggcttagccaaaggaatagaagacaaactaggaggttcaggccaagaaacgtctcgcaagaaacgacgactgtcttctgtaatttcttgcaggaaccatctgtggcaactagcaatatcttcttggtgggttttcactaagtgttccctaatttttgcatcatctatctctaattgggatttgggttctgaaattcttggtttgtatgggatcgcaagttcagtgggacactctatctctaaatattttggacgataaacttctgaactaggttgggacattgctgcaaagagaaagcaatcccaattcttggatgaaatttatcaaaacagaagttggtaaattggagaaactcgaaaacctacgtactgcctaaactctaacatttacccagatataattcaaccctaaaattgctaaaaccagataaggagataaaggtgctaattaaggaactattgatcaaacccagaagtgcaaaattaaaagcatgtaagaaaatgaagagagaaatcacttactatttaaagctaggttttgggacaatgaatggtcctgcaatcgacggattgaatgcttgaggtcgaaaatcaaatcggacaaaactcccaagaagaatgtcaatgacaaagatggcatgcaaggttttgaaatattttgggtatggttttctgtagaaaagcttgaaaaattcccaaaatttttgaaatggcaaaggtagtgaaaaggtgatccttttttcgttttatactcttgggttgatct

SEQ ID NO: 346730 - DNA, 694 bp, Cannabis indica
tgtcttcttctacaatctttacagcagggttatacataaatatgctaagtgcactaacaacataggcaatgtcaggcatggtgcttatcatggtgtacattacacttcctatagcctctacataaggtatattttccatgtcttttttctctaaattacacttggtgactattgtatcttatgttaaaattctttatcactcataaaatatgcaataacaagatttaatttcatagataaatatattacatacaattataagtgtataatcaaagatataaagaatacctttgttgattcaaagagaagaagccaaatagcggaagcgtaccttagtccatagatagtgatgatcttaatccatcttgtagagatgatctttatagtgattttgggtaatgatcattcaagaaaataagacttatggttttctaattttctctcttgatgggggaagatgagaatagaattgactcttatttcttggggaccactaccaatttataacctcataattaggttattaattttaagtatttttaatttagccctttaataaattagaaatatctcttagggtatctacatacacatttagtccatcatacgttaatacccaacgaaccataattactaaaatgatcactttatttgggtcaaattttaaataacaatacactaatatacatatgag

SEQ ID NO: 346731 - DNA, 645 bp, Cannabis indica
attcataatgcctatacctagtgtgaaaagtcgtatttggaatgtcctcttctcagattctcaactgatgatagcgcaatcagagatcaatctttggaaaggccgtcttcccttgaagttgatcgaaaagatcatcgatcctaggtaaaggatacttattcttgattgtcaatttattcaattcccgatagtcaatgcacatatgcagagacccatctttcttcttaacaaacaatacaggagcttcccagggtgacacactaggtcgtgaaaaccctatgtcaaacaacccctgaagttgaatttccatttctttatgttctgctggagccattctgtaaggggccttagaaactagttctgctctaggtgctaagtcaataataaaatcaatttccctttgaagtggtaaactgggaagctcatcaggaaaaacatctaaaaaaatacccgaaccaccttgatgtcttctggctgaattgactcaagctgagtggtatgaattaccatggccagaaaccctagacatccatctcataacagttccctggttgttagtactgaaattactgggatccaagatcccttaatcgatccaacaaaaacaaacagttcctcacccttcggttggaagattaccatctt

SEQ ID NO: 346732 - DNA, 1412 bp, Cannabis indica
gctgcgcctcttccagacggtgtcttaggcggtagttttccatttcataagtaccttctcccatagtctgggtacctctaccattgggctcttcatccctcatcccagagttctggccactcctacgttgagttctcctcaagcatgttggtggcgtactaggatcaacatcaggttgagtcctccgggaacgtgtggtccgtgtgctggggccacgctcaggttgaatcctcctggaactggtggtccatctggactgtgggttgatataccttctggagcccatgggctctttcccgggacaatgatgagtttactcatgtggggtattaacattttctgggttttcagccatgaaggaggtggtttttctcaaaagaaatgagggtttttctgagcttttcaacatagactctcaatgaaagcaccaaactgttaacgtagattttcgttgatcaaaattgagcccacagaaaaaaaaaaaggttgtcaaataaaagtatgaatttttgcagttaaaattctgcatagtccgcgagtcaatcttattcaaatttttgatagttttctcgaggcctcttttgtatgattttttttcatctcttttttgatcttacttgccactatttataatcacatagtgggcaattaattacaaagttgactgtaatctttttataacgatcatcccctaaaataatggggtttgattacatatcacgtagtgtaaatgcgggtattatttgaaaattatatagctgtgattttcccacttttactgggttaaaatgatcgtgtgttcaaatacgtctttaattgttgtatttggggatgtctcgacagaagctttgttccagtagcgagttggggccatttttccttccgaggtcgactatgcacgtcttgttgcttctttgtgaagatcgcggttcttatttacaaagatttcttcgaggctcatttgaatgttagcttctgacttgtcaggattggaagcctcactgagaagatatcagaagttaactgggtgaagttacaggaagccttccaatagcgagattggcacctcgcttattaggtctcaagctaacctgactgttatacttagtttatacattatacgctaagtactcccgcagtcgatatgtgtcgcttttgtcttcctaggtgtaacgtacttgatgcctcgctattcaaattcaacgacatatggtttctcattaatatactaggcaatagtttgtatattttttcctcgcataagaccttacagtcagcaggttgcaaatatactctgatacttacgtaattaatgagttgttccataaaaagtaattgcatcgatccatattccttttatattgacacgtgttccccactgagatggtagctaaatttcgggtataacacca

SEQ ID NO: 346733 - DNA, 510 bp, Cannabis indica
caactagatttgatgtcttgaccgaaaaaaaataaactaactattttgttattttataggcgcacattgtgtttgaaacaaaaaatgaatattgtttttctaatatataaaaaatagactaataggtttattgacgtatattattatgtttgattatagtttactctatattgaaaaaaaataaaatgttattccaacaaacagaaactagtaagtttattaacatatataatagtatgttatataaaataaaatattgaattgttgttttaataaaggaaaagaaaaataaaaatttatttcaatataccaaattaaaatagtagatttattagcatatacgatgataggctatacaaaaatgttacttgtaaacaaagaataaaaatttatttcaatatgctaaaatacactaataagtttatatatgctagtatagacatatttggtctgatcatcattttctttttctaatttgtccagaaatatttgcattcattatcatcttta

SEQ ID NO: 346734 - DNA, 1075 bp, Cannabis indica
aataccctcattttgcctaaaacctttagctactagcctagctttaagggtttgtatagagccatgagtgtgatatttcttcctaaatatccacttacacccaattactttacatccttgtggaagatccacaatatcataggtgtcatttgagagaattgagtccatctcatcatcaacggcttctctccaaaatgtcgtatctctagattgcatggcttctagaaaagtcttaggattatcttcaataagaagtattagagaaattttccttattacttcttctctagtcccttctagcatgtagaaagagattagttgagaatctattttatccttatttagacttttctcttttctcaccctttgacctctcctagggtcatgggttgttctacaactttagcattgttctcctcttgagatcctcttttagaattagaagcttaagaattattttcatataaaatattattaccttgaggtgtggaactttgagagttgtcctcatacagcttattatcaaaaaattctacttatctagattcaataacaatattggattccacatcaaatagcttatacaaaatactattgttggcataaccaagaaatccacattttatggcccttgaacccatggttctatttggtttggtcttcttacgataagcaaaacacccccacactttgaagtaacaaatatttggttttctttctctccaaaactcatatgcagacttgtcatttttcttcataggtattctattaagaatatgacatgcgattaaaagtgcctcctcccataagtttttattcaacttagagtacactatcatagaattaacctgttcaagaaatattctattcttcctttaggctacatcattttgttgtggtgtatgtggtgccgaactctcatgaattataccattttcctcacaaaatgagtaaattcattagagaagtattcacctcctctatcacttcttaacacttttattttcatattgagtttattttcaacctccgctttgaaaatcttaaaagcactaaaggcctcatccttttgctt

SEQ ID NO: 346735 - DNA, 574 bp, Cannabis indica
aacaacaataaaaaaaaataaaagataaacaactataaaacaacgtgaaatcaacataatcgttaaaatatttagataaaatctcttattcataaaaaagataaaatataaatcaacaaaagtaatatcaaaataataccacgaaaatgcttaacttaaagttgaaataaaatcatatttgaatatgccctattcctttaagctagtgaacaattctcttgggtatttcaccaaacatctagcaaatgtacttttatatgtatatatataagaaatcaacttacagaataagaacaaaattttaaaatctgtgagaaaaatagaaaaatcaataataaataagcaaataaacaacaaattcttataaaaactatcaaatctaaacttttattcttgtaattttagtaaaatgggaagtagaagaagaagatcttacaaacatcaatctatatatatatatatatataaaggagaagtatgagacggtgacatgccactctacaatcattccaattacctttatctattctctccttaattttctcattttttaatttttattaagtttataaat

SEQ ID NO: 346736 - DNA, 696 bp, Cannabis indica
tcacgagctccttcacctcaacggttaggttggcagtcgtctgcatgttagcctgatgcagctcctctaaggacttcagcttggctgttaggtcttccactgtctccttggcctccctaaggtcgcgcctcgccctagccacggcctcatcccgggccttcaactcctctgcctctgccttcagcgcctcctgatgcctccactccgtttgagcctccctctattgggcctcctcccggaacgccttcatctcagccgccaagtctctcagactcttcatggcctcgtccatgcccccgaactcgaacatgacgtacccatggtccattaaagtctttgagaggcgaccggtctccgcagcaatctgacaatacaagaaaaaacggtaagtatgggagatcaggtgccacaaagtaaagcccaagaacattaacagagacttactgtggtcatagcagcgctgatatcctaaatctgatagatggagttcgtagaagcgcaggctgcatatcttttggccgggagttgggtcaggttggagacaaagtggctcgtcaactcgaaggcgaagggagcaaggttaggctcgacgaagcggtttaactagtccctcagggggtccatgttcaggtcccaagcattcctaaaggcctcctcacgcaaggaattttgttgggcctcccgtaagaccttttt

SEQ ID NO: 346737 - DNA, 856 bp, Cannabis indica
gtcattttgccccatagcttttgtcctttagtggacttggctttagttagtaatctaatttttatatgaatattaggctgatattatcttttgattaaacaaatgaattctactcatttatccaaaataagaaaagactttctcaaccctctctccttctctctcttaaaattcctagagcaagcaagaatttggtgtttctttctaaaattcaagctagtttcagcaagaatttggtggtctcaagttctaggtaagcttcttgtaacctctccgttagtttcttgaagtgtaagaaagtggatttttgcatgtttattgttgctattcttgctgtaattgttggttattgattttagaagttaaaatatgtttttatgtgttattttgaagtggttttaggggctgtagtatagattgagcaagctttgagtttttgaactcaagcttggctcattaatggtaattttggattctgagcatgggtagttgttctatcacttggaaaatgtttattagggtgtattatgtaggtctagaaagtttggttgggtttggaattgatttggttagggtttggatgtttttgggttttcagggtaaaaccggctaactggttttacaatgcttgtaaaaccagttaaatggatttcgcagcagggtgtctcaaaaaatccagctcgtcgattcgttctagtttcaggtttctagttggttgttttcttgctagtttagggttttgccataataagttacagtggataggtttttggttttaacctaagtcccgggtgtgatttagcgtgtcacttatccatgttgttatcgatgtaatttaggagcctataattcaccg

SEQ ID NO: 346738 - DNA, 1333 bp, Cannabis indica
gcaactcgatatcccagttttctcgcttctattttgtcttcaggcaagacatcctttccaagtaatttactatcggagtcatccatgtaactcctctggaaatgtctatctccatcgcttcatctcgactcaacgttgggtgagttaacacatcgacaagaattacatagagcaattcaggttctcttgtcgaggccaagtgggccaaagcatctgcgtgtgagttatgagcacgcggtactcaggagacaatcactttgttgaatttttgcaacaactcgcatgttatggcaaggtacttagccaaacgcccgcctctgagtagatattctccgtttatctgacatacgacgatttgggagtcgctaaaagcctgtaagtactcgatcttcatctcaagggcgagccttaatcctgcgatcaaagcctcatattcagcttcattgttagatgcagaaaattcaaatcgtaaggcagcgtgtaccttaaaattcttggggctaatgagtattatgccgccaccggagcctttgcttttagaggctccattgacgtataaagtccatccttcgccatttggtacatatcaattttttcttctacgagtgcaacttcagtacttgggaactcgagaatgaaatctgccaaggcctgccccttaatcgcagatcttggtttgtacttgatgtcgaactggcttagctctactgaccatttcaacaaccttcccgatgcttctggttttgcttaaacttgtctcaaagggtaattcgttaaaacttcaatgctatgggcctggaaataaggtcgcaattttcttgaaactattaccaaagcaaacgccagtttctccatttgagggtaacgagtctcggcgtctagcaaacgtttactgacatagtacaccgggtattgcctaccttggtcttcgcggattagtactgagctaatcgcatattcggataccgtcaggtaaatggataaaacttctccaggcattggttttaacaggattgggggctgcccgaaatgcatttttagtgcttggaaagcttcttcgcatgttttggtccattggaacttcgtattgccttttaagatttgaaaaaatactttgcatttatcagaggatcgtgatatgaaacgatttagagcggcgactttacctgtcagattttggacttcttttcgcttagtcggagatcgcatttctactaatgctttaatcttcgcagggtttgcctcaatgcctcgctgattcaccataaacccgaggaatttccctgagccgaccccaaagacacacttaagagggttgagccgcattttgtat

SEQ ID NO: 346739 - DNA, 837 bp, Cannabis indica
cttaacatgagataaaaaaaattgcaggcataagaaactgtactttaaaatggtcacatgagctgagtactttgtttcttttatcgaaacctttgagcgtaggccgcccagcaggccatttacttaaaagtaaatgttcatttagcatttaaagttgtcatccgacctggtactttattggtagtattttcttaaatgttccccattctaatatcgtggtgctcgaatgagttgccttttttcgtcatacttatctaatttgtatgctccggagttgagaacttcaaccacttaatatggtccttcctagttaggtccaagtacacctgtcgtattttctttcgtgtttaggaatacccttctcaggaccatatctcccacaaataatttctgagctttaacttgtttgttgaaataccgagctacttttgttgatgggccatcaactttaagtctacagtggctcgtctttcttcgattttatcaagtgattctgctaggattatgtgattggtaccttgatcgtacgtcaatcttctgtgggaaggtggctcgagttcgacgggtagcatagcttcataaccgtacgtcattgcaaatggtgtctgtccggttgccgttttctaagttgtgcgatatgaccatagaacttcaggaagctcttctggccagtttcctttggcatcttcaagattttcttcagtgtatccttcaaggttttgttgactacttccacttgaccatttgcttgaggatgcaccattgcggagaaacttttgatgataccatggttcacacagaaatcagtgaaagattggctgtcgaactgcttgccat

SEQ ID NO: 346740 - DNA, 736 bp, Cannabis indica
caaagaccaacactaaacaaaatatccggtctactagcgattaaatataataaagagtcaatcataactcgatacttggtcatgtccacattcttactactttcatctttgtccatccttaaacatgtgctcatgggggttttcatggactttacatttgccaagtcaaacttttgaagaagatctttgatgtacttggtttgacttgtgaatatgcatgttatccttttgttgcttgatttaaagtcctaggaaaaagttgagctctcccatcatgctcatctcaaactcactatgcacacttagaaaatttttcacaaaggacatcattagtagcatcaaagataatatcattagtactatctgctttacccattaaaaaccatttgagataataaatgtacttaatctttcataccaagctctaggagcttgctttaaaccatataaagcattttttaatttataaacatggttagggtatttatgatttcaaaaattgggtggttgagagacataaacctcttccataatgtacccatttaagaatgcgattattacatccatttggtacaagataaaattcttgtggcatgcaaaagctaacaacattctaatagactcaaatcttgctaccgggcaaaagattttctcataatcaatttcttcttcttgattgtaaccttgggccactaatctagccctgttacgcacaatgactgttgggttttatgcc

SEQ ID NO: 346741 - DNA, 897 bp, Cannabis indica
attatacaaataccacttacacacaccttcaacccaggatccatacttcttgggcaaccatcgcgcaaccgcgcagcaacccaacgcatccaaaacaaaaaattcaaccagaaagaccaccatttattccggtgacttcatatgagaagacgactagaattaatcaaaattggagctattttgaattcattaaaaaaagtgtaaaaaaactattacgaaactaaaattcaatcggaaatctagtttaatttgcataaaactaatatcctgagttcaattttcagatccatgaaaggcagatctcaaaaagttgagttagagttcccaaacaatccaactcaaatataatccaaaaaaaaaatttacatcaacactatagtaaaatgtttatcctggtgtatttttgttgtttttcgaatttctaatggtgaatttgttcatattaaatcagaaagagacatgtagatcgagttacgtacgtggaaacattattctgatttttaatgttttacaataattgcattacagttgcataactaatctgattttcgttatacaactgtaatgcaattgttgtaaaacattttgctaacagttatttcgtctgattgaaaccttcgtctgatgcaaccttcgaccaaccacccagcaaccacccaaaaacttccgtctgattgaaaccttcgtctaatgcaaccttcaggcttcagccaaccacccagcaaccatcatctgattgaaatcttcatttgatgcaaccacgcagcaactacgtaccctggaaccatcgtctaattgtgtaattggtattttagtaattaaaatcaaataaaaggtataaatgttgttcataccttatggaggtatttttgtaaataaattgtcaatttatatttt

SEQ ID NO: 346742 - DNA, 699 bp, Cannabis indica
tggtctgcccagaaggccattcaattaactgttcttttgtttagtacttgatatggtcatccaacctggtaattctattggtagtattttcttaaatgttccccattccaataccttggtaccagaacgagttgcattttttcatcatacttacccaatttgtatgctcctgattcgagaacttcgaccactttatatggtccttctcagttaggtctgagcacacctatcgtactgtctatggtgtttagaaatactcttcttaggaccatgtcacccacaaagaatttctaagccttcacttatatgttgaaatattgaggtactttttgctaatgggccatcagctttaagtttgttatggtttgcttctcttcaatttcatcaagtgattcggcaaggagtacgtgattggcttcttggctataagtcaatcttttgcgggatagtggtttgagttctacgggcagcattgcttcatatccatatgccatgacaaatggagtctgtccagttgtcgttctctcggttgttcggtatgaccatagaacttcaggaagttcctccgaccagtttcctttagcatcctcaagtcttttctttagtgtatccttcattgtcttgttgactgcttcaacttgaccatggtttgcacaaaaatcagtaaagtcttgaaccggcatattatgttcttcacca

SEQ ID NO: 346743 - DNA, 367 bp, Cannabis indica
gggcataaaacccaacatagccccggtcatcaaatgtgtttggctccaagctccgaagcctccgtaattgtgattgggtgtctccgcgtcccggggcggccggtggtaagtcccagaagtcgcgggcttgatgcctaccaccagcacaatgtgctccagcttgtgggggcaagtgagggtagagtgaagctcggccgcttcccaccccgtggcacgttatacccttcctgggccacgggtcccttcatcacctcttccagggtggccaagcgatttcctccttttttagaagacttggagccggatgtagacattttgattctgaaaaagatttaaaattccaacagtcaggccccataccaaaccc

SEQ ID NO: 346744 - DNA, 670 bp, Cannabis indica
agtctgttgcacatattctggacctaagtacttcatttctcctatttcatcccagtgattgggagatctacactttctgccatacaacaactcatagggagccatccctattacactctggtagctgttattatacgagaattatatcagtgtcagatacttgctccaggagccctcaaagtccattacacaggctcgtaacatgtcttccagtatctgaattgtccttttagactatccatcagtctaaggatggaaagttgtactaaattttagtttggacctatagccgactgaagactctgctagaacttaaaggaaacttcggatctctatccgagactatagactttggaacaccatgtaaactcactatctctttgatatataactctgcgtacagatccactgtaaatgttgtttttaccggtagaaaatgtgcaaacttcatgaatcgatctaccacaaccataattgaatcatacatacttgtggttctaggtaatccaaccacaaagtccaaggtgatatcctcccacttccacttaggaagtgttaaaggctgcaacaaacctaccagtctctgatgttcagccttaataagctgacaagttaagcaccgagatacaaattctaccacattcttcttcatctcgctccaccagaagta

SEQ ID NO: 346745 - DNA, 1162 bp, Cannabis indica
aaccactcatgttattaagctcataaaacagaagttgtaggaatcatcttttttgagaaactttaacgagtgaatcaaagaacttaataaacacaaataggggttcatgtatactcaggattcagactgatccactaatgatcattgatatgaataactatttcatggtaaatgacatgttgatgaaagatattattacatatcgatctagacatatataatcaaattatatacgataccttcactacatgcctatccacatatgtgatctaaatcaaaattacacgtactagagtatagtgcatagtaaaccatacttggcaattccatattaaagatttcttactttttattcaaaaaaaaaaatcttattgtaatacactaccgacttattatattcatattatataattttaattatcttgtacgaccttataagattatactatctatatgaatatttcagatatttattaattgtacttttataattaatgcattcatttatctcacaattgtattgcatatattctattatacattatccataaaatacttgcttttaggacttaaaaaaacttttaaactaaaaaatttattttagataactacatttaatatatatactagtaaaaagttacgtgcgaggcacgtatactaaattttatgctagtttttttctacgttattaaaaagtgatacaattaaaaattaaaaaaaatattattagttattaggttcaacatcattaccctgtgttcatttttaaagaaaaaaaaatatttatgaaataataatttgttgcaacgcgagtacaggcaaaattcagaaaatatagcatttattagtagagtattgacaatttcaacagtaaattaactgattgtatacttttttgtctgctaacattaagcttttgatatttgagtggtgaactcttatttgtccgcttttcaaatttttctaacactctcattttattcttccaactttctgtagttggagtgatgtccttaattgttgtatatagtgtagtcatttattcacctgttttcaaataaaacaatagatatacaaaataaaattaaatataactaagctcatattaaaatcaatctcacctttcaatatagtaaaaggtttttaaattgattcattctca

SEQ ID NO: 346746 - DNA, 852 bp, Cannabis indica
caagttcaattttcaactaaattaaattaagtgttatcaatttgtccatcaaagagtttaacaacaattgagtattaacactatagtcaccatgtttggtcaagctagttgagctctattagaattatcacatctattgaatttcactcttttagcaaacattgatgaaaaattttaacaattaaaaatataaattgggatcaaatctagttgagccctaccgttacgtctgtcatcttgcctgacaatagtcgagctctactaaaactgtaattccaactaacatagttgagatctaccaaaatcaccatctcaactgacatagtcgagctcaacaattaatagtcgagccccctgcaattcatcttcaacctcgggttcatatcgcaaaaatgggattttcaactaaaaaactataaaatagtaataatatggctagtttgatatttttatgggtaaatactattttggactctgtgttttacaaaaattactaattgggccatttgttttgttaaatgacaaaatggaccctgtattttctaaagttgtacaaataggaccctgacctgatttttcgtcaaaataaaatttaagaataatctgatctagatatgttatgataaaactggttacattttctatatctgttcgtgttaaaaaaatttcttaaagttagttataattaaaaaaattgaaaatttagctcagggtcctatttttaccattttggaaaatatatgctctattttgtcatttaacaaaacagatggtccaattgataacttttacaaaatacaaaggtcctaaatagtatataccgtatttttattgttgttcctatcacatata

SEQ ID NO: 346747 - DNA, 761 bp, Cannabis indica
cttctcccagtctcctcaattttttcatactctgattttttggaggatcacagtcccaacagccgatgtttggtcaatttgggagttcatctcagcagccgatgttttatgagggtccaatgcaacaaccttccccgagtcaagtttttcggtgcacaaaagccatatatttttcctggtcagtttcagcaacaatcaccgaattttttgccacagcaacaatctccaaatgtttcgcaacaacaacaatctccgaatttactacaacaacgacaggctcgacaatttgtggagattttatcttcccaacaaccatattacccatcaccatcagtatcgcaagctcagaacaatgcacaaactactgattttaacttgaacactaccggctcaaaatttttagataatatgtttgatgaagacaacaataattagtttatgttaattttagttatgtgtggatttatttaagtttttaattatgtttggatttatttaagttttaaactatgtatggatgataattatctaatttttatgatggataatttttaattcataatgtgtgtagtaattactttattgttaattttaattttaatatttatttataatattaattttaatatttatttataatatttattattaatattaatgtaaaaaaatcataaatatatttataatttattatttttttatataaaaacattaataccagcggggacccgccgctattaatgtgtcagcaattgaatttg

SEQ ID NO: 346748 - DNA, 903 bp, Cannabis indica
tcgcttattaaaagactcattgtcgttggctaaaagcaaagtcaacattttggtgctttctttgagagaagaatcacagatcgctctttcgagacgatagtgcaaactcgcagaggcctgtcagacccagcaaactcatagacgcgggatccaatgttgcaggacacaggtagttcgaaggttccacccgttgtcaatcctagacaaacgagaagcgtggtgaatgatggaacaactcctctaactgaaactgcgcctggtgtgcaagagaccggaaataattgttctgcacacagctaggatgttcataacatgactgttccaccaggcattagcgcccagacaaccatcggagatgcaaccgaattgcaaaatctccgtgctgcgcttggactcatgcagggccacaacattaccctgcatcacgatcaggaggagttacgtgccgcagtaaaccttgcgtttgatgaacagaggcgtatgttcgccgagtggagagataaagagatggaggcattaagggcccatcatgcaaaaatcgaagatcgtagtcagctagctactgtgctgatacggagagtctatcagactgtaggccagcaggcgccgagcgtcattccccttggagaatccgaggatgacccaacggtgaatgcttcccagacaaacaacggccagccgtccaatccccggtcacgagttccactcgtgggccaagaggtaggcggacagaccttgtccgggaattcatcagtaggagtcatgctcgatggatccactcaaaataatggagccattccacctgccaaccaagcgaaccaatcgctaaggcagccaggttcttctgtgttcgaaaggttgggaacaccccgtgacctacgggatgacctgaatagaagaagg

SEQ ID NO: 346749 - DNA, 714 bp, Cannabis indica
tatatattacatctaaataataaataatttttttttgctgaaaaaaaaaattaaaaatataaccctcttcacttatctctaaatagagaaattttctttcatcacctatacatttgtgtatcccaaaagcttccctccctaaagttagctataatttgatgaaaaatatttcatgtacaacaaattaatatgtaaaagtatctagaaaaattatatttataaggaaaatgatttataataaaaagttactcatatctctttattatattacatgtatatattatttatatacaacttaataatagggtggtatttaaatatggagtttttataataataattaatataatgcatagttctatatttatactttgtatacatttaatgatttagtaattaatagagtggtgtttaaatatgagctttttctattcttaaaaatgcaaccaattttaatatacattcttctttttgttattgtttcttttataattactagttggaacaacacgcacgtgttatcttcttggaagtaaatacataacttctattaatttgttaaatcagctaaaagataagattctacctcaacaggaacatcgctcttgttgaacactcgatttagaaaagaacaagatgctccagcaagactatgagcaactatcatttaataaaaaaacaagaaaacattgtttaaagtgttgggttttatgc

SEQ ID NO: 346750 - DNA, 655 bp, Cannabis indica
gatattataatcttaccgttgtatctttctaagtcaatatcactggatgatcttagatcaaaagatcttaatcctgacatggttaggttcaatcttaagagtgttatttgtgttctttgatttgttagttaagcctatcttttggtccgggtgataggtacattttgggaacattttaggaaaatgatggtaatggtgttaatgaggaacaacctcatcttgatgaaaatcctacagataattgtacggataagggtaagggtaagggtaagggtgataaaaaagggatagacctcctactgtgcctattccttatcctaggaagaagggaaagtctgatgtttggcctcatttcactatggaagacaatcctccccgagctacagaggacaatgatgaagaacctcaacaaccttgtgttcctaagtgtatgtgcaactattgtgggagtgattttcactgtgacactaaaaacatgggactagtcatctatggagtcatttgagaaaagtgtgtgagcttagtccactcaaaaatgaagatgaaaaacagaagattttaagttcgagcctcttaagggtggcaaggagggggatggccagttagtagctgtggcctataacaaagaagcttgtaggactgccctcacacaata

SEQ ID NO: 346751 - DNA, 573 bp, Cannabis indica
caaacctgcacaataaccgggacctagtacccgacgcagacccaaacttgaacataggacccagctcgtgacctggcaccagaaattgaaccagactgggacccgaaagtgggatctagatctggacccagggcttggacaaaactcgtagtcggtatcttgatttgggacccagccctagaccagaaccctgagaaggacccgaacccacacccgatcgtaaccggttcaggacttggactctaactcatacctagactcgaagtgggagccgaacctggatcccaacccaaacctagactcggaacgcgaaccccaacctgaactcagacccaaacatggaacaagactaggacacagaaccacggtcgggacctagaaccgcacccagtctcgatctcgaattgaaattcaaaaatgggaactgggacctaaacccgagcaagaccgagacccgtgacagtgatccagatcttgactcgagattcgagtaacggggcctggaacagacccgtagtcgttgtctagatctaggacttagactaggaccagaacccagacgaagaaccaaac

SEQ ID NO: 346752 - DNA, 566 bp, Cannabis indica
atcttttcgttttacaaacttgttctagacctcttcagtttaaggtattcactactaatttactccccaaagtggtagaaaatcacaccgttaaagtttcaatcatctctaaatgtcaccactgccttctatctaacttcttccaaaataaacagtatttgaggcttttgtgttctgtatagacttcacattttcaccatatagataatgtaccaactttcagtgcaaaactattactgccaattcaatatcatgattaaaataccattgctcatactcctttaatggtctaggtggtttggcaaaactctcctaaactatgtcagaatacaatctaatccttgtttagaagtgttaccctaaatcacaaatttctcctctttgactggcattgttaatattggtacaatagttaacctttgtttcaattctttgacttaactccacttagagtgtaaaacattcctcaacaaatattccgtagcattctgttaattctagaaaacctctaacctcagttgtaaacttggattgaagtcaactctaaactgctttaatccttgtcg

SEQ ID NO: 346753 - DNA, 2550 bp, Cannabis indica
tgatctaggatcaacttggtgatattgaattgaatagatataacggtaaatttatcatatctgatcaaagttcaatattggtcccttccaatgcatactccttgcatccaacccaagctttactttaatcaatgccctggaaaggacatatcacttatccaaggtgcaagtaaactgtggtatagattatcatatcagttaaaccctgtgtactgataaatctaggaatataaattgaatcacacaatcttgattactttccactgtggtgacgacacaataaacaagaatattaatgtgataagggtttaggatgaatttataaatcaaataaacatataaatgataacatgaaccaaaagacacattaaataagtgatgaaaatacttttgtttctttattgatatttaaatgatagagattacattgaaatagagttttatttagggcataaagcccaacagttgggtgctatcttcgaaatttctcaccctcgcagcagcttagctaaaccgacttaagtaggtcttaagcgtctcgctcggctgtggctttatgttagtgagtgaggacgcctcgggtttccaatcccttgccgcctggaactgttttttgaagtccttagacaactgctcccaagaggtgattgaatgatgggtaaatttgttgaaccatttgctcactgctccaactagtgaagtggggattacaatatagcctagattattcgtaacattactggctcgcatgatggtattaaaattatttaaatgccaaatcggatctgtggtcctatcatatgacgagacgtgagggtttttgaatccctaggggaattcagtattcataatgtcttcatggaaaggctcgaggtcctcgtccgactcgtatccagactgctttccatattccctgacttgatacctcctgaatttgtcctccaattcatcaatttgcaattggataggatcctcttgcttctaactgagatgttggcaaaggtcaagttttttttttggttcaagtgattacgaagatccagttgctgctggttttagttactaacagacctcttcctactcatggacctcgtcctactcatggatctcgtccttgagtaactttcagttctacttgtgcctatactctctctatcagtattacaatgagttctttccccgccttgcgttgattgactatggcttgtcgtgcatcttgagttggtactcgcctcgtcacgttccggcattctcccttaggtatgggtcgttgcatggcccctgttggggtttatacgtgctccttccgtattagttcgagaaggatgttggcgatgcctcggtggcaacccacttgtcctaggttgagtcccaggatttccctcattctcacggggcatttcttgttccctggtctcgggtcgccttctgttctcatttccatgagaaggctccggttattcattctcagggggaccctcaattttcccaggttgttcttcttgagcgttctaaggattctcctgagccatctcctacctcctggttcatgaaccgtgaggtctacctcgtggtctcctcattccaggattaggttgatgttgtgcattgttttcctatgccgccctggccgcggctacctcctgttccaactcagcattttgtcagtttgcctcctccaagcgacgcctgagatggcgattttccaactcgacaactgcatgtatctcatgggatcatatgcaccatcatcatcatattccatgggttgatcaccaccaacatttctattgggttcttcattccctgtttctgggtttttgccgccttcatgatgggtccttcttgaacgcgtggaccgtgtattttctgggtttcggccaccttcatgttgggtccttcttgagcatgtggaccgtgatgtctctaagttgggaggcctccgtgagcccatcggctcttttccaggatggtgagtagtctctttaggatgagtatcaacattttctctgttatcagccattgagaaaaaatttctttttgttaggtggattttttctgagctttttttacacgtaggctctcaatgaaagcaccaaactgttaatgcagatttttgttagcgatatgagcctattttcgtgataggattagcacaaaaataatataaaataaaaataagaagagtaatgcaaagatcacaccaagttttttacgtggttttgcagttaaaattctgcacagtccacgagtctatcttattagatttctctgatacaaactagggttctttctcttaaggattttctgtccctttttcagtacattttgtccctatttatagttacatatggaggtagttaattacaatcagattcatatcccacaacaatatttccctgaaattatgggatttgattacgtcccatgtaaaataaatacggttattatttgaaaatcacacagtcgtgatttatccgcttttactaggtcaatgttgatgtggatttagatacgctgcaaagtgtatcttgctgggtcatctcgctg

SEQ ID NO: 346754 - DNA, 506 bp, Cannabis indica
atatgtattggatttttaaattactatattctacattaaaatattaattgtatatttaatttttttttataaaaatataaatatgtgctgattggatcagttacttttaaatttcaatcaacattcaattcgcacaaatgtggattttctattttctaatccaatccaatctgcacttgattggatcgtgcgaattagattggataagagcatctccaaggagctttggtgtcacactattactaaatttgctgtcaaaaattattttcactctaaccctaacacaaaaaattatactaaaaaatatttttattattatattattttttaataaaataaaaataattatagtattcacctctaaatttacacacaataaattaaaaggattttgcaatgcacccctcaaagtataagagttacgtttgtaacaaatagtttgaattttattttcggcgttgttaaatttttttgattttttttgaaattttgtaggatatcttaaa

SEQ ID NO: 346755 - DNA, 546 bp, Cannabis indica
aaagaggcaaaattataactagtgacgcccacataatggccgaccatttagtgtgaatttttgcccattattttatttttttaatccatataattaaatcctaaatcctagttgaaatactttcaaaggaacatgatgctcccatctcatcctcaacactttcaacctaacaaatctagttttctaactctgtcagacaactagtagatgagagactcttttctatagtgatttcgcacattattcttgttcttcatgaattcaagccatagtgatagagtattatgcccacacatagcaagtcaagtactcaatcatagcactgaagaaggtggttaaccaaattgaaggagagaaggagattcaggctcaaatttgttattatctgcgacaaagatgaacaagatttagagatctgagtggaaggagtcatatgattctgctgccatcaatgtaaggttttctcaactcttatgtgtttaatttcatcgtattagagaattcatatttagggtgttaatgaaacatacatgttggtaaatctag

SEQ ID NO: 346756 - DNA, 624 bp, Cannabis indica
aacaactagtatcagagccatggtaattgatttgtttgcaagaaatttggacttattttttgaagttttgaaaaaagaaaggttgatgacacatcctcacgcgtgcggaaccgagcttcactcggtcagtagcgtgtttggacagcatatgtccgaaggaacacgctcagggatgtctaaaatcccttcctgtgtgcgcgaaaatcatgctggcagcctcatgtgccgaggaaactcgattgtgtacctagtgagcgcgcgcggatgggtatgcaacgcataccatccgtacagctcacaaatttttcgaatttcttcattttttcatactttttcatggaattaatttccaatttttttttttgtgtagttttgtattttgatttttacatttcatatttcaaatctaattatcagaattaaattaattagaatttttaaaattaatttaagatattagtgtaatttgaacttgaaaataggtaaaaaaatcgatctttttgcttaattaattattttattcttaaaatttgattatattaatattttttaaattattctattttttttaaataaattgaccttatttaaatttaaaataagattattttaatcatgatattt

SEQ ID NO: 346757 - DNA, 584 bp, Cannabis indica
ttaaaatataaataaaataaacaaaaataatcaaaaattttaaaattaaccataaggctagtttgtggaaaaatcaaattactaatatctaaaacaaattttaattaattaaaaaaattaataaaaattaattttattctgataattagagatttttatttaaaaattttgattctacacaaacttctaccaaaatttgaattttatcaatgcaagatgatttttgaaagtcaaaatatcacaaaaataagattgcacattgcatactccctgctcgcgcacaaggggccaaattgtgtgaaaaagggctactggtaacctttttgagaggcaaaactcggtcaggaggggcttaggacaacctttgtccgctcgcgcatgcgtgttgctcagtttcaaatatttttatctaaattcaaaaaatcataactaattcataaaaaatctaaattaagttctgtaaaagccttaatttattaaattttcatctaatattcacgaaaaatacttttaaaacaaaattaaaaatatttaacatcataaattgcaattttcatacaatcatcaaatatgcacataaacta

SEQ ID NO: 346758 - DNA, 550 bp, Cannabis indica
gccagttcttggctaagtcatgggaccttggataaccctttttaggattgggaaccccgcctcgcatgggccttggttccaagcaggtggccagctttctatcctcttttgacttcgacaagaatcttattatggccttgtaggcatataaaaccttagtcttgtacgtggttcccttagaaactttgtatgaaacttaatggtgagtctattattgttgaatgttcaacttaagacccaacatttgtccaagttgttacaattgagacttgtactttgctgatatccagcttgtacgctgacatggtcttccaagtacccatgggtacagttgtccaaagttttatctatggcctggaacctacaacgaactcttcctttttgcttggaacctactaggaattatgtcttagccttagcccagtacgtggttcggtacatctctagctatacaattcttgcagggcttggccctatgcatgtgaaccgatttcatattcggccttattgctctcatgttcttgcttttggcctataggccctctgtttt

SEQ ID NO: 346759 - DNA, 600 bp, Cannabis indica
aaatctgatgcgagtattgcacttatcatccagaaaacaagaaaccgatcctagaggaattgaatggcattactgacgaaactgttgccttgttaacgagaaactatgcaaaattcttgaaaaagaactactgaagaaatttcccagctgataaagaaaatactctcaagaaaaacaaaggtggaaacttcaaacaaggacaaccttctactgatccaaagaatcgaggaattaagtgcagagagtgtgacggatatggccacatccaggctgagtgcgctaacacactcaaaaagaagaaggcccttgcagcaacttggagtgatagtgaagaagaaaagaactccagtgtcagtgaaggatcggatgaggataagcaagtattgtcattcataggccaaagctgtcacccagttgagtctgaaaatgatgcagtctctgcttcatgagaagctgatagcgtaggtcgacaaaatgcatttgaagaaatgtttgtgcaatgggagtacatgactaaacagatccgtggtctaaaaagctctctagagcaagtggagactgaaaaaggaaagttagaggacacggtcaaaaacctcaaca

SEQ ID NO: 346760 - DNA, 587 bp, Cannabis indica
ggcataaaacccaacacagacaactttaaaaaactaaaagaagttgtatcttgcggtaaaaactcaaagaattaaaagaaaaagcaagactctcttgctctgtagactcaggcgcaagggcagttagaaaggagggaactctggggggaaaagggaaaaatggtaaacccaacaagtcttccaaaagaaagagacccaagacgagggataagaccttttaggattatgagccccggttaaccacttattccattctcttagcccctagggaagaaatctttatgggtgtcatataagaaactgcgacctttaaaaagaaacgggaaattatgatatgaacaagttttgtcagtttcacaataattacagtcatgatatcaatgagtgtaatcaattgaggaatgaggtcgaggtcctcatccaccaaaaacatgctgcccctaacgatatgtaccaacgacaaccccttaagagactgtcgcacctctcttacctacaaccattgtaagacagttagatgtgattgttggaggcctacatctagctggaaacttgagaaaagcattggagagatgtaacgccttatc

SEQ ID NO: 346761 - DNA, 565 bp, Cannabis indica
tatcactcaaaggaatttcgaaaaacagagaagaaagagagagggaaagtggcggcttcagagtgtttgtgtgaaagaaaatgaatacaaatgtgtgtgtgaaaacctgaagcctttaccttctatttatagaataccacatagggttaaggttgaattacttggcatttaaaaatgaaaaataaaatgagaaataggaagcaaagtggccggccatggaataaggaaacaagcctctcacttttgcaactttcctattttatcattcctagtttcccattctccaaaattgccaattttctcattcaaccacataaatgtcaaatctaattatttaataactataattaattattaaataatatattgtcatttattttatttattaataaaaactaatcaaagtttcccaattaataaatataccctttaaactctctatttactgttttacccttgcttagtgaaaattcataaagtagacatagtctaacttttagaattataattgattaattaaaatcaattaactgagtcttacaagcagtatggtctcaactagtat

SEQ ID NO: 346762 - DNA, 577 bp, Cannabis indica
tcttgcgttcccgaaacagatgttgggattggtgtgaatgaggaggttccgaccaatgtacaggttccgactaatgtagagcaacaacaagaggggacaagatttcatcagtttgaggagttcgatacaaccttctacaataacgatcctattgtagatttgaatatgatttgtcagtcgatgaagccgtagcgggaccttccttgaggttagagtgtgtaccgagcaaccacggtacacagcgagaacgacaaccccgtagtgaaaatcgcactacacctggaactagcagtagtcgacaaggcagaactgaagaacatgctcattctcgtcatgcaaccttctcaacgttctcctcttttgaagtttgtaccaagttcaaagctcctatgtggacaaaggaagatataatggaaaatcatgagctaactacttgtttacaaagtaaggaagcaggggtgatagagcttggtaatgtttatgaaaacaaggaagaactgagacaagtagtgggtaggtttgcacttaataacaattttgagtggatggtgaagaagtcatcccctgatgtgttgta

SEQ ID NO: 346763 - DNA, 995 bp, Cannabis indica
tataaaataattagtaaataaaaatagtagcttattatattatatgacaactcattagttttgaaaataaactttaaggttacccaaatatattttgaataataaaatagtacaatataacttaaaaatagctaattgattattaagatgtttacaaataaggttatagaggtaatcaaattatatctcaaattatataatttaaaaataatttattttacgtaaaatcaactaattagttttttatcagcatcataagtaaccaaaaggttacttttgaaaactcgagaaaataataaaaaacggaatttgggattaatttaatttcaggcatattattttagaattaaggtattttttaatgacgtggcaaagtattattgtaattgaaatttattaaggtatttttgtaaataatttatattttaagtatattattgaaaaaatcccaaaagaaaatgaaggaaaacaaaaaaaagagcccaaaaatatgctcaaaggcccagcccaaggtctactcctccaacccagaccgtgggccccttttcatctagtcagcgcccatgtggtgcttgtttcttccccagtcgtgcgccacatggtgccataggattggttccaccattctctccttctcttctgcccatgtgggcctaccatgcagttgctcctctatgccttccacgctaaagcccatactccacctgtattgaaacatcaatcacaaaatttaatctttcaaagatttatcaatcaacaacaaagacaagggaaatttgaatttccatgcttaaataacccatatattattcccctaaactaaaactatatataattaattttatatgacactttttgtatttttcccataataccctccccacctacatctacccactccaacctttttctcatcaattcaacaaacattccacccgaaagcttccacaaccaccaaaaaaaattttcttctcttcactcatcactaaaagcta

SEQ ID NO: 346764 - DNA, 577 bp, Cannabis indica
tttttttttttttttattgaagtcaaagaagtgaattttgtgtgtaattataattgtgtctttttctaccaatatttatttatttttcaaatttataatataagagagaaattataaaatatatattggccaatagagattaattgagtttagttgggtctaaaatacatttgatatgttttatgtgaagaaaaatatgtaggtaggtggggactatttttctagctccaaaaaataaaaagtgaaaagtaatgtccttaatttattatttggaaggaaaattcattatacacttaatatgtccttaattatagaataaattaacagtagattacattttaacgatataatatttttcttacataccaacaaactaacataagagaacaaaaatataatagttagtagtcccgtgatccgtaaggggaaataccgggtaaactgtgcaatctcatatcgcctggggaagatcaagtgggatgattctgaaattgtgtaagtataggactacaaagttgaagagagcttaaatggattgattggtactaccgtatatcaacaaggtgcatcttgtttt

SEQ ID NO: 346765 - DNA, 1128 bp, Cannabis indica
aaaaacatatgatgtttgacacacaaaaaactttgcttccaagccattgatcaactactccaaagagtcaaaactttgcacaaacaaaagaatgaacaaaacaacacttaactaccaagtgccataaacaataacacaacacttgaaacacaccaatctggttaccttgtacctcttcatttaaattgcacagaatgcacttcaagttgctaaagggtttagtaaaacaattaacaaaacaacattaaactactaactgccataaccaaaaagtagtacaaaccagttggtacaaacaagttggtataatccgtgagaaccaagaacataaagcacatacatgaatagacaaaatgcccccaaaggttaaccaatttgggtagcttgtacctgtacaaaacaagttgtaaaacatttaatatcagaattaacaaatttcactaactgtcataaccaatttcactaactacttggataattgatttacacaaagaataaaaactgccatagtttttatcaatagtgtatctcattaactcagtaatcttacgtctaaaccatcaaatttttcaaaacaaatttataacaataggaaaatccaaactaaaatttgtaattaaagtacaataattactacccaacagataataaacatataacacatcacatttaaagtaacaatcaaattaaaaaatttaagaccatagttctttttaattttttgggtcaaaatagggaagctaagggtattaaattgtaaaccaaaacacttgggtaaaaaaaacacaccaaaaggaccaaacacttgaatcgactgatgtttttcacacagattactaaataaaattgatttttaaaaacaagtatttttcagcaacactgtatgtaccaatgtttacattgcttttgtttctttcattacattcttttattaaaaaagtttcactgcaagggtattaaattattccaaaacactttcacgataaaaaaacaaacaaaaagggtaaacacatgaatcgaatcaggctcttcacaaaagatataggaactgacatggatatttataagtaactacttcctagtactctgtatgtagaaatggaaaacataaaatgtactttcgatttt

SEQ ID NO: 346766 - DNA, 1498 bp, Cannabis indica
ttaatttattttatcctttaagcttattaaatgtatatttttcactattaatcacttgttcagacccgcttctgatcagctcagatccaccttttgcctgctcaggtcgtccgaactccctcatcgggaacctttggacttagtgactttcaaggtaagagggtccacgacagtttgttctttagaaagatcaatgacctcaccagctggtgctttctctttggacagagtctcactgcccttagacttcttggccggaggggataagcccgagttcccccactctcttcttcagtgcctcaatcatcttctgagatatttctgcatggactaaaaacaatacagttagaagaagttatgaaatatacagaggcatgaaaattaagaaaaataaattcaagatgaaatactctgcacgctggcaggagcatctgcccgaacaagcacagatggggcgtcatcatttgaagagtcttcctgctcctccaggacggctttcccctttccttctacaggggtggatggccgagcaggtagatcaggctctctgatccggatagtatgttcaatgggcctctggccggttgggagggtttcctttttcttgagcggcctctcctgctctgttcctgagcctccttttcctgctcagaatattcctgagcatactgcttggctcttgcatcacccttcaacttagcctcacgcttgagttgaatgagctccttctcttgctcagctccttcagcccggccaaccctggacttcttcttcctccccttcacaggctggggtataaagtctgccagataaagcttgtagttcacaaagttgtcctccgaggtcaacaaagtgatatttcaagcagcatccggaaactggataatctcctgagccctgtccctaagtgccaacgtgaggggtggacgacagtatattgggatctgttgaaaccgagtatagttggtatccatgccttccatgaagtaatactcatcaacaaaacccctgatcttgctaacattcttgtccacggtgcccgtcagccacttgaagtctggctgagagaagtagaagtaccccgacctgctctgcttaggaatagacttcaagtcaaaaagccagttgatctcgtgtggggacgacacagcccatccttgaatggcgtagagaacgaacagggcaaacaagtacttaatgcccttgggagtgaattggatcggacaaaggcaaaaataatctgttaccctcttaaagtacgagtgcaaaggcagcatcgccccttgcttagtgtgagcgcccgaccaggcacaaaaccctttctatgggttagttgcccgatgtttcgaagaggggacgtaacacttaagtctgcctaggtacctagccttatccaaggccctcatgcatgcctcacttattttggacggagggcttacccatctggcacctaaggcactttgcctcctgtggggaactgcttcagtaagctcctcgg

SEQ ID NO: 346767 - DNA, 418 bp, Cannabis indica
aatttcttaagttcagctggagccattctataaggagccttggaaaccggttctactcggagtgccaaataaattataaaatcaatttcctgctgaggtggtaaacccagaagttcttcaggaaaaacatctaaaaattcctataccacctgaatgtcttcaagtcgaatagggttaggccgagtggtgtctactaccacggccagcaatcctaaacatccatcacacaataattccttagctgttaaggccaaagtcaccgggatccgagatccttgtaccgaactgacaaaaacaaagggtttttcaccttctggttggaagattgccatcttcctcttgcagtcaatactggctgaatatttggataagaaatccattcccagtatgatatcaaaatctgttgggttttatgccc

SEQ ID NO: 346768 - DNA, 938 bp, Cannabis indica
ccgccagtgtttgagggtggtgctgatccactcaaggcggagcaatggatgagtatgataacatccatttttgattttatgcgggttgaagataatgaccgggtcaggtgtgctacttatatgctgcgagatgatgcccgtatttggtgggagattgtatctcagggtcatgatctgaataacatgacctgggaagccttcgggccttgttttatgagaagtattataatgagtctattcgggcggcaaaggcagaagagtttatacgtttgactcagggcagtatgactgtgacagagtatgccactaagtttgatcgactggcaaagtttgcttcagatgaggtggctactgaagctgctaggaaagcaaagttcattcgagggttggatgaacatatcgcacgagatgtgattgttgcttctaaacaaccgggggttgctcgaacttatgctcagatagttgaactggccctagtttctgagggtgcagaagctcagatacgaaagaaaaatattgccagaagagattcatggaagcaaacatcaggtgctggttctggtaggggtactgatcccggtgaccgcaagaaaagacctagtgaattatcagctgcaggcccaaaaaaaaggttccagggtaaccaaggtttccgtcttggtgggaacgaaatttggcagacttttcctgaatgtccgaggtgtaaaaggccccaccagggcgagtgtcaggccagggcctatttccactgtggggcggtgggtcacatgaagagaaattgtccatagctactacgactagagcaaaagaaggatggtacacccgctcctactcgattgtttgccctgactcaggctgaggctgatactggtccttctactgtaacaggtcagctttctgttgttggtactttattgactgttctaattgattctggt

SEQ ID NO: 346769 - DNA, 515 bp, Cannabis indica
gattgaactaccactaccaccttgacaacttcaagcaaatcaaaaaccataatttcaactcaataactctaagaattaacttggatgcacaattcagaagtaagaaattcatatagacacaaaacacctcttttgacacccatatcacacccattctacactctccgacattccactaacccatgttcaataagcttgaacgacatacctttctccactaatgttgacaattcttgctcggaatcaaaaggtctttttcggttataatagcatggcttaggtaaaacgggtagatgagaagtcatttaggctacattataccataagcaaaattataccaaacaagcacccacaattatccaatttttttttcatcccaaagtaaatagtaagagattacacttttctcttttatgtgcctacctcattgttcacatttgtttcctcaagaagaatttatcacatttatttatgtttttgtttttttttctcttcttcttttcttctttcttttt

SEQ ID NO: 346770 - DNA, 590 bp, Cannabis indica
gggcccagacagggtcgtgtaccccgaccggaattgagacccggacttggagctaaatctgggacctgatcacaaacatagacttgtacctagatagggatccggatacggacctggacgtgggacaagacccagactttgatcgaaatgcatgacctagatctggacagagatcctgacccagacccaaacttggacccacactcgtataagaacttggacctggacccgaaccttgacccagatcgggatccagacttggacacaaacgcggacacaaactcagacccgaacccaaacacccacagctagaatcagacccaaagctagacccggacccggacccaaactcgaacacagaccaggatcagaaccaaggagttagacccagaactgaatccaaactcagatcgaaattggaacctaggactcggacccaacgtagaccaagacccaggacacaaacccacacccggagcttcatttggacctagacttaaatttggtcccgaacccaaactcagaacaggacttgaactccgacccgcactcaaacccaaactctaactcagaatcgcaaatggaactag

SEQ ID NO: 346771 - DNA, 582 bp, Cannabis indica
aaatatcgaaataaagtgaaaaagtcaataaaaacttgaagaaaagtatttgaaaaaacctaaaaacctagaaaattatctctacatgtaaagcataaataatgtttgagctaaaatgaagaatgatttagctcacttgatgtagcactattttattatttttttagcaaaagaattaaagataactactttagctacactaatatgagtgctataagcagagaattatgtttgatttaattgatagtgactagttacttgaaacttattccataaatgtaaatatttgcttataatttgtgatcttacatttgcttataatttgtgatcaagtctggccttgggctaaagcatgcccgtttttagagcctacccaaattcaaggccttaaattaatgtatatttactcatttgtaaaaaaaaaagtatatatatatatatatatatagtagaaattagacaatatatttgaaaaattttagagttttatttttttgtatagtataaataaacaatactgtgggttatgtaatttttttatttttactatttatatgtagttttttatgccaatatttttgt

SEQ ID NO: 346772 - DNA, 669 bp, Cannabis indica
gtttggagaagacaatccaaaactggccatttcgagctgaaatatcagtggtatttggcttctttgaggttctgggatccttgggaacattttccaattgaaaagacgcatcgaaacgggatgtagaaggagtttgatactcgccgttgctggagaagacgactacgccggcgtaacgctggcgaccgtgttctgggcagttctgaggtgtttttctcatctttttttgtagatttagattctacatattagtttagggtgtttggtacagtttcataattttcttgcaattatttgatttattatgaattatttgatttatttgttatgttaattaggaaaaatacttagattgctcagaaaaatctaagtttttttctatgattggttatggattataaactgctacaaaattaatagattatatttttggtaaattttttatttttcatgaattatttgtattatttataaatttaattatgaaaaatacctagactgttttgaaaattgaaagtaaattatttatggcttattacagattattaaccgtgttagaatggttagatttggtttttgatataaatttggaatttttcataaatttatttagttaatacttaaaataattatgaaaaatagttaagtgatgttaaaacagtaaaatat

SEQ ID NO: 346773 - DNA, 499 bp, Cannabis indica
atttttgttttggtaataaatattaaaagagagtaaataaaggtgtaatcaatagtaaaataaagaaaggctttaagaatcatccatatgcttgtttagctatcttgtacccatgattcacaaagttgacacaaataatttagccttaaacttcattatattttgagtatacaagttcttgaaaataaaagaaataatttaatcttatgtagaacctagaaatgactttatacatcaagtgataatgcaataaaagattaaacataaaactaaacatcgatattatttttattaaatagaaacacatagaaagagcatgactaatcctatatatctttagtaaaaataatagaaatagagatggtggtgatagtgatggaaatgaacattataattactttcttaatttttaagcacatagaaagagcatgactaaacctatacgtttaataaaaagtaaataaaaatgaacatagaagatagaacaagataaatacta

SEQ ID NO: 346774 - DNA, 796 bp, Cannabis indica
aaactaaataaaattgataaaatattataaaaattaaccaaaactaatttataaatactaaaactaatatttatacaaaattaaggaaaaccaaataaaagtcactaaaataaagtaaaaatacttgagagcaaagctagtttaatggacaaaaagagacaaataactctattttcatagagttatcacaccccaaacttaaaactttgcttgtcctcaagcaaaaagaaaaataaacataaagcaagaggcaatatgacactaaagttggtgatctccacatttcccttaaaggttgattaatgaacatagcttagagaaaaaatataaagattgtccaatgattgtgaaaaattcaagaacaagtttcattccaattttgattactccaagtgtgtgtgggaaatgccttttctcaaaagattacttgcaatttagatcaatttatgtaaatatgaattaagcacaaaatctctaaaatgacaaagtctcataggtttatttttcatctctctctccactaatgtagacaaacacaaaaccaaagatcaaaaggactttttcaagcttgtaatgaaaggcttaggtgaaggtagttaagagaagtcatttttggctcaaatcacctaaaagcaccttaattttcctaagaccaaaatgagacctcacacttacttcctcataatatcccacaaaaaatttgagtattaatattgccattatttattgccccaaaattttccaaaataacgtgctcccaggagttatagcaacgtcttagcatagcatttttttt

SEQ ID NO: 346775 - DNA, 756 bp, Cannabis indica
tttgtcaaagaaaaatatgcatattaaatagataaaaaatttgttctagaaaaaatctgaatgatctcgattactgttgatctcaacctaagggcgatatgtcgcctggtcagtaggagacaacaacctgataaagaaacttgttgaatacttatattgaaggattggtatatgttttaccagtatatatattttaacaaggtaaatagctcaacgagaacttatttctttggttcccacaactccgacaatgacatgctcaattcaagcccactaaattagtttaggatcccacaagtcacagtctttataatttattttttatttgagattaattttaattaattaaacaattttaattctttatgatagtatattaattgatcttgttatcatggaacaattcatatatgaaatattttttctcgaattttacaattgttgtgaacaactaaataagatgtaagattaggcattaatatatcatctaaatgtaatagtttataaaactttgaatagtatgatattttcaaacaaattcaataatcaaattgtcactctaggtatcttaaaagatcaatagttgcattataaataagattatatgtgttgagttaaactatcaaaacgatccaattggtttagaaatcattgttgattaaactcatatgtagtagcttttagtaatgctaataggtaaaagactctaattagtgtatggtacaattatttttctttttctatttatacttaatt

SEQ ID NO: 346776 - DNA, 948 bp, Cannabis indica
ctgaacacgcacgcacaaacaaccaacacccacatcccaccaccaccagttcacctccgacgaccactgcgtcgtcaccccctcaccaccgcctacgaccgacgatctccaccgcgtacgacaaaataattaataaaaaaaaaacccctcgggtccgatgggtccgattggcccaatatggtagccattggaccctatcggtccaatcggacctccacgaatcagaccatcggacccaacccaacgtgaccatcagacccaacccatcggaccatcggacccatgcaggatcatcggacccaacccgtcggacccatcagacccaacccgtcggacccatcggacccccttcttccccaatggtttctcagatccgaatccaccaaaaattccacaaaaataccttcgacatctcggttaggcatcggcgtggatccaccgtgggtcaaaaaaatctgcgccgtcgactgggtcggtcaccgtgggtcgactgcgtccgtcaccgtgggtcgattgagccgccgtcatcgtcaccgtgggtcgactagggttgtgttagaatttgaggataagatgaatggggttccatcccaaaaccaattggcaatgggaggagtagcccattcttcttatatattctattatctttccacacattggcaatgtgggactctctaacatccccctcaagatggtagcattttagctgctcaccatcttggacaactcgatcataagcggctctttttttagctcactatccctgatcacaagtgacactttttgctctactttttggatcggtatttttggatttttggtggctcttttttatttttggctcactatatccccgaatcacaagtggctttttttgactttggctcttggatcagttgtttttggatttttggtggctcttttttttcggctctacttcgatcggtt

SEQ ID NO: 346777 - DNA, 597 bp, Cannabis indica
atacatttatccctaataatatgaactcttggattataaagatttaacttcaaaatcatgttaaaaccttcttgttatttattatttattagaaaattaattatataatcaattctgtagtttatttattacaaaaaggctaagattttagttaactaaaatttgtgttaacagtttaatactttcattgagagcctttgtaataaaactcaaaaaaataacctcctcaaaaatacaactctaaatttgcattcacgatagacgatactccacgtaatataatgaagaaaatcagcaagaagagacaacccatcgtccaagaaaggagcctcaggcttcgcaaagaactaacactattgaaactcccccttctggaagaaatgttggagattttaatcaaattggtgaacaaatcccaaaaaggcaaagcaagaatgcttatgattcaaccagctacgttccactagtggaattagaaaataggcaacttcggcaatgcttggctgaatcaaactggaggaatgccatgttagaaggcgaaggggtagcagcaagggctgcacgaggagagtgttggttattattttaccaggatct

SEQ ID NO: 346778 - DNA, 611 bp, Cannabis indica
aataaatcctttaaattctatccaaacttaacccaaacaaactcaagaaattaaagctcaaaacaacccaacacacttgaacatgcatcacaatttcataatcacaagccacaccacattctatgcttttacaacaattaatttcatcaataaaactcagattaaaactataagaagttacctcaaactcaatccaagaataagcttaagatttcacatacacaaagcttcaaatgcaagctcaaccaagcaattcttcaagaaattccccaattagaaaataggtttgagaaaatgaaagagggaaagagagagggtcgggtaaggggcaaagcaaccagaaatttctttttctcaaaattttcttcttttattaaatataaaacaaagggtcaaaagaccattttgcccctagggccatataacattcactttaacatacaagggcaaaaatgacatttcatgcacaattcaaacccaattaatttcagattattcaccaacattaaaatgccaaataatttaatccaatttgcatttcgggcccgaaccccgttcggcctgaaatacccggttgtgactataccgcgccaacctgtcagaacacacct

SEQ ID NO: 346779 - DNA, 746 bp, Cannabis indica
cataaaatgatttctgatctttattaattagtaaaatttattatattgaaatgggttttatttagggcacaaaacccaatcctagttcatacgccaccattgctcactttcaatcatcactatcttcatacttggttaaccactctaaagatagttttacactcaactatatagttcattgtttaataaacaaactactttgtgatccaacattcaccaatcactcaaatacctgtccattaaagtgcatctcaattcataagatttttcccattctaggtgagtttgcctttctataattgcttaataaagtaatctttttcaaaatttcaatggtctccttgtataccatattgactatccagtcaattataaagtactctccatcattattgcatcaccttatgtaattcatgtaatcttttttaccttagtgataccactacttatcttgacgttcttttgtacgttaccatggtaacttcctcgcctcaagccttcattgggcccttactcccatggaatgatggttcttatatatgagttcatcactctagctgcttcctggactgacgactagccccacagacaaatccaagtgtttctaacgtgcattgctctgactcggacacttcatggggaaatttcgtaaatgaaatcaccctaagtcaaggacactcaaccatggagttccttcattttgcgctaccaaaacaagatgcttcttgctaacataggtagtccca

SEQ ID NO: 346780 - DNA, 873 bp, Cannabis indica
acgatactcgatttatcactttattacttgttacgattgcgtacacttgcgtatacaatttttcacaacaagtttttggcgccgttgccggggattgatttagtgaaattttgtttgtggaacttaattactatcaatttggttttttttagtttttcatttgtttcattttattttccttgttctattttacgctttgtttgtttgtcttggttcctttttcaaggtacttgggatgtctcatcgacaagtccttatgaattttgttcaacatgacttggagtccttgtatgaagcatggtggagatacaaggcacttctaatgaggtttccatatcatgggttgtccaaagagtgtcaattagaaatcttcctaaatgggttgaatccaagcacacgaaaatgggtagaaagaggaaatggtaccaccaatttctaccaactatcaatcgatgaagcctattggatgttggaagacatggcggagtacaatgagtggtgttgtaattgtccaaacaatgaccatgtttgggaggacaattacaacaatttggagccaaattttgacacttacactcaaggaccaaatgatgagattttagaagatttacaagagttcaacatagaagaagatcttcatcaaatggctcaatcaagctcacttgaggtgttgatgatggagttcatggctaaaaatgatgccttaattcaaagccaagcttcatccttgaggaaattggagaaccaatttgagcttttggtgaatgagttgcgtgataaatcccatgaaactttgggtattgatatggaaaattcaagggagaaagaagaaagtgaaaatgtcattttgaggagtggtaatgagttggagat

SEQ ID NO: 346781 - DNA, 653 bp, Cannabis indica
gtttctccagagtaccttgacaaaagtcatggtcttgtttcaaaagactttatctttcctatctgaactggttgttcttcgtcaatagatctggttgaagctctaagttctcataactcagcacatgagtaggatcaaaaatgtatttccataacatagagacgtgaaacacgttatggactgctgaaagtgctggaggcaaggctagacaatatgctaccagtccaaccttttcgagaatcttgaaaggccctataaacctagggcataacttgctccatttcccaaaaggtctgatccccttcatcggagacactcgtatgaatacatgatctcctacctaaaattatatatgtctgcatttcagatctgcataactcttttgcctactctgagaggcaagcattctggccttgatcttttctatagcctcattgatctgttgcaccgactccggacctaagtatttcttttctccagtttcatcccagtgaattgaagatatgcacttccttacatacaacaactcatagggagccatccctgtagtactctaataactggtgttgtatgaaaactcaatcagcggcaggtacttgcttcaagagccttcgaaatccatcacacagccacgtaacatatcttccagtatc

SEQ ID NO: 346782 - DNA, 941 bp, Cannabis indica
tcccagtttgggggcccaattcccgggtctgggtaccccatctatgttcaagtctaggtccctgttcgggtccaagtttgtgttcttgttcgagttcgggtctcgagtcccagtatcagtccaagtctcggtttgggttcgagtcggagttcaggtcccaatcctagtatgggttcgagttttaagtcccaagtccgagtctagttcttaggtcctaggttcgggcccatttttgggtctaggtttgggtctgggtccgggtaccggtttgggtccaggtcaaggtcttggtttaggtcccaagtcacaggtcccggtccggtccaattcccggtatgggttatagtctgagtttgggtttatgtttaggtttgggtcttgttattctcccaagtctttgttctagtctcaaacctggccggattctgattccggatccaggatcaggtcttgatcccgatctgggtccgggtatgagtctggatacgaatcccagtccaggtcctggattcaaacactgactacgagtcaggtcaaagccttaggtcaagatttggatctcgatcttgttccagtttgggtcccgagtcttgatccgcgtcctaagtttgggtttaggtctgggttcagggttgtgtctcggtagttaggtcctgggtttcaggtctatggtcaggtcccgtgtctcgagtctgtggtcaagttttgggtctcggtcccagttctggggctcagtttcgtgtccaagtctcccatttgggtttggatccttggtgtaggtctaggtccaagttcgggtgcagggcctaggtcccccatctaggtctggatctttggggctcaggttcgtgtccaagtctcccatcagggtctggatccttggtttaggtctaggtccaagttcgggtgtagggcccaggtcccccatctaggtctggatc

SEQ ID NO: 346783 - DNA, 875 bp, Cannabis indica
agctcgtcgaggagaacaacctaaactaaatcatttttcccagttcgctactttttccggtgatatttttgtagctccgccccttttcgacgacgtttttggtacaccaatttttaccgccaccgattgttaatgtgcaccgcttaggtgtggtatcgaaactccaaattttaaatatagccatgttatatgtcgttggactcggttttgaatgtagaatgcgatgatgataattatttaacaatttgatagtataggtgagagtaatatgtaagattggactaaacaattggagctcgggacttgagagcttaagattgtcttttggataaagtttaacgacttgggagaggtagggacttaacttgattattggactttattttttatatgtgttgtataacattggacatattccaatttttatgatttacaaattgtttgaaaagttgaaaagttaatatgcatatttttctggactgttctggagcactaagtgccaaatatatttttgtgtgcaaatatttatgcaggttatgatttttgagtttattcaaaatacagctgttatgctaccaaattttctagaaaataaaagggaatatgttctttgttatggttattatttgtctgctttaattatactgatgacagccacgttgatcatgttcggtgcatattgttgtttcacgacctagtctcgatgtcatcataggtagatcaggtgtgcactgacttgtaggtgaaagacctagaatctgtacagggagtgagataaatttgagccccggtatttatggtggatatcagatgcgactacctggtcttggatgtcgtaatctatgatttgtattgagagctaggggtctagtgga

SEQ ID NO: 346784 - DNA, 712 bp, Cannabis indica
tgcaaaattatgaaattaactatatgacataaaatgcattttagaattcgataataacagtataaataattatttaaatatctataactaattttcataatcaatcataattaactgctgattttcaaattaaactaagcggtctttacagcaggtatccgtaagctcttgaaaaaaaaatctgggacataatcagtgagctgtgtgtgtatttcaaacaattatactcaaaaacacttaatgtttcagatttggaaaaaatgcaaacaaatgttctaactattttgtgcaagttagaaacaatttttacaccagatttctttgacataatggttcacgtagttatgcatctccctaaagaagttatacgaggtggaccagtgcagtacaggtggatgtatcccattgagcgatcaatgtctgtgtacaagcaatatgtcaggaatcgtgcccttttggaaggctctattgctgaatcttttgtggttaatgaggcattaacattttgctcaatgtacttttgagaagtggaaactcgattcaaccgtcctgaacggaacaatgacattgtccaaaacatgccaactcgacaattttctgtattcaagcatgttggccgaccgctaggtatgaggacagtcgacacctaactcatgcaaagcaagcgtaaggcggagtggtacattttgaataattgcacagaggttgagcc

SEQ ID NO: 346785 - DNA, 690 bp, Cannabis indica
gttttttcccaacaccaaaaccaaacatcagctctacgacttaaagataagggaatactaagaattaaattagcatctctgtcattaaacaaatcacgaaccaagtcgacatcccaggcaacatcttcagaagtcattaacacatttacagtttgatttactaacgccggatgagaagaggagactctcggattatcatagtcaggcagccacgggtccaaaagaatgtttacagatgaaccatccccaatgcaacacctaacccccctccgaactaactcttgggcttccattatactacgccacacaaaactcggattacatcccaactccgctgatagaaaactaccatttttataataacgagctttgaaaatacgtcccaccaaagagtcaggttgacttaacagacaccaaccttgcttgctaagaagacttaaattaaaatctcttagatttctaaaccccattccacctttagacttgtgaactgttaatttctcccagctcttccaatgaatccctttattattcttagcagatgcttgccaccagaatttgcacatcagttgctccatttcctgacaagtttctataagaatatttttatatttaggaaatatatttctatttgaggaaataaatttctaattaaggaaataaaataaataattgattttctgataaatg

SEQ ID NO: 346786 - DNA, 654 bp, Cannabis indica
agagcaggattattcgaagttactcttggattatcttcatttggcagccacggatccaacactatattaattcgagaaccatcaccaactctgcatatcgccccttttcgaacgatctcttgagtttcataaatacttcgccacacgaaacttggatcgctccccaacgcaacatttaagaaggtaccattacggtagtacctagctttaaaatcttactgacaagtgagtccggacgaccaaacaatctccatccttgtttacaaagtacactcaagttaaagtcatgcaagttgcgaaatcccataccacctttagacttatgtatcgtcaatctatcccactttttccaatggattcatttgttgttcttcgacgatcgccaccaaaacttacacatccattgctccatctcattgcaagtttccacaggtagcaaaaacacatttaatccaataagccttaaatatttatttactcataaagatttgaatatgagacagagacggtgattggaactagttaaagattacaattgtaaaattctctatcatcccgtgaaggccaatgtagtggcagatgccctaagcaggaaaggtcccaggcaagttttctgcatgagtattgtaacgccctaatgctaaggcacgctac

SEQ ID NO: 346787 - DNA, 552 bp, Cannabis indica
tatataccacaatttaaagtagatatattacatttgtttttttcgtaatcatatttaaaagttaatatatcatcataatgagaaataaaaataccaaaaatttagtttaatattccataaattcttttttcctttcctttttcatataccatagaaaataaaaagaatatagcctaatgaatataaccttacctcaaataaagtactatttcatattttttcactctttcgttctttatataccacccaacataaaaataatatactacattattaaagtaatatacttgaatataaatatactgtaatatactttatctttcgttcttcatataccaccccacataaaaaaacataccacactattaaagtaatatacttgagtatctttatctttcgttcttcatgtaccaccccacataaaaataatataccacattattaaagtaatatattggaatatgaatatactgtaatataaaaatcttttggaaattaagatcccttcagtacaacttaaaaaagatgaaaaaaaagcacaatgtaaccatt

SEQ ID NO: 346788 - DNA, 631 bp, Cannabis indica
atttaaattaaagattactaaaacaaatattttgattacttattatattttttaatatatactaatttatatttttctattttatttatttaaattaaatattataaagtttaaaaattttaaatatattttttcgcatacttttgacattttatgatatacattatttaacaaatttttatttaatttatttaaattaaaaattacattacataactatctaccaaaatttgggcagcataacggcttaaaaagcgtaaacccaaaattttcaaaacctatgaatatagcacaaacaaactttccataacaacatatgaaaaacaataaatcacaccaccgatcagactgcagtattttatcacagaacctacttcactaacatgtataggcatactaacttataacaaaactattaaatttattactaatataaagaaaaaaaaaaacaaacctgaagcagtccaaaaatgacaacaacaagcaggaagcggtgcttcgggccggtaaacgggacctaatttcataaaaataaaacccaataattaaaatatcaacatacatatacacacacataaataatatatacatacacttaaacttaaacttacatatatacacatacacatac

SEQ ID NO: 346789 - DNA, 664 bp, Cannabis indica
tattgtttcaatatacgaaaaatagactaataggtttattagtgtatatcattatgtttgattatagtttactttgtattgaaaaaataaagtattccaataaacagaaactagtaagtttattgacatatataatgataagtcatataaaatgaaataaattattgttccagtatacgaaaagaaaaatgaaaatttgtttcaatatgtcaaaataaactaatagatttattagcatatacgatgttaagctatacgaaaaatgtaaacaaagaatgaaaatttgttttaatataccaaaaataaactaataagtttatttgacatgatcatcatctttttattttaaaattgatgattttatcaaggtaaccaactggtatcttatcaaaagcataattaattggtctaaaaaatgtcgtatttgtaatgatttaaaagttatttgtaacttcattctttatttaattaatcaaaatgcatatattaatttacatttaaaaatataggtgacttaaatatttatgatgtatatttttaaatatagtttattaaaattgtattttattgaattataaattgttattttcaaaagttaaattgtaaagttactcaaatgtattaatataacctaaataattagttgattattcaaatgtataca

SEQ ID NO: 346790 - DNA, 768 bp, Cannabis indica
tgaactgacacaaaattaatcctcaaacctttgcaatattaatctagaattcaaaatatcaatttttttgttcttaaaaaaataacatttctcgtatcccaaatacttttgaagagacatcctccaaaggtgagaagcctccatttacattcattaggcagacccccaaccaaaacctaaagaatctctctcaactatgttcccctcaaatcagaacaacctattgaaaatgatccaaagaaccacaaagcccttgcaaacgaacagtcctagaaaagatgataaggggattccaaacctcctccacataacaaaaagaatttgtcacaaatgaaatccagcttatccttagtagggagacacctagctagaactctccaaagcatagttacaagcctaaaaagactattatgattccaaatcagcttccaaaaactctcaccttgattctcctctaaccttagactttccaaataggctctcttggtggagaagaatccatatgaaactttcttccaatctagggagtctttgttaggaatattttaccagatctagatttactaacaagtatgttgaattaacatcctatatatgaatatctctaaaataatgaaattaaacacataagagcttagaaaaccttacattggttgcagcggaataatatgactccttctgctcagatctctaacccttgttcctttctatcgccgagtattatcaagatctgagcttggatctctttctctcctttgggtttggtta

SEQ ID NO: 346791 - DNA, 782 bp, Cannabis indica
agccacgaaatgtatccttcttggttattcatctaataaaaaaggatacaaatcctattgttctgtttcacaaaaagtgttcaactccatggatgtcactttctttgaggaacaatcttattatcccaaatttgtagttcagggagagaatcataatcaagaactaaaaaattagaactttgtttcactcattgatcctaagaacacccttgctccaaaaactactcatccttctatttcactcacaaatcctcattattcttcttctgacaacaccattgcttcaaaaattcatcatctgtctgatactcatactccaaactatttagtcaaatcacatgagccaagaaatcctcacccaattccttccttaagtcttgttcccatcaatgaggaccgacctaaccattcagccaatttacatgagctaaaaacttctcatccaaccttttcaaatcctgtccacatcccaaacacagaaatctagttttattcaaggaaaaagaagaatctagccaacattgaacaagctaccactcaaactcatcaaagtcatgaatataatctaattccattcattcttgaacaaacataggaagatgctcgagccaaacctattgtggaagaagatgtgtctggcgatctaagcattcgcattgctctcaggaaaggggttcgctcttgcactcaacatcccattcacaactaattgagttactcaagcttatctcctacctatagagcttttatcaccactctggatcaagtttagattccaaatt

SEQ ID NO: 346792 - DNA, 916 bp, Cannabis indica
ttaggccccgaaccaaaccctaatgttcaaaaaaaggaatgggggtcccctaaccgctggaaagaggccccctccggacacttgccaaataggaaagccccaagaagttttccttgacaagagtcgtgtgcaagaatcccaaaggtactgacattgcaaataaaaagaggaacagagaaaaaaaaaaaaagaggggtaatgccgaaaaggcaaggtactctaagccctaaagttgtcattacgtgggatgaggatggttcctcaaagaaaacgcagtgaaaagaagtaatctaaaagcaaaaaggaggaatttagcacatcattcagaaactcgaacaaaaccattcccagaagttcaaacatccaacccagaaatcataaaaacgttctatataaacgaacagtgagaaagtatacggtatacgaaggacttacatgaagtttgaaggctgggggttggtgttgatcactggtaaaacgaagactggcaacgtcgaaggaatgagagcaggaaatcaattgtgtttaaagcttcttttctctctagaaaaactcttaagaaaatttggtgaaatgctgaaagtaaccaaatgaagtaagaaggctggcttttataggccagaataggtgtgagacaactgtgatcagccaccatcgtacggttaggatggcaatcaattcgaattctacagatccaacagttggattaaacactcatcaagacggtagaaaacgtttgagtacccgtctgacactcatttaatgcgtcgtatcaataaatggacagaaaacgaatcgttgtctgcaaaaagcaaataactgcagtaatgatggtcattaatatgtcaccacgcgcccgaggtacgtgccaggaagctgataaggcaactggaggcatctaagcaagccttgttta

SEQ ID NO: 346793 - DNA, 554 bp, Cannabis indica
atggaagctataccatggtttcgaacagaaacgaaagtatttcttaatctattttgaagttcattgtcataatcaacaagtgtacacagtcaactagatgttatgtgaagatggtgaacaacacaactcaatattttgtttgattatttcatagaaatttaagatttcatgtctatgtatgtacatactttgagcaacatattcaactaagtttataaaaaatatgagagctacatattcaactaagtttgtaaaaatattagcgctatattaatgcataattattttgtaaattattcatttgatcttgtttcattaaaatctaataaaattattatatagtagtattactaaattaagaaaaaaaacttattaattagtatttttattaaaaaagaaatagctaagaaaacggagatttagcaacattttataggaaaagtgttataatatatatatttttaaacatatcaaatactaacataaagtaacacttatacaagtgttgtcttataccctatcttttggcaacggtctaggaggcaacactttta

SEQ ID NO: 346794 - DNA, 1228 bp, Cannabis indica
agagggtagactgttattaatctagaagaagacttttgctagagtgatagttatagaagaaactagccaatatgtccactgctatgtgaagttggcaagtcacacagaggctttttgtgcaacgtttgtgtatgggatgaatggtttagaggagcggaagctgttatggaagggcctagccaatttgaggttcccgattaggccttggattcttttaggtgactttaactccttaattaattttggggatagagtaggaggtaaaccagtttcaagggctgagattgaggaatttaatgattggttaagtttgggcatggtggactctttgaagaggcagggatctttcttcacttggtctaataatcaagggagtaaggatagaatctattcgaggatagatcatgcttttaagaacgaggattggttggatttgtttcctaattccttagcctattagttgggaagaggtctcagatcaatgtgctattgtcatatcctcggctgtaatggtggagataggagtgaagccatttagattctttaactattggacagagcatagagagtttaaaaatctggttttggagagctggcaaaaaccggttttctcttctggcttactggggatctggtttaaattttctcggctgaagcatgtattaaagtcatttaatcatgccaggttgggcaatatggagttggattttcagaaggcaaaatataagtttcttaaagccagattacaagctcaaagcaactcgggagctaaaagatttataatggaggaaaaagatgctgctgatagttttcatcttcaagaaaaaatgctgaaaagtttccttgtccaaaggagtaaggtaacttggctaaaccaaggagatggtaataatgcttatttttatgcctgtatcaagaaaagaagggaagagaataggatagctagctttgttgatcttcatggaaatattgttgataactatcctgatgtagtgaggcattatattgatcattttaaaagctacatgggcagctgtagctcggttactagaaggcttgatactgagtgtctagagcatggcaaccgatggacaataaaccaacagctgagattaattcaatctttttctaacaaggagatcaaggaagctttgttcagcatccctagttcgaaaagtccaggccctgatggctacaactctgaattttttaaggctatgtggaaaga

SEQ ID NO: 346795 - DNA, 727 bp, Cannabis indica
aaaaaatccctaaaatctaattatttcatttttattacatagataatatattaaaaataacaatatataatatattatatatagtttggaacttgacttttgtattttaaatttgaaattaatgtattttttattttattttaatctaaataatatagattatggtgttataagtttataagttatatgcttaatttaatatatagaaaaaactacataaaatttattttttttttaaaaaaaaaaaaattaacgagttgacagagtcaacccgttgactcggccaacccgaacccgcagacccgcgagcccaaaacctgcgaacctgaaccatttcatgggttgggtccgggtgcaattttttgaacccgaaacccgcgaacctgaaaccgatcaacccaccaaatgttcagctctaattgaaaccttcgtctatgccaccttcgagcaaccacctaaacacaactgaaacgaaatccaacaagtttaagaaccaccattaattctggtgatttcacctgagaagatgactagaatcaatcaaaataggggttgttttgaattcatgaaaaaaaagtgcggaaaaactactatgaaactaaaattcaaccagaaattcagtttaattcgcataaaactaatgtcctgacttcaatttttcagatccatgaaatgcagatctcaaaaagttgaacttgagttcctaaaaaatccaactcaagtataa

SEQ ID NO: 346796 - DNA, 716 bp, Cannabis indica
gagctagtttagactgtaaaacagtgagagagttctggtgagatgagttgtaattgaagctttgcttcacgagtgtatgtgtttcatgaacactttgtaaaacaacttgtaattctctctcaaactagcattaataaagattcaaagccactggggctgttctggccgaggagtaggcaagtgattaacagatcacttaatcgaacctcgtaattgattgtgtttgatctctcttctcttatttttcttgtcattgataatttgcctatttctgttataccttagtttccactactggtttatgcattattggttttactgttttctgtcatagttgatttgttcaatttgcaattgattaattctgttcttgatcaaatctttgtgttgtgtcatttgcgaggtggtttgatcatgcattgatcacatcaaatggtatcagagctcaatcgaaagggatcatcaaagaattgaaacaaagacatcaagaacttcaagaaaagaaccaagaactgatctgctatggcttctaccaggtttgaagttgacaagttcaatgggacaaacgacttgggtctatggagaattaaaatgaaggcatttctggtacatcaaggaatctcagaggcaattgatagagatgagcttgctgctctaggagatgacaagaagaaacttaaggaaattcagaacaaggcacacagtgccattctgtt

SEQ ID NO: 346797 - DNA, 891 bp, Cannabis indica
atttgtgaaagaaaagataagttctaaaataaaattgcaaaattaaaacctatagggccaacaacgtttcaattaagccattattttatcttcttttttttttaattccgtataattctaatcctaaccctaaaagttatcttataaatagaaagagatggctcttattttctaacatagttttactttgtcagacaacttaaaaaataaagagagagcctcttagaattaaaaatcctcttcctttcttcttcatatttttgaaacccctttagtgagttgaggaattgcccacataattcaagccaatactcaggcctttgtggaagactgtgaagaattctaataacaaaagaagatccatgtttagatcttaatcatactctgcgacagaaaagatcaaggattagagatttaaatggaaggagacattatattccactgccaccaatgtaagattttctataactttatatgtctttatttcattgtcttagaaaattcacatttaggatgttagattatagtactataatcaacatacatgttagtaaatctagatcctagtaaaataagctctaacaataaccactgcctttgtctcatcttcaaatcttttggagtaaagaactacttgagactcttgtggtctatatagatctcacactttcctccatacaagtaatgctgccaaattttcaaagcaaacacaacaacaagttctaaatcgtgtgtcgggtaacgttgctcatactccttcaattgatgagaagcataagtaatgacgctgtcagcttgcatcaaaacgcaccccagaccctatctagatgcatcacaatatacaacgaacttctctgatctgatggtgaagctaacactggtgtcgtgatc

SEQ ID NO: 346798 - DNA, 549 bp, Cannabis indica
tttttttttttttaataatttcttatttatatgtttattacatctattaatgtttttttttgtatggatccaaagtattttgaatgtagatttaatcaataaaaaaaagatatatggattattaaaaaatatatccaatttgtttaatatttattgtatctactcatctatttgttagtcacttcttcttctttattttttacactaaatggaagaaagattttctaaaagtataaaactgcacaatttcattattttaactgagaaaaagaaatttaaaacatatagtagaagatgtagttgcttagtaaaagcttaaaaatatctaggcttaatattatatatttatgaatgataattaagaataataataatagggatttcaaaaattgagaagtaagcgtttgattgggaaaaatgaaaacataggaatatgaatgataatggagatagaaataggaatggaatggaatgaaatttaaaatgtataaaaaatcgataaaaaaattattaatttttttttctcatcatgcattggaatggtctttc

SEQ ID NO: 346799 - DNA, 552 bp, Cannabis indica
tttttgcggttttttagtatcgcggtgcgggtgcggtttagaaaattggaaaaaccgcatgtgcgggttggtttgaaaaaatggttaaaaaccgcaccacccgcaccgcaaacacccctagtaatagctatcttttttgggactcttggtttagctgggtttatatacaacttctgggtattatgttgagaaacttttttggatcaaagattagggattacgttgctttcttcttgtttcttctttatgttccatgacaggtgatctttgagcttggaggtattaatccaaagttgcagatcaaagcttgaagatgttgagttcagactgaagggatttcagtatcatcttcatcattagatctgaagggagttcagattgaagaaaagtagtgttgaagagaactcatcattcacacaaggggatcttgtgtctccaatcaagggtcttggttggtatgagtatagattcactgtattttgtaaaagagtgtattgtttaaattttgttggttttgtaagatacatctttgaatatagtgaaagttattac

SEQ ID NO: 346800 - DNA, 897 bp, Cannabis indica
attacggtaaatttaacatatctgattcaaagttcagattatcatatcagttaaacccagtgtactgataaatctaggaatatatatttaatcacacaatcttgattactttccactgtgctaacgacataagaaacaagaacataaatgtgataaggatttggatgaatttacaaatcaaataaacaaataaatgataacatgaaccaaatgacacaataagtgatgaaaatacttttgtttctttattgatattaaatgatagagattttattgaaatagagttttatttagggcataaaacccaacagttcatccatggctgctatgttcttctttatgattcaacaaacttctaataattaaagaaaagggaaaaaaatagaagaaaggtaagagaaattcaaacaaatagagcttgtgtccttctctttttgcactacgatctccctttttctccttcctcttatgtactttatctttctaccattaattcttttctccaaatggcagttgagctaatgttgaagaaggtgatggctatacttagtgtttgttaggtaaatagggtacaatgtaataccctaaaaataaaagcccaattcatttccaatcttggcccattaggttttgtctcttccctcaacaacagccagttggcgtaactttgaatggttgatacgtacgtgctgatgtggatgaatgaaattcagtctgtaacttttttccacgtcactgcccagaatgctaaattttttgcagcaatgcttcagtaatttagtccaatttcagcttttatttccactttgtccttgcatcctttccttttccctaacaatttaattcttcttttcaacaaccaacaaacaacatttaattaaataaacacaactaaaa

SEQ ID NO: 346801 - DNA, 585 bp, Cannabis indica
actaaagttaaagttatatttgtaaacaaaatcttaaaaacaagtaatatagatatatatatatatacatctttgatctctttagtgcttctgttgtaatatagaacaaaatttgaacaaatgcaaattatgcaaaaaagatctcaataacaaggtcaacgatctcaacaactaggtcaagaatcaaaacatacttctgactaattcttcaataatctcaggtaattcacaatcagatttagctagtgctaactactaatctattttagtattatgtatttttgttatttatttaggtttttaatgttgtttatatttttttaattcattagtctttttttgaattaatattagcctagattgtggattgtggtaaaatcatgagaaacttcattttaagaaaaatatgaaaattttagtatgaatctcttttaagatgaagacatacaataattttgatttcatattaactgtgatattgataacaacagcccaggtcacaaaacaaggccagaagatgtgttattttggcaatctgctatgggagaaatttattttttcctccaaaaatgtataaagtttaat

SEQ ID NO: 346802 - DNA, 715 bp, Cannabis indica
aggggatgtgcgcctggtcgaggactcacggccagcaagggcgctaatgcccttgcagaaatacttcagggatgtggcagacttctttggtctttgtccggacaagattactcctaagggcatcaagtatttatccgccctctttgtcgtctacgcttcctaaggatgggatgctccttcttcccacgaggtcgcctggttctttgacatgaattctacccccaaacaaggcagttcagggtacttctacttctctcagccagtcttcaagtggttgaccggcacggacgccaaggccatcaacaaaatagggcattttgttgatgagtagatcatggtgaaggatccgagcattacctggactcgatttcaatagattccgatatatcactgtcctcccctcactcttgctcttagggatagagctcacaaacttgcctggttgccgggggaggcaggaatattatccagttgacctccagtgataatctggtgtagtacgggctctatcttgaggacttttctcctaagtccgtggcggggaagaggaggaaatttgatgctggctggcctgaacgagctagtaaggacgatgagctcattcaacttaagcgcgaggctaagttgaacggaggtgccagggccaagcagtatgctcatgagcctttgaatcctgtagatgaggctgaggacgagcaggtgaccccattgaaga

SEQ ID NO: 346803 - DNA, 1158 bp, Cannabis indica
tttttttttttttttgagtttaactaagtgattttgattactttgtaggcatggtaaataatttaattcaaaaaagcatttaatttttacatgtcatatgtaaattttgagttaaaaatttatttttcatacaaattaatttttatttgaaattcattcatcaaataaaatcttctcctgtatagtattgtatagagatgattcagagactatggaactatatttcaaagctccaataaattcaagattattagcaatctcatcaataaaaaatctggtttattaattctattattactccactataaatatagaattgcactctttgacaatatagaattatatttataaaaattttatttgtgatataatcaatataagtagttcgccttttaattattaattcataattagaattggtcaaaatatcgttttacccttctaattatatcttgattctttatgtgtcattaattcaatgtgaacagtagttaatctataacttattatagatttagatctaacttttagtagtcccaaaattaatatactataagggaactaatattcaatcttggattccactattatctaacatgtttccatgaacacaaacatgagttcatgtatacttaggattcatctactaatgatcatcgttatgatatgaataactcttttcatggtaaacgacaagttaatgaaagatgtttattacatatcggtccagtcatgcataatctaattaaacacaatatatttactacatgtccatcacatatgtgatccgaatcaaaatcacacacactagaactatagtgtatagtaaatcatacttagtagttccatattaaaaattcttaaaactttaatacactaccgacttattttattcatatcatataatcttagttctcttgtagatatacatccttacaagattatacccttttcatatgaataaggagttttcaaatatttaataattatactcttataattaatatataaattatcttataaatgtatttattgtgaaatggaagaatgaaaagtaaatatgttattgaaaaatgattaattaatggcatgtttactaataagtaatgggaatcaatagtaaggtaatcattcccttacatttgtttacttgcatta

SEQ ID NO: 346804 - DNA, 542 bp, Cannabis indica
tacccgcttcttaaattcaccccatacccgtcccaatacccgtttaaattaaagcggggcggggtgggtattacccgacgggagaaggattcccatcgggtacccattacatatatatttttgaaaaaaaaaatgtcttaaagagacttaaaaaaaaataatcataaaaatttagtaaaacaataaacttaagtggaatagtgtgtatagtaaaaaaaaaagtataatcaataaaaatcctaaagcatgaagttattttagttgtagtagttattattttaaaaattaaatatatacatatattatattggggcgggtttggggcgggtatctattcccccgctcccgcccccgtcccgtttccgactcgggtatgaatctttaaacccacccccgcccctgcccccgaaagtcaacccccgtacccgccccattaggggcggtaaccagcgggtacccgaacctacgtgtataattgccatccctacttatgtaattatccatttttttctttcttttattatttaattgggataaattga

SEQ ID NO: 346805 - DNA, 435 bp, Cannabis indica
taaaataatttccaacatcttcctccttttgagcagagtcacctgctcttcctcggcttcatcttcaggattcaagggctcctgagcatactgcttggcccttgcacctcctttcaacttagcttcacgcttaacttggatgagttcattctcctgatgagctcgttcaacccttccagcaccagatttcctcttcctccccttcactagcttaggaatgaaatccttcggatagagcccgtacttcacaaatttatcctcggaggtcaactggatgatatttcggtattcccttgggagtcgagcaagcttttgagctctatccctgagattaagaaggagaggcggcggtgatacaacggaatctgctggaacttgttggattatttattttaccaggatcttagatctactcacaagtatgttgtttaaaca

SEQ ID NO: 346806 - DNA, 486 bp, Cannabis indica
ttcaccttctattcaaaattctattcaaaaaaaaataataataataataagttttaaaattggaaaaataaattaattttttatgaactacgacgtcagttctgatgacatatggcgtcagttattcaataattacccttttggcatctgttgagtttgaccctacagtgttgcctgaatcagcatcagtagtaaattttactaaaattaatgctgaaaggggttaaaaaaccacctctaaagcctataattgtcgtagtgtaaagctctgaaaatttcattcccagggaattcaacctccaaaagaggggcattagcctaagcgacgttagctgcacactttctccttgtttctcttcactttgtaggcatgccctcctcatacactacaccttatatgtattttcttcgatctttgtatcaaaagcttacaagttagtgagaaatagatgctcttgtaataaatattaataattatgtggatgt

SEQ ID NO: 346807 - DNA, 579 bp, Cannabis indica
tccagtctttattgttaagttctcgatacttctctggagtatcacaaagctctttaatcctaccacttttagcaatcgagaggataatcgttcgggtcaggagcttcttgaaacttttcatcatttttcccgcatttgatagtagtttagacttatacgtttttggaaggtcgaaagcatcctaaaatcacaaaaagaatggattagtaattaaaaatgttgaattaaatgtgttgaaatatatatatacacaaaatttaagtcttacaagtgtctcctttcatatttactccttgagtttcgaatctacatgtctccaatcatcataatttagagaaactgtagatctttctttaaccctaatccatgattgcatatctgcatatgttattcttatagattctcctttctcattccactctagttttttcttgcgtccttgagctttcagattgttgatgttattcttttttatcatgcctcgcccttttggcttatttgcatcttatagaatcaatcagatcagttatgtaaaatacttgtttcgcttgggtagccatgataaaaggatcgttcttg

SEQ ID NO: 346808 - DNA, 903 bp, Cannabis indica
attcaggagtcctcttgtcccctcccccacttttgctcggccattgctttcccgacttcttactcgcagcattgttggtgctcgtctggggattcatcttcttcgactgcgaattctcagaggtgtaatcagtcagccactcggctgcagcttgagcagtggcgaggtctgacacccgctacctttgcagctcttgtttagcccacagcttgagtccttcgaggaagtagaaaagtctgtcaacttcgttcatgtccttaatgtagagcatcaatccagagaacttctttacatagtctcagactgtcccaacttgctttaactctctcaactgacatcgagccaagtaggcgacattttctggcaggaattgggattccattctttcttgaggtcttctcatgtcttatttaatggtgcattttaaactttgaatgtcttcatactttgtcctccaccataacttggcatccccagacaaatacatggtagttgttgctacatttgcttctttagagttggtccgcgcaaccctaaagtattgctccatgtcaaacaaaaagttttggagctccttcgcatccctcgcccctccatagcattttggctcaggtgctctcggtcggccatactccatacctccgtgccccccggtattagcacactctgctactatcatggaaagatttagcttagttgagattcctgctaactcttctcgaatagctgtgacagacacatgacaatcctctatcgtatcattgagggagtcttgtaatgcagcctgcccattttgtagcacagtgatagcagcatgcatgtccgttgtgttttttgtgccctaaataaaacccatttcaatataatcagatttaataaagatcagaaataacattttatgtt

SEQ ID NO: 346809 - DNA, 437 bp, Cannabis indica
atcagttttattttagattgcaacaccatcatttaaatatttgaatataaataaaaattactacacccaataaataaaaataaatttttcttgaataaatcactttattaaaaaaaaaaattcaattaggctataataataaaatgattatttattgaatcattttcatttatattataaaacacctaacataaaactaagtatacctaccccttgcacgtagctttctcctagtcatttatgtatttccacaaaatattccaaaagagttgatggattgggcaattatgtattaagctttgttttaggtttgaatgatgggagacgttggagaatatattttttttgttatacattaattaaatttatctttaaataaaatttaatttaaacatatttttttatgagtattatacccaaattattctcacaccctc

SEQ ID NO: 346810 - DNA, 427 bp, Cannabis indica
tttttacatttttttttaactaaaattggtttagtttttaagtttttaattactttgtgaagtttttaattatttttgaatttatttgttttattgtaattttatatgtttttgtgtatttatataattattttatgtggtatttatttttaattttattttagttttctaattaattttatgaatttttaggtgtatttggtggaaaaagtatggattgatttgaagaacatgtgaagaatttggggtgaaaatgcaatttgtaaaataaaaatcagatcagtccaaaagagccccattttcggtcatactttgacccaatcttagccgtccgtgctctgatccaacgacccagatgggcgagtctaactcacccaggcaagcgcaagtgacgagccaaacacctactattggaaataattttacc

SEQ ID NO: 346811 - DNA, 639 bp, Cannabis indica
gccacgcgaccccctggtccccagctcgccagccccacaacgaacaacaagcgccacgcgagcaaccgtcagcccctcctccattcaagccgcgccaagtggcacctacagaaaacaaaaaaaaaaaagaagaaaaaaatgctttatttctcatccgaaaatcacttagaaaatgccaaaattcaatattttctcccacaacttttacctaaatatcaattttattctctcaattattttcacctaaataaacattcctaatttatttttttaccctatctcttctctatttttccatccaaacaaacatttattctttccaatactcttacacatactctatttttccattctcttcccaacactaattaaataattcattttatttattttattgtgattaatttaatcctccaattttgcctataaatatggtgttggaagaccatttcaaaatacacctcttcactaccaaaacatttcttcatctcttcaaccctaaacacttctccattccacaccatttcattccacactcttcatatacttctaccatttccttcttaccattttttttctaccattttttatatttttgaagagcatgtcaagtatattattttgtaatttttatttcaa

SEQ ID NO: 346812 - DNA, 729 bp, Cannabis indica
caacccccaatctgcacctacaaagttatgatcatttatgtctattgatggctacactgcaaagagtcacgtcagtcaaaagacaataacgatattccacataaaagccctacaacacctagggatttgaccatggattacccatggtatattcattgggaatacccaactttatgtatatttacagacatacatgtactgtaatcctaggaatcacccaaccaaaaacactataaataccccctcaaagctcattaaatggggtcgagaattttgggtttcataagtgcaagaagagtaaatactcaccaagaacattctctgtatttaatacactcattaatacacagactcgtggactaaggctcattaacgctccaaccacgtaaagatccttctcttaatttcttacagttctctaatcttatattattttattggttgccgaaaacctcggtcaacagatattaatataattaaattattattcttaaactaacaaactaaattttgaaaatttagggttgttaaaaacaaccttaaaaatctcatcaaaatttaaattcaaaaaatgaaaactaatttaaaatatctaggtttatttagaattatttttatcaaatcaaattagatatcaaacaagataaatgatttgaaaaaaaatatcttcaatatcatcttctaatcttataatttaataaaatttaataataaaataaaccaatttaa

SEQ ID NO: 346813 - DNA, 691 bp, Cannabis indica
aatctgagaggaggacattccaaagacgacttttcgtactaggtatggacattatgaatttctggttatgtcatttggactaaccaatgcttctacaacattcatggacttgatgaatagagtattcaaggatttcctcaatatctgtgtaattgtgtttatcgacaatatccttgtgtattctcagtcaaaaggggagcatgagttacatctccgaatggttctgcaatggcttcgagaacacaagctttatgccaaattcaagaaatgtgaattttggttgtctcaggtgtcctttctaggacacattgttagaaaggatgggatcaaggtggatccaggaaagatagcatccgtcagggattggccaagactgaaaacagtgacagaagtcagaagcttcttgggtctagccagttattatcgtcggtttgtagaagcatttctaaaatctcaacacccttaaccgagctcaccaaaaagaatcagcgttttgtatggtcagacaaatgtgaggctagttttcaggagctgaaacacaggttgattatagttccagtgctagctttgccttctgacaaagaaaagttcatagtttattgtgatgcatctagacagggtttggatgcatgctgatgcaaaccgatcgggttatcgcttatgcctcccgtcagttaaaagattatgagca

SEQ ID NO: 346814 - DNA, 809 bp, Cannabis indica
ggccatgtttttcgttgctggttttgtgattttctgggtttggaacccaagggctgtggcccagctccttgggcaccgcggctcgcctccagttggtggcctgggattcgaacctaggtgccgcgaccccatgtgcggagtgtcgcggtccgccccttgtttctgggcagattcgaacgcgatattcaaatattcataactttgtgatccaaactccgttttgggagttctatatatcattggaaagctcgtttcgagctctatgtgaatatctgtgatttaaatgccaagtttatattatgtgaaagtggaattagggattaaccttttatttataaatcttagaatttgtgactaggattaccggcacttggtcaggagcacccgcggatttggaatctccacgtttgctggacatcaggtaagacagtatttagcacgtagagttattaccctaacatgagcggtttaatggcctagggttattaccctagtgattattaatgtgtatctgctacaccatgttaaatatatgtgtatattgagatttagggtgatgcgttcaaggcataatcgggttggactcggtaactagaaccgagatgtaccgttctaaggccttagtgtatatagacgtgtgagcgcaacacgtagatctatgtcacatagacataaataggcgtgtgagcgtaacacgcaggtctgtgtcatacagatatatgtgaaatggcattaatactgttgtgatatgttaagtatgattattgatattttatactgtcttgctgggcttggctcacgggtgctct

SEQ ID NO: 346815 - DNA, 823 bp, Cannabis indica
cttatttttcttttgatttttctgtttttttagatgtcatctgatgaagattggatggctgcacaaaaaacgcatagtattatctctccggtctagtggtaccagacatgtcttctgggtataaattactgaagacggaaggctttacgaatgcggaaccaagatatgttcatggaaggacatatccatgtgggattggcccacttctcctttgttgagggtcccactgataggtctacggtgctgacctggagtccacgtgtccaataccaaaaacacgaataacagttacaattttgtttgcacgtcatcaaggccaaaatttaggataataattatattgtgcaatttttatattttgttgtatacaaaaattataatttttttttttgaaaaaacaaaatgtataagagtttcccataataataactttaattaatatactatcataaaaatttaaaatagttgatttttctctacaatcttaatgtatcgacgaggtataactttatgatgacctgtcttgctacatgttacaattttgattgcaaatcatacaactcaaaatttgagataacaattatattgtgcaattgttgatcctaaaatataagggtagcaattcgataatttagtacatctaaaagatctcatagttattcaatgttatcatatactatctaatttgaatgagatcaactgtaacaccctaactagcataggagtattacgtgatttttaaacatactgtgcagctcattgctaatcaacgagatttatggaaatcgtgattaattaaattttttttgctttttaattaaac

SEQ ID NO: 346816 - DNA, 1201 bp, Cannabis indica
ttcttttctccatcaataatgtacccgccgctttgtaggcactagcattatcagtaaccacttgaacaacaagatgctctccaatttcttcaataacgtcatccaacattttaaacaacttttctgcatttttactaaatgaggaggcatcaatacttttcaaaaacacagtgcccttaggattgttgatcaagatgttaagtatgcttcgatttctaccgtcggaccatccatcagacattattgaaactcccgttgatggccatgtctttttaatatcctcaactatagtgtcggtagtctttatctcctccttcaatatccaagtcctaagctcatacatactaggaggtttcaatcccctaccataatttccaatcgagcgacacatattgataaaggaaggactcttagccaaatgaaaaggcaaagcattctcatagaaacacctcccaatgtccatgcaaacattatcacgcatttctttctcatttttgggagttatggatattttcagcggctgtcctatcaataccatcacacacaaacctatcaattggtcctcttacacctctagcagacacgggagcactagtcttagtgtaataagatcccgactcaaccatctcttcgaatttcatttgagccacacgcttttctaatgttttttgtttcaagagctccacaaattcattcttaacatcttcgggaacctccttacatggtgcaacacctttcctagtgtgagcaaggtgttgtttcaaccttgcaacaccacccgtaataagctttctacagtatttacactccatgtaaacataatttttcttatttgtagcattttcacccgaagtatcgacttcaacaccatgcttccaagccagaacttttctatttccaagtctattatcattattaccgtcaacactaccactgccactagctcctccaatatgactcaattttgattttctatttattttcttatctacacaaaaaaaaagtaacaaccaaataataaatcaccacttaatgaacctaagaacaactaaatatggcttatgaattaaaaaaactaaataatgttcaaatgtttacctatggaacaaagaaaggcagcagcaaccagcaagcacctaactcgaacaaggcagtagcaaaccagcaaggttttttttttctgtgatgagaagagggaaaa

SEQ ID NO: 346817 - DNA, 1892 bp, Cannabis indica
gttctcaacatcaccaatcgtttctttcaattttctcataaaataggttcaggaattgtggttttgactgtcaactataacaaaagctatcggaaagatatgactcactgcatccaaagccactgcacacaacatttgcccaccatacctagtcttcaagaaagacccatcaacgcatacaacaggtcgacaaaacctaaacccccgaatacaaggacccagagagaagaaacaatacttgaagcgaccatcttctaccacaaaatccgtgatggtacctggatttctcaactgtagcatgtgcaagtaaccaggtaatttcgagtacgaatcttcaggtgtaccccgagctaggtgtagtgccttcactctgcacctccatgccttttcacaactcatttggatcccgtaatccttgtgcatactttttcttatatcagaggccaagtgatccgagccgtcagttgcgaacttatccttaattagatgggcaactattacaggtgatgcttgacggttatcttttcctcgaagatcaagggaacatgtatgtacattatgaaatgtactcacctcaaacatgttagaaagtacgttcttcttcgctcttaatctccacccacaatctgtatccttacatgtgacgtaccaaatatcagtaccggacttcctaacgtagtagtcaaaccctttcttcattgcatacaggccaacaaccatctttaaatgctctttgtctctaaaaaactttcccacatgtaactccccgcctggtgtgccacccgtagatatataatgactatgatcctcgatgtcttctcttgtatacattttctccttgaatttaccgtaacttgtcgaagaagaaaatggatcgctccatccagtcacattggtccctcgagcatcagtaggaccactaatatcattggtctctctaccattattaggacctgtactgtcagtagttcctctagcatgactggttttgcctggacgactactactagtaccaggtgtttgacaattttctctacggggtattcttttccgtgtcggtggcctcggtggtatttggtacgatagtggagtcaagttcaaaggtacagcagcaggggcctctgcaccttggtcgtctcttacgccatcattgccctcaacataacattcagggtctggaccatcaaaaaaaccatcgatgaacggcatttgtgctacaatatcagcactcggcatcatagtttttaattcaggtaacacatcggcaacaaacacatctggatttgtttctggaacaaaactcccaaccttgctatgagtttccttaacagaacttggtatgagactagggtcgacacaaatattcttctttaacaaattaacaaataagggagtaaattcatctggcttcttcgcaagtgtagacaaaaagaaccttgcacgcttatcagttccaataagttcagggtgatacattaagccttttatgtacttgtaatttacttctcatttcaagtcatactacactttgtcaacatctagttcttcatacaaaagatcaaccaaatatgagtagcttacgttcgtatcaatgtcaaatgtttcgacccggttataaacccaatctctaccctcaagctctaaaataccattatacataacaaccacattaacagttgaacttgtcacatagattaaaaaaaatacaattacaatttagaacacaaatctcacaaaaaagtgatccaaattcttgaaaaaacgaataaatctataaaccatcagacaacccatcgagcccaatcaaaaaaatgtcccaaaacccatattggacacacatcgggcccaatcaagcccatatcggaccccaccaaaaactaaatgtccctaaa

SEQ ID NO: 346818 - DNA, 643 bp, Cannabis indica
ggggtacgagataaaccctaccaacactcgtatagtgttggtacgtagtgtatgcggtatagtggctgtaccctagtaaacaacgttcttactcatttgttaagccttataaataggtgtatgggcgcctagatgcaagtcgatagtatacgaattgttatatgtttttcttactaagtctgtcgactcatagttgatacttccatgtgtaggtaaaggaaaagtgaaggttgtacaggagtgaactctgagctaggatggtgtttgtacatgtcatggcaacgcaacctggagtgttcagtcttaagacatttgaaattttattttgtagtcgctgtgcgaccaatttataaatatattttgataatgttgtaaaattttaaatacgggatcccaacttatgtaaataattgtatgaaagttcataaagtttagcaattaaatcaacaatttttaacttgtcacgatttttaagaaaaactatttgattagcaaaggtggcactataattggaaaattactgtagcgcgcctaagtatcagggtgttacatatggtgtataatagcatcaataataacaccggcgtataatttattttttaataaataaatttattactattaataagtaattagataattt

SEQ ID NO: 346819 - DNA, 1056 bp, Cannabis indica
taattattaattaaattaattttcaaaaaatagataaataaatcatttcgaaaataattaaataaaattaaataattaattttaaaaataaacctataaatttaaaaaaatgaggtttataacaaacctaaatatctaataaaaaaaatgccagcaaacttttcaaactttacgttattttaaaagaaaataaaattaaatatctaataaagtaaaataaataaatattatttatctgattttataatttaatttaaataaaataacaaaattttgaaagttgacaaaatatctagttaggtttataaattttctagattaaaatatatctattttaaatttcaaataaggtcactttataaaattaattaaataatgtaaaatgtaaaatatctcactttaaatttaaaaataagataaaataatcaaaaatttaaaaaaaaaaaaaaaaaaaaaaaagaaaataaaaagaaaaaaaaactactacaaaaaatcagaagttaattccatgaaaaagcatgaaaaaacgaagaaaaacgaaaaaattgtgagctgtacggacagttttcgcgatcgcaggaaaatttcagcacaactccgatttttttcgaatcttcaaaaaatcataactaattcaaattaaatcgaaattgagttctgtaaaaaagtaacttgcttaattttttccatactatccaataaaaataattccagaaacagaatcgcaattatttttcacgaaaatttacaaacatcaatcaatcatcaaataacactcaatacaacatgataccatccaaaaacaaacaaacaatcgttttaaagtccaaatttcttgcaagtaaatcaattaccatggctctgaggccagttgttggaatttattttaccaggatcttagatctactcacaagtatgtttattaacaccctaaatatgaactttctaaaacgatgaaataaacacatataaagtttaggaaaccttacattgggtgcagcggaatttaatgactccttccgttcagatatctagcccttgattcctttctgtagc

SEQ ID NO: 346820 - DNA, 571 bp, Cannabis indica
tccttacgaaggaaaagtaaaaaaaaactaaaccatagtaacattattgaaagctgagaacacacaactaacttacgtttttttttttttgaaatgacacaacaactacttaaaagaatacatattacacaccaatattatactattctattatttagttataaatattataatgaatgtctaatcacaattaaaacataataaatatttaattatatttttctttattttattgatttagtttctcattattctagtcatatttttgtataaatagaagttcaacctattagaataaactactaagaaaaatcttatttactctctcgttctgtttttctctttctgtcactaaaaaaaataactacttttagtttgggatgtttattggatcacattcaatggatttagatccaactgacccaatccaattatttattggacattgaattttgtcatccgatccaatccaatctaattgagtcacccgatccgatccaatggataaattggattggatcggttccaaccattagatgcattgactggttttttattagattggattaga

SEQ ID NO: 346821 - DNA, 723 bp, Cannabis indica
atccttccacaacaacatgataccccctttcaacccagttctaggaacttctaaaccacaattaaaacataaagattgcttaaaacgagaaagagaattaactgtaacctttgtttccataagaaacaacacatggggattttgctctttaacaagcaaacgaagtcttcggaatgcattcgggttccccaaaccccgagcattccaactgacgattttcatggtgaaccgcgggattgctgtgcaatctccgcgtagttgtcaaacacatcagtggaatccacagttgcagaaacggactgacttaaaccagcaacttctgacaaggaaggagcagtttaagaattgttagctcgacatctcttcaaagtttgtctcatggagttagtgtcaaattgtcttttgaaaactctattcggatgatcattttcttggccaccaacattaagcttggaaacaattgtagcagtaggagcagtagtgaaaatagccttcgaaacagcaggcaatggtacgggcctcaacggatgaataggatttcgaaatgaaggaggactgggaggatacgaggcaaaggtattgagattagtggcactggaggcattcattaaatccgatcctatgtcaggtgtgaagacatctaataaaatagatgtagactcagtaccagaagaaacaatatttttccccttatcagtaattgttttatcagtcccaggggta

SEQ ID NO: 346822 - DNA, 1257 bp, Cannabis indica
ctaggttagtattagatatatatatatactgaatattatatttttgaaaaaataacctagtaacttagaaactaatgaacatcaatgcatcacctcttcctctctttctcgagcatgatagcgccagccaaccagggggaaatcttcaccatttttcttgaatttgagcagattttatacctaaactaaacatagaagctattgagatatgttctttgctttgttaattgagaattgtaagttttgagttgggtttaggttagggttttgtaattttgaggctgtggaattaaactgggttgaggttgtgttcttagatttgtttttgagtgtgttggagtttgaattgattggtttctatggctgttgaatatgatttttcttagatgaagtaaaaattagtttttcttcacttgaatatgtaattttaacttaatggttgaattattgttagtggatgggttgaatactttgatttatgctaaatatgttgttctggagctgttggacatgtttgtgaatgaattaagatacagtcattaccgttatgagtacttactcttgaaaccacggataggtttcttacttatcgtttgtgttaatgggcaacgatagtgacatacgcagctcctggataacgagtggtgaagattagtaacggtcattactgttacaagtaattactcgttgaaaccgtggataggtttcttacttatcatttgctttatcaggcaacgatagtgacgtacacagctcgtggataacaagttttacgggagccttaatgaagctccgagaatatgtgattagagtgctttataaagcactgaaactatgtgtttatggtaatgtgtaattagaatactttacaaagcattgagattatgtgggtacatgctgaacgaatgtctattgggtgaaatgataaaattgttgatagtgagttactatgattttcttataatgtgaagtttatgggttagtattgatgctaatcaaataagcattgaaaatataagtattcatatcacaacataataaacatactcatgattcaatacctattcagcatgcatatgatctagtaacttttcttgttgagtcattgtgactcacgaatgctttgtgttgcagataagaaggaaagcagttgtggtgtcttggcttccgggaagcaggattgactaattttctatgattgtaaatgaaacctacttttgtaataatagttttgtaattaattgtaaaagcacacac

SEQ ID NO: 346823 - DNA, 619 bp, Cannabis indica
tttctaactttatatgtgtttattttcattgttttagaattcatattaggttgtgaatccaacatactttttagtaaatctagatcctggtaaaataatttccaacaataccttctatcaaaaagttagccaaagcttggcccttgatggatgttcgaggatggtatcttatatcgaactgccccagtttaatcgaccattttatcaatcttccagaagcatctggctttgataaaacttgtctcaagggctaattggtgaacacttttatggcgtatgcctgaaaatatggtcgtagtttacgagatgcatggactaggcacaacgtgagtttttctagagggggatatctggattctgcccctaataaccttttgcttacatagtaaataggttgttgttgcttgccctcttctcgcactatagttgcactaatcgcatcttctgagatggctaaataaagaaacaacatttctcaagttataggtttcgccaaaactggaggcgtcgccaaatgcctttttatgctctgaaaggcctctttgcactcttttgtccactcgaactttttgttgcctcgcaatacattgaagaacggcacacacttatcagttgactt

SEQ ID NO: 346824 - DNA, 512 bp, Cannabis indica
taaaaaaaaaaaaattcagccccgattagataccaatctcaacggttacacatgaaatcgtcgaaataggggtgtcgagattgtctaatttttagtagtgtaaacttagatattttaaattttaaaattagaaaaaataataaaagatatattttttttttaaaaaaaataagatattttactatttttttttgtcttaatagatatttggaaaataaaatattattaaaataaaacttaagtttgaatttgcaaagttgtgttatttagggtgtatttggaagtaactgtgtaattactaggtagggtaattactagggtagtaattaaacaatttagtaattacactatattttaaaatgcaaggtgtgtttgggtatgaggtggtaattacatatgaattcctaatatcttgtttggcaaaatagttagtaattacatgagaaaataacatttttttaatagctaatgtttaatatggaaagtttatagtaattacacagtgtaattac

SEQ ID NO: 346825 - DNA, 475 bp, Cannabis indica
aaagaatgtcaacatgatatttatacaggtcaaacaattctaaaaatagtacaaatattcaagaaaaatgttagtaacaagccaataaaaactatacagaattaccttgaataaatctagaattgtgagtgtgtgcaccaaaccctaaccttcttaccgcaaaccataacacataaatacttttgaaaaatataccaagtgaagtctcaacttcattagcctcacaagtccttgaaaatatttaaatatggctaaggtattcactcatagagttggaaatttgaaagtgagcactcaaaatggatagatcaatttatgacaaacatttgaataaacattgaaacgaagataggttataaattatttggacaaccaccataaagagtaccacaaaccaacttttcaggacttttaaacaaaaatagacaatcttttacatttattctaggagccaaaaaaaataaaaaaataaata

SEQ ID NO: 346826 - DNA, 686 bp, Cannabis indica
aaatacatcaacctagaagaagcccaaatagtggcctatgggggatactaccccaccgggatagcgggatatgtactcggagctcagctcccaggaaccttgccaacagccgctccaccgatgagcggcatacaattttctgctactcccggatatagtcaaggccaggccttggcccctgcatcttctcactatggaaatccctcagggatgaatggacaagccctgtcgcactccactccggccacaagtttagccactccttctcaaggctctcggagcaaaaggtcctcaaaaggtagcaaccggacggaggaaaagcggcagaaaagggggtacactcctcagtacacccagtatacggagctaacaaactcacaagagcgtgtgtatttttctaccaggcagaatacgcactaccggggaccaccccctctgtacaaggatagctcccagagggatcccaataaaagatgcgagtaccacaacgacattggacacatcaccaatgaatgctaaaacctcaaggacgagatcaaaaacttgatccgattggaacatctctacgaatggatcaagaaccggttgtctcacctcaatccggtccaggcagcaggagctttgcctaaaggagcacctgttggaatttattttaccaggatcttagatctactcacaagtatgtt

SEQ ID NO: 346827 - DNA, 898 bp, Cannabis indica
catctactttatattattttataacagagtaaatattattttagatcttatctgttacaaaatttattaattggattctatattttattaaataataaattagaccttttatttttcaaaattgtataaataagaccctaaattgatattttgtcgaaataaaacttagtaataatccaatctaaagatgttatgacaaatctagttacattttatgtatctgttcaagttagaaattatcttaaagttggttatattaaaaaataaatttgttaaaaattgagttcaaggtcttatttttatcattttggaaaatatagggtctattttgtcatttaacaaaactgaaagtctaattagtaacttttgcaaaacatagagtctaaaatggtatttacccgctaatatataattatggataaatattattttggactgtatgttttgcgccactatagattcgaaatcgcactcttaattatatagaacgctctatatgtaccaagatatacatacgttatgaaattatccattgctacaatccaaatagtcaaagatcctctatagatgatctaggggtgaaaatcagtcggttatggtcgatttttacaagtttataaccgaccggtcgattacagtttttattttatgaaaatcgtaaccgaccgattaaaaattataacagtataaaaccgaccgtacgatttttggcaattttggacggtttattgcggtttttgacggtttttgtgatttttcggtttaaccattttttgtttcaaaaaccgaaaccgactgccatctcaaaaaaatcgaaaacgaaaccgactgccaaattcggtgatgacgtggaaccgaaaattcggttacggtctggtcggtttcagtttatcggttt

SEQ ID NO: 346828 - DNA, 1203 bp, Cannabis indica
acttgaggatgctaaaggaaactagctggaggagcttccttgagttctatggtcataccgaacaactgagaaaatggcagccggacagactccagttgtcatggcttatggatatgaagcaatgctgcctgtagaactcgagccaccttcctacagaagattgacttatagccaacaggtaaatcacgtactccttgtcgaatcacttgatgaaatcgaagagaagcgaaccacgacaaatttaaaggtgatggcccatcagcaaaaagtacctcggtatttcaataaacaagtgaaggctcgaagattctatgtgggagatatggtcctaaggatagtatttctaaacaccaaagacagtacgacaagtgtactcggacctaactgggaaggaccatatcaggtggttgaagttctctaatcaagagcatacaaattgggtaagtatgatgaaaaaatgcaactcgttctggtaccaaggtatgggaacggggaacatttaagaaaatactacaaataaaagtactaggtcagattaccatatcaagtagtaaacaaaaaggacatttattcttaagtgaatggccttttaggcggaccacgcccaaaggttcggacaaaattacaaagtactcaggtcggatgaacaccatctaaagtacaatttttaatttctgcaatttgctttattacatgttaagctaaagatcaaattagatcaaattaatagctttgatgtaagttactacggtaacaaacacgttttcgattaataaatgaatgaagatgttgatttcaaaattcaaattgagtcgaatttactagcatgatgttaatttaccatccaatgcgtacaaaaggttttgtcaaacccaaaaccccaaacagaaaaaagagcatacttacaaaaaaattataactcactaagattcataagtctgctcagtcaattgggggacacctatacttgtacaaagcatttggtaaaaataaaacaaaaacagttgcacaatgataataaatagaggatgaaattcattaaagataacaaaagcatgtaatatggggattaaaggttgccttttttatcagcccgttgtctgaaaaatgaaaaataattccaagtttaaagaccgcttggccggtcactttgtcttaaaaaaagaccatatggccagacagaagaagtattcaaacggctgg

SEQ ID NO: 346829 - DNA, 862 bp, Cannabis indica
taaaataaatcctgaaaaattattctaattttatgttattttcctatttaattaaatattaaaaaaatttatatatttaagtgtcatgatgaaaatcaacttaaatatttgttatcccaatttttgcactctgacgtggtatcacatgaatggtgacacgtggaatccacttggaacatctgctcgggaagcatagtccgagcagaacacctcgctggcatgcccagggcaaagtactcagcaatcctcgcagagcaaccaacacttagcgaattcagctttcgcatcgtcagtcatcagcacaattcctataactcagggagaaatttatgtggatattgtatacatacgatcccactatcagtgtattcaatctcaatcccacgatccctatattcagcattgatcccaccatctttctgtttatacgcattgtaacgagaggggaaactcttcctctccaagcttactagccctataaatagtgatgcatgttcactgggcaaaggagagagctttctagtcaaaaaatagtttagttaagactatactctagagagattatctaagaattatatattcagagatactattgaagagctataagaaaaggaaccattctccttgttcttaagtcaatacaaataatgaggattaggctattaccgtacagatcggggatgaacctctatgaaattcctgtgtctttatattgctttattatatattgattgctataaatcgtttatcgcttattaaatagactcattgtcgttggctaaaagcgaagtcaacaatattaattttctatttaattaaatatcactaaaaaaatacttcaagcaaaaacagataatatcta

SEQ ID NO: 346830 - DNA, 1471 bp, Cannabis indica
ggttaccaccgtcttactcactatgattcagtacttgacttgctatgtgttagcacgacactcattactaagggttcgaatatggaagaacaatcaaggaggctgaaattactaaggaaggaactctctcatctactagttatctgacacagaaaactaggtttgattttgttgaaggcatcaagtggatgagtgagagtatcatgctccttttatagtgtttcaactaggaatgtttgctaaattatatggattaaaaaagaataaaatattgggcaaaaaatacttcatggccgtacacttaataagaccaatctctgcttataattttaccactttttttaaccacttattcttctttcaataataccatattttccaattcaatcctataaatgccaaaactatttatgtaatagttataattaattactaaataaaattttcttttttgtaattgattaagtagactatgcaaagtctcttaatgaacaaattgaccccgaaatctcttttcttcacaattaagcccttgcttagtgaaaattcataaataagacacagggccagtttggcacagctgtagctgtgctgtgagaaaaagcagctgtaggaaaactgtagaaaaaagctgaggtgagtgtttggtaaatgataaatttcaaagtactttgagttgttaagatccattataatgataatgataatgttataatctagtttattataatcacaaatatgtaaatacttattttatataatattttattttctatatattttttttttccaaatataaatttatatgcatttgataaaaaaaattatagtatttttttattatgttttatcaaatgtaaaaaaaattagaaattcaagtatataagaaattttttaagttgatgttgtttgttaatattaaaataaaatataaattattttttttaaaaaaaataaaacatttaataattatttattttattataattagtttatttcttttaatatataataaataagtaaatatggtttgagtataaaataaattattatagtcttttaataaaaacaactttttctaaaagttgggttagagcagctttagcttttagttgtagcttctccaaatttttttcaaaaagctgttttttgacagcttaccaaacacatttttattacagctttttcaacttgcagcttttagcttttctaaaagctgttccaaacgggcgcatagtctaattttagaattataatttattaattaaaatcaattaactgagtctgcaagtagtattatctcaactagtgagaggaccatggacctatataactgagctttcaataagtagatctagaattcaccaagtaaattctcagcttattaattctgccttgcgccactataatatttgaaattgaatagcactctcaattatatagaacgcactatatgtaccacgatatagat

SEQ ID NO: 346831 - DNA, 413 bp, Cannabis indica
ggaaggtactttacccatgatccgtcgaagtcaagcaaacatgcccgcaacatgtcttctagaatctatatcatcctctcggattgcccgtccatctgaggatgaaatgtcgtgttgaactttaactaagtacccatagctcgatgcacactctcccataatcttgatgtaaactttttcgtctgaacatgtcaaaagtgagcagactttgtacacctgtccactttgacccacacagagtcaaactgtcccgtggttctaagcatacctaccacgaagtccatagcaatatcttcccatttcaactcttgtatatttagtggatgcagcaaccctgcaggtcgctgatgttcagctttaacttgctgacaagtagagcaccttgcaacatacttagcaatgtcattcttcat

SEQ ID NO: 346832 - DNA, 1810 bp, Cannabis indica
aatgcttcaaagtcctcaggaagttcaacatgaaactaaatcccttaaagtgctcctttggaattagcttgggaaagtttctgcgctttattgtcaatgctcgaggaattgaagccaatccagaaaagattcaagccctcgtggatatgaaatcgccgataagaactaaggaagtacaaagtttgactggtcagatcgccgcactcagcaaatttgtttcaaaatcaatagacaagtgtgttccattcttcaacatcctgcaaggaaataagcaatttgagtcgacagaggaatgtgaaaaagcttttaggagctaaaaatgtaactcgtaaagcctcacgtactctcgaaacctttggaaggagaagaacttgggatatacttcgcaatcacggagcatattgtaagtgccgtgctaatcagagaggaaaacaatatacaacacccggtttattacattagtaaattactcattgaggccgaaggctgacacccattgatagaaaaactcacttactgcgtgattctagcaacaagaaagttaaggccctattttcaagctcaccctgtttaggtgtacactgaccaaccgttacgccaaatattacaaaagtcggatgcttctggatgattactcaagtgggcggtagaactgggtcactatgaaatcacattccaaccccgaacaataatcaaaagccaggccttagcagactttgtggtagaatgcacatgcaaagaagaaagcatatcggaaggcaaccccgagccagtacaaatacctcagccaagtaatagtgaagacaagccgacttggaaactacatgtggacgggttgcatatagatcaattattcagtgcaggagtcgcccttgtcacacatgggggcaacaactgcacgctgcagtcaagtttggatttaaagcatccaataacgaagccgaatatgaagctttgatcactggcctataactagccaggagatgacagccgaacatatcaaaatctgtagtgtttcaccgctggtggtaaatcacgtatctagagaatacgaggcttggggagaaaagacgatagcatatctgagcaaaatccatgacctactcgcacaattcaaaagctacggtctccaacaaattccaagggaagaaaacacgactgcagatgcattagcttggctggcgagtagtaatgtaagtgataaagcaaacttggttcctatcaagttcctcgaagaacctagcattactggcatggaagagatcgaaatgttccctaaactggatgatgccaatagcaacctacctcaacacaggggaactcctagataatcgaaatgaagctcgaaaaatgagaaggaaggctgcacggtgtatcatactagagggaattatgtacagacgagggttctccatgccattgctcatatgtgttacccgagaagaagctacacgacttttatctgaagtgcaggattgattttgtggaaatcataccgccgggcagagtttatctaaaaaaattctaaggcaaggttatttctggccgacaatgattgagttaactcagatgcaaagtgcgtggccttttgccatttggggaattaacctgatcggacaattaaccaaaggcaaaggtggagtgcagtatgcagtggttgcggttgattacatctaaaaaagttcaagattttgttgtgaagaacataatctgtcggtttgaattgccatacaaaatactttcggacaatggcaaacagtttggcagctagtccttcacttgatttttgtgcaaaccatggtatcatcaa

SEQ ID NO: 346833 - DNA, 556 bp, Cannabis indica
agagggtttggaaccctaatgcctagcggggaattagttatctctaatagacacattaggtctatgccggttagaatcgagcatagggagttgagtgctgaccttatagaactggaattaacggagtttgacatcatacttgggatggattttctgtccaagtattcggccagtatagattgtaagcggaaaatggtgacttttcagccaggaggtgaagatctatttgtctatgtttgatcagttcagtggtctcggatcccagttatttctgtattgagggctaaagatctactacacagtgaatgtctaggatttttagcagtggaaattgactccagcagaccggagacatttgggcttgaggtagtcaaagtggtaaaagattttcttgacgtgtttcctgaggaattactgggattgccgctgcaacgggagtttgatttcgtaattgatctggcacctggactcgaacctatttctaaagctccatctagaatggctccagtagaactcaaagagcttaaattacaacttcaggggatgcttgatattg

SEQ ID NO: 346834 - DNA, 833 bp, Cannabis indica
taaattatatttaagatcatggcctttaaaaatcatgtgaaatgtatcgattgataaaatcataaaatttattaggtttcactcaacttatgtattaaacaaaaagaaaaaaaatataagtgtaatacccaaaattcgactggcacttcagagggagacacgtgtcaacctgggagaatacgaataactaaatataatggtaattatatttaaagatattaaaatgaaataactcattaaatgcggagttgatagagtatatttacaacttgctgactgaaaagtcttaagcgagataaggatatacaaactattgtctagcgcattgacgagaaaccattctatgtcagaagtacaaagcgaggcatcaacctcgctacgtataaagagaagtaaatgagacatgttgactgttaacacttagcgtataatgtacattatacaaactaagcataataattgaatgaacttgagcgacgaatagcgagacatccatctcgctataagaaggcatactctcggtaccttcactaattagcttaacacatctttctttaagattcactgctccgtcgagtcaacaccctcggatagaagctgatattcaaatgatgttgactgctgaagttcatcttgtcaccaagaactgcgattgtcagtgttgggttttgtgccctaaataaaacctattttaatgtaatcagatttactaataaataaagatcagaaattgcattttatgttgcatggttcacatgatttatttcatgattatgtttaatgtataaattctgttaagtccaaaatatatataaatatgtatatatttgttc

SEQ ID NO: 346835 - DNA, 475 bp, Cannabis indica
ggactagctagtgtgacgtctcgggaaattggggcgttacagctattcagccagccgagttataaacatactctgcaaattatgtttccaacgagttattccataccaagtgtactttcgtttgcgtatttgagttcttcgttcttcctagtacgacacgtgtcttcctctgatgtgcttaccgaatttcgagtataacaactaatatgggactaagggagatgcccaatttgcttttaggcaagtggaagattgtaagagtttgtgtcctgaaaagcttgtaaagacatttcttattctaaatgatagttgaacattttgatatatactagattgttgaattattaatatttatttttaaattatttatataaatattagaaaattttaatcatacatgacattgtgacttgttgtaaagcccgcttagttaatttggaaattatcagttaattgtgattaattatgaaattat

SEQ ID NO: 346836 - DNA, 536 bp, Cannabis indica
ctcggggtaggtggtggggaagagcatcctccaccccctcagaactgggaacaactgtttcctgccatgcaagagacgattaggcagcaaggggagaagattcgagacctgagaaagcaacaggctcgtcctgcacatatactggcacctcaggtagtgccaccgaatatgggggatcgtatggaaccaatttatgagcggttcaggaaacaaaacccacctctatttgacggtggcccagacccactgaaagcagaacagtggatgagtatgattacttctatcttcgatttcatgtgggtagaagataacgatcgggtacgatgtgctatttatatgttacgggatgatgcccagatttggtgggagattgtttcccaaggtcataatctgaatactatgaattggaatgcatttagggcactgttttatgagaaatattataatgaatctattcgtgccgctcaagatgaagagttcgcactatttgacccaagcagatgctgaagctggcccttcgactgttacaggtgaga

SEQ ID NO: 346837 - DNA, 1891 bp, Cannabis indica
agagagagagacagagaataggagtgaagaacaattcctattttctcaaattaactgtcttctaattgtctgtcaatttaagatgacatatatcctataaatagtgttataaataaactcttttaatcctttattcaaaattaaacaaaacatctaatttgatttgaattagaattcaaaattcaaatataaatatagtaataaactgaataacaaatatcagtgagatcatttatttaataatgatctttaattaaacaattatctaatgtttcatttaattaataattaaaagataattagttaatttaatttaaattattttaaccaataaaataattaaactaaattaatcatgggcttacacgtgtggattagcctacacatgtgggctatattttaggtctaaaattaatttttcaatttttccataataaaatttattatttattttaccaataaataataaatgattaatactcattaatctcttatttcacaagaattaaataaatattattttccctaaaataatatatttctatgtttaatattacttaaaaataatattatattttactaattaatataattttatccaataaaactaaatagttaaatactattaattatacaatttataattgtcataattaatcaaaataattatttcacaaattactatttttcccttaagaattcatttcccatagaaattaattctcactcgaaattcattcatcaaataaaaccttcccatgtacagtgttgtatagaggtgactcggaaactatggacctatattttgaactttaaataaatacttgattattatcgatctcttcaatcgaataattcagtttattaattgtattattactccactataaatatggaattgcactctttgacaatatttgcaaaattcatacttacagtccattgatataatcaatataagcagttcgccttctaattattagtccataattagagttggtcaaaatattattttacccttctaattatctttttattccttatgtactattaattcaacgtgaacaattaatctataactattataaatttagatccaactcttacaacaattccaaaattaacactataagagaactagtattcgatccgttaggaaagcttggattccactattgtataacatgtttccagccactcatattaataagcaaccaaaacagaagttgtaagaatcctcttttctaagaaacttttaacgaattaatcaaaaaaactcaatgatcacaaataggagttcatgtatactgaggattcaggctgatctactaatgatcatcattgttatatgaatgattctttcatggtaaaccgcatgctaataaaagatgtttattacatatccgcccaatcatgaataatcgaattatacacaacacatttactacatgcctatccatatatgtgatccgaatcaaaatcgcacactagaaatgtagtgtatagtaaaagtaaaccatacttagtagttctatattaaagattctcattactttaatacaccaccgacttaatttattcatatcgtataatcttaattatcttgtacatccttataagattataccttctccatatgaataagaaatttttaaatatttactaattatattcttataattaatgtatcatttatcttataattgtatttcacatattctctaatatattctccattaattacttgttttagggcataaattctaacagtcgattctctgatgagttctgttgtcgagtgaatttcgcaacaccaaaatgtattatttaattaatataagagagaattttcagggaagtgacaaatgcgagtattcgacctagaatggcg

SEQ ID NO: 346838 - DNA, 554 bp, Cannabis indica
tacacgaatatgaaaaaaattagcctaaaaaatttttatggatgccgaaacaaattaagggtgtatcaatacatcccttttaaaaaggtgcattgtagaatcaccctaaattatatacaaattatgacaatcacatatgtgacaagtgatttttaacatgtgcgactcatcttaaataaatatgattggttgaaattattgaatgtgaattgcatgtggatatagttaattttataacattggtattataatatgattttacgaagaagagacacaagcgcctgtagctcagtggatagagcgtctgtttcctaagcagaaggtcataggttcgacccctatctggcgcgtttttcttttctttttttttatttatttatttttttttcctttaacctatctctagtagctggaaaaatataggaaaaaaagtactagaaaagtaggaatgaagatcctctcttaaagttaaactaaccgaactttgacatgtattaaatcatgctcctaaatttttttggccgttaaaaatttcctctgaactattgagattg

SEQ ID NO: 346839 - DNA, 587 bp, Cannabis indica
ttttattcaaatggaggtataattagtaaaattgttcagtattcgaatataatttatcatttgtcatagattgctttttaaaattttctgataatgtgtgacattttgaaccggtaaaatgtacggaagtggcaattttaataatttgttaagggtaaattcaaccaaatgaattattgtgaattttatttgaaggtgagaaaagatcgaccttaggtgtaatttttgaatctgttaacaacttataattgatgctttcatctcctaaattttttaatcgatggcgcaacctttgtttctaaatataataaaatttggaaagtttttaaaaatactattttttatattttatttacaattttacgacctacaatttttatttataaaaatatacttttaaagttttaaaattacaaaaaataatttactataaaaaaaagtaagaaaacaaataaaaatcaaccagaaagcaatctcacgatacctataaatcaactataaataaactagaaataactaaaaaaataactttataacaattataatataactataaataaattaaaaaaatggtttattattttact

SEQ ID NO: 346840 - DNA, 537 bp, Cannabis indica
aaaaactgggactctatttctgtttccaaattcttttgggggctaggttttcgaatccttcttctcacaatcaagctctcttagctaagcaggcatggcgtatttggcatgataggtcttccctcctacactctatcctcaaagctagatattttaagcactctgacttcttgcacgcccctcctggtcacaactcctctttcacctggagaagtatcctttggggtcgcactcttcttcaaaaagggttagtttggaaaattggcacgggaaccactattcccatatctgctccaaattggatttcaaatattcagagccctacaattctacaccccctccatcagtctcaagcttttgtctcttttttcttaaatgatgactcaacctggaatatccgaaaactcaattactacttcccttcttaccaagttgatcgtatcctctctaccccaattgatcctcattctccagattctcttatttggggggtttcactcctcaggtcattttaacagttaagtctgcttaccatct

SEQ ID NO: 346841 - DNA, 749 bp, Cannabis indica
ctcctaaattaaccagtggtaaggttaaggccataaatggctccagccttttattacactagtggagttattaggtctagtggcatgtggaacattctggatgaaaatatatgtggcaatttatctcacatgaaattaatcgttacatagggtttgaactttgaaactctatatatagaaaacaatggttttagatagatttgagtagaagattaatgatgatcatgatttagttatgttgaagatgagtaattagcttctaaaaacttcttatgttaatcgttgtccatatatactttttttttttgtccatatttaattaatttagttaacatttatttataggaaatatactagtacattgtgtttttataaaaaatataggaaaatttacggcaaaagtccccaaaaagtttacattgatgcagattagtccccaacctctaaaaatagtggcaatagtcctcaaggtcacactttttatttgtccgttaatcctaattttaactgagtcgttttcttgccacgtgtcgaaatattattggtccaaattattattttaattttaaaaaataaataattgatttcttttttatttttctttttcctttttcctttttctttttttttcttttctttcttttcttcttcatcttcttcgtcttcttctccttcttctcactgccatcaccatcaaccccaaaccagcgccaccaccaccttcaaataatttccaatgcacaaataaa

SEQ ID NO: 346842 - DNA, 858 bp, Cannabis indica
gcgatttgtatatatgattaataatactaatagtggttaaatatatcatataaaacttgttccacaatcaatagtactagctatacataaaagcaatatgatatgtgtattttttatacatttttattacataagtatattttcatattaaaaattaattttagtgtatatatgttaaatacgataagaattaacaacagagaatatatatatatatattattataataattctaggaaggtaggttttataggcatatataaggattaatttggacccacggattaaataaatgggtgtcactgaggtggacctgattgaaaactatacttaattttctcaaggagagtgtcacaacagtcacagtcacatataataattctcttccaatgttcgttatggccactttttgtaccaatcagaaatttcaaagtgagaataataatattataatagtgtctaacatcggatcatattatcttctacactaccttgatgtgattttttcctctttttaaattatatatcttcccaaacgatagatgaccggtaaaatttaagtttggtattaaattaacactaaaaatattattattttaatactaatttttttttaattttaatcataacactaaattttatattatttattatgaactttttcatttttacacttcaaatcagttttttttttacatttttatggaattttacatagaaattcctattgcaactagcactgcaatctaaattgcataaaaaatcgtatagaaacccctattacaactagcgctgcaactactttgaaacccaaacctgaaattttgaaagaaaaaaaaaacgtaaaaaaaaactaaa

SEQ ID NO: 346843 - DNA, 1423 bp, Cannabis indica
tatttgttttatataagttaatgagatggaagtggccaacaggccatgaggtacactatctcttcgatctgagaccgaacaacagcgagcatcggtcgggatattacgcatttcagcatgcacacaggaatgttaaattccttcatggtatggagaagtcgtcgaaggaacatgatttcaaaactctatttttttgtgaaggacattgggactaaacacaccaaattccaaatggtggaccaattcgagaagccttcccccaccattgccatgtacgagagagctcttgcattagcccaactgcctgactataagaaggatctaaacattctaacatccccccgggcgttagatgattttgggttcaactttgttgttactccttctagcggagtgcgggaaatcccgcgacccttgggacctccgacgctggcacagacagccatagcgaaaagcactatgcccgggtcttctaagaaaaggccaattagggagtgtgactctcttggtgatgatcgctatttgtctttcttattgcatttcttcattaatttgcatgttattatacgttactaatcatttttgtgtgttttgcacatatggccagcctgttgcgacaaacgacctaccaggagaaaaagggttcaccttctaacgcctctcccatggctcctcctggtaaggttaggaagactaactctcgcctaaccattaatattcacacccttactgttggatcgcctgcctcatcttggtcgcctcctcttgactccgcatctgggtctgccaatgatataatcctcgttggttcgacgtccacgggggccgagtcacttgttgcactgtctttatacggtcgttgtcaggctttatctacgggtttgaaggtggcacgtagccacaccgagggccttatggacatcacggacaagaccatgtctaagcttgattgtttgccccctggccagatcaatgctcttgggtgtcgcgagatgattagggtaagttgctcctacttgtaaaaattctttcctttaaccattatttaacatatatgtaatgatatataacaggctgcaaccattacttcttatggtcaatctagggttctcgccctacaagaggagcacaacaagcaaagagcagcctcactccaacttgatgccctccgccaagaatactcccagaagattcgtgatctagaaacttctgttgaaagtcttagtgctgagaaggagcgtttcatgggtgagcttgaaagcgagaaggaggctcatgccaaggttgtcgaggaaaataaaattaatgtcaaggagtgttagaagctagctgcggaggtgaaacagatcgaagacttctccaccgatgttttcttcaaattttggctaaacaacaagaaggctgactttagttatctgggtaa

SEQ ID NO: 346844 - DNA, 586 bp, Cannabis indica
aaaataaaataataattatttatattaattatatacaaatactattaaatataacaacaataattttaattgactatatgtaaaatttataaattagaccattataataattcacaacaacaaaattaataaatattacatattagttcattatactaataaatccataactataaaattatataataactatttgtctattaaaacaaaaaacaactaacatcggtaagtttgagtaaccgatcacatctcacttgccctattaaaacaaaaaataactaacatcggtaagtttaaataaccgataacatctcacttgcccaatgctctttcacttcatatatttcttcttctgtatactttgcatcagttaactacaaaatttaaagataaataatatattaattaaatttatcgtcatatgcattcttaataataataataataataataataataataataataatgtatgacatatttatatagtttgtatgttatgtacctcggccaaaaagtgtttccgattcaaagcttgaattaagtctttcatcatcttcattacataatatccacattcggtgtc

SEQ ID NO: 346845 - DNA, 728 bp, Cannabis indica
agattttattttcattcacaaactaagcatgtttagcatccaaaatttaaaattttttttaatatatttctaaaaagtgatcactcttgactctagaccacaaattttgaagctaaaaatgaaatctttgtcctattataggcaacatgaaatcaatccaagctaaaagaagtttcctttctccattatattttttcatttttgctcaaaaaggcttataaaataccaaaattaccaaaattgagaatctccaaatatttttcctaaaaaataaatataaacaaaaatcaaacataattttgcacaaaaaacataataaaaatactaaaacacatcctaaaatagactataaaagtgcataaaaataaatgtaacaatcctaaaggggtaaaaggctacaagctaagctatggtgcctagaaggacataagaaatacatcattagtagggatgtagagtttaaggaacataaaatggctatgaaagttgcaaacacatgtggtaatcagaaaggccagagtgagacaagtatgcaaatacaagttaacagggaagatcaggtgagatctggttttaaagatatggtcatgtattttgttaagagcactcacatgtttttattttatcaattaaaatgcttcactaaattttactttttttttttctttacttcactacatttacataactaaaatatatcaatttctctatatttttctatatcattt

SEQ ID NO: 346846 - DNA, 1245 bp, Cannabis indica
aaacctcgctccacacaagctttggtaaaagaacaaccaaccataatatgaaaagtggtttcgggttcaaaattacacaaagaacaaatactgtaaacatgaacccgcttagtttgaagagagactagagttggaagacaattggtaagagccctccaaagcaaattcttaactttaggaggaagtttcaagtaccaaaactttctccaaaagccagaattatcctgcatattccatcttccattacgcacttgtaaagcacgataggcactccttaccgaataaccaccacacgtttcaaacgaccaataccatgtatcaagttctggcaatgcaggcagcgggattttacaaatgagctccaataaatcgaaacatatacacaatataactatatgatcgaagtacttccaataattaattttttgagtttcagttccacaagatctttggatctgcaaaaaaaaaaaatgaaattagttaggcaatcgagcttccaagctctctctactctctttaaatagatttattgtgtttcgcataatgaatagtgagcttgaggaccaagaccctatatttatataggtgagacattctattaaagtctcagtcacaattaattgctataatattttgacaatcatttagaaaattaaattgactaagtaacataatgatgaccatcaatcataatattttgtccaaaaataaaatattaatttgataaatcaaaccaattaattataattaattatatatagtgtgaacaaaatattttaatattctccaaggtcaacatttaaataaatatattgcttaagctcaataattatctttgctaaataacaaatatatgaatcatgacgatagatcctcattatttggcgagtattatctttcatgtattacgatatatttattacataatactatacttaatgtgacaatatacttaagcgaataaaccataaattttatgtttattttggtcctctgaagataattttttcagatcaaattaagatgtacataagagaaaatattaaaatttgagtttcactgaataatttaagtagtacaaccaaaaactgcgaaaggggtaactaaatcccatatttattttatgatccttgaatttgtgatgcaacatgcctttagttaaggatattgcaatcacccaattcagtgttgcatgcttaatgaccacttatcacatctctttatggctaaatacttaatgtcgat

SEQ ID NO: 346847 - DNA, 684 bp, Cannabis indica
aaaggccgaagaagtcctccacattctttaagtattgatgcaaaggcatcaacgccctttgctgggcatgggcacctgaccaggcacacatccccctttcagggtttgtggcccgattgttgtgggcgggaatgtagtaatccaattcgcccaggtatccgccttggtcaagagtccgaaggtgctcctcagtaaccctggacggagggcttacccacttgagcccaaggcaccttgccttctattaggagccgcagcagtaagttcctcacggacgtagtccacgccctcaaccaggacatctctgtcagcatcgactggcacccaagcctcattgtactccccgtagtttgggggttcaacctctgcctcctcctttgtctcggaggaactgctaggatgaacatcgtcctgctcctcattctgctggacttcagcatccccttcatgatccacctcaacctggacggctggatcctattcgacgctaggaaaagtggtgtgccgagccaattgaggatcagatgcgtcagccagatgcgttgttttctttgtatgagccatcattctatggctgggtataagattttgataatgtccctcactagaagaaggtgggctagaacgaagacgaggatgatcctcgtgcaaaagttaaagtaggtcctggtcgatatgatgttc

SEQ ID NO: 346848 - DNA, 720 bp, Cannabis indica
atagctaccagagtacaatagggatggctccttatgagatgctatatgataggaaatgtcgttcccctattcattgggaataaatttgataaaggaagtacttgggtccaaaattagttcagagaaccaatgaagctatcgacaagattaaggctcggatgcttgcttctcaaagcacacagaaaagttatgctgatcggaaacgcagagatgtcacatttcaagtaggggaacatgtttttctgcgggtttcaccaatgaaaggtattaggcgctttgggaagaagggtaagttgagccctaggttcattgggcaatttcagatacgtgagaaggtcgggcaggtagcgtatcggctagccttacaaccatcattatcgatttgttcatgatgtattccatatttttatgttgaggaaatatgtttcagacccgactcatatcttgagttatgaagcccttaaactgcagttagactagtcctatgaagagcaacctgttcagatcattcatagaaaggagaaagttcttaagaataagaccattgctttggttaaagtgctctggacgaacaatgaggtggaggaagccacctgggagttagattctgacatgtggactcaatatccagagcttttcaggttaaatttcgaggacgaattccttttaacggggggataattgtaatgatcgctttagtaatttggattagtaaaggca

SEQ ID NO: 346849 - DNA, 694 bp, Cannabis indica
tgaaaactacattttaacataaaaaattatagaataattagcaattttacttcttgaactttcgacaatattaattttagcccctaaaatatacggcttgtcaagaatctgccttgaacttttacatatacagaaatttagtccttctgttaggttcctattattccgtttaaatgatgacgtgtttttgtaaattagcaaccttgctccctaaatttcgataattatcaaatcataccctctcagaataaaaatgaaaaaggttcaacattttttttttagtaaatcttaaaaaattaatgtagatcttaagaaaaaattattttgaatgattaagaaaattaaaaaaaataaattaaaattttaaaaataattaagcaatttaaaaagttatttattttttattaaaaaattcatttagatattacaaaatattaaaattcaattataaaaactaaatttacgggaataaacttgagtatattttatttttctcaataaatgtagatttatttaagtaaacataatatttttttagtttaatttataaattttttcaaaataattttataattttatagttttattgaatttttaattattttctttatttgtttaagatatgtttataaatataaataagttcaatttttttttctaaaaaatcttaagtttatttaaattatttattaga

SEQ ID NO: 346850 - DNA, 761 bp, Cannabis indica
cgtagtcggcaagctaccgtgctcatgcgaagagcctaccagactgtaggtcagcaaatgccgaacgtcattcccctggagaaacggaggatgatccaatgatgaatacctcccagaaaaccaatggttagccgttcaatccccagttactagttccactcgtggcccaagaggtaggcgggcagaccttgttcaggaatacatcaggaggagccatacctaacggatccaaacagaataatggtgtaattccacctatcaactaagcgaatcaatcgctcaggcaaccaggctcttctgtgttcgataggttgggaacaactcatgacctcaggaacgatctaaacagaagaagggaacagacgagcagaatactacaacgatcgtgcagcccggagcccatactcaaatccccgctcagaaaagacgctgacgtaatccaaatcgaccagaatgccgagcaagtcagcccagccgtacaggcgcaacttgacgagttgaagaatatgtttcatggcatgaccggtcagtgtaacaatgtcttgagttagaccgtgctcgcggtactcccttctcaccagagatcaatctcctgccactgcctcacaagttcaaaatgccaacgtggaagatgtacactgggagagaagatcctctttcccatctcaagtactttgagatgcaaatggatttacaagaagacacacagcaaatgtatttcaagttggctcctggaaattttagttcatggaaaaccttct

SEQ ID NO: 346851 - DNA, 2522 bp, Cannabis indica
gaccaggacatggacccaaacccagacctcggacccaatactgaaacttgaaccagaacgtgaccaggaccctggaacaggatcgggaccgtgaccaggacatgggccaagactgggacccgaaactaaaccagattccaaccttggaactcaggctcggacccagtccgagacccagactaggactgagactcgaacctgaacccgaacccgaactcaggtatcgatcccagacccaaaccaagcccttgatataaacagggattcagacctggacatggacacgaaccagacctggactcaaataccgacccatacccagactggcatcgtaacacgggatctggacccaaacgtagacccagacccaaacctgcgacctagatcttggacccaaacctggacatggactcagacctagacccagactgagataaaaaaaaacccgtactcggactcgaactaagactcgaaacatgacccaaccttgagccaaacccaaacctcaaaccgaaccacacaaaattagaactagaactgtgactaggaccaaaagcgaagacaataaccgaacccaaacaataacccaaacttagactcagaccttgactaggactgggacccgagacttgggacccgaacggggaccgggacccagaccgggacctagacctgacctggtcctaaaccctcgtgaggacctgagacccgcaacccagaccaggatccagaccctgacaaggacctgaacctgaacctggaccaagactgggaccgagacctggacccgaatccacctggactaaaaccaagactcaggacccaaacccgaactttgacctagacaatgacctaagaaccaaacttggataggggacctagaccaggcacctaggccctggaacccagacccaaatctgaatccaggactcgaacccaacccagggcttgacctagacctgggaatccgaagccagacctagacctggagccaaaacctgccctcaacccacacaaggataggaacttaaacacgaacccataccacgaccaaacctgaacctcgactcaaacccaaaattggacctgaacctgggacctgcacctggatctgaacttaaacccagaccgagattgaaacccaagacttagaccccgaactaatctaactcatatcgagatcaaaaactgggactcaaacccgaacctagaccaagacccaggaccaagaccaagacccaggacctgatctagacttagaacaagatccgaacccaaacccaaactcagaccagactcaaacgccgacacgaacacgacccccgacccaaactcgaacccaaacttgacctcagaatcgcaagtggaactggaagtagactaggactacgaccaggaccaggacaacgaccaagactgagacacgaaccaaaacccaaataaaaacccagaccgagacccaaacccaaaccgcgactaggacccaaacttgaacctacaccaggacccaaacctaaaccaaaactaggacctagacccataatcaagatagggaccagggcaacgaaataaggaccgggacccaggacctgacccaagacctacacttgaaccagaccaagacccgagatcgggattttaaactcgggcccacacccagacctaggaccgaactcgaacatagccccagaccttaattgagaccgaaactcgggcccaaacacggtcgtgtacccagaccaggaccgagacccgaacccgaacctggacccgaacctagacctaggacccaatcccagaccctaactcggacgtagatagggatcctgatatgaaccttaacccagacccagacctggacccgcacccgagacccaaacttagacctgaaatgaccctagacctagaccgggatctgaacctggacccaaacccaatcccagactcgcacaaggacttagaccccgacccaaaccctaacccaaactcgaaccgagacactgaattaaaatcaaaactgggactaggacccaaacccgaaaatggacccagaccgggacctaggacccggacctggatggcagacttggacctaggccttggaacccagacctagatcggaactccggactcagacccaaactagaccataatcgagccccaaaactcaagcttggacccaatcccggacctggtcccgaacccagactaggattgagactcaaacccaaacccaaacttgaactcgggacttgatctcggacccagaccaagcccttgatcgagacttggatttggacctagacatgtacacgaattagacctagaatagaataccgacccatacccagactgggatcaaaacatgggaccagactagaacccaaatgtagacccaaactcgaacttgggacccaaagtcaaacctgaacccagcttgggatccaaaaaactcgtacccaaactcagattaagactcggaccctgaccccaacctttacctagaccctgactcgaaacca

SEQ ID NO: 346852 - DNA, 534 bp, Cannabis indica
tcccacttgcaataacataaaacaatttcaattaatcctaaattcaatctgtgcttttcaaatgtagttgcagtcaatactttggtgaatggatcagctaagttgtcttcagagtccactttctccaccagtacgtttcctctatccacatattctctgatgatgaggtatttactctctcatttgcttctcttgtggcttcgaggctctttactattggctatagcaccagtgttgtcacaaagtaaaatcagtggtttttccattcgacgaacaacatcaagtcttgagaagaaatttcttagccaagaaagttccttagcagcctctgcggcggctatgtactcggcctccatggtagagtctgatattgcagtttgcttagcgcttctccaaacaactgctccagccccaagagtaaaaacaatcctagatgtagactttttgtcatcaagacaagcctagaaatctgagtcggtatagcctacgggatttaaagcaccattcttgtagactaacacataatgcctagta

SEQ ID NO: 346853 - DNA, 845 bp, Cannabis indica
cgtccgactttaaatcatatataggcacaattactaaacacatgtgagaacttaaaaaagagaaagaaaagcatcatcatgtgattcataaataaaattatagtgccaacatatgacttttgaggaatttttttgactggccacagagaaaccttgtaatcagcctagagtcctacacacttgacatagatcaataatacatgtcacttaatgtgtcatttatcttttttgacaagcctgtaaagggccttgaccttgaagccctataatattttgtcaccatctactgctgtgtaatagtaaccactaccttaatctcaaaactcagttccaaaaccaagagatttatcaggaggggtaggggttgcataccagttctcaagtattcaggaggagtaaaagccagatttgtactataacttttcccatccctactatttttcatcaagccaaaggttgaaagtctgggattggcatcctgcacaaaaatttatttcaaagtttaagggttgcaaacagattacaccaagaatactggttatgcaatatgaaagtaacaaacctcatcaaataaaactctataagcattaagatcgtgatataaagcacgtcctttgcttgtgcagtattctaaagcttgtgcaagatgtagaacaacccttaatctcatcgcccatttcataggctgtttttcccctgcatcaagaaagtaatcaaggcaatttacagagaaattgaaaaattaaacactggcaatgcatctttaactgcactgggcaaagcaactttttttgggaaccaaaataaaaaggaaatcagaacaagttactgactgaaaaagtact

SEQ ID NO: 346854 - DNA, 575 bp, Cannabis indica
agttccatttgcgattctaagttggagtttgggttttagttcaggtcggagttcgagtcctggtctgactttgagttagggtccggatttaagtttaggtccaaattaggctccgagtgtgggttcgtgtcctgggtcttggtctaggttgggtccgagtcccatgttcaaatcccaatgggagtttggattcagttctgggtccgagtcccatgttcaaatcccaatctcaatctagattcagttctgggtctaagtcccttgttttgatcctagtgtgggttcgagtttgggtccgggtctaggtctagctttgggtttgattctaggtgttggtgtttaagtttgggtccgagtttgtgtctgggtttatgtccaggtctggaccccgatcagggtctaggttcgcgtctagctccaagttcgggacctgagtgcgggtccaagtttgggtcagggtcaggatcttagtccagagctatgtccagcatttcgataccagtctgggtcttggtccgagtccactttcatatccggatccctatctaggtccaagtctgtgtttgggatcgggt

SEQ ID NO: 346855 - DNA, 468 bp, Cannabis indica
attttaagtattgatttatatttatatacattaatgtttataattttgatattgtattttattaaaaaaatcttattaaattataaaaattcatactaaaatagataataaacatttatcttttaataaaaaaatatttaacttgtttatttttataaatctgtttaattaattttacgaaattgtttattttgaggtttaataaacatattaaaaatttatggtttcatgtaataagttttcaaaatgtataaatttttaaaataatttttttttgctacatttttttgtaatttatttttgttttttgttgttacatttatgaaaaaagccctacttattatactataatatcattgtgtaactgctaggattacaaatcaaaaggcatgaggtaattatatacaattattaaataaggtgagatgaagaaatgaaaggttttgttaaagaaaaataattaaaaaa

SEQ ID NO: 346856 - DNA, 625 bp, Cannabis indica
aaatagagaaaaagaaatgcttgacagcatagatcctcttgaatatgatcaatattaaactgtcaatcacaaaaacaaaattttctgttaaaagaaaattacaaaaaactggactttaagtcaaagtttacaattttactgttacacaaattatttttataaaaatactattttttttataaaataaccgtaaaataacaaaacagaataattaaaaacaatagtagaacaactaaaaaataaccgtaaaataatagtgaaaacttaacacagcacacaatatgaaacttacatagtatttttaaaaaagattccattataaaaataaaaagttaaaaatttcaatacgatagtgtagttaattatacccaaaaaaaaaaaaatccaaatcttaatgaccaatttcacacaaaatccattatttccatgtgggtctttattctcttttctggaagaaaactaattatgatgggccaagataaacaaggccccattcagtaataaatgcagagaagttctggtatgttggcgcttctgttcatcaatcaacaaccggaactacacaaagaaatctgagattacaattccggcaaaggaaattctctcgattatcatttggatttgg

SEQ ID NO: 346857 - DNA, 926 bp, Cannabis indica
tattaagtttaatatcggtcccttctgatgcatactccatacattcaatccacacttactttaaccaatgcctggaaaggacatagcacttaccaaagggcaaagtaaactacattgtagattatcctattagttaaaccctgtgtattgataaatcataggaatacatttaatcacataatctattgattacttttcactgtgttgacattacaataaacaagagtattaatgtgataaggatttggatgaatttataaatcaaacaagtgatcacatgaaccaaataaaacattaaataagtaatgaaataaatatttttctttattgataaatgaatgttcaagattacattaaaataggattttatttaggatacaaaactcaacaaactcccacttgcactaacataaaacaaccagtacattttaattaatcctagattcgttctgtgcttttcaaacgtagtgattgttaaaatcttggtgaatagatcagctaagttgtctccagtatcaacttcctccaccagttggtcccctctttccacatattctctgatgatgtggtacttcctctcaatgtgtttgcttctcttgtggctttgaggctctttactgttggcttctctgatgatgtggtactgttctcacaaagtaaaacgagtattttttccattctaggaacaacaccaagttctgtaaagaactttcttagctagaccaattctttagcagcctcagcgacaactatgcctccatggtagagtctgatattgcagattgcttgatacttctccaaacaactactccacccccaagagtaaataccatcttagatatagactttctatcatcaagacaagcctggaaatctgagttagcatagcctacgggatttaaagcaccacccttgtagactaacac

SEQ ID NO: 346858 - DNA, 551 bp, Cannabis indica
gtacattctcaataggcttaacctaagaaactcccattgatagtcttccaccaaagaactagaagaaaaaaaaaaaatagaacacttaaacctgaaaacaaggcaccatgacttacaatttatactgtcatttctaaaagctatttaagtatgtgagtagtgtaaataagtttattgcctttaataaaattgtattagcatcttttatacataatataattctataaattaaataagtttaatttataatattattagaattaaagggaaatcattaacgaaaataattaaaatgatacagcattttaattgaaggaaatgaaggatgaaatcttattatttatgtataacgaattagtatggtgtatattcgtatcataatgcatatgaatagtaagatcatctaacaattttattaagaatagaatttataagaacaaaatttatgaatgaaatcatatattttgtagaaattttttgagtagaaaatctcaaataaagaattttttttttcaaaatattattaataatactttatgatactatagtga

SEQ ID NO: 346859 - DNA, 880 bp, Cannabis indica
agcaccacccttgtagactaacacataatgccttatacttttcaaatattttagaatatgcttaactgcagtccaatgttcctctcctgggtttatttgatacatgttcacaattcctagtgcatagtaaatgtcttgtctagtgcacaacataacatacattagacttctaactactgaagcataaggaacctttctcatgtcttctatcttttgggattcagtgggacattgttctttagatagacggataccaggtttagaaggcataactacccctctggtgtcagtcattgagaatcgctctagcaccttatcaatgtaagctgcttgcgagagagtaagtgatctgttcttttggtttctaatgatttgaataccaagaacataaccagcttcacccaaatctttcatttcgaattgagtgttaagtcattctttaatgtcagtcattatcttgatattgttaccaataatcaaaatgttatcaacataaaggactatgaatactaccacttgattatccttgagttggtaaacacaaggttcatcctcattttggtgaaagccgtaggttttgattatttcatcaaatcttttgttccatgaatgagaaacctgcttaagtccataaatggacctatttaggttaaaaactttctcttcctgtcctggaagcttataacattctggttgctccatgtagattgtctcgtcaagaattctgttaaggaaagttgtcttgacattcatttgccaaatttcatgatcaaaagcgatagctatggagagaagtattttgatggatttgtgctccgtatttttttcttttgtacaattcattattttcatcattgctttttaaactttcattaattac

SEQ ID NO: 346860 - DNA, 1297 bp, Cannabis indica
tacagaagtatgtcaaggccgataacattcagagaggtgataataaccaggacttgctacctccaccagtggatggacatctacaggtcatcattagaggcccgcacatagttggagatttgggcaaagctcgggagaggtatgcccgaacagcacaacacgagcaagaagaagtgatcttggccgtagaagaaaggaagcctaaaattccatgggcaagagggcccacaataaccttcaacgacgaagatgctgtaaaaataaggtttctgcacaacgacccgttggtcgtagaggtccagatagctaacaagatggtggccagaaccatgatagataatggagcctcttccaatatgttattcaaaacttcctatgaaaagatggggctccagctcaaggatctagccccctgcctcctgcctgtatatggtttctccggcgaaggagtagcgcctctaggacaatttcgcctaccgctcactgttgtacaagctttgacgagcatgactattatggcacaatttttggtattagatgttccttcagcctttaacgttatgctaggctgaccaactttgtatgacttaaaggatgtcacatcgatattccattcatgcctgaagtttctaacaaagaatggggtagggtgtctgagaggaaaccagcagactaattgggaatgttataaccttgcagtggccaaggctaagaaggaaggatcctccagccagagcatagacaagggaaaaaatattcccaagtagggaacttccaggggcagggatgaacatgtggatcctcaacttagggacccaagcagcaatgttggacctatggaagaattaaaagagatcgagatcgatccagatatcccggcccgaaagctaaaaattggaaaaggtttgttgctcgaagtaaaatcagcactgacaaaatttttgagagcaaacctagacgtttttgcctagtcacatgaggatatggtcagaattgatccttctgtaatttcgcacttcctcaacattgatcctaactttcgaccagtccaataaaagctaaggctattcgacaaagagcgagcactagccctaaaggaagaggtagagaagctatgcaacactaatttcataattgaagctttctaccctgcttgggtcgcaaatcctttactggtacccaagccgaacaagaaatggcgagtatgtattaatttcatagacctcaacaaatcgtgccccaaagactgttttccacttccaagaatagatcagctcatggatgcaatagctgggca

SEQ ID NO: 346861 - DNA, 933 bp, Cannabis indica
tggacctctggtctttacccaataaaatatgtggaccaattagctgcagctctttactcacgagtatgtgggccaataagttgcaagctcttattcctaagtttgtgggttaatgagttgcaagccctttgtgtactcgtcttgaaaatttttaattatgtattctgttcattctgagatggaattattgtctcgccaatcttactcatgaatagttattattcttaactcacatctgttgaagtggcaacgactttgaatatttctatcagattaatattctttcactggtacatgtgtcaacttctggttgttagccgaaattagggtataacaattaccccttaaaaagtacttattaattaaaaaaaatgaccttttaaatgtcttcgagggtattattgtattttttccttttaaaatttgcatgctttatttttggtggttcaaaactataagacaaatcatttcttcatttaatgctccaattgttcttttctcgtgcagttacaatctatttgatcagttttcttttgatcgaatgattatcaactttttggtataaatttcaaactttccatcatttttgccattttagcccacgaaaccttccagcttcaaaaatttctcaaccaatatattctataaacttgcatgccctctttatctttcatattttttctttgagtttcatccgattgcatccctcaacttcaaaatcatcaagacccagttttctttacgtcaaaatttccaccccaaagctcttcaatacccagaatctctcatcaaactagtaagtgacattctctcttgttggttttcctttcgtgctttcaattttagtttcttggtatgtgttttttttttttgcattgttctattatttaggtgaactgtatatgaatgcttgagtaatttagggctagaaaa

SEQ ID NO: 346862 - DNA, 1192 bp, Cannabis indica
ggttgttggtggggctcctacccttcctacatcaggctttagtaggggaggtagttgttcgaccactgaccaaaaagaaaggcacctaccgcgtccagtggttcaggtcagaacaagaggttctgagggaaccagggccgaggcaatcgtcagggtagcttcgaaacccgatacacttacccagaataccccatctataaaaagcatcacgtgggagagtgtagagggcagggatgtttgcaatgtggtataccaggacattataagagcgattgtccccaactcaagactgaagaacaaaggactgcagcgaaacccgctccagcaagggtgtttgcgataactcaggctgatgtagaggctagcccctcatcagctctcggtcaacaactcttacttctctgtgttatttgactctggggccactcattcctatgtggcagccagaatctttagtaaattgggtagaccgcatgatagttctgatatagggtttggaaccctactacctggcggagagttagtcatctccaaaaggtggattaggtccatgccgatcataattgaggatagggagttgagtgctgacttaatagaaatgggtttagcagattttgatattatactgggatttcttatccaagtactcagccaatattgattctaagcggaagatggtaatcttccaaacagaaggcgaagaaccgttttcgttggatcggtttagggatctcaaattcctgtaattttagtactaatagccagggaatttttacaagatggatgcctagggtttctggccgtggtaatggatgccacttggcctaagtctgttcagccagaggacatcaagttggattgggaattcttagatgtttttcctgatgaacttccgggtttaccaccgcaaagggaaattgattttgttattgatttggctcctggaacagaactggtttctaaggccccttatagaatggctccagcagaacttaaagaactaaaatcaacttcaggggctgcttgattagggttttcatggcctagtgtgtcaccctggggagctcctgtactgtttgtcaagaagagagatgggtctttgcggatgtgcattgactaccgggaattgaataaactgacaatcaagaataagtatcctttacctaggctcgacgatctcttcgatcaactt

SEQ ID NO: 346863 - DNA, 554 bp, Cannabis indica
cagtagagaaaaaccagtaggtgcctaggaagagcaataggtagaagaccgacgaagcatcgaccgtcaagtggtcaggtggtagtggaacctcgtcactgttcgctatgtcacggtgcagggcacaacagagctacatgtaaagctcgagtttgaaccgtttctctaatatttaaatgaatatgtgttgtattgctggttgttgtttaacaggactatagctttaatattgttatggatattttaaatgtgtctgcgactttttgcgattttatgcgattattgtgcgatttgacttcatatttcattaatgttgctttttgtgatttgtatgcgatatctatgcgacattgtgcgattttcttcaccattttaattgctaatttgtgattcctgtgcgatttctggcgacatttggcgatttcatggtgacatgcctaatatactagctatctactttttacaatttctatgcgatgtatgtgcgacatatttagcgagctaagcaagttattatttcaacgttgataatatttgcgatttctatgcgatat

SEQ ID NO: 346864 - DNA, 1094 bp, Cannabis indica
gcactaaggtagacccaaaagctgaaaccctaggtgggaatgtcaacctgggcactgggtgaaaaccctaggtgcctgggttgactttcagggtgttgttttatctttttttagtttccaagcctcagacttggattcttcttgtctacttggtttaaaatactaaaagatggtgagtaggaaacaatttggcgggatccaaacaactattttggagttcccagaatcaacttgagcgtagggttagggacccctaatatgttcactactacaatgtaagcctttagcttcccttttttcaacccaatttataaaaagggaagctaaagggggtgaaaatatctgcattgacatttagaggcggttttttggtaaaaaccgtaggtatagaatgtatatatatctatgccgtcggttgggggttgggaaaatcagggttttttatataaccctatggcgtcggttattaggtattaaccgacgccataggtgttaggttttatgccctaaataaaactccatttcaatgtaatctattttattcaacatcaataaagaaacagaagtatttttcattcatttgtgtatgttttggttcactttatcaattgcttgtctatttgatttataaattcatcttaaacccttttcacatacttgatcatgtttattgtgctgtcatcacattggaaagtaaacatgactatgtgaataaagtttcctagatttatcagacacagggttttactgatatgataatctacaacaagagtttacttgtatttggagaaatactatgttctttccagaacattggttaaagtaaagctcaggttggatgcatggagtatgcatcggaagggaccgatattgaactttgacttagatttaattaaacttaccgtaaaatctattcaagtcaatatcgccaagttgatcctagatcaaatgatcttaatcctgttatgattaggctcaatcttgaaaggctattcgtgttctttgatttgttagttaagcctacttttaggtcagggtgatacgtacattttgggaacacggtagtgcaattgagtgggagcgctagcataaac

SEQ ID NO: 346865 - DNA, 703 bp, Cannabis indica
tagtgattatattagaatatttactagtttagtacataatcgcaatgaatttagttttttcttttatttgatttgagtagtgatatttttttttaagttactcagtttatttagtatttttcaacataaaataaaatttttataaacccaaaagttaccaatggagatacaaagtgaaaatatagctcacttaacataaaatatagagaagtttacacttgacaccttattttatagtaaaaaataacatgaattatggaaaaaaaatttaagggtttacttttttatagcataattaaataatgctaatggtgtatggactttttgttttaaaaataagttgaggaatacttttttttgtatccattaatcaaaaataccctcatattatattttattaaattgtacccacttttgtgagtgagttgctcaatacaccctcaccctccacttaagtctagcacataatttatattaacttaagggggtataatagagacatcatctataaaaataggtatatcttgaaactttattatatcatcatctatataaacagtcttcatcaagaaaacggtttcttcatcaagacataatttacactggttccttcatcaagaaacctatttcttcatcaagaaaacggtttcttggtaactttttctgtaatttttctggcgacaatgccaattttgatgacttt

SEQ ID NO: 346866 - DNA, 603 bp, Cannabis indica
aaaggaaaggcaaaagctgaacaggagtgagccggagctaggatgagattgtacatgtcgtggcaaagtgagctagactgttcagtctcaggacatctggggttatattttgtagtagttgtgcgacctggatattgtattttggcatgttttgtataaaagtttagaaacgtgaatccccgtgtttgtaaatcattatgtaaaattataaagttttatatttattataaaagttttaaattgacacgtttttttagaaaaatctttgattagcaaagatagcaatgtacttaaaaaagcactgtagcgtgccttagcattaggacgttacattcatgcaccaaaaatttgattttagtgtattttttccccaaattttgaatttttccaattttcaaaccctaaatatctaaattaaatattatttttcatatatttaaacttaattatcaattttgtaaattaataatattttatttttaattagattattattaatttctgtatatttttgaggttgaaattcttaaattgattagtttattttaaattatggtttagattttaaaaagttattaacttctttaatatttatatattatt

SEQ ID NO: 346867 - DNA, 511 bp, Cannabis indica
ccctttcctgcacagtagagcacccgtgagccaagcctagcaagatagtactaatatcaataatcataaatatcatatcacatatacaataatcccatttcattgccatttcacagttgtctatttactatatgacctgcgtgttacgctcacatgcctatttatgtctatatgtcatatacctcacacgtctatttatctctacatggcatagacctatgtgttacgctcacacgtctattttccataaggccttagaatggttcatctcagttttagttaccgagtctaacctgattatgccttaaacgcataaaccttaatctcaacacatacataacacggcatatcatttacacattgataatcactaaggtaataaccccaggccattaaacctctcatgttagggtaataaccctaatctcggtttataattactcacaaatatcatattcaatataagagccaccacgcataactctacgttctaactactgtcttacctgat

SEQ ID NO: 346868 - DNA, 1105 bp, Cannabis indica
attatttttttatcctgtaacgtaaaggatgagtaaaaataggggagtggggagttgagatcctattttctctctatttgactgatattttattattattattattattattattttaaaaccaataatgaaataataataaatttatttattcctcttttttttttatttatcgttcaacaaaaagtagtgggcgtttctcttgcaaatcggcttatcttacccaagcattggagagagctccccactgtgaagtggtgcctgctctttggaataaactttggaatagtaacatcatggagcgccaaaaggttctttggtggtgcatcctctccaatgccctgccggttagagcagtcatctgtaggagatttccaattgaagacactaattgtcctttttgtggaaggggagaggaaaccatggaacatttctttctaacttgtgatgtggcgatgcacttgtggcgctcgtcaccttgggaaatttttccagtaagtgacactggtattcgtgtttgggattgggtgaagttcatctggagccttaataataaaggtgttagggctgaggatgtctttctctatgcgtccactgtcgttgacaatatatggcgaatgcgaaatgaaggggttcacaacaatagccctcctcatgttttaaaatgtattgacattatttgttcttcttttgcagagctacatactactcttttccctagtcctccgccgttgatgagggacaactggatcccaccacctctggagtggatcaaatttaattgtgatgttcgtgtgggtttagagagtatgtgtatagctgcagttgctaggaaccacctgggaagggtgattagtgttcacacgtcccgattggattactctgatgctctttgtggagaagccgcggcctgctgcttggcgatgtctgttgcgatggagctccagcataagtatattatagtggagagtgactcgaggctagcgatcgatgctcttaatgggaaggcatcccattgggctctagaaaactatgtctccttttgtactaagtcttctccttttttcatttgttgtaatttttcgaacattagtaggtcttgtaa

SEQ ID NO: 346869 - DNA, 585 bp, Cannabis indica
tttttgttactcgaaaattgttttttttttatgttttctcttacttacctaggttcgaggtttggagtcgggtccaagtttggagtccagggtcgggctgggctattcaaatttaataaaatcacatagataaacacaagtataattaaatagcaaacttgaaatgtaaagagcttagggatagaaattacaaactctcaatttttacaaggttcggtagaactaaaccacctacatcattagtcttcaaacctatggacctagctttgagttcaattatcgagccaatttaacgggcttgactaacccttacatttggagaatttttcaccaaggtatttcccaaacctctcacaatagttttcttcaaggaatattgaccttattggattgttaaagtgtcaatcttaacaaccgagttatttttccaccggtgccaactttacctcaacggatagtttttcaaaggactataaacctcttcggatttttgaattgccaatctcactctcagattgttgtagtgacaatccactttacttaggttgtttacaaaaccaatgtcaacctcacctacaaccgagt

SEQ ID NO: 346870 - DNA, 544 bp, Cannabis indica
ctcaggagaagcctgacacctcacggagaggctttatgctatgcgagcttccgggagcaccttgcactccgggtgcctcctccgggacttatgcccagggtgtttccttgtggcatacaaagacttagcaaatatttataagttatctgatccacgtgtccctgttcggttggtccacgtatattgggtgaaatcaggggcaacatttatcataagaacttttaaaatcccaaagtgtaatttcctctaaaatataaaagcattcatattgggtacatgtagtgactattatttttttcataggtggtggtgtttagtattttctatatgtggtgttttatgattggttagcgatatttttgaaaaattattttcttaagttattttagacctaatatttaatttcaccaataaaaatatagggacatgattttgtcccgtgattgtactttcacggaatgtatttcgtgatgtacgacagccgttagatgagagagttatttgatctgagggctgagattgatctttagggttaaaaaatagt

SEQ ID NO: 346871 - DNA, 835 bp, Cannabis indica
atagcaatgcatttctgaattcaataaataacagtataataaattatttaaatggctataaataatttcataattaatcgtaattaactgctaattcccaaattaaactaagcgggctttacaatatcggtcccttttgatgcatactctacacatccaacccaagcttactttaactaatgccctggaaaggacacaacacttatccaaggtgcaagtaaactacattgtagattatcatatcagttaaaccctatgtactgatgaatcataggaatacatttaatcacacaatcttgattactttctactgtgttaacaacacaataaataataatatcaatgtataaggattaagatgaatttataaatcaaataaataactaaatgatcgcatgaaccaaataacacattaaataagtaatgaaaataaatctatttctttattgataaatgaatatacaagattacattgaaatagagttttatttagggcacaaagcccaacaaactccaacttgcactaacataaaacaatcattacaattcaattaatcctagattcagtccgtgtttttcaaatgaagttatagtccaaactttggtgaatggatcagttaagttgtcttcactatccactttctccactagtttttcccctcttgccacatattccctgatgatgtggtatttcttctctatgtgtgttgcttctcttgtggcttcgaggctctttactgttggctatagtgttgggttttgtgccctaaataaaacccatttcaatataaccagatttacttattaataaagatcagaaataacattttatgtt

SEQ ID NO: 346872 - DNA, 734 bp, Cannabis indica
agtcacgtggagagtatcttaaaggataaaaataaaagaggaatataaaaatagtatagagtgtaatttcctctaacattaagggctcataacatagggataagttgaaaaatataatttttttgtatttattaatcaaaaataccttcatattatattttattaaaatatacccacttttttagtagatttcccaatataccctcactctctatttaagtctagcatataatttacattaacctaaggggtctaatggaaacatcatctataaaagtgagtatatcttaaagaatataaaaatgaagataaaaattaaaacaagtaaagtgggtataccatgtaatttcttccctaacatactgtcaaactattgggccaagacaaccaattcttacgggcaattaggtctaaaagatttatgccttttatgttgagggtgtgagatgtgttactgtataactgttgagagagaaagagtagtgttcataaatcctttttgtacccttgtcatctctttgatgtgtaggtggatgaattgtgataccctaaatagaatgatatcattttgggctattttatgagctgtgaaaatcacataaattgttatttttagtaaataaaaatatatttttatgtttaaagtttttttatatatatttcgtacaaccgtatgtaaattttttattatttttgttaattctatttttggcatatttaattgacaaaaatat

SEQ ID NO: 346873 - DNA, 802 bp, Cannabis indica
ataagtatatagaagtgaaacaacgattttcttcgagcttggcttgatagagataaatgattgaggcctcatttcagttattatattagtttactaaaatatcatttataggtagctaagtgttttaaagctaaaatatattaaagggtagaacggtaaatttgtccttattccatgtagatcatctatagaagatctttgaatattgagattgatacaatggataatcataatgtaagtgttctatataattgagagtgcaattttaaatttatagtgacgcaaggacaaattaataagttaagaaatttacttggtaaattctaaatctatttattggaagttcaattatataggctaataatggtcccctcactagttgagataatactgcttgcaaacttagttaattgattttaattaataaattataattctaaaattagactttgtcttatttataaaatttcactaaacaagaccaattgtgaagaaaagaggttttagggttaatttattaattaaaagactttgtatggtctaattaataaataatataaatagaaattttattggataattaattatgatcattaatagatagttttggtaattatgtgattaaaattataaaatatggtattatttaaagaagaataagtagttgaaataaagtgataaaattgtaactagagaatggtccactaagtagccggccttagtgtgtaattttgcctaatattttattcttttttaactatataattcaaacctaagccctagttgaaacactataaaagga

SEQ ID NO: 346874 - DNA, 567 bp, Cannabis indica
ccgttatctatcaacaccctctttatccttttattggtgagttgaatagtaatcaccaatggatcaacatgaggatatctcacattcttctcatctttgtccgagaatatgattggatgttcttcagtttttaccttcttggaaggtttcggggtaaataccggctgctcattctttatttctttcacgtatctcttttgggcgtttttgctctcccctacgatatgcgaccctcctgaaataactaggatgtcctctccttcaacaggaagaagttgtaatccctggttgtttgggttgttgggcagattgggttggttgtgtccattgccctgtctcttcacatactattaaaagtggccgcgagcgatgagactttctatctcatctttcaactagcgacattcattggttgtgtgcccaatgtccgtatggtatttgcaatacctagtaggatctctcttgctccttgcatgcgtcatggctcgagcttgccgaaggaaaccttttgctcatgtgcgaggtagatattttcccgagtttcattaagctcagtataaattatat

SEQ ID NO: 346875 - DNA, 643 bp, Cannabis indica
ataatttctgaattgtgtatgaatttacattgaactatgttattttttgttattaatgttgtagtataaattttgaatcttcattgttggtctaacttaggttgttgtttttaatgggacaaattccaaagaattgtcatccgttagacaaacataatagtgttagatctcgacaaataagtatttgtaaattcaacatctagttgtacatccaaagatatcaacttagactaatgtttacaatatgaaacaatgattaaataataaaataagaataactttgactctcacctaaacgggacatcattagatttttattttaatcaaaattatcctttacttttcctcttagccttttcattaggaatttgcttagatagtatatcattggatagatggtttataaatcatatgcttatgatgtcatcctattttctcttatgaaatgaaatggcacagataactatattcaagacattctatcctgaaatgatataaatcctcgatcttagatatctcctacttatatatacttacttaaggcaacctaaaattagagttagattagtagtggtggtccaagaaagattataattcaagaaatatttggtataaatttaagtctttgactttaaattttaga

SEQ ID NO: 346876 - DNA, 753 bp, Cannabis indica
agaatctgtgagccaatagactcaataaaaaaagcatacaataaaatataaataatcgacatgtctagacgcccatacacctatctacaaggcttaccaaatgattaagaactatgatatcacccactacaagcactatgatcgcactgcgggaccgacactatgttcgtaccgctatgatagcatcaatagcacccaagagtataattggccatgatatcactcttaaccagtattgtgcccgtactgccgaaccgacacaatagttgtgtcactatgatagcgccaattaatactctctggggtgaatatcacaccagtacgatgcttgtactgccgaaccgacacaatggttgtgccggtatgacatcacccaaaatatatacaatcacaaacacaacatgcttatataatatgttctatgcaaatcttaccttatttccgagttcaagtgtgccagacgaccttaatggaaaattacatgctgaatggaggccctatgtcacaacataaaattgataagtgtttaccctaggacacttctctaatgctcgaaaagaacctagggtttttctactgaactttgtggtgaagacactctaaaataaaatacataagtggctctagtttatataccatattgtagagctcgtcataagctttaaaacagtatatagaacgtctaaaatggacacccgagtgaaaagttatggccaaaatacgaaaatttgccttccccgatacagtccaacc

SEQ ID NO: 346877 - DNA, 709 bp, Cannabis indica
ccaaatcaacacaataaacatattcatcattttaaatccatattacatgaaagtaaatcattaacctggctctaataccagttgttgggattattttaccaggatctagatttacttacaagtatgttgattaacatcataaatatgaatatctctaaaacaattaaatgaaacacaaaagatttaaaaaaccttacattggttgcagtggaatataatgactccttccgcttaaatctctaacccttgctcctttctgtcgcagagtattatcaagatctaagctggatctctttctctctatcgggattggttaccaccgccttactcactatgattgagtacttgactttctatttgtgggcatggcactctatcactaagggttggagtatgaagaacaatgaaggatgaaaaatcactatagaaggaactctctcatctattagttgtcagagaatgaaaactagattttggcaggttgaaaactcaagttgacaagttgataagatgagagcttcatgttcctttcatagtgtttcaactaggacttaaggctgagttatatggattaaaaaaaatatattgcacaaaaaacacttaatggtcagccataaaggggtcaatctctagttacaattttgccactttatctcaaccacttattcttcttttaataataccatattttctaattcaatcctataaa

SEQ ID NO: 346878 - DNA, 1321 bp, Cannabis indica
gaaagttgtccgtgatactagggggcattgaagtcctcagtgcactttggaaggacataaggaagaatggccctgtagactcaatgagtgattttcttgaccgtgctgaaggcttcatcaagctcgaaaaagctattcagcgagcaaaaggtgagcaaaagcctggaaagtcaaaagctccttccactggaatgtccgcccaacttccccactacccaaataattcgaggtcaaatggtaaacgttctaacaacaacaacaggcaagggaatgggaagaagggaaagtttaccagcaaaaccgagcaggctccccaagaaaatcaaccgaagtacactgtatttaccatcttgactgaggatatagaaagtgtatacatggccactcagtcgctagccccgtataagaagcccgcgcccatgaagaaagatgtcagcaagagagacatgacaaagttttgtcaattccacggagactacggccacaacactaatgaatgcaacaatctgaagcaggaaattgaattcttgataaggaaaaataacccacacttacagaagtatgtcaagaccaatcagaattagaggaacgacaataaccaagacttgctacctccacctgtagacggacatctgcaagtcatcattggaggcccgcacatagctcgagattcgggaaaagctcaggagaggtatgcccgaacagcacagcacgagcaagaagaagttatcctggccgtagaagaaaggaagcccaaaatcccacgtgcagtaggtcctaccatcaccttcaacgatgaggacgctgtcaaaataaggtttccacacaacgacccgttggttgtggaagtccagatagccaacaaaatggtggccagatgcatgattgataatggagcctctttcgatatcttgttcaagaacgcctatgaaaagatgggactccagctcaaggatctaatcccatgtctcctacctgtctatggtttctctggccaaggagtcgcacatctaggacaaattcgtctaccccacactattggacaagctccgacgagcatgactatcatggcacaattctggtattagatgttcctccagcctttaacgtaatgctacgccgactagccttgtatgacttaaaggctgtcacatcgatattccactcgtgcctgaagtttccaacaaagaatagggtagggtgtctgagaggaaaccagcagactgcttgggaatgttataaccttgcagtggccaaggctaagagggaagtatcctctagccagagcatagacaagggaaaaaacatttccaagtaggaa

SEQ ID NO: 346879 - DNA, 520 bp, Cannabis indica
aatcatcgaatcatacatctaatggatgttggtttagatcggttttatccattggatatatttcatgtatatctatttatttaatttagatttatctaatattttagacctagtatttattggatcggattgaatccatttaatattttaaatccggtatctattgaattaaattggatctatcaaatccaaaaaaaagtaaaattttaatattaattttcatacatacatatattttatttttatttttttacgtatgataacataaaatttaattattcattcaaactaaataaaaatattaattagttcgattgaatgttagaggtattggatttttggacattccatccaacatttaatccaatctgattggatattcaaaaataacatccaatctgattctatcacaattggatatctaatgtttagtcgttcgttgtaattggatcagtcgattataattggattggatcgatttatgcacaaccctagtcctactccgaaggcattatgtgtg

SEQ ID NO: 346880 - DNA, 603 bp, Cannabis indica
ttcatggatgcttattcggggtataataaaatcaaaatgcatatgggtctatattgttacaaagtaatgtcatttcgtctaaaaaatgctggagcaacatactaaatatcggtaaacaaaatgtttaaagaccagatcggacgaaatattgaagtatacgtggatgacatgctcgtcaaatccaggaaggctggggggcacatagatgacctggacgaatgcttcaaggtccttagaaagtacaatatgaaactatgtcccttaaggtgttcctttggagtcagcttgagaaagtttctgggcttcattgtcaatgcccgaagaattgaagccaatctagagaagattcaagccctcctggatatgaagttgccaactaaaaccaaggaagtgcaaagcttgagttgtcgaatcgccacactcaacagatttgtttcaaaatcaacaaacaagtgtgtcccattctttaatatcctgcgaggaaacaagcaattcgagtggacggaggaatgtgaaaaagctttccaagagctaagagcacagcttgcgaaacctcccgtactctcaaaacccctagatggagagaacttggaatatacttag

SEQ ID NO: 346881 - DNA, 879 bp, Cannabis indica
aagagattaataagaattaatcaattattatttattggcaaaataaataataaattttatttgtaaaaattgaaaaattaattttgaaccttaaaatattactcacacgtggtgtagggtgacatataaaggtccatgagaatttttcttgatttaaaataaattgaattaaattaagaactatcttttaattgattatattaaatatattattagataatgtatttaaaattaaaatgataatattaaataaaaaattataacgaatttctcttaatcagtatatgatatttatattttaaatttgaaatttgattttgaatttaaaataaatattatcttttattttagaataattagcaattttaccctgttgcccctgattttgcccaatatacgtggaccaaccagacaaggacacgtggatacaaaggtcttaacactcaaattaatagctaagtctttataaagaaaggcattatccgggatctgcctcccggagaaggcatacgaagtcctctatgctcccggaggccaaggtggcatcaaagcatctccgggagatgtcaggcttcctctgagcagtcatctcgcatttaatgccgcatgggaggaggcgtgttggaactgccacacgcaataaagtctgacgacacaacccccgatctgcacctacaaggctatgatcacttaagtctaatgacggctacactgtgaagaatcacatcagtcaaaaggcaataaggacaatccacataaaatccctacagcacctagggatttgaccatgcattacccatggtatattcattgggaatacccaactttattgatagttacagaaatacatgtactataattctgggaatcaccccacaa

SEQ ID NO: 346882 - DNA, 648 bp, Cannabis indica
acctgctggagataaccaactccccagtaggcagcaaagtcccaaaacttctagaaagtaaatcactaggtctattcactttctcaattattctacttgcaatataagaatgtgtcgcaccagaatcaattagaacagtcaataaagtaccacaatagaaagctgacctgtcacagtggaaggaccagcatcaacctcagcttgagtcaaggcaaacactcgagcaggagcgggtgtatcattcttcttttgcgctactcgtagcagctatggacaatttctcttcatatgacccaccaccccacagtggaaacaggccctgacctgacactcgccctggtggcgccttttacatctcggacattcaggaaaattccaccagttttcgttcccaccaaaacggaaaccttggttaccctggaaccttttacttggccctatagctgataattcactaggtcttttcttgcggtcaccgggatcagtacccctaccagaaccagcacctgatgtttgcttccatgaatctcttctggcaatatttttctttcgtatctgagcttctgcaccctcagaaactaaggccaattcaactatctgagcataagttcgagcaacccccagttgtttagaagcaacaatcacatc

SEQ ID NO: 346883 - DNA, 998 bp, Cannabis indica
ataaaaatagcaccaagttatctagacttcaattaaaggataactaaaataataatcaattaaaaatataatacactacctttgtaataaaaatcaaaaacagaaatatagatgtgctcataaaaaactaaatatatattaaattttttttgaataacttaaacaattaaatcacaatgaacaaacaattagacaacaaataaaaataaggtattaacacattatatcaactcaaaataaactgaaaacaacatacaaataaacttcaaaattaaaagtaactacaaaatactagtgcaccaactcgaaaatatatatttattttttcaattttctaaacggaaaattatatgcaaatcaattaaacatcaacaaataatgtaaacaatttaaaagaaacaaacaaataatctcaattaaacaagtacaaatcaccaatataacataaaaaaactacacgttatataattttatttttctctatcataaacacccataaagatatacatatataaatatatatatataaaataacaatcttgatatataattttatttctttcatcttaaatatacaaaaaaaaatatatatattacaacaattttgatgtatgcaccataaaaaactaaacatgtgtatatatataattttatttttttcttagttgaacaattaaataaaaactaacaaacgacttcataacaatttcgctataatatgtaaattaaataataatcaaaacaactccacatgttgcataaactctaaaacataataataaaaaatctatgtacaccgacttaaaaatatatttactagaaaaagacaaacatatactcattttatcttagttgaacaacaaaataacaacgaataaacaactcactttaatctaaaattaattaggcatcaacacatagcatcaatattaaaaataaataaaaacaacaacacaaataaaaaaaaaatatgtatatagtatattctttttttcttg

SEQ ID NO: 346884 - DNA, 495 bp, Cannabis indica
tatatagtatattctttttttcttgattaaataacttaataacaataaataaacaactgtataacacaactttactctaacatacaaattatatagggataagaacaaactccatgaaagaaaaaaaaaataccaataatctataaaataaatttaaaaataactataaaatatttgtacaccaactcaaaaatatatattctcataaaaaactaaaaatatacttatttttttcttagttaaacaacttaataacaacgaataaaaaacacgataacaatctcattttaatataaaaattaattggacatcaatacattgtgttaacattaataactaaacatatacttatttttctcttgattaaacaactaaataacaatgagaaaataatgagacaacaaccccatataatatataaaaaaattattgggcatcaataaatatttgtgttaacttaaaaaaaagacgtatacacaaaaataatcttaaaaa

SEQ ID NO: 346885 - DNA, 680 bp, Cannabis indica
tgtttacaatccctgtggagacgatcttacttatcactttattacttgtgtgactgcgtatacttgcgtatataattttcacaacatcaacctaggtgctgggtgaaaccataagtgcccaggttgatttttgggttgcaggttcatgtatttttagctctcggggcttggatttgtttgctccatatcttcacggtacataatactgaaagatagtgagttgaaaatgagttatcaaagtccgaacttccatttcagaattcctgaattcaacttgagggcagggttaaggacccttctcaggtcgacttgctatgactcgggagtattcaactccgaaatatcatatttcttgccacgtataaaatattaatgtccacgttattaggactactttggtgtaaacaatgttcatacagtggagagaatatcgttttatgagagtaaaagaggattaggctcaggggcggacgtatatggacctctacagaggccatggcccctccaaagtttctatatcctatattatttcatttatataatttatttttattattatatactatatggtggcccccacttaaagttaaataatttttttttttcaaaaaataaaaaaatagatattataaataaacccaatttatattatatatatatgtattctcaaaaaaaaaaaa

SEQ ID NO: 346886 - DNA, 321 bp, Cannabis indica
tacaattttttttatctttagtcacaaattttgttatgactaaaaataaatttttttatagtgactattaaaaataatttttgatcctaagttacaattttttttttgacaaaataattatatatttattttttaaataaaaatattatattcctaacaaataattatatatatatcatgtgtgcacatattattactccttaattataatattattctatatatgagtaatttgcgacataaatatatagatttaattgttggttgcagataaataattaagtttaatttttaacggtatattcactacaagaaatgtca

SEQ ID NO: 346887 - DNA, 578 bp, Cannabis indica
taaggtgatttgtgcattagtgttatcatgtcaataaatgatactaaaactaattgcttgcaatgttggagcagataccctcatactgatatcatgttcactcttattcattcttcaataaactagttaatttgcttctttttcatcttagttttttgcttctttttatcgacaaactgccttggtgaatgtgcacctataatctgtccaacattgcaagcaattagttacacaaccaactgctctaaaacaagcagaacacaccattttgtgtaaactttttgttcctcaaaccaagcactctagctttgacactcaactgcagcatatgatgctgattcctacctaaccaagctcgccaatccgcacaaagggcaggccacgtagctactccaaagcaagcacaagttttctttgaatacatgcactcaaagaatagatatgagagcaggccggccctaaaaatatatggccccaaaatttaagtgttatgggatttgaacccatgaccgacttcgacctcaaccaactaagctatgaatatttattgtttataatacacttaaattttacttaaa

SEQ ID NO: 346888 - DNA, 833 bp, Cannabis indica
aactatgctgtagaaagaatgctcaagaaaccctagggttagagacttctacgactcttcttttccatgtctttatgttggcttttagccgtagtgcttatttttgaactgcattgcgtctgtcttccatcttgcttattccaagcttcacgaacttttttaccctaactcaagaaaactttctgacttcttgagttttgacttttctttaaacatagtcattctttaatatgttgagtactcttggtcgacatatttgcttgtttttcgcttgatactccgtccaacactcatcttgtgtgttgtcttttgtagatgaacccatgtgattcttgggaactcaggcatcagatcgaccaggattcgcttcaacttctgcacgaggttcatcctcgtcttcgtgctagtcctccttctagcgaaggaaactcttctgaccttgtactcagccaaaggatgatggctcgtacgaagaaaaccacgcgtctggccgacgcttttgatcctcaagtggctcagcttgccactttgcccaatgccgaacaagattcggctgtcccgatggaggaggtctgtgagggggacgctgaggtccaggaggttgaggagctggatgaggtgcgttcgggcagtccttccgctgcggagggaggggaacaggttggaccccctgacttcggggagtacaatgaggctgggcagccagtcgatgttgatggagacgtcctggttgagggcgtggactacgtcagtgaggagcttgctgtggtggttcctcataggaggcagggtgccttgggcgccaggtgggtaagtcctccgtccacgatttc

SEQ ID NO: 346889 - DNA, 598 bp, Cannabis indica
tattatactaaaaataataatcacaatcattagtattattattcccactaataataatatgtaccaaatcaaaccaaattgcatattcatttaacaatatccagacatatatatctattaggcattatgcacatgccaataaaatcaaatattatatcatcataaaaataatcccatacatatttaaatccataaatatgtaaaataaaaaaaatactctcagctaaataaaattacaaaaataccctttcggagttagcggatattacaattatccccctctaaaagaaaatttcgtcccgaaattttactcaaataattctggatattgttctcgcatatcagactctagctcccaagtagcttcctcaaccacactgtttctccataggactttcaccagggtaattgtcttatttctcaaaatcctatccttttgatcaagaatctttaccggacgttcattgtaggacaaatcttcctgcaaacccagtgtttcatagctcaaaacatgcgatgggtctgacacatatttccggagttgagatacatgaaatacattgtgcaccccagataatgatggcggtaaagctattct

SEQ ID NO: 346890 - DNA, 537 bp, Cannabis indica
tttttattaaatttgttcttcataataattttattcaagtataatagattatattaagaattttgaaactataaattataaaataaattgagattcatagtttgaactagaaaaattaatgctctaagtctttattttttgattaaaaccattgcttgtctgtttacttttcagttattttattatttcgttcttaatcattatttattttgatttttttaattaaagcataaaaccaaaaagtatagtaattaatgaattttaataatcaatctctatgggtcggacaacctttttagaattaaaactttgctataacaacgctttacatgaaaataaaaaaaattatcttaattaaattaatttttttttatttaccggttgtgtatcaagtttttggcaccgttatcgaggattgaaagttcttaaattattgctaatattattactaaaagtttttgctttaaatgaaggtagcgtttgataacacttttttaatcagttttctgtttttaaaattgaaaaagtgaaaatatt

SEQ ID NO: 346891 - DNA, 1302 bp, Cannabis indica
ttacttaaatgtattaatcatttcgctaatctatcgaacaaatgttggccactttttaacgtcagcactactcatcatgctttatgtggttgttcttccctttctttgtgcctaaaactttgtaattctcaattgagagactcgcttgcttattgctcagatttgtatggtttaatacatcaattcatctcttcatgtgaaacaagtggagttgattttggttgtttcataaagaatccactttaaaagaaataaattggtgcataataattaattttatctcggttgagtttgttgttcatttggcacgtgactatcttcatgattttcaacttgataactccagctctggagcttagtctgtcatgacacaaattgttagcagctgtcgtcttcctctgtcttgtcaccatctgatttgtgatgggtagctttcaacctaaaatgatcgaggctttggctttgagaaatgcgagaattcaatgccaattgcctggctttgagaacatattatttgagtcgacttgtcttaatttggtgactaaaattttaataaccatgttttgttggagtcatcatctaggttttagttttgaatgtattttggtattagttttttacttttaggtcatgctgtctatttttcattgttctagaactattaatattgtagctcacactaactaagtatgtcattcaactgtagcaaagtctggtgatcaagttactcgatatgtatcaaacatcttataataagtgtccccccccccccttttcattccgaattaaagaattcggaatgaatcaaatctccccaagtaggattcgaacctacgaccaatcggttaacagccgaccgctctaccactgagctactgaggaacaacaggaggttagatctcataaagttcaattcccgttctcaacacatgacccatatgagctcgaagtttcctttgtaactctcggaacttcttcttcgtggctccgttccatgcctcatttcatagggaacctcaaagtggctctatttcattatattccatccacatcccaattccattcatttaagatccctttggtgtcattgagataagagatgtcgtttctagtttatctctttctatatatggaaagttcaaaaatcatcatataataatccagaaatggaaatagaaaagaacaaggggaggtttgggatgatttttcaatcttttatactaggtaatctagtatccttatgcatgaagataataaattcggtcgttgtggtcggactctattatggatttctgaccacat

SEQ ID NO: 346892 - DNA, 893 bp, Cannabis indica
ccgccttcagcgcctcccgatgcctcgcctctagctcagcctccctccgttggacctcctctcggagcctcgccttcgcctgggcttccctctacttggcctcctccttgagcttcgccttagcaagggcttccttcgctcagcctcctcctggatcacccgcctttcagcagaaaggtcccacaggatcctcacggcctcgtctatgcccccgaattcagacatgacaaagccatgattgacgatggtcttggaaaggcggttggtctccgcagtaatctgaaaaaggagataagagtgagatcaaatgccttagatgaaatatcgaggaaagaaataaactacaagtacttaccgcatccatgccgttgctgatgtcttgaacttggtagacggatttcaaggaggcacaagcagcgtaccgtttgggcgggaattgagtaagatgggagacatactccgctgtcctctccgaggcaaaaggagccagagtgggcccaaggaaacggttgaaccagtccgtcagcgggtccatgttcaggtcccacggattccggaaggcctcctcgttgagagtgttttgctgctcctctcgtaagaccctcttcagggcctccaccttagcatgtccccgagtgtactcgtcgagggcatagttgtatttggctacccgaaggttctgcctctcctcgtctccaggaatcggggtcaacactatgccgtgaggcactgtgtattcctccgcctcggagggaatcctagagtcatggctcggggccggagtgtccactctccgggggcgcttagaaggctcctcctccaccattttgcccttgcccttgcgcacgagggcggcctcttgctcttctccaccttcttcagcttcctcaaga

SEQ ID NO: 346893 - DNA, 678 bp, Cannabis indica
cacgccactttgcccagcgctgaacgggatccaaccatccaggaggagggggatcatgaaggtgatgctgaggtctaggagattgagggggaggacgacattcatcctagcagtttttctgaggcagaggaagaggaggaggttgaactcccaaactatggggagtacaatgaggctggggagcaagtcgatgctgacggagacgtcctggttgagggcatggactacgtcagtgaggagcttactactgtggctcctcacaggaggcaaagtgccttgggcaccaggtgggtgagtcctccgtccagcgttactaaggcgcgcctgcggactctcgaccaggatggctacataggcgaattggactgcttaattcccgcccacaataatcgtgccacaatccccgaagggggatgtgcgcttggtcgggcgctcatgcccagcaaggggcattgatgctttgcattaatactttaataatgtggcagacttcttcggcctctgtccgacccagttcactcctaaggccattaagtatctgtctgccctttttgtcctttctgcctcccagaagtgggatatgccttctccccacgaggtcagttggttttttgatttgaagtccacccccaagcaaggcaggtccgggtacttctatttctctcaaccagacttcaa

SEQ ID NO: 346894 - DNA, 724 bp, Cannabis indica
gagcggttgtcagttctattatgaggtcgtgcagctggcgtccgattttttgactcgaagaggaaagtatctcctaacgtcgaggtttcacgcgacacctcctcactatgtcgtttctcttctacttccaaagccacgtatcctcttgccatagttaaggcccttgttagggacaggccaggttccactattatcgccttctttaattctgagccatgtaacaatccttgcattaatgctttcagcggcaccaaatcagtgcatttcgggatactgacgtactcttcactaaatctgttgataaatttttccagaggttcatcaaaccgctggcgtatcaacattaggtctgtatccacttttgcagtccgcacacttattgcaaagtttgtctggaaccttaagatgagatcttgatacgagttcactgtggcggacggcaggttgtggaaccagcgtaaagtgggcccccttaatccttgtgtaaaggtttttcacttgattgcttccaagtcctctagcgggacagacacggttagcattttttctcaaactggcatacatattctgaggggtctcccgtcccgttatactctggtagcttaggggctatgtaacgttgaggggcctccacgcgcaagaagtggttcccaaagggtgagagggttgatccctgttgggttttatgccctaaataaaactctttacaatctgattagttatc

SEQ ID NO: 346895 - DNA, 1051 bp, Cannabis indica
tctctgcgagtcgcgtcgagtgcagggcaagctggtctatctgcgaaaacaaaaaaagcgagttagcttaagatctcaaagtaactcaaaaaatgactaagtcaggaaacatgcgacatactaggtcgacggttaaagtcagttctaatcccgggactttgaatatgtaaaaccactttgatttccaatctcccatattggaaaccatgccttctaccccgttaatctcagaagtggcccacttgctgaagcagtagaaaccattgtgaaggcctacgctttttatatcatagaagtagctaaactcttctacgtgggagccctatgtacgtactccatatacatcgcataaaaagcaagggctgtgcgataactattgggggttagttggaaaggagacacatcgtaacgtttgaggatggccgcaataaagggatggaaagggaccgataccccacatcgaagaatgggtattgagattaccacatcctctgtgggaataatcgctggattggtaaaagaaagatgcgccctctgagtcggtttaggtcgcaaagaagcaagtcgcaacaagtttagtcttgtaaaggtagtgaggtccgatttggtaaccctcgaaaccaagtcctcgcacgagaagggctcgttcagctgagtgtcgtccaccgaatcagtcccactcccttctgcctcttcttcttcctcgcctgactctcgagctggggccgcccaatcgtcatccatctcctcgacctcaacgtcaggggcatgcctggaatggataagataatcgtgggctgacaccgtagactcgctgtctcgaatctcaatggcccctggttcagcgagctcctgcaccattctctcgatgtctgcggaagacatcgaacctaattctatacctacagtaggtgcgatctcctcttctgagatcgaagtcggaataaagctatcttccctctggtcctcatcaccgtcaaatgcctgagccaagcagctgactatccgacaggtcgctcatctgaaagatagaagatcttttcagcatggt

SEQ ID NO: 346896 - DNA, 645 bp, Cannabis indica
tggttgacgggcaccgatgactcgaccatcagcaaaattggacatttagttgatgaatacttcttggtggatggcgtacgcatcacccgtactcggttctagcagattccaacataccattgccctcccctcacccttgctcttaaggatagagctcaaaagcttactcgacttgcgggggaagacaggaatatcatccagttgacctccgaggataactttataaggtacgggctctatcaaaggatttcattcctaagacagtgagggagaggaagaggaaatctggtgctggatgggctaaccgagctcattcagagaatgaactcattaaacttaagcgcgaagctaagttgaagggaggtgcaagggccaagcagtatgcttgaaagcacttgaatcctgaagatgaagttgaggaggagcaggttactctactcaaaaggaggaacaaactttcggcccagcacaggcctgttgaacatgaaattcgcataatggagcccatctctcctgctcggccacctcctcccgtgctcggaaaagggaaagctattatgtccaaaataagaggcatgtaaggtgagatggactttcgagttctgttcggacaatcaccttgcatactacttcatcttgtttttg

SEQ ID NO: 346897 - DNA, 831 bp, Cannabis indica
tacatttttattataccaactttataaaaataatgtgtttaaagtttcaaaattacaaaaaatattgtgttatagtaaaataaaaaaaaaaactcaaaaataaccctagaacaacttaacaaataacatgaaaataaatataaaacaataaaaatataactacaaagtaacagaaaaataacaatacattaacctaattgcagtaagcaaaataatattaactcctcaatatgtttttgtattacgatttttttacttagttttgacaactttatttatttttttgtactattacattattttttcatagaatttgttattacaactttattctttcaattttttttctcttttcttttttgagttagtgataattaaaaaacaactataaatttaaaagtaactaaaaaacaaaataaaaataataaaacaagtgcacttacatacaacaaaaatattgtctggaataaagtgaaaaatatatacaataaaaaatacacataaactaaacaactatacaaaaaaaacacaaaaataacagagaaataactatagaatacctaaatgttgcccctgattttgcccaatatacgtggaccaaccaaacaaggacacgtagatcaagcaatgtacaatccaaaaatatttgctaagtctttatgccgtaaggtggcttccaggatgtagctcccggagaaggcatatggaaccccatatgctccggaagctcgaagtaacgttaaggcatctccgcgaagtgtcaggtttctcctgagcaatcaagtcgcatttaatgccgcatgggaggaagcgtgttgggactgctacacg

SEQ ID NO: 346898 - DNA, 521 bp, Cannabis indica
ttactttttttttttatattatttttgacactcttacttttaaagtactctaatggtataaatatttttaaaaaatactataattatgatctcacacattattatttaattttttagtaacaataatggtttagttttaattttttattaaaaaaaataataatagcattaatggtactctatatcattcacacatattcttagaataacattactttccctccaatagtataatatcttaatattttgccatttcatctatccacctcactaagtatcccttaatttttttaccatatgagatgctctaagatgttaggacatttctagtgggaattttttgttttgttttcttaattaaaaatagtaagggaaaaaaaattaaaaaatactaagaataattttgaaaataaaattaaaataagtattgaaattattactgttgactgaggttttcggcaactaataaaatattataaaattactgagctgtaagaaagtgagagaaggatttttacgtg

SEQ ID NO: 346899 - DNA, 814 bp, Cannabis indica
tttgcccttgcacgtcccttcaacttagcttcacgcttaagttgaatgagttcattctccttatgagctcccttagcccggttagcactcgatttcctcttcttctccttcacaggccgaggaatgaaatccttcgggtaaagcctgtactccacaaagttgtccttggaggtcaacaaagtgatatcctgggcagcacccgacaatagagcaggcttctgagctctatcccagagggcatgtgtgaagggaggacggtgatatgtggagatctggtaaaaccaagtgtaggtggtgcccatgccttccacgttgaagtactcatcaacaaaatgtccaattttgctaacggccttatcctcggtgcccgtcaaccacttgaagtctggctgagaaaaatagaaataccccgatctatcttgcataggggtagacttcaagtaaaaaaacctgctaacctcatgcggagaaggcatatcccacttctgggaggcgtagagaacgaagagggcagacagatacttaatgccctgtggagtgaattgggtcggacagaggcggaagaagtctgccacattcctaaagtatgggtgcaaaggcagcaatgccccttgcttggcatgagcacccgaccaggcacacattcccctttcagggtttgtggttcgattgttatgagcgggaatatagcagtctaactcgcccaggtagccattctagtcaagatcccagcgtgcctcattgaccttggacggagggctcacccaccgggcacccaaagtgccttcccatctatgaggaactgcgacaataa

SEQ ID NO: 346900 - DNA, 838 bp, Cannabis indica
ttattcataagaaatgatttaaaaatatattattataattatataagaaaattagaatattctactaatttttgtaattagtggtaatatttatgattaattaattataacatatgtatattgtattatatgattatttatatattgatttgttaaaatagtaatttaatatgtaaagcctaaaaatgattggcacttttatatagttatagatacacattgttatactcgaaattcgactaccatttcaatggaggacacatgtcaagttaatgagaatatggatcgatgcgtgtaacggtaatcacatttaatagaataactcattaaatgcggaagtgactgagtatatttgcaacttgctaactataaggtcctatgcgagataaagatatacaaactgttgcctcacttattaacgagaaatcatacgacattggatgcacaaggtgagacatcaacttcgttgcgcttgggaagacgtaagcgatgcataatgactgaaaacatttagcgtataatatacaaactaagtataacagtcgggtgaactaaaacaactaatagcgaggcgcttatctcgctataggaaggcatactcttaatactttcatcaatcagcttcagatatcttttagtgaggttattagtcttggcgaatcagtcctctcgagtagaagctgacattcgaatgatgactgctgaagtactctttattattaagaactgtgattgtcaaaatgaagcgttatgccttcaagcgaagaagcaacgaggcgtacatcatcaacctcggaaagataggggaaaagctccaactcgctatcaaggtcattgg

SEQ ID NO: 346901 - DNA, 817 bp, Cannabis indica
ggtctatgccgataagaattgagaatagggagttgagtgctgagttaatagaaatgggtttagtggattttgatattgtacttgaaatggatttcttatccaagtactcagccagtattgaatgtaaacagaagatggtgatcttccagccctagggcgagaaaccgtttatttttgtgggctcggttcagggatctcgggttccagtgatttcagtattaacagctagggaattgttacaaggttgatgtttagggtttttggttgtggtatttgataccacatggcctgagatagttcagccagaggatattagagttgttcgggaatttatagatgtttttcctcatgaacttccaggtttagcaccgtagagagaaatcgatttcatcatcaatctagcacttggagcagaacaattttctaaggcaccttattgtatggctccaacgaaacttaaaaaaaatgaaaattcagctttaggggttgcttgacctagggttttcacggcctagtgtgtcacgatggggagctcccgtatcatttggtaagaagaaagatgggtccttatgcatgtgtattgactaccagagttgaataagctaacagtcaaaaacaagtatcctttacctaggatcgatgatcttcttgattagcttcggaggaaaacgctgctctcaaagattgatctctgatcgcgctttcattagtatagaatctgagaggagaacattccaaagatggttttctgcactaggtatgggcactatgagtttttggttatgccttttggactaaccaacgctcctgcagcttt

SEQ ID NO: 346902 - DNA, 950 bp, Cannabis indica
tgtaatcagatcccacaatttttaagggataatggttgtaaacatggtttggtcagctttgtaattaactgccactatgcaattataaatagtggcaaacaaatctcaaaaaagggatgaaaaaactcttatgaaaggggccctgaagaaatattcaaaaattggaataagattaactcatggactatatagaattttaactgcaaaaccacataaaagaccttatgttcatatattatttttctatagcttttatttattctgtattgaattatcatcgtgaggttcacattttgttaacgaataatctgtgttaacagagaatataaattaattaccagaaattactatctagaatcttttctttaaactatatgtgtttttctaaattaattttaaaataatttaatgaaaaattaattttgttaatttcaaaaactaatcatgttgctaatttaattttaattaggttaaactagtataattagcctaatacaattatttaaacaaggcaaataggccttcgcaattgggattgttcatgggagggcgggtatggtctaatatgtcgtgcccactactattggccccctaactctcaaacaaggtccaaaagagaagaatttaacctttcattaaataattgttatttattgagtaagcccaatactaattgagcataaataaaactatcatggtgatattttattttagtaacctagtctatttaaatatctagaaataaatgtacttcctatatgcatctaagccaaaaagtaacatataggctcacacaggtcaaaccgatttggatgggccctatcatgtttctaggtttatcacgaatgaaagaacttacaaaatttacttgttacaaattatttatatgatctactgacaattagactatgattaaaattagatcattggatctgtcaacaagttaatca

SEQ ID NO: 346903 - DNA, 1436 bp, Cannabis indica
aagatgtaccaagaccttaaaccctacttctggtggaacagaatgaagaagaatgtggtagaatttgtatcccggtgcctaacttgtcaacagatcaaggctgaacatcagagaccggcaggtttgttgcagccttagacacttcttgaatggaagtgggaggatatcaccacagactttgtggttggattacctagaaccacctgtatgtacgattcaatttgggttgtggtagatcgattcatcaagtcttcatattttctaccggcaaaaacaacctttacagtggatcgatatgcagaattatacgtcaaggacttagtgagattacatggtattccaaagtctatatttcagatagaaatccgaagtttacttctgaattctggcagagtcttcagcgggctatgggtaccaaactgaaattcaatacagctttccatcctcagactgatggacagtccgaaaaggacaatttagatgctgaaagatatgttgcgagcctgtgtaatggatttcgagggctcctggagtaaatatctaccactgatagagttctcgtataataccagttatcaaagtacaatagggatggctccctatgaattgttatatgacagaaagtgtagatctcccattcactgggatgaaatgggagagaggaaatacttaggtccggaattagtgtaataaactaatgaaaccatagaaaagattaaggccaaaatgcttgcctctcagagtagacaaaagagttatgcagatccgaaatgtagaaatgtagagtttcaggtaggagatcgagtgttttctacgggtgtctccaataaaggggatcaaacgtttcgggaaaagaggaaaattataccctaggtttataggacctttcgagattctcgaaaaggttggacaagtgacatattgtttagctttgcctctagctttttcagcatttcacaacgtatttcatgttttcatgttacggaagtacgtttcagatcctgctcatgtactaagttatgaaaatcctgagttgtaaccagacttatcatacgaagaacagccagtttagatcctagatagaaaagataaggttcttcggaacaagatcatagctctagtcaaggtactttggagaaacaacaaggtgaaggaagccacctgggagttagagtccgacatgaggctccgtatccagagttgttcaggttagatttcgaggacgaaatccttttaaggggggataattgtaaagaccgcttaactttcatttagaaattagcaaataaataggatagggtttaattatgaaacttacatattagttatgaattatcagtttatggagatttatttgaattcagaatacattttataagtcatatgtggaattcatatttttgcatgttttgtgcccgacaatattggaacgcagt

SEQ ID NO: 346904 - DNA, 600 bp, Cannabis indica
gataactaatcagattgtaaagagttcaacacatactgctgaggtcgagaagcataaatcggaggtggcgaggctggaagagaaagtacatgccttagagacagctgttctcaagattttttatgacttttggaaggctaaccctcaggaaaattttgattacctgggcgaggccaaagacatgtatctcgagtactgtgcttcccaagtggcttatggcaaacccgaggtgactacttctacttctagccagaatgttgatgtaccttccactcggacaacagatcctccagctcctgccagcccagaagacctgaaccaagagcctgggactccagctgtttaaatacttctctttttatctttcttttttatatatcttattcggtaataaggccttttttaagacatcatgactggccaagcggtctttaaacttggaattatttttcattttacagacaacaggctgatcgggtagcttttaatcccggtattacgtgctttcgctgtctttaatgaatttcattctctgtttataatcatcgtgcaattgtgtttgttttatctttaccaaatgctttgtacaggtataggtgc

SEQ ID NO: 346905 - DNA, 696 bp, Cannabis indica
tgcctgtttatgtttacgtgacgtaaacctacgtgttactctcacacgtctatttatgtctacgtggcatagacctacatgttgctctcacacgtctaaatacaataaggccttagaatggttcatcttgtttatggttaccgagtccaacccgattatgccttgaacgcataacccttaaatctcaatatatataataatctacttagcatggcatagcatttactcaacttatatcactagggttataacccttggctattaactgctcatattaaagtaataatcctaatcctggttacaattacttacatatatcatattcaacataagcgccaccgcgcatactctacatgaaaactactgtcttatctgttgtcccgcaataacagagattccaaactcctgggtgctcttgatcaagtgtcggtaatcctagtcacacaacccgggatttcacacatagggttaatccgtaatttcactttcacatagtataaatatggcattcaaaacacatataatcaaattaagatcggaacgagctttcaaacaatataaagaacgtcccaaacagagtcccgagtcaaaagttatggccaaaacgaaatcgggaaaaatagactttctcactgccaaacccagtcgcgacgaccaaaaatcccgtcgcggcgacttggtttagaacacccaaaa

SEQ ID NO: 346906 - DNA, 795 bp, Cannabis indica
ctgcaaccactgtaaggtttcttatactttatatgtgtttatttcatatcgttttagaagttcatatttaggatgttaaataacatacttgttagtaaatctaagatcctggtaaaataattccaacaactggcctcagagccatggtaattgatttactttcaagaaatttggacttaaaacgatttgtgtgtgatttggatggtttcatgttgatctatgtgttatttgatgattgattgatatttgtgaaatttttataaaaaataatggaatttttcgtttctagaattatttttgttggatattttggaaaaaaattaagcaattcacttttttacagaacttgatttcgattttatttgaattagttatgaatttttgaaaataggaaaacatcaggggtgcatcacccacatgtgcgcgcgcagatgcctgagatttctggggcgcacgcgcttcagacacgcacatgtccgagaattctcggtctgacggcgctgatgctgtctgaacaccctcgtccgcatgcgaaaaggctgcatgcagcctccagcgccgaggtttctcagccagcatccctcatgtgcgcgcgcggatggtatgcatccatccgtaccaaatgcaattttttctaattttttctaattttttcatggtttttcatgaaattaatttcagattttttgtgtagttttgtattttaatttttacttttcaaatttcaaatctaattatcagaattaaattattatttttttttaaaaaaaaattaatttaagatattagtgaaat

SEQ ID NO: 346907 - DNA, 1020 bp, Cannabis indica
aatctccgtaattaataaattacgctttatttattcttatctccctaatcaacccataattagtttaagtaggattataatcctactctaatacccacataatcacatatttaataaaatatgtccaattaaaatatcaatatatttttctgggatattacaatcataatcttactttggtaccaaaataatcacatatttaataaaatatgtctaattaaatattatttattttttgggatattacataaactgtatgccaaatttaagaagcttgagttttggctattttaggtgtcttttctttggcacattgtcagtaaagatggattcaaagtggatccagggaagattgaatttgtcaaggattggccgagaccgaagaaagttacagaagttagaagtttcctgggtctggtaagttattaccgtcaatttgtcgagggattttctaagatctcaacacacttaaccgaactcaccaaaaagaatcagcagtttttgtggacagacaagtgtgaagcaagatttcaagagcagattcagagattgattacagcttaggtattagccctaccatctgataaagaaaaatttgtagtctaatgcgatgcatccaggcagggtttggggtgtgtactgatgcaggccgattgggtcatcgcctacgcctcttgccagttaaaggaatatgaacagcgatacccatctcatgatttggaacttaccgcggtagtgtttgctttgaatatttggcagcattatctctacatagagccttaaatacttctttacccagaaagatttaaatatgaggtagagaagctggttgaagttggttaaggattacgactgtgaaatcccttaccatccttggaaggccaatgtaaggattgatgccctaagtaggaagggtcctcggcaggtaactagtatgctaaagatttcaccacagttagcagatggcatggtcagatcaggcattgagtttgttgtaggcaaacttcataatttgacgtt

SEQ ID NO: 346908 - DNA, 552 bp, Cannabis indica
ctataaagaagtatttaaccatgctcattcatcattacgtagtgttattgagcgttgttttggtgtatggaaagcacgttggcaaattttgcatcgaatgccaagttatggatatgataaacaagtagctatcgttactgcttcaatggctttacataattttattaggagggagactattaatgagatggactttccgtcttatgatgaagcaaataatgattttgtagacgatgatgtacaaaatatcaacttagcaagagatgagagtgaaatgggagttgtccgtgataaaattgcagcggaactcatgctgagataaacatgagtattagtgttatttttgaaattatgtaataattgttttaaatgataattatgtaataaattaaagattggttttgtttatatatttttattttattttttaagattattttttaaaaaacaagtaaaagaaattatattattattattattattaaatttgatatatataaatatattatttgtaagagcttttatattctactaccaaacacttataaaagc

SEQ ID NO: 346909 - DNA, 682 bp, Cannabis indica
ctatcagggtatccttaaaacttattgtatgttgtatcctttaattctgatgatgaggatgatgcaattgaactcacactagtgttttccaaatcgatcaaccacacaaaaggaatagtatcagctattaggataaagtgtataatgtgttcttgtttaattctcaatagaagagcaagaacaatttaagagagaaaataattttctttttctcctatgtcaatttcaaaattttctattaaaaattattatcttatttctcaaatcaggcttttatttatagtagttaaattcctattaatttaatcatattcaattatttaaataattaaatatctataatcaaattcggttactaatatttatgagggaatctcttaactacttgagataatatctcaactaattaatttattaatctgaaaagataaaaccaatagggacactctacactagagtaggcacttaccttgtctgaattaagacaagaatggtgtcttttgtcctgacaacttttatcttaacaaatattatcttgataaatattttatatgaacaatttttatctttttcctatttaagtaatttgaaaaattatttatttattacaaaaaaaaataattactatttttccaattcaaaatagatttttttgaacgatattatactactatttatccct

SEQ ID NO: 346910 - DNA, 1124 bp, Cannabis indica
tattggcccctaactctcacacaaggcccaaaagagaggaatttaacctttatataaacaattgttactcattgaataaacccaaatctaattgggcctaaataaatttacttatgtcaaaatttattttagcaatctagtccatttacttagggcattcgataaagttaacatataaacgtggtccgattctctgccttcgaaacagcgtttgggattggttgataacacttgttccctctgtcatgtggcttcagaatctgttcttcatctgtttggttcctgcagtgttgttcgagcggcttggtttcagagtcgatggggcattcgattggagatttttaatgggataccatcatggattttggagattggtggtctcaagtgagggatgaggaccttcaactgtttgctgcttgtctctgtgaaacggtctggcattggaggaataaggtaatttttaaaggttgcaccttctctttaatgggattgattaaggacattcgaaacagagttaaggagatggagttgagagatgttcctctggaagtggctgattgggttgatctccatgtcccggttgtggagaacctggatgacatgcaatgctttcactgtgatgcttctactcttgatgatgctgctggtgtggcggttgtggaagttgctgaaccgaatgtgggtgattcctaggtgacttctgaatttcatacggtctctgggattcttgaaagggaattattggccattcttctagctttgaaagtggctcgagagcggggtgtaaggaagatcaaaatcctatcagattccaaggtggcaattatggctttgaacaatggctgtttgccttatgcttggggcacttatcctgtttttgaatcttgtctatgtgtttgtaagtgttttgatcttgttgtttttgctcattgccctcggtctttgaacggtgtggctgatgcggttgcgagctgggcgagatgtgcaaagtcccgcactttgggtctgctcaaagatattgccccttcggtagctttgagtttgtactagtttcttttggttttcaataaagttgctccttatcgaaaaaaaaaaaatctccatttactcagtaaaacttaaat

SEQ ID NO: 346911 - DNA, 776 bp, Cannabis indica
aaaaggatcgaccgatcaaattaaaattttttcttaaaggtattattgtggaaaaatggtgaagtggcgaaagtaacaaaatgaaggagaacggctggcttttataggccagaacgggtgcaaggcagctgtgatcaggtgccatcatacggtgggaatctcaatcgattcgcattatgcagatccaacagttgggataaatgctcatcagggcagctaaaaatgtttgagtatttgtctgacaccgattaaacgcgccggatcattaatgggcgggaagcgaatcgttgcctgcaaaaagcaataaattttaatgataactatcataaatgcagcccacgcgcctgaggcacgtgccaggaaatcgatgagtcaaccggaggcaccaaacaaggcttaggggataaatgtttccctctattttgcccaaaataagtggaccaatataaagacgacacggggatctgggaggctctgctcctaaagaaatcaactaagtctttggaattaggagtgtcgctgagaagataactcccggagaacatatgagaaggatccatgtactcccggaggccaaggccatgctaaggcacctccgggaggtactggactcaatttgaacagtcacctcgcatttaatgccgcataggagaaaacgtattggaactgccaaaagcataatgactcacggcgtaacccctcttttgtagctattacactgtgattaataaggctagtgatgttgggttttatgccctaaataaaacttcatttca

SEQ ID NO: 346912 - DNA, 911 bp, Cannabis indica
ttttttttgtacagccctagtttacataaatatagtgaggaaacttaataaggaaaaaatatatttaaaataaaaatttaacatatatgagatatatcactttgaattaccataaaaatattaaaattctcttcatatttttgttttaaaaataataaacaaatgaaactacatctacagtgatcgctagagttgttactggggccagaaagtcaccggagtttactgtcggtgccgaaaaattcgctggagtagttgccaggtcagaaaagtcactggatttgctgtcgatgccgaaaaaattgttagaattggcattgtgccgaaaaataagaaactgatttcttggtgatttttcggcgacaatgccaatttcgataatttttttggagtttgctgtcggtgccataaaagtcgccgaagtagctgtcggtgtggataaagttgttggagttgctaccggcgttggaaaattcgtcggaattagtattgtcaccgaaaaaatcaccaagaaacaattttttggtgattttttcagaaatttttctgatgactgccaattctgaagacttttccacaccagtgacatataaaactttcttaaaaagcaaatgaaaacattaaatataggttttgaaaacctaatctacatatatatggcatatcaaatacaataaaaatacctaaaaataaagaaatgccatataaattactcaaatttaaaagtacatatttaagtaaacaacttttaaaatcgcattgtgaaattttttccctctacaattttatgttgaactgtaataatactgaagaatattattgtatttcacaaaaaaaaaacgagagagagaacaatataaactattatttattttttttttgaaaatgaacatcttattaagcaaccacac

SEQ ID NO: 346913 - DNA, 600 bp, Cannabis indica
cggaccctcttaaccctaggttctgttatactttctagaagttaatccaactctggaaatagggaaacacccaaccacgacacagaatggacgaaaattgagaaaatgaaaggcctggggaaccctgccaaaaccggccaaccagttacccggtttgcaccagttcgcccaagaaatttcatttcttcctcaatcctccaccaaatgctaccaaaccttctagagtacctaattagggtatacacgacatatttcagccaataaaccaaagaaaaagtcactgaatcaaacatgccattagagatcaaagttaaggtttctgtgctcaaacttgcacaaaacctaaatcagacatcaaaaccagctactagaatctaaaaccaactcaaactaagcctagaatttgaattgcatcaacacctaaccctaacagcccccaattcataatttcacaacatgaaactaaagtaaaagcttaaaaacacacagctaaaggttttaggtttaccttagctacaagaacacttaaatcctttgcttaacttcagaaaattgttgcgaaaattattaaatactacgcaagtgcacgcaatcaagtag

SEQ ID NO: 346914 - DNA, 629 bp, Cannabis indica
cttattttcataaataagagcataagaagagtatttttcaaaagaaattgttataagcagattggaatagagtatgttaggaaaaaaaaaggaatttagttgttatattagtatttctaacgagagtgtatgtttcaggtttaataaattagacatatataactattggtacgttcttaagtttgattttttttaagtgttaatggatagataattttaagctctactcttttattagaaataattaagttgaattttggttaagggtgaaatctaatcattaaggttataatagaagaacagattgtgacagtcagtagtcccgtgattcgtaagggaatataccgggtaagctgtgcaatcccacaccgcttggggaaggtcaagtgtgatgattctgaggctgtgtaggtatgggactacacagttgaagagggcttaaatggattgattggtactaccagtagccagagtagcgtactcgtgtataagagtcattcattctgtgggtgtaagggcccaatggaggcttgaagcgggggcgttactaatggtatatgattaagtgagtaaaagaaaaatgtatatgagaattggattaagcgattttgttctcgagttattcttag

SEQ ID NO: 346915 - DNA, 634 bp, Cannabis indica
tattgggtaaaattttgtttgattaacttttttttgtatagataaaattctccctatgccactttgtatatatatttgtgcacatatattatgtcccttttttgtggcaatagtttgtctatctcaattttttaaaagttgctttgggatagtatgtaagtaagggcggcacaaatattttgggagctttgtgcaaaattttaaaattagactttttaaaaaaaaaaaattgtgtacattaaaattacaattctattactagtttttttttttttaagatttgtacaaaaaaaatttaattatatattttttatttatgtatatataataggaaaaaagaaacaaaaataggctttttcttccaaaaaataaatgagaaacttacaaaaatactgtttttttatcaaatattttcaaaaatatcgggacacggcaaactttacatttttactgtccaagcccatttttatttcttttatactgtccaggcccaatatatttagttttatactgtaaacagtaacaaaacacaaacaacacctctccttcgtggttggggacgaacaaatcaacaccagaattatagaaacaccaggaaaaaaaccataaaatctggcaaagagaaaaaattact

SEQ ID NO: 346916 - DNA, 1869 bp, Cannabis indica
caagcaaacaacatttcactcataaaacaaaagagttaaaattccaaacttacttcaatccaaccaacatgcatcaaaacctgttctaaaccactcaattaaacatactttaactacagaagtcataacccaatcacaacaacaagaacagtaagcaaaacatcaaaacatgcataattcactctctttaaaaacaagaaattaaaagaaagttgctagagatcatacccaaaacttgagaccaccactttccttaaaagaattagctgaatttccacagaaaaaaccccaaaacccagctgccctaggatttcaagagagagagagagacagtgaagagagaaagctttttcccaatttttcttatttttgaaaattaaatggaatgaagtaaataatggcttaacttgaattaatatcagctaataatcacaaaaattagatttaaaacccaatattaaatccccactagaagacaaaatacaaatgggcaaaatgaccattttgccctcacacactaaaatggcataaaaagggtactaagagtattttggaaaattttaaattcccgaccaatcccgacattcccaatgtctaaccaaaccgccccgctatacgaaaaatactaaattgtgattctactgagccatacaccacgttccatgttgctgggcaccgaaaatgcaaaattataaaatttcactatatgacataaaaatgcattctgaattcaaataaattaacataaataattatttaaatatcaataaataattttcataattgaacactgattatctgctaatttccaaattttaaactaagcggtctttacagctagcctgctccctacatgggtctggtcagctagggaaaggcctgcatggttctccatgcaattccacacatggaatgcatagtttgggctgcgaattgggccctgaaagctcaatagaatagctgaataatatctagattcaagggaattttagtcttttgtaattaattaatttaatatgcaaatatcctaggatttcagatgtaaattagggttttaggctttctatataaaggccttaactctaacctaaaaagtctctaagcctgatactagcctccaagctctaagcctaagtttgataactatcctcttcctcactctctctcacacgcctatactagcactctcatcacttcaaatttgccatgattcctactgtgtatccttaagggtgctatatcagatcccacctatagtgatctaaatagtattaactctcgatattaatacaactaaaaggggagtaggtcattacccgctatgaaagggggtcgaacctctataataaatctttgtgttctttaatttattattctatttgtgtaacatgtagcaagcattagatctatatgatcccgctgtcggttgatcacttttcgaggtcaacacacaacaacccataaatatatatatggaggaggttccaatagttacattaaatatttaactaccatggttatatttttttagccattagattattattgaatagttgtgattaatttgaaaattaaataaaattaaataataattaacttataatctaatagtcacctaataatttatttccttataaaattttaatgagaattaattatattttaaaactaaattaattataattattaattagtttttcttaatttattatttaataagaatcttttagcaactttttttgtccttagattattaaaatttttaaagcaactctttataatttaaaattatacacatataatttcataattaaaattttattatacttataactttatgttcattagtatatcatgaaggaaagaaaa

SEQ ID NO: 346917 - DNA, 792 bp, Cannabis indica
gatatgtatgttggcttcgtactatccgacagtatcacatcggtacggctagagtatgactagcgtaccgagtatgggctgatattatggtcggtagtaccgtactatttgacagtatcacatcggtgtgatcagagtatgactgacataccgagtataggctgatatagtaacacattggtacggctagagtatgactagcgtatcgagtataggcttttactatgtcaaaagaaccgtcgtacgaacgttcgagactcagtaaggtgtgggacatgggtattagggttgtggtcaagggtatgggcgtctgatcataacccaggatttatgtatgttatataatttatgcttttcttactgagtctgtcgactcacagtgctatgtttatgtgtaggtaaaggcaaggctaaggccgaggaaccgtgaggacgagtagatgaaggttctacatgtcggggcggttaggcctggagcgtacgatccgcgggacattagggctttggtaattagtcgctgggcgacaaatattttgtactgaatggcaaacttttgtaaagtgttttgtaaatgggatcccgaagtatattgtatgctatattataaatgtttaattaaataagcaaaatttcaattaatcacgattttcataaacctcgttgattagcaacgagctgcacaatacgttcaaaatcacgttaacacgcctatgctagttagggtgttacaatttggtatcagagccgccaagttgtatttcgaatatcgtcacgacatgtacaatcatcatc

SEQ ID NO: 346918 - DNA, 536 bp, Cannabis indica
gacttcatcaccgaatgtaatgaagccgaagcaaccgcgaacataccggaaccatcggtcccagcatggaaggtatttgtggacggagcctccaacgagaatggatccggagcgggggctgcaatgatatctccgagtggaattcgactccaggcagccttacgattcgacttttcggcttcgaacaatgaggccgaatacgaagccttgatagcagggctgagattagcaaagaccataggggctaaaagagtagaagtctacagtgactccgaactggtagtgaaccaggtgtctggagaataccagacgtgcagagaaagaatggccgcgaatgtagcaatagtccgggaactgctccacgtgttcacagactataaagtagaaagaatccccagagaaaagaacgctcatgcagactgcctggctaaattagcctcagacagtgagatcgagaaactgggggtagtacccgtggaacacttggcagagtcaagcatcaaaataaaagaggccataacaacggttggacaaga

SEQ ID NO: 346919 - DNA, 628 bp, Cannabis indica
tataaatatatttcaaaacttagatcaaatgaatatttcattcttataaaatatagtctaaaacacaattatacatttcttatacatacaattatttttccttattcctttgaatttattattatttttttatatttattgttagagacataaaacaacaataatttattttattttattgttaattatgtgaaaaaaaatatttttttagtaaatatgaaataatttaatattaaaagtaacaaatctaaaataactgatctaatctgtacttttgtggatgagattgaatttgagttattatgcagattggattagatttgagttattatgtgaatcgggtttgttgcggtttgaaattctttgcagtgcggtcgctgtttgaattttttctaaatcgcgcggtgcactgcgatttgcggttttgaattgttaatatgcggtttaaaccgcacattataaaaatactaatttttatatttatttaggttcaatacatgaatgttcaactcaaaaactcactaattattatattgttgaaattttatttttttctatatttatttttaaggccttatggtatttttgtacaagtgttgctcaaactttgttatatttgtgatagttt

SEQ ID NO: 346920 - DNA, 783 bp, Cannabis indica
gtaatgattattacatgaattgagtaataatttgtgttaataatgatttgtttaggaagttaataacatgtgaatttgacttgagttttagtaatgaggtcaatatatattggggtgtgatattatcatatagttcttaattaatgttaatattgattttttttattattattattaaaaaagagtatgaatattcatgtttttttattttaaaaaaagtatgaatattgatgtttaagcatacttttttttggcttggttttaagattttgagatttatgcttgaataattgaataattgttgtggattaagcatgatttgttgtgtgatgttaatgtgagtaatttgcattctgtttctgtttaggcatagaaactacatgtaatataaagtttggttattttgatgcatttttgggtacttaaacaagatatttatggctttttttttcaaatttagtgttgtgaccctgttctagggtgtcgcggctcgtatagatttgagctaaaaatatgctccatgttcttttgggtgcgttggagccctcataggtggtagcgctgcgattctgattcttttcattcattcaaatttttgtaaaatttattctagctataatttttatttctaactccgatttagacatattatatactgttagtgaaaaactttatacagttagtctcatttattatccttaattatatgtaactatgtatatgattggaagtacttatttttgttatactcaaaattgtgtatcatgattaatgttcgcttga

SEQ ID NO: 346921 - DNA, 1308 bp, Cannabis indica
aatttttctacactagcttggtcatttgatcgacttatctcctcagggagatgcgttgctccttcaaggaatcattgagactagaaatatctacctcaaacgatgttttttttggcttcgaactgagctcgtcgttgttgtatggctagttctgctgcaataatctctgcttcatctacctaaaaaattttaaaattctttgtcttgttagtgacagatatggacaaactatctatagctgccaaattatcctcattatgacgaagaaggtccatgataagaggttcatcaagactaagggcattctcaacagcttgagcagaagcgagagacttttcttgagccttgagcaaatcattgacagagtcaatgaaccatgcaacctctgctaagccacatttataatgcccacaaagggtactcaacacgtaaaattgcataaccacgtcagcacgatgttttgaaatgtctactgtggtcaaaggagaagataacaaatgaagaatgtctttcatgcattcaatcacaaaccttttggtatgctcatttaagtcggagttggtgattgctaaagctaacactgtcaacactgggtctggtcaaggaatgagcaaatctgagggaacaactgatgatggaacacccgtttctactgagacaatcgattctggtagaatggttggctctacaagcaatgcctcactgtcaaatcctttgttaacataatcatcagacccatcacagtcgataagtttttcatccctagggctagaagctccaaagcaagtataagatggtggcatctctcaactctgaataagtgggaaggagacatcttcaatacgacaagactcatcatgttttgcacgtttcctttgtttgaaatgtgggtttaaggaatggacattttctaatccaatgtccgactcaatatcagcatagttggtgccagtaaattcattatgttgaggaggacatctcacaaaagcttctgcaaggttggagtaaagtaaacgaatatctttgattacatacttcgactcattttctttgaatggttgcttggacaatgttgaatgaatggccttcacagacctccctaaatatggaaggcaacttctcacccaccaacgacagtaccaccatgtgcattgacccatacaggtagtcctaggaatgtgaaagtagataccaatatttctccttaatattaaaacccaagctttagcgatttcgcttattccacacggcctcctcctagggatactcaaacaaaatttatctaagggcacaccttgatcaaaacca

SEQ ID NO: 346922 - DNA, 867 bp, Cannabis indica
aacaatataaaactaaagaatagaacaaaacaagaaaagaagaacaaacacccaaagtagatatgaggatcaccaaaagcttgaacaagctggtttctacacctttgtctaggactttgtgaaaatacttctaggaattatcaagccttagaactctctagctttgtatttgaaagatagaagagaagagtgtgtctcaaatggtgaaccaagatctctatttacagtgtttaggatgacacactttgaaattcaaatattctacacccaatggttgttaccatctcttaattgggtgtaaataagattaaatgggtgatttagaagttatgcgagttgttaaaaaatatccccatagtgaataacgctcaagaattaaagctgaaaaaacagtaactagctactagtttctaaatttttcagcttttgcaaataactctccaaaccatttcaaaccattcccactttattttatatcacttatacacattataaatgataaaattcaatccccaacaactatatttgaatttcaaaaaattaagttgtgtgaccactctttacacacttaattggtgatcatgtggaagttacaaaatatgagtaactccacctcttatgttacaactattacatatatgtaactcccaatcatattatattgtgattattacatgtatataacttccaatcatattatattatgattattacatgattataactctcaatcatattatatattatattcataataatatatataatatataacaattttaatcttaaatattatattatttgataaatcatataacattttccgactagattaaaatttgtgatacctcattgtaacactttatt

SEQ ID NO: 346923 - DNA, 940 bp, Cannabis indica
aagaaacttgatgaggacttttgtcaagttcttttcttggaaattttcaaaaaaaatcaacatcaacattcctttcattgatgcattagagcagatgcctaataatgttaagcttacgaaggaggtgttgacaaagaagaagaaatttggggattatgatactgtgagcttaattgaggaatgtagggccataattcagaagaagctgcctcaaaagcttaaagatctaggtagcttttcaattgatccctgtgagattggtggtttaaaatttgagaagtctttatgtgatcttggggctagtataaatttaatgccactttcggtattcaaaactttgggtattggtgaagtaaagcccacaacaatttcgttacaattggcggatcgatcattcacttatccaaggggaataatagaagatgctctaattaaagtgggtaagttagtgtttccaactgattttgtggtactagacatgcaagaagacaaggatatgccattgatccttgggcgccctttcttagcagctggtggtgcacttatagatgttcgaggatgccacttaaccttgagtgctaatgatgaagaaatcaagtttgatatttataattcttctaatcaagccgatattgagaatacatgcaatatatggttgagtcttgtaatttcaacgaagataatcgagagactaatcataaagaaaagacaaagaagccttgaaataaaaagaaaccaaaggaggagttttcaataggtcaacgagtgttggtgattcattcaaaattcaaatctttgacaagtaacgttacctcaagatggaaaaatccttttaaagccaaagagttacttccttgtggctttgtaagtattaaaagtgagaaatgtgagattctaaaggttcacaagcgtaaactaaaggcatgcactgatgagctcc

SEQ ID NO: 346924 - DNA, 716 bp, Cannabis indica
gatatgttgaagttagtagaaaacgcagaaaagttcttcgaatatccgtggggccttctttcttatcagaagttgttgtcatccacagccaaaagtatgactgacctgaggaagaactacattgataaatctactaaggataagaagaaagggaagaaggagaaaaaaattactcaacctgaggcgaagtacaatgtctacggatatgcaccggcgctacaatattgggcctttgaggtgatgcaggatttggggaagaagtacgggcagtgcagagggactagaaattggagcacccccaacacggttacgaaacatgatgtgaagcaacctgatgttgctacactatttgagaaaagggtatgtcaatctgactttctttgttgttttggtatttgttttgctaaactttgattttcaacgattttatgcgatttttgtgcgatttaaacatgtttttcatttgcctctgttttattttacgagtttatgcgattttcgtgcgatttttgtgcgattttactatgttgtatacagatttgctattttctgcgattttatgcgacatatatgcgatgtttgtgcgactttaccatgttgtataccaatctgttattttctgcgattttatgcgacgtatatgcgatgtttgtgcgataattaatatttttttttgtttttttttcagatggttattcttcaaattttgtatcctc

SEQ ID NO: 346925 - DNA, 1141 bp, Cannabis indica
cagtaaaaaagtattttttttaaataaaatttagattttttatagatttggatgcgaattcgtgtatattcttcagattagttgaatttttgtagattctaaataatgtgtatttttcagtatgttcttcagtggtgtctgtgtgttttaatagtgttatcgataaattatcgataggttatcgatataatgtcgaccataattgaacatagtttgaacattagaatttaatatttttttactgtatatcgataggttattgacatcttatctttggtttatcgacattttgattaggatatatttgtaagaatttattgggtatatcgatgttttgtcgatgaaatatcaatatgttgtcgatagtatgtctttgtttgagcagaactggtctttttaattttttaaagaatatattgatagtatgtcgataggatatcgatagtttttcggcaatccaagaatatattatggttgtcgatataatgtcgacaaactgtcgacatgtttttgacaccctatgtgcatttattatttgatatactttgtcgatatgttgtcgacaggttatcgatatgttgtcaacaatttgatattattgtattttgttatttttaagtgtgaatatatcgacataatgtcgacaatttctgtgagggcatttgtaatattttttgttatatatattttcaaatggctccacgactcatagttctagcagccgagcattttacttgtcgcgtgacatatagaggtactggtgcttttgcaaaactcaaatctcgatttgaggagtacaatttgaataacacgacgaaagaaagtgattttggaaacttttggaatgtcgtatccctaacattctcctcgatgttatttcacgaagttatgttgcacaagatgaaggttgatgttgaggaagatttgcacatgcatttttacattggtcgaaaggagctcagatttggagtagttgagtttgcattcattataggcctgaacttctccttgggtccaacaaaagaggagaaggctgcgcaggttgccgactcggggtcagaccgattgaccaacaaatatttcaatcaatttgatagtgtgaagacagaagcactccaagataggttcacaaactgtcaga

SEQ ID NO: 346926 - DNA, 991 bp, Cannabis indica
ttgttgtccttgggaccactgtccttgattcttcttggtcatctttcgatcatttcctcttcctctgcttgggttcttcttctcattcccttctacatgagcctcagttcgcaaggctgctgtcacacactcagtcaggttgttaaaggtcaaaggggctataggaccacgtatcgcaggcctcaaacgacgcatgaactgttcaatcaccaagggttgatcaacaacaccaggatatgcataagaggatagctctacaaacttcatgtaaaattcattcacagtcatatccccttgtcttagaccatcaaatactccaataagagccctcctgtgagatggactaaaatattgttccctgaaaacttcctcaaattctcgccaagtcatcccatcagtttccattgtcctggacaaggtctcccaccaatctgctgcaccaccctctaacttggacacagcgaaagtaacttggtattcctcaggtgttcctattgtgttgaaatttttctttatttgcctcaaccacctttcagctaccatgggatcttgtccaccctcaaattcaggcacttggatccgatgaaagacttggaaatgatgactctgtcgagcggcaggatccatctgttgagcgggaatagctcttaaggcttcgagaagggcgttcatagggaattcagcttgtggaggttggacattagcttgaggggcgtcttctccaaccgttctccttgtcttctttccttttggaggcattttcttaggtctgagaaccaaaagctaatcagttagtgaggattggatgctaataatataaatatgccttatacatataaataccaagatatttattactattattatttaaaataaatctaaactatttggtgacacactccgaggtaattaaacccggtgctctgataccatttttctgtcacgacccgagccctaggctgtggcagatgtgtaatatccataacttggg

SEQ ID NO: 346927 - DNA, 789 bp, Cannabis indica
ggtcgggtgagacccaattttgtttaaggtacggggcggggcgggtcagaagcggggcggggcagacccgccccatttgccattcctacttggagcaaggtttgccaacccaaatcggaaggaggtgctggttttacaaaaacagttgaatggaatgttgctgccttgtttaagtacgtgtgggccatcaccaacaaagaagacaacatttgggtccgttggattcacaatgtttacctcaaagaggaagagtggtggagctacaaagctccaatccaagggacctggtattggaaacaaattgttgctgcaaaagatcaactcaaagaactaattgatactcaacaattcacatccaataggtacactatctctcttggttataagttgccctgcccatcacaaaataaagtcgcttggagtaatgaagtgtgggggagatttaatatccccaaacactgcttcatcacttggctttcacttcaaaactgattgaagaccaaagatagattgcataaacttcatatagcatctaatgcaaactgcaacttatgcactcaccatgaagaatcggtcaagcatttgtttttcaattgccagttagctcaggagtgtttgaagcagattaaaagctggctgttctggggtactctctccaatgacctcgacaagctccttcggtggataaaccgtgcaaagatcagcaccttcaagaagagagttcttgcagcggctgtagcagggttagtgtactcaatatggcatactagaaatgacaaaatatggaat

SEQ ID NO: 346928 - DNA, 605 bp, Cannabis indica
tacatactaaaaataaaaacaaaaataaaaatacagtacaatcggtcaaaacaagtctgctgtattgagctttctgaaagaggaaatgaggaagcgtatacaaagttagaatggtaaactcttgtcacgtgctggtaaggaggccctagttcgtaatgtgactcaaagtcttccaacttttgctatgagcatttttcttttgtctgtggaacgtgtcatgatttggaataactaatggctaattttggaggaagtcgtctccgaattcccgtcaaggaatttcatggatgagttgggagaggatgacgcatagtaaggaggttggaagtttggggtttcgctctcttcatgattttaatttggctatgttgggtaaacaagcttgaaggttcctgaccaagcctgattcgttagtttctagagtgtacaaagctcggtactttaacatgagaactttctttcagtagaacttggttataatcagggtcggccctaggcataaggcgggctaggcccgtgcctagggcccacacttttcgggggcccaaaataaaaaaataaaaaaattaattaagcttttatttaagtaaaatttaagtgtatta

SEQ ID NO: 346929 - DNA, 1023 bp, Cannabis indica
tcacagtcagagtcggagtcatcgcctttttgtctccgagagacccgagcaatgtctttacgtagtatggcgagctcagccatgattccttcatttaacgttcccgtggagaccgcgggcgcgtgtttcttctggtctaggtgatcccgaacgtcaccgtgttttccgttaatctgaagcctcagatcgacgggagggtatttttggcccttccttcctctccctccgggttcctggtgcacagaaatgctctttcggtcctctcgatcctgaggggcaagactccctttttggagcttgcccctatgcggacctttccctttcgggaaatctgagcggacctttcgcggatcctgcacctttttctttttcccaagagtggaagtagggtttttctgctggttttcttcagagggataccttatagggctaggttccctagacttctgcttttgggcacttggcgaggactctcctggtgtttctccatgtccgacagggggatggctttatgatgcacgtggattcctgccgcctccatgtctttctgcatggcaagcatcacctcttgcatctttttgttttgttctttttgggctgtgatttcagcttcgtgatcagtagccttttgtctcaagagtactatttctgtgtagctaccttcgtcataggcgtcccactcatcaaagtttccttcgtattcatcgtcgtgggttccttctccttcctcagagcccacgttcactcttgaggccacctcctcatcgtcgggatcttgggcgtctttaggaggacggggttgacgctaggtgtgagcaatggtcggtttggtcggttttttacacacaaaaaatccaaaattcgatttttcagtttttatggttctaatccgaaaaccgaccgacaaatataaaaatataaaagaaccgaccgttttaatccacggtttggtcggtttaaaccgaccaaaccgaacttcattttttttaaaaaaaataagttttaatgaaagcaccaaaatgt

SEQ ID NO: 346930 - DNA, 920 bp, Cannabis indica
taactgtggagttctttcgtgtgggactaacccaaaaaaagattcaccttgttgatataggtagtaccaatcaatctatttaagctctcttcaactgtgcagtcccatacctacacagtctcagaaccatcccacttgaccttccccaggtgatgtgggattgcaccgcttaccccgtattatttccccttacggatcacgggactactgactatcacactcagcctcatcttctgaattcaagggctcatgagcatactatttggcccttgcacctcccttcaacttagcttcacgcttaagttgaatgtgttcatcctcctgatgagctctctcagcccctccaacaccaaatttcctcttcctctccttcactgtctttcgaatgaactccttcggatagagcctatacttcacaaagttgtccttggaggtcatctggatgatatttcagtcatccctcggcagttgatcaagcctttgagctctatctctaaaagcaagagtgatgggagggcggtgatatgtggggatctgctggaaccaagtatgggtggtgcccatgccttccacaatgaaataatcatcaacaaaaaggccaatcttcctaatggccttatccccggtccctatcaaccacttgaaatctggttgagagacatagaaggaaatagaagtaccctcacctgccttgtttaggggtggacttcaaataaaaaagcctgctaacctcgtggggagaaggcatatctcacttctgggaggcatagagaacgaagagggcggacagatacttaatgcccttgggagtaaatttggtcggacagaggcaggagaagtctgccacattcctaaactacaggtgcaaaggcaggaaagccccttgctgggcatgagcacccgaccaggcgcacattccc

SEQ ID NO: 346931 - DNA, 552 bp, Cannabis indica
caagtgcctcaagagaataaccgtcaaaagcgtgcacggggaaatgtgtctcgaggcattaactaactcagagcattaattcgtcaaaaatcaaagggatgcctggtcagactcacatcgaatcacgaacagacgcactcaacacatgtcacccattcaaatgtagaggcaggtcggatgaagtctacatgcaactttagaagtcctgttcatactttgggcgcaaatgttatcccaatttttacactctgacgtggcatcacatgctggtgacatgttgaattgattctccatacctgtccgaaggagatgttttgatcagaatactgcatatacctacacgaacaaggtccttctagccgagtaatggacaattcgaacagcatatcaatacttagcaatttcagcatttgcatcgtgaagaacaggagcaatccctataaatctgggatcgtatcacagagatatggcaagcgacacaaatcccacaatctgtgcattctatatatgtaatatgtattcttaccaattatagatattgtaagtaaaagg

SEQ ID NO: 346932 - DNA, 823 bp, Cannabis indica
aaaacccagaaaatatagtccccactcaaaaacagaaaacgaagcatggtgaaaaattcaaaaaaaactaaccttttactttgatgaatctgtttccacgaatcgcccttgacagcaatgtagaatcaaggagaatccacgaataaaggcgaaaatctgggcaatttacgaagatttttcgtgctgttttctctgagagtgaaagaacaaggaagttaagggagttgaaggaaagtgagggaaaatggggatttttggttcgaatcagggggtttaaatacccaaatccctcattcattgggatcatgacacgtggcagttggaatgcctagagtcgcctaatccaacggccagagatgaccacgcctacacagaaaccgaagagttttgtgacgtggcaccataaatgcaatcaaaataatgattatagccgtcatttttcgaaaccctcgaagggacaaccaaaggtcacctccttgtgacaacctttcacctgtctctcgaatgtagtttcccttgtgaccgcacctgtcacgtcgcgaaactaggggcatgtgttatagtgagatttctctcacctagaaactcgagaccagacccccactagaaaggacacgtatactcagtttttccacagaaagctgagatgtccctgagggactcctcgaagttttaaacctcgcttaaggtataaccagcgagaggtggcgagcatgaccgaagtctaatcgcatccaagacaagagagtagatcgcatatatcgaatatatgcgatcatcctccccttgtcctcgtatcaaccaggagaacgattctctgtaa

SEQ ID NO: 346933 - DNA, 718 bp, Cannabis indica
aacatggaagtaatataatgaattagcaattatcagaataaattcttgatcttgatttatgtttcagtttatatttaccgttgtattagaaatcgataccaataaagttctttgacaatgtatcacactaacttaatagagtgggagaattttaaaattctttacccatcttcttttggttgacacttgtgataggaacttaagaacactactgagaaattcaagctccatcagggaagatatataactttgtaaattcgaaattaccagaaagttattcaactgaagagaattctatactgtattatctctatttcattctttaaaagaatgagagatatgtcttctgtttatccagatgtccttaataagcaataaggattttagtaacccttgatgagtaatgcatatagtaaaggatgttgtgtaatgttttatgaacatggttctagagatttgggttgagtcaaatatattacacttgttctaaagatcaagacaatctattgattgaaatgcacaacttgttttatgttagtgcaagtgggagtttgttgggattttatgccctaaataaaacccattacaatctaatctgatttgttatcaataaaagattagaagtcatttatatttacatgttgcttacatgtttatggtttaatatatgtatatacaaaatctgttaagtccaaaacatgtagtcattcacaattat

SEQ ID NO: 346934 - DNA, 515 bp, Cannabis indica
aaccttccaaacaatgaagaaaaatgttcatttcaagaagcaaaaaggagtcgcaatccatcaaaatagtgattgtttacaagctttttttgaactagatgagttaacagaggaggaacaaaaaatgtttcacagcgacgatgttcctacaccttccccgcaggtctcagtatttgatagacttgaaccaagcacatccaccccacgagtgtcagcattcgaaaggcttgttttcccaagtgctccatagttaaagggaactaaaaagcaaaaacagtggatgccaaaacagaagaaatctttgagaattactattcgggggcatgaaacacaagaagatggagaaaattttgctcaagtcaattacctctctttcaaagaaagcttgacagtagaagatgaaggctcaagctcaaacccttcggaagattttatagacatctttcaaccaacacctcaggaattcgaagatggaggacaagcaactgtggatgacttagtagagatcaatctcg

SEQ ID NO: 346935 - DNA, 716 bp, Cannabis indica
acaaggggcaaaccattgtcttgttcttaagaccgtttgcctaaataaaatcaaaataaataaaaccaagcctacatagtaggagacttggaaagttcttcttctgttgctgccttgtcatcttcttcctccttcttagtcttcttgtagaagccaaggatttcctcctccgattctcccaagaaactcgtgtccatccctggatttgccatccaggcttgatagatagtacgaaggccaacaacgttgcatcattcaatgatttcggcctctttcgcatcaagtgttaccttggctgcatcaagttcctctttggagtttttggcatgcatcggtcttatcctttgcctccttcttggtagcttcaagctcggcatcgaggttcctcttcaccttctcgaattctttggtaaacgagtattttatagtttggcatcagtccattgcttggttataacctcgagctggcctatgaggttctagaccatgccctctagatactttttcttttccgagcctcgctgctgggtgacaaaggagaggaaagaagtctagaaaccaacaacaaagatgcatgagtattttgaaagatgtaaaaaaaagaagtgagaaaataaggataaggaaaacttactgagaggctatgagacaaatgttggaaattattttaccaagatcttagatctactcacaagtatgttgattaataccctaaa

SEQ ID NO: 346936 - DNA, 706 bp, Cannabis indica
tacattggaatggtcattccttcctttttaaaatggaatagccattccaccaaaatagtggaaagagcattccattgaaatgtcattccaatactttaaaatgcaaccaaacaaaggaatggaatgaaaattgtttcatttccattccattccatttcattacctccaaccaaacgccttggtcataataaaaagtcttataaaggaaaggaattcaaagaatacaaatagttttccttatttttaatgtatgaaagaatacaattagtttgattgttacaaaattaatctaataaatatgcaagaaatacaaactatgaaagctatgaaagcctcaaatagtggttgcacatattaaaagtaattactattatatatgttatgtaagtattacatgtaaatttatatttatatgaaataaatggtgtaattattatttgataagttattacgtaagttacttatgaatagttgttatcctcttattattttttaatatagaaaatagaaaattataaggtgatgttactacttttttaaaaaaaaattgagaaatagttgtaaactaatttaggagatttaagagtgccgcatcaacacttcaaaactctactttatattaatatattgatattgattattattattgatagaaagagtaaaagatgataataattacaatttataattgtattaatatattatt

SEQ ID NO: 346937 - DNA, 1226 bp, Cannabis indica
caacctgcgtagtatgtttaagcagttggcaaatgacatattttaactctaactctattaatgtctatctatttaataattataattaattatcaaataaatttttcatttaacctatttattaattagaccttagaaagtcttttaattagcaaataaatcctaaattctttctttcttctcaaataagcccttgcttagtgaaaactcaagagcaagacatagtcttatttagaattctaaattattaattaaaactaattatttgattatacaagacaatattatcccaggcaatgtggggaccatgggcctatataaccaagctcttaatgagtagatctaaaatttactaagtaaattttttatcttattaatttctcctaactctactatagatatagaattgcactcctgattacatagaacggtctatatgttccaaatatatagatatgaactatccattattttaattcaaataaccaaagatcctctatagataatttacatcgagtaaggacaaatttaccgttctaccccttaatgtattttatccttacaatacttagcttcctataaataatatttttgtaaactaataaaattactgaaataagagtttttctatttatctctattaagccaagctcaaaggaaattatcatttcacttctatataaatataatatgctatagattccatatctatgattagtgctcccactcaattacactaccatgtttccaagatgtaagtatttggctgatccattgatcagctttaacgaacaagtcaatgaacataaataatacagttaaactagaacctaaccaactcaggattaagatatattgatctaagatcaactaagtgatattgacttagaaagatataatggtaagtttatgatatctttaccactgtcaatatcggtctagtctgatgtatactctgtatatccgatactagtatactttgctaataccctagaaaggaaattctacttattcgagtgtaagtaaactttatcgctgattatcatgtcagtgtaaattcagtgcactgagaaataatgagaataaagactttgaagcatataatcatgatcattttttactgtatagacaacactataatcatgaataactatacgttcaggatttaacagaatttacatatgaaacatataatcatgaaagtaatcatgtgaaccatgtaacat

SEQ ID NO: 346938 - DNA, 806 bp, Cannabis indica
atgagaagagaaatttaaaatcatagttggaaatttgaacgtaatatatgtagcgatttaaaaaaatttgtgcagctaagtataattttttttgtttgaagatttaatttcttttatttattgagaatggtcttaagtgtatatcttgattaaataggtgaggaagttttacatgatcatatctcaatgcatacacaaatagtaagatccaggtttactttgtactgatattgttattaaatgaaaaacacactctcacaaatagaaatttttctcttttttgttagtttttggtttcatattgtgggtgtaccacgaatagctccctctcgtttttcttatgtgaatattaaaaaaatgattacttacattttggtttttaagtttaataaaacaaaaaagtatttttggcataacaaccattaaaagttaattaattatgataaaagaaaatataattaaaaagttattttacaattttgtatacattattttaattaattacaaaatatgtgcaaaaaaacttattatcattttttcatacatttttatatataattaaaaaaaaaatcaatttcttttataatatatatatggtaataattattgattattatatatatggtaatattggctatgtttatttttatgtttacaattataataaaaacataccaataatataaaacattttatatatgtgtttactttattttttattaattaaacatactaatttaataaacaaaataataatattcacataagtttattatatcactctggtggcgtttggttggaggtaa

SEQ ID NO: 346939 - DNA, 880 bp, Cannabis indica
acaccaagctatctgttttcaacatgactctatcccacgaatgagttgcaatccaactcaatgcttctttaatgtctattacttagcaatttcgagttgaacacatccactcttccccttcttgaatgcttctaccatagcaccatgatgattctgagctacacaactcatgccaaaagataagactccaactagaaaaaactaaaagaaaaagactaaaaaaccatgtcaaaagacaagactaaagaatcatgccaaaagacaagactaatagaaaaactaaattagcttcaacacataaacacgattacaacattaaaattaattaaggaatgaactctttataattctaaccccataaaaacattaattagaattaattattattttcatttagtttgaatgagtaattagattttatattgttataagtaaaatatatatgtatatataaaaattaatattaaaatttaattttttttcttggattggatggatccaatctaatatatattggacctaaaatattggatggatccgatccaatccaaaaaatactaagtttaaaatattgaataaactcaaattaaaccaataaatatatattgttatatttaatctatataaaaaatacatcctacatccaatcaaattaattaatatttttatttagtttgaatgagagattatgtaacgccctaaagaattaggcacgctacccaaaatgcttatggaatcctaatcccctaattcgggattactaatcaaaaatagcgcagaatttaaacttttaaattaatcggaatgaaaataaaacttgtaatacttttaaacttttaaaccattaggatcccaaaaatatttacaaacttattacaag

SEQ ID NO: 346940 - DNA, 1148 bp, Cannabis indica
cataaaacccaacacatacatctcctcgtactccttacagatccatttgcatctcaaaatacttaaggtgtgatagcagatcttccttaccagtatactcttccaagttggcatcttcaacttgtggggcaattctaggatattgatcttgggggagaaaggggttccacgtgctcgatccaactcgagatcgttgttcctttgaccggccatgccttggaacatactctttagttcatctagctgtacctgcgcgactggactaacctgttcggcattttggccgatttgagtcacatcaacatctttctgagcgggattttgaacacgggtcccgggttgtacgatcgacatgtcaagctgatcgtctactcctctcctcatgtttagatcgtttctgagatcatgggtcgtccccaacctctcaaatacaaaaatgcctggctgtctcagtgattggttggtttggcttatgtgctgactggtaccgttagcctggttggaattgttaggtatgacttctcccgatgaattactagacaaggtctgcccacctaccacttggcccacaggtggaacctaaaaacggggatttggtggttgaccatatatagtctgagaggtattcattgctggatcttcgtctatttcacccaaggggatgacattcgcgggttactgcccgacagtctgataggcttttcgtatcaacacactggcttgccgactacgattgtcaatgactgcttgctgagcccttaacgcttccatctctttgtctctccattcgacaaacatgcacctctgctcctcaaacacgaggttcaccgcagcgcggagttcattctgatcatgatgcaaggtgttggtatgaccctgcatgagcccaagagtagcacagaggttttggatctcagtgtcatctctaatggtcgtttgaacattggtggcgggcagaacgactgtgctatgaatgccctggtcggttgctgaattggtattcccagtctcttgcacaccaggcgcaatctcatccacaggagtcctcacaccgtgacccgcagttgatggctgtccaggatttactgccggtggaacccttgtgtttcctaggttttgcagtgtaggatccaccacttgtggatttg

SEQ ID NO: 346941 - DNA, 607 bp, Cannabis indica
ttgtcacctaacttgccaaaaaaggactttacaatatctgtctgagttctaaatgcttagaagatgtagactaaatgtgtgataagttatgcaataagtgtaagggcaattgaatagtctgattagcgagccatctgggctcagggttagtggtggggaagagcatcctccaccccctcaggactgggaacaactgtttgctgccatgcaagagataattaggcagcaaggggagcagattcgagacctgagagagcaacaggctcgttctgcacctatagtagcacctgtgccataaaatatgggggatcgtatggagccaatatatcagcggttcaggaaacaaaacccacctatatttaagggcggcccagacccactgaaagtataacagtggatgagtatgattacttttatctttgactttatgcgggtcgaagataatgactgagtacgatacgctatctatatgttacagaatgatgcccgaatatggtgggagatttcttctcaaggtcataatatatatgacttgggatgcattcaaggcactattttaagagaagtattataatgaatccatccgtgctgctcaagctgaagagtt

SEQ ID NO: 346942 - DNA, 868 bp, Cannabis indica
aaaaaaaaaaaatagaattgtaaagtaaacaattaactaactaaactaactcaaggttgtgttagctaacatccactacgaaaaaatctatatttagttacaatcttatagtcataacataatttttttgtgactaaatgagatttttagtcacaacaaaaacttttagtcacaacaaaaagttatttctgactaatatatattatatacatacaagttgtcattaatttagtttcaatcacgataaatattatgattaaaaatacatttagtcacaactaattataatttttatgactaatacttttagccacgtactttttagtcacaatatagggataatgatttataattagcataattttttcacttttattcataagttttattgtggttaaaagtaagattttttgtagtgatcagtgagaatatttttttacaagtaattgtaacaaaagactattttaatataattttttgtgtctagattttttacattaaaattttacacgtagcaagtgtacttgcattagagcatctctaatgaaatgtaaaatagtagtgtagtgatatattttagcacttaaaaaaattagttcttgctaaatcttgtgtcaaatttgattaatgctgaaagttgtgccaaaattaacaatatataatattgttccaaatttaacacaaaattaatgcacatttttaattacaattttgtcattgatcattaataataaactttaatatacactttctagttgtaatattgtcattaattattttttaaaatatttaattttatttatgatcattaatgctagggtaaataccattttggaccttgtgttttgcaaaagttacagattggacc

SEQ ID NO: 346943 - DNA, 608 bp, Cannabis indica
tttaaaaacaagtccaaagttcaccaaaaattcacacaatggcctataatttatatttttcaacaagtatagctcatgtaggtcaagcatcaagagatttcctcatttatgcatataagtcatgtaaatatcatttatggaacgaatatgcataaataagtgagtaaagagatatatagtttcaatagctagcaaaccttatatttcatttaagttggtcatgcctaactttcttctaatggtactaaatctctcatcactaagagacttggtgaatatgtttgctaattggaattcggtactcacaaagtctagcataatatcacttctttaaatacggtctctaaggaaatggtgccttatatcaatatgcttggctctagaatgcaatattggattcttagagagattaatggcactagtattatcacactttatgggtgtaaattcaaaattaacatcaaaatccttaagagtttgtttcatccaaagtatttgtgcacaacaactacccgcggctatatattcggcttcggttgtggatagagctattgagttttgtttcttgctaaaccatgattctagggaatttcttagaaagtgacatg

SEQ ID NO: 346944 - DNA, 1024 bp, Cannabis indica
aaatatgttatgaataatgtaatagcatgtatgtacatgctcccttatttgtgttggcatgaaatgaaacaatagtaaaattgtatttttaatgatgctatatatataaatatatgaatgtctctttgatttggaacaatttaaaagtatgtatcctaactaggtatcaaaatactattcaatttattactttgtcttttagtgaatgggttcgttatggcataagaatatttgatgtacactttgtactactactactttaattcattcataaaacatattattattattattattatctcaattttaacaaaaaaaaaaaaaaaaaaaaaataactcaactacaaaacgaaaattttaactcaaatttgaccttataatattttatatgcattattagagattttattattgaatattgatccttgtcttgcttacgtatataaggagcctatatattcaatcaattgtgacatataataagtaaaaatttatagtatgatttaataattggcaagctatctagttgatcttcatgcatccaaaatataaatatgaatgaccgtttaagggtaaatattattttagttttgtattttatgaaaattattaatagaattctctattttgttaaatgataaaatatattatatattttttaattttttgtcaaaataaaacttaataataacctgatctagaagtgttatgacgaaacttattatattttttacatttgttagtgttagttatatattaaaacaaaaaaattgtcgaaagttgagctcaagatcctatttatatcaatttagaaagtacataatctattttattatataacagcacaaaaaatctaatctataacttttataaaatataaagtccaaaataatatattttacctataattaattaattaaacattatattataattgcgtaacacatatgattgacattgaccactatattatatactagctgattgttacgtgccaagccacgtagtgttagttttatttaat

SEQ ID NO: 346945 - DNA, 799 bp, Cannabis indica
atcaaatcatgaaaatgagatacatagctcgttgaagatactttgttaattgtgttagccacaagaagggaatctgtttcgatagagtagatagccaactggttagaaagagcccattttaaactgtaaataatggcattggcttccatctctttagtagaatattagccccttaaagatttcgagaaagttgcaattacatctctagcataatctctaacaatagctcctataccaatgattgatcccgccgcatcatacgcagcatcaacattaattttgtaagagcctgttgccggtggaagccatctaatttgaggtgaagtgctggtgttcatcgtgataggagtagcagaagtggagcatctggttttttcctttaaagccttcgaaggagtagcaggtgctttagcattcctaaattggtcgatgtaagcttcggcaaaagtacaaataataggagctggttttggtttagtgccatgaacttccttagttctttccgtccatatactccacatgaggcaaaggatttttttccagatcagaatcattatgagcctcaacgaaatatgagtagatatcatggccattaaggttgctgatatttggaatacacacccgaaaaagagttagcttccatacagcttcagctctagtgcatcaaaataaagcatgaccaactgattcccacccccttgcataaagagcattcatcagtatgagagattgtcctgtgcaatagattaacagccgtcagtattgcatcattaatgactctccaagcaaagattttaat

SEQ ID NO: 346946 - DNA, 740 bp, Cannabis indica
ttgaggcatatcgacaaataatacattaatgcatcaagtatacatgttaatctaaatctcaaaaacaatataactttccctaaatacgattctcaggtttattaaaatattactctcactcctgtaaaaacaaaaagaacaacacaaccatataaaatattataaactatcttgtatacatattcaacaaatacattactatacctcaatctatctaagtatacaatatacattatctaatacgatttacacaaaaaattaaatcggtataaacaatataccttactgtatactatatatatacacaaaattcgagtcagtttcataatgcaaacaaacactcaaaaaactaacctaataataaataacaaaccaaataacacttccaatacacatatattctaaactattatgtatacaatttaacaaacatacactcctagatctaatcactactacaaatatccccttttaagtccatcagagttggactagataaactttcccagtccattttttgttggacataatagtcagggacataaaaagggtatttttctagtccaacaatgttggactagaaaaacatttctagtccaactatactagacttgaaaatcaatcccacaacgcaaacccctttcaagtccaacaaagttggacatgaaacttgattgttggactagaaaaaatatttctagtccaacaatgttagacttgaaacttgttttttttttttt

SEQ ID NO: 346947 - DNA, 980 bp, Cannabis indica
ctctaactctcacacaaggcccaaaggagatgtgataactctatggtatagagttattttttatgctttaaagctgaaaatattgtgaggagagtagtgaaaaatgtgtttggttgcttaattttaagtagttttagtttaatttctagttaggaagctaacgtttgagtcttgtaaaaattattgtgttaagtgtgtttttttttaattaaatgttgcttatttgtgtgggaaagaagaattaatttgttaggaaaaaggaagtgatgcgaaggaagaagtggaactaaagctgaaaactcgacagaaatgctgaagcaatgctatagcattctgggcagtttgggaactaacgtggaaaaagtctaaaaaacgactttcacttatccacatcagcaaattcgtcccagtcactcaaaatgcaccaactggctgttgtggaaggaaagagacttaacctagtgggccaaagtggaaaaagattgggcttctattttaggtgtgaattttgtaccctagaaacccaacaactaaaagaggagaaaagaaagtacaccatcatcatcctccataacgtgagtagctgcaattttttgaaggagagtaattgcagaaagtacacagttgaagaaagaagagagggggaccaagctttttgtgtttgaattttcttttaccttctcttaatattgtgcttttcctttgtcttttctttgtgcttgtacttagaaattaaaagaaacttgttgactaaaaaaagggcagcagccatggttaaaccatttcagatttggatgttatttttttatttgaatatgagctaaactattaaggcttgagcggctatgaactcctatgttgggtatggttaattttaaagcttacttcagtatttttgcctttgttcattcaagtgagttctaatttttatttgattgttgcttcttggccattaataacaatttgctaagctagatctt

SEQ ID NO: 346948 - DNA, 515 bp, Cannabis indica
ggattcggatctggacccagagcttagacaaaacctatagtcggtgtctggatttgggaccgagcccaagacccgaaccctgacaaggaccagaacccacacctggacctgaacacagtcccaaacacaaaagttaacctgaacccgtaccctgtgaccctaaattggaaccaaaacaagaagttgaccgagactggaactaggacttggactttgaatcataactgaaattggacctagatccaaagagtaaccagtccaggacccggactccaaatcaaacgtagaccggaattaggagacggacccggatcccaacacaaacctatactcaagacccgaacccgaacctaaactcagacccaaacaaggaaccagactaggtacgcaggaccagggtcaggacctaaaaccgaaccccagtctcgatcctaaacccaaactcaaaaacgggaccaaggtttcagaaaacggagcttggaatagaccagtagtcggtgtctagatctgggact

SEQ ID NO: 346949 - DNA, 949 bp, Cannabis indica
gcttccaaaatgggactttaccatggaaatcagtttttgtattttggccataaatttgcacttggatgtccattttggacgttctatataccgttttaaagcttgtgacaaactctaccatatggaatataagttagagccgaaatatgtatttttctaagggtgttttcactttatagtttggtagaaaaatcctaggttattttcaggattagagaagtgttgtagagtaaatacttatccattttacattgtgacatagggcctccgttcagcatgtgaatttccattcaagttgactgacacacttgaataaggaaaggggataagactagcatagaatgtatatgtatatgtgtattatatgcatgttatttatatgattcatatgctatcaacactattatggtagttgtattgagagctttaatacaatatatgatgtttaagagtacaattcggtgttaccaacactagtacaattaggtacgtagtgcgtgtggtacaacactcagtggtactcaaggtatggcttaaaccctaccaactctagtacagtatcagtacatagtgcatgtggtacagaggtcgtacctttgtttagaatgttcttaatcatctgttaaaccttttggataggtgtatgggtgcttaaatacaagtcagtgatatattgtatgctataagcttttattattaagtttatcgactcacaattattacttgcatgtgtaggtaagggaaaggataaggctgagcaacaatgagctaacagctcgaggatgattgtacatggcaagatggtacgacctagagagttcagtctcaggacgacttaggcttatttttaagtcgatgtgcgacaagattgtaaggtttaatttgattgtgaaaataagtttaaaaatgagatcccgacctttttgtataattatatatttatagttat

SEQ ID NO: 346950 - DNA, 533 bp, Cannabis indica
cgagttccgctcgtgggcccagcagtagacgagcagaccttgtctggtaattcatcaggagaagtcatacctgatggttccaaccaaattaatggtgccattccacccgtcaaccaagcgaatcaatcgctaaggcaaccaggcacttatgtgttcgaaaggttgggagcaacccatgacctaaggaatgatctgagcagaaggaggggagtagacgaacataatattacgatgatcgtgcagcctggagtccgtactcaaattcctgctcaaaaagatgttgacataattcgaattgaccagaatgtcgagcaagttagccaagccgtacaggctcagcttgacgaactgaaaaatatgttccacggtatggctagacaaagaaataatgatcttaagctggaccgagcacgctgaactcctttctcaccagagatcaatctcctgccactgccccacaagttcaaaatgtcgacgtggaaaatgtacacgaggagagaatactcccctttcccatctcaagtactttgaaa

SEQ ID NO: 346951 - DNA, 929 bp, Cannabis indica
tttcagccatgaaggagatgtttcttcttcaaaagaaacgagggatttttctgagctttttcacaaaggctctcaatgaaagcaccaaactgttaacacgtattttcattaaccaaaatttgagcctaacagtgatataatttcacacagaaaaattgaaagcagtaaagtaagaggtatgaacacaagggattttttacgtgtttttgcatttaaattctgcatagtccaagagtcaatcttattagatttcagatagatttttagggcctctttcgtatgattttttttcgtcccttttttgatcttacttgccactatttataatcacatagtaggcagttaattacaaagttgactgtaatctttacaatctttttctcctgaaataacggggtttgattacatatcacgtagtataattgcggttattatttgagaatcacaaagctgtgattttcccgattttactgggtcaaaataatcgtgtatttaaacacgtctttaattttagcattttgggatgtctcgacaggaacttggttccaatgaccttgatagcgagctggagcttttcacccctatcttcctgagatcgatgatgtacaccttgtttcgtctttttttgaagacttaatgcttcattctgataatcgcagttcttattaacagagagttcctcggtacacatttaaacgttagcttctgactcgtcaagattataagtctagttgaaagatgtctgaagttaactggagaaagtaacaataatgcgccttcctataactagataggcacctcgcttattaggtctcgagcccacctgactgttatacatagtttatacattatatgctaagtgttttcacagtgaataggcgtcgctttcgtcgtcccagatgtaacggagttgatgcctcgctttatgc

SEQ ID NO: 346952 - DNA, 1069 bp, Cannabis indica
gaggactatgaaaaatgacaagcatgagccgtccttttatacatgaagttcagtgacaagaaagccaaagattgagaaatctaacggctgggaatcgtgcagaatatgaataggcgattcataatgatctttgaaactatacaaccgccagaatcaaaggaggcgtcctttccaaggaaggattttggcgaaattaccctccgtaattattgaaaagctctttttactaaaaaagaactttttaaggggcatttattatacccaaaattcagctggaggacacgtgtcaagataaagggaatgtgaatcggtgccatatctttttatggaataactcatcaattgtgtaagtactagagtatatttgcaacacactgactgtaaagtcttagacgaggaattaatgtacgaactggtacttagagtattaacgagaaatcatatatcgctaagggataatagcgaggcaccagagaagagtaacacatacctcaacttgcaataagctgactaagcataaaagtcaaattggcttggaatacaagaatgcgagatgagcacctcgctacgaggaaacgtcctttagtttcatccaactaacggaagcgagattcacaaccccggtaagtcaacagatttccttaaatccacgatcgacgtgagacacatcttgtcgatctcggaaagaagggtggttccagctcaccattgagatcactactatcaagtttctgtcgagacatctccagaatcgataattaaaggcgtgtttaatacacgttatttctgacccagtaaaagcgggaaaatcatagctgtatgactttcaaaatcatgcaccccgtttacattttgtaatatgtaatcatatcccacaatttaagggataataactgtaattacattttggtcagccttgtaattaactgccactatacaattacaaatagtggcagacaatctcgaaaaagggatggaaaaactcttatacaagaggccctaagaaaaacactcagatatctgaataagattgactcgtggattatgcagaattttaactacaaaacca

SEQ ID NO: 346953 - DNA, 605 bp, Cannabis indica
cttgtaaatctttacttattaacgcatcctttcctcttggtaatctctggaacgacgattgattatgcatcctaataagaatctttatagcgtacttttgtcctcacttgtacgctttccgagatgactcctcgaaagattcccaccttgatattaccttaagttaagtatgcttaactccaagataagctcatggtgggttatcaaaaactagatgcttctttttcgttcttacttatatttcttatttttctgtccttccgttatttaaatctaatttctatcactcccttcattaccctcttacagttcctcgtcgattttattcacttatgcttaagaaagtttaatcttattataaatttgaatcttatccatctccactcattttaacttgcatccatctcatgagttcttagctaataacaattgataaaagatcattccttgatctcaaagcttcgtatctgtgttcggtagaaatcttaaaattctccttttaatacacttagaaatacctcaagtatattctttgttttattgacaatcccttggcatgaactaccactccaacttgtagtgagtctctcatcgatggtgttgat

SEQ ID NO: 346954 - DNA, 928 bp, Cannabis indica
ggttgtcacgaggaggtgacctttggttgtcccatcgagggcttcgaaaaatgacggctgtaattatttcattttattacatttatggtgccacgtcacgaaactcctcggttttcgtgtaggcgtggccatggctggccgttagatagggcgaccttaggcattcttgctgccacgtggcataatcccaatttatgagggatacgagtatttaaactctttcatacgaaataacttcctcattttccctctcggtcttctttcccttctccctctttcactgagattcaaagaacaacccatactttgttcagattgctgcctattttccttggatcttcttcagtttcagaagtgatcgagagcaatcgtagggaaaaatcatcaaaactaaaggttagttttgaattcattttgcattttttggtttctgttcaaaatgtaaaactattttttctgggtttttgtattttgaggggtttagaaatgcatgtttgtaggaaatgttcatagggctatgttttttctatatggaactgggtaatcccagaaatatagacttgaaatttgcataatcgtgaactttaggaagaatatttgaatgatcgcatctttcctatctgtttatcttttgaatacacgcgattattcaaaggaacacttcgaatactcgcatgcctgctcaccctaggttaaacagagactttatcacttctagtcgttgcttaaaaccttaggattttatactatgtatatttcgttgcgagaacattggttaagtctctcaaatggtgggcgtgttgcaatattccaatgctcatacgtgcgatcgtatgttccttgaggtactgcgatacgcccagccatttgtggcagacgccaatgttccaatataagcgtattctttggctggcagatttgctcgaaa

SEQ ID NO: 346955 - DNA, 619 bp, Cannabis indica
attgtgccatgtgtacattgtgtctactccaacatggcacttaacacctaaaatggacataaatattaaattgctaacagaacacgagtattgggggttttaccgtccaaatttaacttttgggggttaaatgtaagcaaaatgaatctattggaggttttgccgcaattaacccttataattaaaatttttgaactaaattttttaatttttttacctaaatttttactaaatataaaactaattttaataacaccaatcatcataactaaaataacataacattattctaaataactaaaacaaacttaccctaacaattaatctcaaattataatccaactattacaaatatttaataaaacaaaatatatttgtattatatatgtaaatatatatataaatggaacacctcttaatcagtattacccatgaatggttactaaataaatttaactataaatattaattttaaaaatatcaaactatcgaattttgatctaataacgaataatgaaatcataaatttgaatttctatgcttaatttaactacttaattaaaaaaaatatacaaaaatatctctttttacactatatcaaaaatatattcatacaaaa

SEQ ID NO: 346956 - DNA, 700 bp, Cannabis indica
atttattaaaatatttaaattataaagttttattatcaacaactcctattttaaaaattatattattacataaatttattaaaaaaatttacttactaattaagaataattatactaaatgttcatataattttttaatttataattaagataattgaactaaactttctaatttttttaactaaaattttactaaatataaaactaaattttttaataacacaaataatacaaaatatctaaatattgtaaaaaaaacaacatcacattattcaaaatatctaaaaaaaaattatattaataattaatctcaaattataatccaactattataaatatttaacaaaacaaaatatatttcattaacatattatatatatatttatatatatatatataaaatatatgtatttatatatataaaaatatatatttatataaatatctatatctataaaatatcataacagcaatatatttaagatttatatcataactacattttattaacatatttcaaatttatatcacaattataatatatattaaaatatttactataaatttaaaaaaaaaaaaaaaaaaaacaaaaaaaaaaacaataactatacacaaatattatttgtgaacttcttatccaagctgaaattccaaaatcccacctacaaaatctaaaaataaaataataaaaaagaaaaaa

SEQ ID NO: 346957 - DNA, 595 bp, Cannabis indica
aaaattgaaaagtgaaaacagttttatagaacatgtttttaaaaaatattttcacttttccacttttaaaaacagaaaactgattaaaaaagtgttatcaaacgtcaccaatattttataacaatttttatttagttttcctttttaataataatggttacaaaattgtaatatataattataaatttgttgattttagttaaaaattggtaacattcagttgcttaaatattatagtatatacatattgtgtgtagaagcaatacgtagtaaaagattaccatatatatatgggtgactatttaatagttatatttttattataccatcgtggttatatttttattgtaaccatacatataatatcaagttaccaataggtaaaacttccttttttatagaatcaattaattattttaagatatttaacaagactttttagtaattaataattataaatattcttttttatataattccctattaaaattattttaacagttaagccatttaattttaatatttacaataaattttattttatttttttacaaaaatttagacttttttttacacaaattaaaattctcttctt

SEQ ID NO: 346958 - DNA, 566 bp, Cannabis indica
tttgtagacttcgaaggttttgctctctttaccttatgagactcgaccttatctggaatgggtcttttcttagtaccagatggctctgctctggaacatcacccattactttcttagcaatgcgcttcaaacccatcttaggatcaactttagatgaatttgtaggaggtttctttgaatttttagaatttttttttagctggaaatagggacttcgaaccacttctagtggtggtcatttatagaagaagagaacacaatgggggaggaaaaacttacagagattatcgaacaaaatggagatagtggcatagatgggaggttgagaaaaaacgtgggtaagggcttcgactgggtgatcgtgggctatggaggttgaagaacggaggaaagagaaacagagaaaaaaaaaaaaagaagaagaatagggcagttattgaggaggtgaggtgttagaatggataaaacatgacatatgcatggtgaaggtatatttgtaattattgaacttttgaaaaagtaaaattaaaaaataaaaaatgtaaaaaagtttaaataaccgaaaa

SEQ ID NO: 346959 - DNA, 580 bp, Cannabis indica
atacatatatagaaaaaacataaatttaaaacctaataatctaacatagataataaaataatatataaaatattaaataaaataattaaatatataaaattataaatattaaatatgattggatggacattggatgatattagattggatcggttcggttatccattggatcggatgtctcatccaacatccaatccgatccaattggatttttaaaatttgcatccgatccgatccaattatgattggatatccgattctattggatcggccgattgagaattggattggataactttctgcacacccctattgacacctgcattgaaacatcaatcacaaaattaaatctttcaaaaatttatcaatcaacaacaaagacaacactaataataggaaatcaatgttaacttcaaaaaccatcagattattattattattagttttgtaacctaaaactattagtatattgcattttagtccatttcaaggctctattagtaggaactcacttctattgtttaagtgtgtaaattttagagtagagaaactatagcaaaatttctctccacttttcttc

SEQ ID NO: 346960 - DNA, 744 bp, Cannabis indica
gtaaaataatttccaacatcttgcttttacaagaatttgatttagagatacgtgataaaacaatgttctgaacccgacccgaaccatggctagctcgagcttctgaacccacaacaacaacaaataatgttccagaagaggaagaagaaggtcatgtagagtttttccaatctacagctccgatttttgccacttccgacgaaccctcttctctccaagtcgccaccagcgttctactcaccagttccattgctgtcttcctcttccactcgctctgccgcgctaaagaacttgtaaatttctcccctttttgtcttcaaaacagaacactgattgaagaatttgatcggtttgggttcaagttactgactttatgaaaaactagggttttgaatttgatggggattggtttcagttattgaatttttaagaaatgggtttttgatgggatcggttcaagttttcgaattttcaagaaatgggggttttgattttgaatttggtgtttagaaatttaggtgagatgttgtgaaggaagaagcacttgaaagcttaaaggcaatgagatcagcttcagtaactgaagctaagtcaccaccttcacctgttcgagagcgtgatgagagagagagagagagagagtgatagagcgagataaacagaaaaagaaagaaaagaacaaaaaaaaaaaagaaagaaaaagaaagaaaaaaaaagaaaatttatttttatttatattttttt

SEQ ID NO: 346961 - DNA, 646 bp, Cannabis indica
tcatttattaagcccacacactattttatctcttctcttttttttttaaaaaaaaataatattttatatctttaattattaagaatgtagtttttcaatgtattttatttagggtattagatttgatatacattcagatttaataatacatgaagttttgaatttggtatactaaaatagtgatgtcatttcatcagtactccactttagtacttttattacttttcttatctaatggattaaatcgtatgtgagttaaattttaaatgaaaagttactatttagtttcttatttaaatgctattttcttaaattgaaagttactaatgagtttcttatttgcttcgtataagagttcattttaaaatgaaaaaaatacttatgagtttcttatttgcttcgcataagagataacttcaaattaaaaaattaatcaagataattggtgtaattggaacatgtttatatgtataatttactctttgtgctagtgtttgatttttttctttactgtgttagagttgctatttatatgtgagctcttgttagttacttttttttttctttttatgtttttgttttattcaatttgatgacctttcagcattattttaatgtttgttttattggttgttgatcgtattat

SEQ ID NO: 346962 - DNA, 581 bp, Cannabis indica
gtggcctcagtagcttttgacatgaattcatgagcaagagactcatctttatccatgtttgggtcatattcgcttcgggcgagtttaatccaaggaaaatcaggaaccactgtctctgtctctgtctctgtctgcttgttgttattatcattatcttgctcagactttttagtgttaaaaagagaatggaacacagccattgcataatgtgacataccgtagaaaacgagccgtgggaatcccagcttggaggccgaatcaagggtccaccagaggaacccatcagagaccatgaagctcactggagattgaatattctccagagctcgatctaagtcgggtttcatgtgttgggtgcccaacgcgaaggagtggaacatggacatggacatggttgggaaagcctcggtactctctactccggtagggactcccggtatgtttttcgggaagggaagctccacgatggcagctgaggtgcctgcgagaaatttggtgatgaaggatctgttggctggagtggtgaagatggtaacggttacatggcggttgaggagaacacgagctaggtgaaggagtgg

SEQ ID NO: 346963 - DNA, 974 bp, Cannabis indica
ttttcctactctgagaggcaagcattctagttttaatcttctcaattgcctcattggtccgctgtactgattctggacctaggtatttcttctccccagtctcatcccaatggatgggagatctacactttctttcatataacaattcatagagagccatacctatcgtactttgatgactattattgtaggagaactctatcagtggtaggtacttactcaaggaaccctcgaaatccataatacaagcccgcaataaatattctagtatgtgaattgtcctttcggactgtccatcagtctgaggatggaaagccgtactgaatttcagtttagtacccctagcccgttgcaaacttcgccaaaacttagaagtaaatttcgaatccctatccaaaactatggattttggtacaccatgcagtcttacatatctttgacgtacaaatctgcatagtgatcctatgaaaaggttgttttaactagtagaaaatgtgcagacttcatgaatcgctctaccacaacccaaatagaatcaaacaagcccgtggttctaggtaacccaacctcaaagtccatcgtgatgtcctcccatttcactcaggtaaggttaaaggctgcaacaaccctgtcggtctctgatgttcagctttgatctgctgacaggttaagcatctcgatacgaattctaccacattcttctttgttccgctccaccagaagtaaggtttaagaccctgatacatcttggtggtgccagggtgtagggaatatggagtggaatgagcctctttaagaatttcatttctaagttccacactattaggaacacaagccctggttttgaacaatagcatcccactgtctgacactgtaaagtctctggcttgaccagctgaaacctcttctttgatctttactaactctggatccgtcatctgagcgactttaattcgttctaatagatcagattg

SEQ ID NO: 346964 - DNA, 538 bp, Cannabis indica
cacaacgtgccctcttcatccccttcactttccatttgtaatttgaatctctgcaagttgcataaaaaacatcggtcccaaacttcttcaccatgaacttaaaattcattttcgatgcaaaccttcccactatatttttttaattcagtcttatttgtgtacatcttgccaacgtgtatttcccctgaatgtgtaccagtaagagaagttgtataaacattatttttctctatgtcttcccttgtccgcacaataggtttgaattttgtataaatttaaaattagatggtacagtattacgaagaggacctagccggctgctactggtgcctggtgtttggtgattttcactactaggggttcttctttcttggtctttcctctactcccttggacgtcatggagatggtggaggtagctctaacctcaaagaaggtacctctatagcttcatgaacttgcaactccgcatcaccatcctcgttcaaatctactataggatcattgttgtaaaaggtaccatcaaactcattaaactg

SEQ ID NO: 346965 - DNA, 271 bp, Cannabis indica
catggatctataatgcttagcttccaataagcgaaccgaatttactaagtaaattccctaacttattaattccttgttgaatccactcttagaacttggaattgcactctcagacttatatagagcgttctatatgttccacgatatagatacgctatcacatttaaccattagttggccccttaaaacacttagctacaggtaaatgatgttttagtgatctaagaattagtcactgaaacaagagctcatccatttacttctatttagc

SEQ ID NO: 346966 - DNA, 535 bp, Cannabis indica
cccccttaattcaaatcaaacccaaacttttcaaaaacttccagaatacctgtaaacatcatattaaactaatcccaagcagtaaaactcaacaattcacacagattttcaattcaccattagagagctaagtttgagttcataaactcaaactttgctctaagctcaaatcaacctctaatcctagctgaaatcaactcacacaacaacaaacaaactccagaacacccactcaaactcttaccattcatacagcaacagaaactcataattcaattacaaaacctaacttaaactaaagaaaacctaaaaagaatagcaagaagaaataccttgattggaacttcaaaaactcaactagattagtaagatttcagcaagaaaactcccctccttgctggcttgaaggatcgaaagagagggaaagagagagatgaacaagaaaacttcaatgctaagttttcctctaactcactcctttcttcttttcttatattttttttaaataataaacttattcacagccaacaaaata

SEQ ID NO: 346967 - DNA, 1203 bp, Cannabis indica
gtaatgggttttatttagggcacaaaacccaacactccactccgtacacaaatgatgagataaatattatgcatgatcggtggattcattacgtgaaagcagaagcagagcgacaacagttactgtgttagtcagtgtgtatacatctagatttatcgttactacatagatttgtaaatgtatttagattattataattagagttaactcaactatagatttttaaatatatttagattatattaattagcgttagttcaattattgtgactatacagaattttaaatatatttagataataatagcgttagtttaattgttgtggctattcagatttgtacaaaatttataaattaatgcagggaaaaaattacagaaaatctatttttttcaaaaaaaaactattgctaaaaaaattaaaaaaaaatgtaatcaaactataaggcacggtttaaaaccgtcaggaaacccacattagcgacggttttgaaccgttgcctattctgcccgttttatgacggtcgaataggcaacggttatagaaactgacgaaaatactttaaaaaactgtataaaaatgtcggcaaaacttatttttgtagtagtgaatctaacttactgtactatatctacgtgactctataggccaaacatcgcattccactgttattgggcataaaaatatgaaaaacataacattttacataagccataattaatacacctagaattcaaataaatcattataattatgaaaataataattaaaagtctaattctaaaattaaactctaattatctactaattctcaaaataaaattaagcggtcattacagacattcttggaaaatgtgccaaaatgctcgaggtttacatacatcaacctgggtgcctaaaatgacgcctagtgccaccttggatgtgttgggctttgtgccctaaataaaattctatttcaatgtaatcttttctattcaattatcaataaagaaacaaaattattttcattagttatttagtatatcatttggttcatgtgatcatttatatgtttatttaatttataaattcatccaaatccttatcacattgatattcttgtttattgtatcgtcaacacagtggaaagtaatcaaggttatgtgattaaatgtattcctatgtcctttccagggctattggttaaagtaaagtttgggtt

SEQ ID NO: 346968 - DNA, 616 bp, Cannabis indica
aattttgaatatatcaaaaggctcgattggttctaaatcccagctcgcatctatgtgacctgccctatcttccatagtactgtattgcttggctataccataaaatgaatcatgacagttattctggacgtggaatctaggataccaactgtcaaacttatgagcaatgcggtccacgagaacggcattccaagtataaaaattaagacatgagtcttggaaggtaactaatgtattacgctcagtcctaagtacagtaggtgaccagctacattgattacctcaggatgctccttcaccggattcccgaggggcagtgctttaaaggtattgtgcttgggccaagatatcctaggcttgatcctcgggtggaacaatcatttgctgccaagaggaatatttgggaaccttgtaattgcaagtgtattctttatcagcgaacccaccgcaagttaacttcgttcaaaagaaattttcatgatcgaagactctaagggagagtcatcaggcgcctgtgcctactaaccatctcgggggtaggagtaggtctcgccaaaagagctgccagaacaaacaaaatattaatcaagtacttgaaaaaggaaaattgatgtaa

SEQ ID NO: 346969 - DNA, 619 bp, Cannabis indica
atcctgattttcctaatagatcaaatattggttctctttaagtgttatatgtatgtatatgtatttgtttcataattattattgattttgttttatttttttatagcaacaataaataatgaagatgttgatgttgatccaacaatggtaattagtttagtttttataatttatcaaataaattattaatttttattattaaaacttttctttatttatttattttttttattttttttttactaggagctttacgttgttgatcttgatgattagaatatatgttgtttcattgttagtttttattattaatatactttgttattagtaatatgagtgtaatttatatttgaacttcacttcaactcaactcaaatcataaatcagaatttgtttagaactctttatttttttttatgggtattgttcaattttaatatgaacttctttagaaatttttaaagtctcttttggaaatttgtttataagcatgtcttaatgaatccaaggacaacaagcaacctaggttaagatataatagtaattaaataaaaaaattctcatagaagccaacatatttggtttcttcatttttaaagtttctttaaaatttactatt

SEQ ID NO: 346970 - DNA, 709 bp, Cannabis indica
actttggaggattttcccaccaaaatatgaggttggatggttttttgtaagtaaattgatagttggggggttttgccgccaattactctttcagatttaaataaacaaccatattcaaactatattaaataagaaaatatgcaattttcattcctactaaaacattgttacaattacaattcatcatcatcatcagttacatatacaacattatcatcactgtcactctctaattttaagtaattatcgtcttggttatttagaccctcggtgtcatcatcgacaatgaaatcatctaactgttgaggctcttaattcacacgatggatgtttgcaatttcagttgggtgcacatcatagtgaacatagtcaacatcatccaactgtagaagttgaacaaataactcagtttcagctaaattattttcctgtataaagggtgtatcctcatcattgtttgggaagtcctagacattttgagggatgtactcgttcacaatcagccagtctttaccgttcttaagatcaggaatgtaatatatcaattttgcttgagatccaagtatgaacggttcattttggtaccacttttggttgacgcaaatgctagtaagaacactatcactatccattctactcccattagtgtcaaaccacttacacattaataagagaacactgcagtcctttaaataagtgaactccataa

SEQ ID NO: 346971 - DNA, 606 bp, Cannabis indica
aaatcacgtaatacgcctaaggtagttagggtgttacaatgtatgactttcacaagtcaatggattcaaactgtatgttaatgtattgaatgtgagtttagtattctgtgaccaggatccacttgcactattctaagaactctttaatgtaactagacctaagtcatcagaagaccacaacaacatattttataaatctatggcatttgtatcttgttcatagtgcttttgacaagatcattctttgtaaagagtcaatatgcctatatccacttgttatcccaaattttgcactcttacgtggcatcacgagaatggtgacacgtggagtccacttggaacatttgcttgggaagataggccgaccaggatgcctcactggcatgtccagagtaagatattcaacgatccgtgcaaaagcaatcaacacttagtgaatttagctttcgcatcatgagtcatcagctcaatccctataactcacggattagtttacctggatacgacatacacaagatcccactaccagtgtattcagcctcaatcccacgatccttacattcagcattgatcccatgatctttctgtttatgcgcattgtaacga

SEQ ID NO: 346972 - DNA, 662 bp, Cannabis indica
gagtctaaatctcctacataatctgagtctacaaacccttctatttgagtattagttgtatttggaccatagatcaagcctatatccattgttccccttaagtatcttagtaaccacttcacagcactccaatgttcagtgcctgggtttcccatgaacctgctgacagtacttacagcatgattgagatcaggcctgtagcataccaatagatacattatgctgcctaccacatttgaatatggtatattttccatgtattttgtatcttcatcagtacaaggagattgggagctatttagtctaaactgtaggccaataggggtgcgaactggtttgcaatccaggaaattgaatttccttagaatcttttcaatatagctatgttgggatagctttaggcatctttgttctctgtttctatcaatctcgattcctagaattttctttgcagcccctaaatccttcatgtcaaattctctacttaatagcttcttgatcttgtctatttcactcttatctttgctagctattaacatatcatcaacatatagcagcaagaacactaaaccttttgcctttctcacatagacacagctgtcataggcacttcttttgaaccctattttggttacaaaatcatcaaacctcctataccattg

SEQ ID NO: 346973 - DNA, 913 bp, Cannabis indica
aaaaaacattatcatacatcttttaagtataagaatttttaaatcatttaagttttaagatactaattcatgattatgattatttgtaaaatgtatagcaattactcaaaaagtataaagagttggaaaatggttatggacataatataataattttacacttctcgtaaaaagaaagtcacaagtttgaatcctttcttctcgtaaaaagaaagtcacaagtttgaatccttctcaatgtaaaaaaaaaaaatagtacaaaaatattcatttgtttgtagacacttcattttaattaggatattagcagctaaaccaccagaatttatttttttttagaaatcagccatttattgcacaaactccattttctatacaaactaagagcaccacacccaataagggaggcctcggtatgtatctatacaaatttacaaatcattaaaccatattacatcttccttgtttattttccttggccaaataagaaggattctttgtttgacatttcttttaacctgagtcaccacctgatcaacattgggggttttattttgccatatcaattcattcctgcttctccaaatattgtaaactaggctggcaagggccgctgccatcaccctccttttgaatctactcatttgcactctctgaatccacctagttatatctgctaagtctagagccgaactcctccattacagccagtgtaccacaccagtaaaacactgtaatgtccagctacaaaaactacaaaaaccgaaattttggcggcataactatctaaaccctagttctgttttgctctgtaccatctgtccaaaaatgacagttaagtgccacggcagactgtccacgtgtacacacttgtacacgtgacaaatttttagtagtccacgtaatattaatt

SEQ ID NO: 346974 - DNA, 574 bp, Cannabis indica
aattagcctattaataatgagatacaaggttcgattcttctcgtagtcactatttttttaaaaaaaaaattaaagattttacttatatattatttattttataataaataataatatatataattatgtacatagtaagtaattagtttaaatttgtacaagttcttaggatttttttagtacaactttttagaaattactctaatatatagtgtataataacatttttaagtacaaactcataaaaaaattatcacgccaataataaaaatatttcaaaaaaaaaagaactaacaagaatgttataacttaaaaagttaatgacaatattataactttgttagaatattagttgtaaagaaattagggtaacttgtatttagtagtttctcatttagtctcctagcattgtatataaacataatattctatgaaataaaatacataattcgattcactattctctacatggtatcagagccatacttagaattgtgattcgaaattcgaaattagggttcataaaaaaagattgtttgagtttagggttctttttcgaaaactctatttggag

SEQ ID NO: 346975 - DNA, 1019 bp, Cannabis indica
actgtctcttaatgtcggggttttatgtaggattttcgtatgtttttattttcgtttttcagagaaataggctttcagaaaactaccatatctctctccccataggcccattttcagtgatttaggtaccgttttaaagataatttaatggtctacattttttatgaagaaactctttccaaattctgattatttcaatgtcaaaaattcatgttttatgctgactgtcgaattacagttctttttttaaatttatgtccgatattgcctcagtaaaaatgtgatatctctcttgatatctattattttccagcgattcttgtactgttagaaagataattcaataatccatattttctttgaagaaacctttccctaattccgagttcttacctgtcaaaagtcagtatctttactcggttaggatgtttcgttttaagttttgtttcagaaaaagtgtcgtcagtaaaaattcaatatctctctcaactttgatccattttaaaagatctttatctcgttttaaagcttaggaaaatagctacattttttatgaaggaaatattgtctagatcggggtgtaactatttttaaaacttttatttttgggctgtattcagaaatcggcatgatccaggattttaaagaaactgttttaataaaacatgcataacgcctaggtgataactccgattttgatgatctttatactgttagaaaggtctttcgattaactaaagttgacagatgtagggaaaaaatattttttctgtgttattttatttcgatataaagcagtatatataacatgtacaataagtctataaagagaaacatatcaaataataaagatacaatgaatccctaaactaattccctaaaaatatggtacaataaaaacagaattattattatacagctatactgaataataataataattaggaaagctgattttccaacactcccctcaagctgggcaaaaaaatgttctccatagccagcttgctagtcagaaa

SEQ ID NO: 346976 - DNA, 1014 bp, Cannabis indica
ttactggtgtattatacagggtgttgtacactgtgctttcttctctttgtgaagccagcactcatagcatgttccatgactgctcggtgcacgcctagctcttcttatccagggatttgggcaacacaagtggcagagctaattgtttctcttctcctggaatgcggttttacattcctttggccactcaaatttgccgttgcttctacttcatgttgaagaagggtacacatttgtctgtatacttggacacaagtctaccttagtgtagtagtgcatcccatttggctttgtacttccttgattattgtgggcgacttcatgtttaaaaggacttggattttgtctaggattaagcttcttcatgttgtagctatggaggattttgaaattttctatctaggtcctccatatgcccatatcccttttacacttgacaagcatgtcgtccatgcacaccttcatgttgcggccgataggatcattgaacattttgttcataggattctaatgtgtggccctacgttcttcagccctgaaggccatgactttgtagcagcgcaggcctaagtctgtcaagaagcttgtatgctcctggctggtgggtgcatcatcttttttttggctttggataaggccaagttgtaatagtgacaggcagattgctaacctcctcttgacatcctacctcatgccttgttggagaaaatccaaccaccaaaactctattggcgtagttcttcataatcgacgttccctcagcttctaacgccatgatgggttgaataatctggtatacctgatgagtgtgatgctttgaccaaagaggacatacatcacttgattgtagggcgccaagtcagcgagttagcgcctcatcttttcatgtgttgattttgaaaagaatgttgagcgaggctctattgtctaccatgtatctgttgggttttatgcctaaaaaaaaactccatttcaatgtaatctattttggtcaacatcaataaagaaacaaaa

SEQ ID NO: 346977 - DNA, 837 bp, Cannabis indica
aaaagagattttggggtcaatttattaattatgagactttttatggtctaattaataaatgatataaatggcaattttatttaataattaattataattattaaataaaaagttttggcatttataggattgaattgaaaaatatggtattattgaaagaagaataagtggttgaaaaaattggcaaaattgtaactagaaagtggtccacttaatgggcagccactgtgttattttttcccaatattttattcttttttaatccatataatttagccctaagacctagttaaaatactataaaaggaacatgatgctttcatctcatccactttgtcaacttgatgctttcaaccaaatcaaacctaattctctgtcagacaactagtagatgagagagtttcttccattgtgatttaagcttccttcattgttcttcaccttattcgaacccttattgaaagagtgccatgcccacacatagcaagtcaagtactcgatcatagtgagtaagacggtggtaaccaacttgaaggagagaaagagatccaggctcaaatcttgataatactctgcaacagaaaggaacaaggattagagatctaagcggaaggagtcattatattccgctgcaacgaatgtaaggttttttaaactcttatgtgtttaatttcattattttagagatattcatacttaggaagttaatcaacatacttgttagtaaatctagatcctggtaaaatattaacaataactggcctcagagccacggtaatgatttactttcatgtaatatgaatttaaaacgatgattttgtttattgtgttgatttg

SEQ ID NO: 346978 - DNA, 913 bp, Cannabis indica
tgagtggaacgaactgcacgacggtttacaggctcctaaatcataacaatcacaacactattacgtgatacgctaaatcacttcccgtggacttaaactagaaactaaaagttccctatcgataaaaacatggcaataccctaaaccacataaaacgagaaaaactagggttcctgaaaatttcccaaccggcagaccggttgcacaatcggaattctagttctgggaattcctgaaccccatccggaattccggttgcacatccagaattccggttcctcgcaggaaactttcaaaaattcacaactctttcaaatcaaacccaatccaaaccaaaccttccagacctgttctatataccccaaataacatttctaaagcatcaacacagccaagaaaacacagaatcgaaaatcaccattaaagctccaagctttgagttcaaaactcaaacttggttaaacatcactaacatgcatccgaactagctcaaatctacctaaacatgcatacaataacctctgaaaactacagaaagcatcaacaacaagtgcagcaacagatttcatcattttctttgaaaaacatagttttgagtaaaaaattcatatcttgataaaccaactaatcaccaacacaatcatgcttgaatcaacaaaaaaacatcataattaaacctcagaaatcaaaagcaaccataaacaatattcacagccacaaatcatcaagcatgcattactcaacttcttaaaaaccaagaaaactaaaagagaagctacaagaatcttaccaagcactttgaacaacacttagattggatgaataaagcttgaaaaatcaagagaaatcccagccctagcaatccacaccagccgagagagagagagagagagagagagaggagagagagaga

SEQ ID NO: 346979 - DNA, 676 bp, Cannabis indica
aaatcacgtaatacgcctaaggtagttagggtgtcacactatgattcaatttataatagaataaaataaccaaacaactaaccatatagtgataacaatcgcaccataaacaatggggcaaataaaaatcttagaatttcttagatttgaacatggacaatgatagtcatgctactaacataaacttgctttgagcaaattgagattccatcaatgctcggcctcaaaaaagaaacataactaaaattccttgccaagaatgaataaagtcttactactataacaatagcaaggttgtgtaaccacaacataattgaaaataaaactaaacaataaaaaataaaaacatatcaaataaaaataaacacactaagaggattaacatcagtgaatagatgcaatccagagccaatatgagcaactcaaatctctgagacatacatctagagaaaggaagaaaagaacactcaggcagaaggatatcaactactccatcaaaatcaaaaatagtgtgggagttaggggtgttcatccgatccaatccgtacttttttggtcaaacaacatccaatccgcactaagtgcggatttcatattttggatccaatccgatccgcataagagtttaaatccaatccaatccaatccgcaatagtgcggattggatcggttattt

SEQ ID NO: 346980 - DNA, 895 bp, Cannabis indica
tcaccccatccttgtaaggcatatagtacgaatacaacagattggtacttgaggcccttgggagtaaactgggtcgggctgatagggtaataattggctatcttcttgaagtacagaagaaagggtagcattgcaccctatttggtgtaagctcccgaccaagcacaataaccttctctagggtcagtagccagttggcctggggagggaaagaagcattcgacattccctaagagaccacgctcgagcaaattagtcatttcttcatggtcactacggatggtggagaaatccatcgatctcttagtgaacctattcttctcaaaggatgagcctcggtatactcttcaataatatagccctggccggcctccaaaacatcacctccctcagatactggctctccttcatcattgtagccacgaaatggcaacacctgagctaccccttcttcctcattgcctttggcattggaaagagtagtagggcggaccttgcccgggtcctccactttttggacttcaatgtccccaacagtatcttcctcgtcagtagcacgatgggtcttttctaccctagccagagtggctaggcaggcaatatgcaaatcagttaaggaacatttcctaacagtttgtttagtctgttccatcatcctatgcttaggaggaattttattagaagtgttcttggcaatggtcacagcaaaattggcagcaggttagcccgcggaagtaggttttggatggcccaccggtagagcatcgaccacgttcggatgaactatgtacgtccagttaataagaatgtaatgcttccaacctttcttgagttcccaaatgaaacaatcatatccttcacctcgaatttggtcgggatataaatgatgttgcac

SEQ ID NO: 346981 - DNA, 1664 bp, Cannabis indica
aaagagttttatttagggcataaaacccaacataaacatctttcattaactttctatttaccatgaaaagagttattcatatcacagtgatgatcattagtagatcaacttgaatcttgagtatacatgaactcctatttgtgttcattgagttctttgattcactcgttaaagtttctcagagaagatgattcttacaacttctattttggaagcttaataacatgagtggctggaaacatgttatacaatagtggaatccaagctttcctaacggatcaaatattatttctgtcatagtattaattttaggactactaatagatggatccaaatctagaataagttataaattaactgttcacattaaatcagtggtacataagaaataaagagataattagaagggtaaaatagtattttgaccaacactaattatgaactaataattagataccaaactacttatattgattatatcaatggactacaagtaagaattctgtaaatataattctttattatcaaagagtgaaatttcatatttatagtggagtaataatagaattaatagtaaactatattaatctattgatagattaataataatcttcgatttattggagcttcaaaacaaggcgggcccaaggcataggcgggctaggcccgtgcctatggctcacacttttcggaggcccaaaataaaaaaaatataaaaaaattattaggcttagttggttgaggtagatggcataatgtccaaggtcattgggttcaaatctcataacactcttcttttttttaatatatttttgagggccccaatatttaattcgtcttgggcccatatatttttcgggccggcccttcttcaaaatataggtctataattcccaagtcaccttaatacaataatgtacatgggaattctttatttgatgaatgaattttgactgagaactaatttttatggaaaataaattctcaagggcaagatagaaatttgtaaaatttttgttttgatttattatgataattataaattatataattaatagtatttaactatttattttttttagatgaaactatattaattagttaaatataatattattcttaaataatattaaagagagaaatatattattttagaaaaattaatatgcattttagtgtttgtgaaataagagattaatgaaaattaatcaattattatttattagcagactaaataataaatcttatttatagtaaaattgagaaatcaattttgaccttaaaatatggcccacatgtgtaggcccaatctacatgtgtggggtgacatataaaggtccatgattaattaaatttaattattttattagttaaattaatttaaactaaattaagctaattatcttttaattataaattaaatgaattattagataattctttgattaaaaagataataattaaaataaaagatttactgatatttgttattcagttattagatatttatatttgaatttgaattctaattcaaatcaaattcgatatttacatttattaaaaataaaagatgggatattggcggctaaaccacctgaactttatagtttgttacatttaaccacaaaaaccaaatttttggctctgcacacctccgtccaaaa

SEQ ID NO: 346982 - DNA, 626 bp, Cannabis indica
aaagtagagctaagtttggcatattattgttgggaggcttatttgagaccatagatgcttttatgtaatttgcatacaatattggaaggaaggtctccttggtgtttgtaaccgcgaggaagtgccatataaacttcctcatttagatcaccatggaggaaagcattgttaatgtccatttgatatagttaccaattattaatggcagcaagaacaaggaggactttgaggctattaaactttgctacgggagcaaaagtttcaagataatctatcccaaattattgggagtaccctttggctactaagcgagttttaaacttttcaatttcaccttgggcattatattttatttttattttatatacccatttacagccaacgaaatggtggtcagcaggaagatagacaactattcaagttttattggctataagtgcaacagtttctatatccatagcttttacccacatgggaaatttagaagcttgggaataagaagttggttcagaaaccaaatagacacttaaaatgacagcacaaaacttaggagaaaatttgtcataagagatgaaatttgaaatgggatgtgaggtagaaaactcacaaatgtagtcttggagatg

SEQ ID NO: 346983 - DNA, 508 bp, Cannabis indica
aaaatgaatacaataaataattacagaaaatccaatggtaaatgtacaacagcaaaaatccaattgtatttttctttttttatttaatgggatttattttattatatataaataaaaagtgactcatgaatttcttataaattattttatttttaataataaattcttttatttttaatataataaataaaaagtcactcattaattttttataaaccaagaattttgttatataggcacactttatataaaatagatatatgaagtattttatgtaagccatatacaatatgctttcatctgaaaaacctcatatacatatatcatgtatatatattaaaaagtgcttatgcccagtgacagattcagaatttttgatctgtaggggcttaattgttataaaaatatttattatttactttacattaaaattataactattttgtggggactttttactattttgttgtataattatttaactaaatagaagatatttaattttttt

SEQ ID NO: 346984 - DNA, 2067 bp, Cannabis indica
tagggttccaaaacctttatcattaatacaatgcggtctatccaatctgctaaaaattattgctgccacataagagtgagtggccccagagtcaaacaatacaaagaagtaagagttattgactgagagttgtcctattacaactgaggggctagcttctgcatcagcctaagttaagcaaacactcttgctggaacaggttttgctgttgacttctgctcctctttcttaagcatcgggcaacctcttttgtaatgtcctggcaacccacactggaaacatccttgccatctatactcacccagaagatgctttttaaaactgggatactccgattaagtgtattgggttttacaacaaccctaatggttgcatcgaccttggttccctcagaacctcttattctgagccaccaggtgtagttggtgcctttcgtttctgattagtggtcgagccactaccaccccttccaaaactaggggttggaggagtaggggctccaccagcaacttgagtccctcgagacccctgagtgcactcaactgcgccctcagctcgtagtgcctttcccaccatgtcaacataagtaattgtgtcgtcagtagtaatcataagattgtgttttatcttcaaatttaatccatccatgtacttttctttcttgctgaaattggttgatacaattctcgaggccaacctagccaatcgatcaaactgagttgtgtatttagtaacactcatattctccttctaggtcaactgagtaaattcctttatttttgcacttctaactgcttcattgtaatactttgtgttgaaaaactcttggaacgtttcccaagtcatagtagtaacatcataagtcagggacaccatgtcccaccaaaccagggcatcctcctggaactggaatgcggcataggccactctgtcattgcttgtgacacccataaaataaaaaattcttgtaataagcgtcagccactactcggctttcatcacattgggaccacccagaaagactagaggttcttgcttgcgaaatctttcatacagtggttccatcctattcactgtagcatctggtcctatctacacagcaggggtaggagctacctgaatttatggagcaggcattgcaagagcccttgctgccttaggcgtctgatttcttcttcttctttgttgattttggcttgtattgctacaaaactattttcccattcctaggcagcctgcgacgggttaacatctctccgaccgcatgctctgcctctagggcctctgcctcgaccatgaacattcgagggaaactgaactccctgactgccactagacccgatcgagttacccttactcctagtattttgcatagcgtccatactattataacaacctgcataaccaagagctagtatggtcagctcgcgatcaagaataatttactaattaccgcttattttgaaaattaaaacatgcacctattcaactattaggctactaaaatgttttctatcaggctttttcaaaacatactgttaaaataaactactaaagcaataaaggcttacttaaccgtaagacgagctaatcgctgatgatgattgtacatgtcgtgacgatctttggaagataacctagcagctctgataccaaattgtaacacctactagtttaggtgtgtttatgtgatttataacttaactgtccaacttgttgctaatcaacgagtttattgaaaatcgtgaataatttaaacctttatttaactaattataaatatcaaaataacatacttgtattaaacttggatcccgtttacaaatatatttacaaaagttttgctttgcatattacacgagtttatcaaccagtgactatacaaaatgagcccaaccaccccaaagaccgttcgctcaaggcctaaccgccccaacatgtacaatcttcatctgctcgctctcacggctgctcaaccttcgtttgcccttacctacacatgcaaacaatatctgtgagtcaacagactcagtaagaaaagcataaatactaacatagcaataaccc

SEQ ID NO: 346985 - DNA, 660 bp, Cannabis indica
ttctctctcctctttctctctctttcaataatttaattaattaaattaaataattaatattattattagacattttttaaatttatttatattttactgaggtgttgctgtgatctgtttggatgatttgtttgtattcgttctaactctattagggtacgaaatttcctcatttctcattattcctttttatcttaatctttttaaaaataaaaaataaaaaattacccaaaaaaaagtattaaaattagctctatatataaagtagacaactttttttttggctaaagtactataacaaaaaaaaaaaaatccaggtaagggtaagaatattaaaatattattttattattgagtaatttgcgggaaatataatttaagttaggggtgttcgcggtgtaggtggtgcggtttttgactatttttttaaactaacccgcacatgtagtttttctaatttctcaaaccgcacccgcactgcgaaactaaaaaactgtgaaaaccgcaacgcaaaaaatggtgtggtgcagtttttgtgatttggactgtcaccaataattaaactatcacaaatataacaaagtttgagcaacaattgtcaaaaataccataaggcttgaaaataaatatgaaaaaaaaaattaagtttcaacaatacaa

SEQ ID NO: 346986 - DNA, 1390 bp, Cannabis indica
gtcgttagtatttagcttcgcatttagcatagtgtcatttttatgagttatatctcatttacaactgctacttttgatttttctttctcgtgagaaaggttctttaataaaaaagtttaaaaattttaaatttttaaagtgtagtgggtttgaaatatatcatgatatcatgtatttccagataaattctggttaatcatacacgcacatatatatgcccctcaagtaattttaaagattgaaactttgtaattacttggaaaagtgattcaactttattaataactgaagttcaaaaaatattacatcagaaatagaagttacaacatcagtttattggtagtagggtcgcaaatgctccacattccagtagctctttaccagcgagccgttaagctgagctaatttataaaccccaattcccactatcaacttgatcacataaggaccctcccagtttggcttaaatactcctacagacgcgtctctcgtattagcaaatactcgccttagcaccaagtctccaacgttgaagagcttcttcttcactttcttattgaagtatcttgtcacttggtgttggtatgccgcattagtgatttgcaactcaatacgttttcatcaagtaaatccaaggaaaatttcaatagttcttggttttcttcttgattataaaattcttgtctgtgggtcgcaatattgaattctactggcagcattgcctccgagccaaatgctagcgagaatggagtatgttctgttgttgtcttcttagttgtcctacgaacccaaagtactttaggtagttcgttgacccatctacccttagtagcgtccaacttctttttgatataatccatcatggttttattaacagcttctactttcccattcgcttgaggcctggatactaatgagaagcttttaataatcttgttcctttcgcggaactcagtgaataagtcaccatcgaactgagttttgttatcaaactatcttaatgggtattccaaacctacaaaacatgttcttcatgaaaaagtctagaactttcttgtaggctatggataccagagatttagcctctgtccactttggaaagaagtcgacagccaccactgcgtactttgctcctcctcaccctatggggagtgccccaattaaatcaattccccatattgcaaatgggtaaggcaagatcatcattctcagttctattggtggtattcaaggtatctgtgagaatcttttacatttatcacatttcttgaaaaatttgtgagtgtccttatttatagttggccataatatccttgtcgaatgatctttctgacaagctttgccaacctgcatggtccccacaaaagccttcatggatttctctgatgat

SEQ ID NO: 346987 - DNA, 807 bp, Cannabis indica
accacgtgccatacagtgcgcagttttgttaccataccgtttaacatgactaatagaaacactacttaaagaagataaaaatgattgacaatcttgaacaaataaaccaaaaaatgaaggcatagataccgaactaagaatagcttgaacaactaaaatacaatccgtctctaaaatgacatttgacttgttattcctctttatccaactaagtgcctctttgacacttagaatctctgcaatctcaggtcgacaactgacagaagaaatagttgaaaacgcctcaactatttgaccatcacagtcgcgtgctacaaatccagtaccaatctcatttgtgtcttcaaaaatcgccccatccacattaatttttaactatccagcagccagtttggaccagtggtctcttgtgtcagcgcgattgaaagccagagagaccgagcccaaccgcttagattgagcacacttttattgtcgaagagtggtttgagccagccaaacaacctcagcagtactacaacttttaccattccaaagcatatcatttcgagccttccaaattgtccaactaaccatgacagcttcttcaaccaaccccatattacctactgccaacacttccataaaccaatcaaaaaaattggttgctgcagaatgaccaacacctaacttgaagaaaattcttaacacgaacagatacagaaaatataaataattttgttgtaacacctttaaatcagattattattaaattttattttaaaaaaattaattaggattctatttatactaggggtgttcgcggtg

SEQ ID NO: 346988 - DNA, 1362 bp, Cannabis indica
ttagacagaaacatccgctaatacaatggattgaagagcaaggggaacatcgctctcagtaaaacgacgacctgaccacgtgccatacagtgcgcgactttgttagtagactgtttaacatgaccaatagaaacattacttaaagaagataaaataaattgacaatcttgaacaaaaagaccaaaaatagatggcatagataccgaactaagaatagcttgaacaactaaaatgcaatccgtttctaaatgacatttgacttgttattcctttttatccaactaagtgcctctttgacacttaaaatttctacaacttcgggtcggcagctgacagaagaaatagttgaaaaggcctcaatgattcgaccatcacagccgcgtgctacaaaactagtaccgacctcatttgtttcttcaaaacccgccccatccacattaatttttagctgtccaacagccggcttagaccagtggtctcttgtgtcagtgcgattggaagccaggaaaaccgagtccagcccttagatgagcacacgtccattgtcgaagggtagtacgagccacccaaacaacctcagcagcactacaacttttaccattccaaagcatatcattccgagccttccaaattgcccaaccaaccatgacaacttcttcaaccaaccccatattgcctactgccaacacttccataaatcagtcaaaaaaattagttactgcagaatggccaacgcctaacacagatcggagccaacatgaatgagcaaaggagcattgagccaaaacatggaatattgactcttccccatggttgcacaacacacaatgtaaggcaacaggaacatgttgactatgaagttgagtacgtgtaggcaaacaacccaaaagagcaaatatttaaaaaattattaattgcaattgtaaataaaatatatattaaagtataattaataattagagtaatttgtgacataaatacctaagtttaacttccagttgtaaataaatacttaagtttaatttttagcagtaataatacctaagttatatttctggaacttctataagtacctaactattaattattaagtaaattgccacgtggcaatctttaattggtccacgtccttaattttctttttcttgaaattaaatataccaataagaaaatgacacttggataattatttgacattgattaggtactttcgaagttccaaaaatataacttagatattattactgctaaaataataacttaagtattcttttgcaactggggagttaaacttagggtatttatgccacaaattattctaataattaataataaaatttgaaaaaccgtgtttttgcaaat

SEQ ID NO: 346989 - DNA, 492 bp, Cannabis indica
ggcttggacaaaacccgtagtcagtgtttggatttatgacccagccttggacccaaaccctgaaaaggacccaaacccacaccaggacctgaacccagtcccaaacccaaaagtggacccgaacccgtaccctgtgactagtgttgcacataaacaccacgggggcggggacccgcagggatccgccccttatggggcggggattccccgacttagcggggatcggatgcggggacggggttgattttacgtacccgagtcggaggcggggcggggtcggggaaagtactatccgccccgatttatccccgattatatattaatacatataaattataatagttaattacttataataaatatataccttggacttttcctcttctcaatatatgtcatttcatattcattgattaattacatatacaattatatatgacatttatatggtttacggtttaccctttttttttgtaatcatatcaatttgat

SEQ ID NO: 346990 - DNA, 652 bp, Cannabis indica
cctttatataggaagcctaaaacactaatttaaaatttgaaaccctggttatttgtatctttaattaattaattataaaagaccaaaatgcccttaaatatagatattatttagctattctattgggattttgggacccaatttccatcccaaactatgttgtacatgtgtgggattgcacaaagaatcttgtaggcctttctctggctggcctaccatggtgttgtctagaggctggccggccatagggccagccaagtctagtcggccaccctctgtgaggaagttggtctatcatttgatggccgtttgagtgctgggatccctatttgctaaggtatttacttggccttcttattggtgagctgtattgccatgtggcgctaattttgtccatgtaagtactgccacgttgagaggacgaaaattgggataacagcgtgcatatctttaaaataggggtgttcaaataatagttaatccaatctaatctacacaattcgatccagtctaatttgtaaagtgcaaatattaatacttttggggattggatgttgattaacatgtaaaagtaaccgatccaattcaatccacacatatttatatgaaatttttaaaaattatgtatacaatttgtaaagcccgcttagtt

SEQ ID NO: 346991 - DNA, 625 bp, Cannabis indica
ttatattgatgagagccatattgttagtttacgatctagtctctgtgtcatcataggtagatccggtgtgcactcaactagaatctgtacaggaagtgaattaaatttgagtctcgatattatggtggttatcaggtgcgactatccaatttttggatgtcattttctatgattggtattgagagctaggagtttagtggacgatgtgatatgcatttgaagcttgattttgtgaatatttaaggtctctctattttacttatacattttgacaatggtgatgagatgttttatttttaaacagctaaccatgcatgactttttattaaaccaatggtcttctgatattagttattttcctactgggctttataagctcagccccaattttctcctgttccagaaacccagtttgatgctagcggatgaggatggtaccgttgaggagaaagtcgttattagtttagtcttattttatttatcaaacattccaaaattgattttgtatttaagcttgaatgggtggtctgtaagacttaaattggctatgtaccagttaaaaatgagaaatgatggatgctaaatattattttggtattttattgacttattaaatctatctatt

SEQ ID NO: 346992 - DNA, 610 bp, Cannabis indica
tatccatacttctctagaataatcatccacaatagataaaaataagaacaactaccatgtgtattaattttctcaggaccccataggtctgaatgtacatactcaagtattcttttagagttgtgaatacctgttgtgaactttaacctgtgatgctttccaagtatgcagcattcacaaaaatctagtttactcactttatccttacccaacagttgttgctcattcatgagttgtaagcctcactcacttatatgccctaatcttatgtgccacagagtagctatttcatcttctttgttgttgtgagttttgatgttacagcttgaaataggcgagccttgtaggtagtaaagttcaccatttttgatgcctttcatgattattagtgctcctctactaagcttcatatgacctgcctctaccttacacaacacccaaatcatcaagcacactaataaaaatttggtttctagagagattaggaacataccttactgttgttagggttcttattgtcctatcatacttttttaatctgattgatcccgaccctttaatcttacaggtttgattgttcccgaggaccacttttcctcctttagattcc

SEQ ID NO: 346993 - DNA, 456 bp, Cannabis indica
ttcctatttaagttacttgtaagttaagtaacttcactttttcaagctcttccttctcctcttccttcgagcagctgcaaccagccattagggggactatttttcttcagcaatcttctatttcagagctaaacttaatccccaagccaacctagatcttgaggtaagttcctccttatgttttgttggtgaaatcctaggttctaaggctaggttttgataattcttgtaagttttcagggctgtagacttagttgaggtttgagtgtgatattctagttgaattaagtctaattgtgtatgttttaattgaattcatggctgttgggattgatttgtgaatgaggaagctaaaggaacttagttttattcacttgagcatatgaatttgagctagagattaaactactgtaatttgcaacttggaaatatgctatatttatgatattatactgt

SEQ ID NO: 346994 - DNA, 665 bp, Cannabis indica
aaatagaatttcattataggaaaacaaatcgtaacatcataaaacctagttggaacaacacacacgtgatacccacttataattttaagagtaatttgtgacataattcctataagtgtctagtttattataactaatccctaattttaaaattttagtagtacaacttcttaaattcatattatgttagtgtaaagtcctatggcaaattagttgacaaaatattttttatttaatggtaagattgatttgcatttttaccgaattcttaccttgtatattcgaatttagttgctcttttcttggttaggaaagatgcttttaatgctgaactttcctttgtttggaaatttcttgtaagagaatcttttctcttatggaaagttggtctataaagaaaaccttgattaaatattttatcctcattaatttcgattgtatcttaatacaatcagaatatctaatctgtttattgtaggaatccagtcttaattgaggatcggacccgattataggaagtttcctgtttctggtttgatctgttacgtcagcatccgaatctgatgctgtagatcgtgtttttcttagaaaagttttgtacagctgtagattcgatcttgtagctgtctctagggtttctatgttctataaatagagcctagaga

SEQ ID NO: 346995 - DNA, 1163 bp, Cannabis indica
acaatggaaactgatgggatgacctggcaaaattttgacgaagttttcagggaacaatattttagtccatctcacaggagggttcttattggagtattggatggtttaagacaaggggatatgactttgaatgaattttacatgaagtttgtagagctatcctcttatgcatatcctattgttgttgaccaacctttggtgattgaacagttcatgcgtcgtttaaggcctacgatacgtggcccaatatcccctttgacctttaacaacctgactgagtgtctgacagcagtcttgcgaactaaggctcatgtagaaatgagaagaagaacacaagcagaggaaaagaaaatgaccgaaagatgaccaagaagaatcaaggacggtggtcccaagcactagtagtgggtcatttggaatgactcgtagtggatcatacatgtgtttcagttgtggtcaacaaggtcataataagaaagaatgcccacaacaacaacaaagatatcaagcatctcacggaggacccataaggagctatgtagagtcgactccttttcacggacagcccagcagaaaccaatctcagtcttcatcctatggttttacaccccaattgggccatcagtctcagtatctacatcagtttaggccacaagattcagggttaaacatggggtactcacaatgtttccaaactcctgctcctagtgggagtcaaagagggtacaatcaaggtggagggtctggtgcaagtacaagccatcctagtcaaggaaagggaaaggaaaaaacaaattcttctgctcaagcctatgctcttggggttgatgatgtacagggcggtgctgaaaagggagttgttgatggtatggttcttatctaacactcttgggctcatgtgttgtttgatactggtgcagcacattcctttatatctttgatgttttctagtatgttgggattgagttgggaaacttttagtcctgcattacatttgagtgtacctatggggggaaacggtaaggtatccaccatttgtaggtcactttgtattgtgttcgagggacacaagttatctggaaacttattagtggtgcctatggggaaatttgatgtaattcttggtatggattagttgtctaaataccaagctattgtggatt

SEQ ID NO: 346996 - DNA, 702 bp, Cannabis indica
cggggattagggttatgatcgggtgtatgagcgccaggttataaccagggatattagtatgttttatgttatgcttttcttactgagtctgtcgactcatagtgttatttttcatgtgtagtaagggccaggcctaagctgaggagctgtgagaacgagcaggtgaagattgtacatgtcggggcagttaggcctggagcgtacgatctttgggacatcagggccttttactgtatagtcgcttggcgacaaaactttgtatatacgtatagcaaactttttataaatgtattttgtaaacgggatcccgggattttatgtatgtaatactttaagtttattaattaaataagaaagttttaattaataacgtttttcgttaatctcgttgattagcaacgagctgcacagtacgtttaaaatcacgctaacacgcctatattagttagggtgttacagcggtagactccgctgctaatagtatcagcggcgagccacaccgctaataatattaaaaaaaacaaatcgttagaattattagcggtagggcattaacaacggtcccactgttaataattgtatatatacccaatcccgactttctgtacctgtttctagtacttgtttttgtctcgtaagcttttttagtacacagtcaattccgtgagtccaatctatgccatttaaacaagttcacgttgt

SEQ ID NO: 346997 - DNA, 643 bp, Cannabis indica
tacctggatggattgaatcaaagataacacatgacctatgatcaccactgatgacaataccacctataatgatatggtggggaaggcactgcgagctgagggtgcagtggagtgcactcaagagtcttgagggactcagattgttggtggggcccctactcctcctacctctggttatggtagaggaggtagtggctaggccactgatcagaaaataagggcaccaactgcatctggtggctcaagtcagaacaagaggttctgagggaaccaaggacgatgcaatcatcaaggtggttttgaaacccgatacacttacccagaatgccccagttgtaaaaagcatcatctaggagagtgtagaggacaagggtgcttcaagtgtggtatgtcagggcattataaaagagactgtccacagcttaagaaagtgatacgaaccacaccaacagttgtgatgaaacccgatagcaattatggcaacctctaagaattctcgaaattgggatgttgaaccgcgacccaatgcttagttaagcatgaaccttggtatgaaggaagacactacaaacagtggtggaagttcgtttgttaagtcagattgaacgccacaaggaatactccttgataagtttgaatagtt

SEQ ID NO: 346998 - DNA, 486 bp, Cannabis indica
ttgaactttgaattgtatccaaacttacctccctagaaatttgatttgcatatggatgatagtataaggttatgataagttacaagaaatttcctaagtccttctagggaaataccctagtgctaggaaaatttcagaatgatgaaatggttgttgttatacccaaaattcagctagcacttcagaggaggacacgtgtcaaactgggagaatacgaatcaacaaatacaatgatatttatatttgaaaatggaataattcattaaatgcaaaactgacagagtatgtttacaacttgctgactgtaaggtcttacacgagataaaaatatacaaactattggctcgtactttaacgagaaaccatacgataacagtagtgtaaggcggggcatcaacctcgctacgcatgaagagacatagaaaatacatgatgactgttaaggtacttagcatataatacacattatacaaactaagtataaca

SEQ ID NO: 346999 - DNA, 825 bp, Cannabis indica
cgcaacagacatttctgtgacacgtggtaatcttgggagacttaataatggataacctttaattataatccttatcaatgaaggaagcaagccaggcaaatctccgacaagcttaggacaatcattaatctcaagtgttttgagcttcccatatgttgttgcctcttcagtttgcattgaattccattgctcccatgatgacatgtcgttgaagattaatgtttccaatgatgaaaatggctttctcgcagaacaattcccgtaaaactcagcacccaccgtcactaccgaattgcatttggagatggaaagatgttttagcaaaggaagttggccaaagggtggcaaataggagcaacgcttacacctatcaagagttacttcaacaatgttgctaaacgaatcattcccaacccaatttggaaatattttgcccgtgtaccccgaaatctgaagctccttcaaagttctattaggtgaaagcatttcaagcacaccttctccatgttttggatcaacaacagcaacagcatcattaacattccattccaacctcaaattctcgagttgcttcttctccagtacaataacttgatccggtgtttttgtaatattgaccacattttctaacttcttaatagaaagctctccgtgtagactttgaagttctgccaattcttctattttcgcgccactatccttccccacaacaaaagttgtcaatatttggagattcgtcaacttacttatttgacttggcatctcaacaaggctattagaaccactaataataagatgtctcaaattaatgagatgatgcatatc

SEQ ID NO: 347000 - DNA, 541 bp, Cannabis indica
aattatttttgattaatgtgatttgaattaatcttataatcttaactttaatcaaatagggtttataaaagaggcataaataatcaaatagggttagaaatacggtaattaaagaaaatctagaaccctatttttttttggatttaatgggatttattttatttttattttattatatataaataaaaagtaacccatgaatttcttataaaccattttctttttaataataaaccattttatttttaatataaataaaaagtcacccataaatttctcataaaccaagaattttgttatataggcacactttatatagaaatagatatatctcttttgatcctctgatcaattaattaagaataagaaaatcgatatagatatgtttaggctttttttcagtaccagtataagtttaattaaaatcacataacgtttttagtcatcaacttttttttttgtaagtagtcaaaagtaggagtgttaattggactacatctaatatttttaggcctatccagatctgatctaattatatatt

SEQ ID NO: 347001 - DNA, 443 bp, Cannabis indica
ttaatagaaagtgataagttaaaggaagtcaaaatttaaagaaaagtcaagagcatcacatttctcttcctctctctttcggctccaaggaaaatcggcaaggaacttgtgggaatctcagctctcttcatcaaattctttgcaaaaccttctgccctaggagttagtcaaaatgaggtgagtttggtaccattttcctttgatttctttaagtttaaggttaggttttggttagggtttcaagaaattcggggctgggctattagttaggattataatctgttcttaggagtggtttaaggtgacataggacctgggatcgtcaagctttgtttatccacttaggctggcatgcacgcttaatctctggactgaggtaagaaaagtattaaatattgtataaggttaatgtatgattgttacagattcgattaagatcgaaa

SEQ ID NO: 347002 - DNA, 551 bp, Cannabis indica
tttcttatattatttttttttttctaatttgaaactgattttcacatttatattatgctctaaaattattgttatgtgttgtttttgattatttttgttagtgttttttctaaattattgtttgaaactggtttacatattttgagagttctgtaatggggttgctctattttataatgttattaaaaaaaatttattttaagttacttttttattattttatttctagattcgaaacttacacttatattttattttcaaattattggtatgcattgtgtgttgttttgattatatttgtgattaatattttttttgtatttttgtatgtgtttttattttttcatttttcatttgattgtctggtgaaactggttttagttgactttattatgtaatatttattattttttatgattttttatagcgtcaaaactggtttcacagattttaactattctgtaatggggttgctccatttttatgctgttattgtatatttttttagtttgtataatatcaattttattgttgtatgatatttgaacaac

SEQ ID NO: 347003 - DNA, 708 bp, Cannabis indica
atttacttgtttaatgtgttattatgttcaagtgatcatttattcatttatttgatttataaattcatccaaatccttatcactctgatattcttgtttattgtattgtcaacacagtggaaagtaatcaagattctatgatgaaatgtattcctagatttatcagtacacagggtttaactgatatgataatctataacaaaatttacttgcaccttggataagtgttatgtcctttacagggcattggttaaaaaaagcttgggttggatgtatggagtatgcatcggaagggaccgatattgaaattggattagatatgataaacttaccctaatatctattcaattcaatatcacctagttgatcctagatcaaacgatctcaatcttgggatggttaggttttagttcagttgcattatttgtgttctttaacctattagttaaagtcgacaaaatggttcttcctatgacgtataggtttagaacagggtagttcaattaaattggagcgctaatcatagatacagaatctatagcttctattcgaacatagaagtgaaacgatgatttccttcgagctttgctaaatacagataaatgatagagcgctcattttagtgattatattagttcaatgaaatatcattctaggtggctaagtgttttatagatgaaatacattgaaagggtgtaacggtagttt

SEQ ID NO: 347004 - DNA, 880 bp, Cannabis indica
aattgtaaatacaagtcaaatctaccttcacctaacttctcataatattacagaaaaattatgtaaaaaattagtaaagttttaaaattgatacagtatttattatttaattatttatttcataaaatataaaatttattttatatatataatttaaaaaaatttaaatatccactgtgaagcgcgaatcatttactaatttatatatattttgaaaaattatatatacaattaatatattattgtaaaaaataataatttaaaaatcaaatgcacatgatataaatatatttcaaaatatagtagattaaatctatattccattcttattcataaaaaggatataatctaaaacaaaattaaacatctttatacatacaatttttttattcttgctttgaatttgttattttttgttttatttgttgttggagatataaaacaacaatgatttattttattttgttgttagctatgcgaaaaagaattattttttaaaaaaattattaaataattaatagtaaaaagtaactattttaaaataatcgattcaatctgcacttttgcggattggattaaatttttattactatgcaaattagattggatcaaaaatagtacagatctgatgcattatgagaaaaatagtgcaaattggatccgatgaatacccccacttgagacgtctctgatttatatttgtcgtataatttttatggtcgctcatgaattagttgtgcgcgtactataagtagatagtgaattagtttgaatcaatgtttttctatcatttatttatgttgtactcaactctaattattttcaataaaatttaagtttattgttcaataaaacaaaaaaaaaaaaacaaaaaaaacaa

SEQ ID NO: 347005 - DNA, 660 bp, Cannabis indica
atgtttatcaccctctcttccctcacataataaaagtaaatacttaccgattattgtttaatttattttatgtacaaaataaacttattagaaagaacattaatgatgattacaagtgagatacggtgataaaatcaactttaaatacagtggtgactacaaatgtgatacggtgatgatagttgttttaaaattatatgatgatttttaatagatttattatcttctttctgttttaatctctattttgtgtaagaaatatttagcttctaattttcttcactataatgtatattttttttaaaaaattgtctaattttttatttatataagaagttgtatgataattttttttattctttaaagttttctatatggatttattattttttaataagcacattttttttttaaaaaatacacaaaaataaatttaaaattatttgatactaattttattgctcaattaatatttatataattatttaactaccgcacgcgcgcgacctgtttcctaattttatatatacaattgtgatcctaataaatttctaatactcccactgggccacatatgtctattctatataaagtgtgcctatataactgaaattcttgatttatgagaaattcatgggtgactttattatttttatttaa

SEQ ID NO: 347006 - DNA, 792 bp, Cannabis indica
tcatatataactcaaataatatctcgagagtttgataaaatctctgaaattgagaaattataattctagtacccacttttaataatgggatctataattaaataaattcataaataattataaaataatatcaataattaacgctaattgcttttacttatccatattctaaaatgcggtcattacaattatccccccgttaaaatgatttcgtcctcaaaagctaacctaaataactctagatattgagtcttcatgtcggactctaactcccatgtgacttcctccaccttgtttttcctccagagcactttcaccaaggctatgatcttgtttcgaagaaccttctccttcctatcgaggattcgaactagctgttcctcgtaggacaagtctgactgcaattcaagagcttcctaactcaagacatgagttggatctaaaacatatttcctcaacattaaaatatgaaatatcgcgacagtgcaacctagagggtttcggtctttcaacatttggagttatattttgatgttccctgtactttgtaaaaaagtattatgtaaatttatatttcctcacaatgaaattttaaaatggaaaacctagaatatcacaaactagaaacacaaaattgataaacgaaaaatacaagaaaatctagaaaaaagggggcacgaaaaagaaactgtaaacaaccctcagttcgaataacaacaccaacattatcattatttccagcaacatcttcatccattttttcttgggcacccaccttcgatttcttcttag

SEQ ID NO: 347007 - DNA, 558 bp, Cannabis indica
accacaaccggccactcaccattttcaatggcatacggttgtgaggcaatggtcccggtggaaacgttattcccatcccacaggagaacgacttacgatccaataacaaacaaggctttattacgaagaagtgttggatcagattgacgaactccgggatgagtctcaaatacgaatggcagcttatcaaaagaaggtggctaaacacttcaactcgaaggttaaatatagaaaatttactattggtgatttggtcctaaggcgggtcttcccacccactcaagaacccggagtgggggtacttggacctaattgggaaggaccatacgaaatcgaggacgaaatcggctccgagacttacaagctcaaaagaatggacagaaccatagtgcctagggccgtggaatgctgatcacctctgaaagtattaccaatggtcgaaaaatataagtttatgctctgtaaagtaaatttgtaccgaacaagtatgtgcaacctctaaattaatgtttgtaaaaattgagtaccctaaaaacaattttcacgtcactcaggggg

SEQ ID NO: 347008 - DNA, 428 bp, Cannabis indica
atataattggttttaaacataaataaaatttgcaagaattcaaaataaaaataaaattataatttatttatataaaaaaatatatgaaaaatactattggttatctatgaataccacgtggctaattcttaatcgtggaagcaactttcatccatgattgaagatgatccctaggttagaggcatccatttatagcctctaattttttttcacaaaacattctaatacaatattggaaaattctacaacgcacccctttaaaataaatatattgatgcacctctatctgtttttagcattcgaaataattttttagtcaaattttttcttcatggtcatgtacgttatagttatttaagacatcctgcaaaattttaagaaatttggaaaagtttaatactcagaaaactaatgttcaaaacagtgtg

SEQ ID NO: 347009 - DNA, 648 bp, Cannabis indica
caagctgatgctgcagccagtcctttcgtggtgacaggtcatcttcctatcaacaacttcttatttactatgttatttgattcgggagctacacgttcatatgtggctacgcgggtaattgatattttgggtaggccttgtgatattttagaaagagggttcggaaccctaatgcctagtgggagttagttatctccaataggcttattaggtctatgccagttaggatcgaggatagggagttaagtgttgaccttatagaactggaattaacggagtttgacatcatacttgggatggattttttgtgcaagtattcggccagtatagactgtaaatggaaaatgttgactttccagccagaaggtgaagatccacttgtttatgttggatcagttcaggggtctcggatcccggttatttctgtgcttagggctagggatctaatacacagtggatgtgtaggattttcagtagtggtgatagactccagcagacccgaaacatttgggcctgaggtagtagagtggttaaagactttctcgacgtatttcccaaggagttgccgcgattaccgccgcaacgagaaatcgattttgtgattgatctggcacctagagccaaacttgtttctaaagctccatatag

SEQ ID NO: 347010 - DNA, 889 bp, Cannabis indica
actttgataactgttattgtacgagaactctatcaacggtaggtacttactcaaggagccctcgaaatccataacaaaggctcgcaacatatcttccaatatctgaattgtccttccaaactgtccatctgtctgaggatggaaagttgtactgaacttcaatttagtacccatagcccgttgcaaactctgccaaaacttagaggtaaactttggatctctatccgaaactatggattttggtacaccatgcaaacccaaatagaatcaaacaaacccgtggttctaagtaacccaaacataaagtcctttgcaatatcttctcacttccactcacgtagagttaaaggctgcaacaaccttgccggtctctgatgttcaaccttgatctgttgacaggttaggcatctcgatacgaattctaccacattcttctttattccgctccaccaaaagtaaggcttaagttcttgatacatcttggtcgtgtcggatgtagggaatatggagtggtatgaggctcctcgagaatttcatttctaagtcccatactacttggaacacaaaccctggttttgaacaacaacattccactgtcttaccctttaaagtctcttgcttgaccagctgatacctcttccctgatctttagtaacattggatcagttaactgagtggctttaatccgttccaacagatcaaattgcagcgtcaagttatgaagcttgcctacaacaaactcgatgctagatctgaccatgtcctctactaaccgaggcgaaatttgaaccatactagctacctgcctgggacccttcctactcagggcatcggatacagcattggccttcccaggatggtaaaggatctcatattcataatccttaac

SEQ ID NO: 347011 - DNA, 754 bp, Cannabis indica
gttaacgttatgtattggttgtgactcgattatgagtcgaggaaaataattggtaacaattattatcgttgtgactcgattatgattgagggaaatgataggaaacgattatcatcgttgagactcgattataatcgagggtaatgatatgaaccgattattatcgttgtgactcgattatgattgagtaaaagatatggtcattaccgttatgagtaattactcctgaaaccgcggataggtttcttacttatcatttgttgtatcgggcaacgacagtgacataagtagcttgtggttaacgagtggtaagggtactttataaagtatcaggattgtatgattacgaagttgtgaaatgatttaagcatgttattatgtgatgacttgtaactggatatatctttgttataatgtgaatgaatggatttttatattgcttaagaaactagtttcttttcttgcagaatcttagtgactcacgaaatgtaagaattcgtgtttatagagatgtaagattagagtgctttatgaagcactgagattatggagttatggtaatgtgtgaattagagtgttttatgaagcactgaaggtgagtatttataatgataaatgtttaggaggttgtatgaaacacagagattgttgattacaaataactatgaatatacttgattatggaataagtgtgctctcatagacattaagttaattatgcaccttgaatatgtatgacctattggtatatata

SEQ ID NO: 347012 - DNA, 535 bp, Cannabis indica
aaaaaaaaaaaaaaaaacatatagattaaaataactaatcatattatatacatgtcatattttaatttaaagtggatcatcttatgaaatgtaacaaattggtatattatcgaaattataattaatttaaatttactatgaactttactatataaaactattttatatctatgcttatttgttatactatataaaaactaattagtttctactgtaaactttaaaggtaactaaaaatataattttaaaataactaatgagcaatttaaatatttacaaattttaccaataagttatagaagggtttttttaaaaaaaaaatttttaacaccaaaaatacaaaatgataactttattactaaaatgccactacacggttatagcaacatttatactttttatctttactttattacatttttaccacatgcacactctccccatgcatcggacacgtgcgtgactcctatcaatcaaccatcaatcacttccctctctttttttcttttttttccttttattttctatttctttt

SEQ ID NO: 347013 - DNA, 912 bp, Cannabis indica
tttaccgaatagaatcataagtataatttagtggtaattaatccaattccatgtggttcgacctcacttgcgtgagtttaatacttgattacgtgcacttgcatattgtctataaatttcataacattgggtcgtcaagcattaatcagactaggtgcagttagttcgatcaagcacttattcttgaagtttcaaacactagtgggtgtgggtgtagtgcgaggtgatcagtttttggctcgcgattgctatcgcatagagctacagtacataaatgtcggtcaccagctaatggcagttttgatagaagaaagcgagaagaaggatgaagatcttgatcccttgattcatgatgatagaaacttattgaaatcaattgaagaattagaagaagttgttctagatccaggaagtcccacaaagtgtgtttacattgggaagaacgtagatgaacatttgaaatagcagctaataagtttttaaggacgaaccaagaccagttcacctgaaaccatggagatatgatagggattgaccctaatgttatttgccatcattacaatgttgatccaaaccacccagcaaagagacagaagaggagacccttggattccgagagacaatgggcactcaaacaggaagtggacaagttgttggttaacaactatatacgtgaggtgttttatccctcatggataacgaatcctattctcgtcccaaaacccaatgcagcttggagacttgtattgagttctcctatctgaataaggcgtgtccaaaggattgttttccactacccaggatcgaccacttggtggatgccactgccgggcatgagcttatctccttcatggatgcatactctggatataactagataaaaatgtgcgtcccagatcaggaacatacaag

SEQ ID NO: 347014 - DNA, 621 bp, Cannabis indica
tatataaaatattctaatatataactcttggctggcgtatttagaataggagaaatactttttgcatgatcacaagctcctctctgataacatggttagtgtctgggccatggattatttatggaaatatcaagatgctaataatattggcccagctcctatgggtctagtctctggcaatgcaagtaatcgactggcctcaactgagactgatctgattcctggtgagttcaatctttttatggatgctggggtgtgtgttgagaatcgaaaaatagggatgggggctttggtttccaactgtatggggcatgtcctattttcgagtgcggctccttgcgcagaattgttggaaccgcacgttgccgaagtcaaagctctactctatgggctttcttgctgcgtgcagatggggtatacggtgattactgccttatctgactgttagcgggtagttattgctgttaatagcaaggtcccttgtctcaatgagtttgatattgttctcaatgatattaatcatattaggaattctttcagtagcaaatctctgtcgtattgtaatcggtcaaaaaaccatgttgctcattctttagcaaaacgagcattagatttagatga

SEQ ID NO: 347015 - DNA, 526 bp, Cannabis indica
ttactttttaatataactaactttaaggcaatttctaacaacagatatagaaaatgtaatcagttttgtcattacatctttagattagattattgttaagttttattttgataaaaaatcagttcagggtcctatttgtacaattttagcaaatacacaatcattttttcatttaacaaaacagagagtcctaattaaaatttacaaaatacatggtcgaaaataatatttatctttttatatatatcttttttcttttttttatatctaagtaaatattttttttcttttcaaattaaataataagtaaatatttaataatgtagaattaatttacgaaaatcaaattctaaaaaaaaatctcaaaaaaaaatactatagtacaaataaattttaaaaaatagtgtcggtaagcataccaaaataaaaaatttatatatacaaaaatatattaacatagaaaattttttacttttaggctttcaactttttatttataaaaatacatttttagtaaaaataataa

SEQ ID NO: 347016 - DNA, 704 bp, Cannabis indica
agaaatgccacttactggttggatgaaatgtttagtgtaaaaaaagactttgcgatgaagattttgatgatcaaaaagctaggttgtgatgattttgaagaaaatgagaacaattagatgaaatccgtaagaagaatgtgagagacagataaggcatgtaaagtcagattagaaggtggttgcgatttctttgaagtttaattcgtgggataaaaatgacgaagatggtgcacaatttcaaatatatacctaaagggtccggtggcaaccgtttgatcaagtgaaatataatcaaacagatggaaactgtacaagaaaaggaatagtcgaagcattaaatgagaaatgacgtgccttgaagttttgaaccaccaaattttaagcatgcattttaaatgagaaaaatacaattatacatttgaagacatttaaaaattccttttaattaaaaaatactttttagaggacaattgttatatctaaaattagctatcaaccagaagctaatacgtgtacttcaaaaggaatatgaattagctcaatgattataatattaaattacagttgatagaaatattgaaactcgtttccacataagcatatgcgagataagaatactaaccattaacatgtaaactgacgagacaatatgtctatctcgggaaaaacaaagtacataatagaagtgttcaagatgagataac

SEQ ID NO: 347017 - DNA, 516 bp, Cannabis indica
attatatcttattattgtgttctatgttatatacaaattgatcttggggtttatattaatttatataacacattctaaatatataatattaattttagttatttttccatctaatacattatcaaattgaacacaagttctttattctttagaaaattgaattattagttgatactgaatgttacgagttaattagacattactccttttttcttttttgacaaaacaacttattgattaaaaaaattgtttaggattggggaggaggcaaaatattgttcagtcgtattaaaaaacttagctaatctatagacaacattaacaacaaacacatatactagagttaaaatgattaaaagcattaacaacattaattatttatttgtatatataatattattaatatttttttttaaaatgatatttgcagttccgaagttcgaaactgacagagtacattagcagcggggtcccgccgccaagaccggtcctgagttgaaatgggttataggcaaa

SEQ ID NO: 347018 - DNA, 507 bp, Cannabis indica
ccatagttagttctcattttccttttcttagagaaaacaatgtgttgcttcttcaaacaaacttaggttactatgagctgtagtttacttattcaagttagttaggttgtaactaatcttattagttgttaatgctgtttattttttttttatctctacactatgaacaacatttttattcaatacttgatttacctttaaatatgttttgaccttcaacagttaatttctgtttaagttacctttcctatatggatatgacctattcatctaaatagctagttatgaatgtgactgttactctgcaatctcatcagtttttttttcttttttttaactctattgtggtgaaaatactttaggggaggttttgcataaaaataactcaatgcccggatgataaaaaagttagagcttgtttggctctgttttcagttttgagtttttacaaaagagaatagaaaactgttttttgtcattttaaaaatttaatggtgtttgacacaa

SEQ ID NO: 347019 - DNA, 900 bp, Cannabis indica
ctctatggcccatttaagtaactgtcaagaggcatcaagattttgcaaaacttggcgcaagggttgatcggtataaactcaaacaggggagcttggaaataatgtcttaacttccatgtggctaagatcaggcattaagtaagcttttcaattaaaggatactaactttctgcttcaacaagtcacttgctgatatagtagactagatgttggacattgtttcttctcttatcagcacgacacttatagcgtattcattgactgccaagtatattcctaattcttctctgtccaagggtttggagagtacaggaggctttgcgagttgtctttttagttcttggaaagcattcttgcattcctctatccattcaaacttcttattgcctcagaggatgttgaagaagggaacacacttgtccgtcaactttgaaactattgggttttgtgccctaaataaaactcatttcaatataatcagatttactaattaataaagatcagaaatcgcattttatgttgcatggctcacatgatttgtttcatggttatgtttaatgtataaattctattaagtccagaacacatgtaaatatgtatatatttgttcatgattatagtgtcgttagcacagtggaatataatcatgattatatgttcaaaagttcaattcccatgatttgtcagttcactagatttaaactggcatgataatcagcgataaggtaaacttaacaccttggataagtgttatgtcctttccagggcattagcaaaagtttaccagtatcggatgtatggagtatacattggaagggactgatattaatcttggataagatatcataaacttaccgttatatcgttctaagtaaatatcaatggttgatctttggtcta

SEQ ID NO: 347020 - DNA, 384 bp, Cannabis indica
taacactcctgagattgaacctaagcatgttaagattaagatcttttgatctaagatcaaccaatgatattaacttagaaagatacaacggcaagattatgatatctttaacaagatcaatatcggtcccagtcccatgtatactccgtacatccgaaactagcatacttttccgatgttctcgaaagaacgtaacacttatccaaggtgtaagtatactttatcgctgttatcacatcagtgtaaatccagtgcactgatgaatcaggcacatcgtcttttgaagcatataatcacaattacattccactgtgttgacatcactatgattgtgaatgactatatgttctggacttaacaaattttgtatatattaaaccataa

SEQ ID NO: 347021 - DNA, 663 bp, Cannabis indica
tctcaaatttttaatattttatttgaggcggtgacgtggcggtctaaaatctctctaaagttatttttcttttttctccttaattctctcaaatttttaatattttattagagcataaatttataaattaatattttactactaatttaataaattttctataaaaatatctatcttaaattaattattttttaaaaaatacgtaataataaatataaactaaattaataatattaaattaaataattattcaattatttatatatggggactattattgtagggattgggtatagctccctttatatatatgtattcataactatatatatgtgaagtttttttttagtttgcagaataaaggaaaagtatttttttaaagaaaaaatctattatgaataaaacattatgaattgaacaaaaaaaaaagtgatatatgtaaatataaagttgatgtcatcattgtagttcctattgatatcatcaaatttctaaactcaacactcaatttatcgttctgatcgttgatcaaaaaagtgctacatgtaaatatagtattggccaaactaataattcttttaaaaaaattattttaaaaaacagtaattagttaaaataaattcatattattcaaaaaagaattaaatgaaataaaaatcaatt

SEQ ID NO: 347022 - DNA, 648 bp, Cannabis indica
ataactaactcaatattgatctgattgatacgattcaacttgacttttgaagctaatgaaattctctattaggtcacatccaatcgcaattctaaagctatcgataccaaatttaacccccaaaagagttaccaaataagctccaggttaccggccgtagcaggtgctgcgagctctgaaaaatgactatcaccattagaagctagttttcaccattagatcatcatctacagttgaaaaaatctaatttgtatttttcttctatttttgtgggcctccttcacctataaaaggagagctcccttagctcatttttcactttcaaaatagtacccacaaggtcagagcttctctctttagaaattggagcctttgccacttaccctatttttgtaataccatcttgtgagcaataaaaactcaaagtagacgtagctctattactgtcgcgatacagggagtgaactattataaatttattgtatctctcttataattacttaacaactatttcattttcaccaatctagcgagtcaggtggggtggcttagaagtctagtccagatttctgagtcaacgctattcatttagataagacttctaaattaaagtatagtgtattgaatgaaacatgtccgtctgagtta

SEQ ID NO: 347023 - DNA, 762 bp, Cannabis indica
aagtctctcaagcttcgaaatctgttgtgatcaatccaacacgcaagtatacgtatcgttttaacaagtaatacacaggtaagtgagatcgttcccacgaggactgcagttaagtaccaatcaattaaattcttgtttctatttggcaatcgaataaataaattttgaacaaaataaactaagcaaaattaaataaaacaaacaaataaaaggtttaacaatggatgtgaaattagggatatgatttcaattgctttgattacccaattattaacactaattaaccattcttcttcctcctatgtgatgacagattataaattaacctaaactcttttcagatcataaaggtcctaaattgtatgccaactactgcatctctgagatagaacaacatacaatttgcattaagcaataatctaaaagtcacataagctatgtgaatactctcgtttcacatcaaaacctatgtctattcatttagagcattctcaatactcacttttcagattttgtattgagatcatagaacatgcaaaaggtgatcaagcttaaacatgaaataagcacaaatatgaataaatcacaataatataggaagaaagaacaatcaaataacattaatccatagaataatctcagtcaatatccatcaaatccctaaatagagagtttagctcataatcgaatccataattaaactaaacacaaataaaaacataaaaaaattcaagagaagagaaagaaactagatggaggatt

SEQ ID NO: 347024 - DNA, 733 bp, Cannabis indica
cttccaagtcagactcaacactcaagaaatggaatgggatattagatcttaattaagatgacaaattaggagttacagtatgtactcaactcatgagacagtgtaattgagttagggtttcgatctcacacacctaaataggtgtgggcgtgtgagacaagagagagagtaggagtgagaaaatcaatttctattttctctctatttccagttgcttactttcaagcttctaattaattgtctgtaaattttatgttactatatatcctatatataatgttataaataaactcctttaattttttatttaaaataaaaaaatatctaatttgatttgaattagaattcaagttcaaatataaatatctaataactgaataacaaatatcatttagatttttattttaattattatctttttaattaaataattattcaataatttatttaattaataattaaaaaaaattagattaacttaatttaaattatgttaaccagtaaaataattaatctaaattaatcatatgactttatatgtcactctacgcagaccatattttaaagtttaaaattgatttttttaattttacaataaaaaagatttattatttattccaatcacacactttttattaaaaagcaatgaaagtgataaggtcttcattagggatgcacacggggcggggaattggcggggagtgctccccccgtccccatccccgttaagaat

SEQ ID NO: 347025 - DNA, 672 bp, Cannabis indica
gccagggtagagcttggagctgttcggatggagccgggtgaagccaataagaagttctttaccgcccagaagaagatagctgagctgacttaggatctcgaggtttctgaccgtcttgaagagaccatcgagaccttatctgctgaagtgaacagtcttcaggatgagaggacttctcttcgagcagttcttcgttgggtggaagaggagaagaagtctaaggaggaggagctttcgaccgaggtgacgaagttgaaagagaaggttaatgctctagagacagccggtcttgagctcttctttaacttttggaaggctaatcctcaggccaactttgactacttgggtgatgctaaggataggtacatcgagttctgagcttcccaagtggcctatggtgaacctgaggtggctgcttctacctccggccaaactgttgatgtacctcccgttcaaacaatagatcctccagcttctactggcccagaagatccgaaccaagagcctgggactccagctgtttaaacacttttctttctatctttttatttttttatatatcttattcggccataaggccttttctaagacatcatgaccggccaagcggtatttaaacttggaattatttttcatttttcagacaacaggatgaccgggcagcttttaatc

SEQ ID NO: 347026 - DNA, 955 bp, Cannabis indica
ctctctctctctctctcacgcccatatagcattctctacacttgaaattcgccaagcttattgattcctactttgtacctttaaaggagcaatatcaaatcccacctatggcgatctgaatagtattatccctcggtatcaatacagctaaaaggggagtaggtcattaactgatatcaaaaggggccgaatctctataaaaattctatgtgttctagagcgagtggatatcgtatctaatcaaacgccatggttaacacgagaagaactccagtttcaccttctacatcttcaagtctccctcaagacccacagacctcagatcctaatgtcaacattccagccatagctagaattcctatgaacactgcagatgtggtcaatcctgtcaccacatcaggcgccccaagtttggccactacagctggccaaactgacataaacaccccagtggatctaaacaaggagcccttacccccaagggaggaccctccactggcgcctcccacttaaggaaagactcacgggtgacagcccctaagaacaacaattagatctcgtctctggtattatggtggagagacaggaccaggaattggggagcctacgatcagcgagcctcatgtggacttgggagaagatctcgagttagtcagacttagagaagccgtcaaccaagctaacctaattgaagaaccacatgttgctgattgtgataccatgtcagcgtacaagctggatatcagcgaagtacaagtctcaagtgtaacaacttagacaaatgttgagtcttaagttgaacattcgactataatagactcgacattaagtttcatacagagtttctaagggaaccacatataagactaaggttgtatatgcctacaaggctaatacaagattcttgccgaagtcaaaagaggatagaaatctcactactacaaattacacaatt

SEQ ID NO: 347027 - DNA, 607 bp, Cannabis indica
ctccttaagtaacttgatctctgtcaagagtcctttcatccatatggcttccttaatagcttctgtggttgatatgtactctgattctgttgttgaaagtgcaaccacaggttggagttgggctttcccactcacacagtttcctcctagtagaaacatgtaagatgaagtagactttctgctgtctctatccccagcatagtcagcatcgctgtatccttctatgttggtgctaaacttttgttgcttgtagatgagtccaaccttaggtgtccctactaggtacttgaaaacccatttcattgcaagccaatgaatctttcttgggtttgccatgtatttggtcaaggtacgtatggcaaaggccagatctggccttgtacaaaccatcaagtacataattgtcccaacagtacttgagtaaggcactttactcattgcttccttctctgcttcagtctcaggacattgttcctttgttaaagtgtattggcaagtattggttgagaagtgttctttgaatctttcattgaaaacttctctataatcttttgaatgtagtcctcttgtgtcaagaatagtttgcccaactttctgtccctcttta

SEQ ID NO: 347028 - DNA, 497 bp, Cannabis indica
aaatacataaatgtcttaaataaacataaagcaaacaaaatacaaactatatcactaaattatgatatcctcaagcaatactacactcatatgagcattgtgcccatgaaagaccttgggtggtaatccttttatgagcggatccgttgtcatggagtttgtcccaatgtgttctatggatatttgtccactctacactctttctttcacaactaggaactttatgtcaatatgctttgacttggatgaactcctattgttattggaatacagcactactgatttattatcacaaaatatcttgagtagtctttctactttctccaagatacacagcctagtgacaaagtttctcaaccatattccctgatttgatgcctcataacacggtacgaattctgctgccatagtggaagaagttataagtgtttgtttgacacttttctaagatatagctcctccagcaaacagaaaaatgtagcctgatgtagaccttc

SEQ ID NO: 347029 - DNA, 583 bp, Cannabis indica
aactcctcctcctcttcttcttcctttctttttttcttctgtaatccttactgtaattttccctctctgtacgtctcaccctccacgattccctctctcttctcgactcctattgtcggcgtcgatctccaccaaccttctctctccgtttcactcatctctctccccttctcggcagtcggcatctcccagcttcgacctttctattttctcggcggtatgaatctccatttttcttaatggctctctaattgaagttgtgccaagtaataatactgttgggtaatttacaataatattttaaaatttaaaaattttgtgtcaggaaactgtgaaggtttatgagaatttgggtataggactatttagagtgttgactggaagatggaaggggctacaatggataatattgggtatagtaaagattctgaggatgatgatgaactttgctatgcttctgtaccagtgtccaaattacagcctaggtaaacattaatcattatagtttatataattcattaaaaaatcttttggatatgaagaaccaacaaatggcgattttttttctcccttgttagtttcc

SEQ ID NO: 347030 - DNA, 511 bp, Cannabis indica
atgtggtacatggtacatggttgtatcctagttagaacgttcttactcatctgttaagccttgtaaataggtatatgggcgcctagatacaagttgatattatatgatatgttatatacttttcttactgagtttgttgactcatagttctgcttccatgtgtaggtaaaggaaaggctaaagctgaacaagagaagcctgggctgagatgaggctatacatgtcgtggcggtgtgacctagagtgttcggtctcgagacatctggggtttagtattttttagtcgttgtgcgaccttgttatgtatttttacatattttgtataaaagtttagaaacgggatcccggtgtttgtaaatgattatataaattataagtttaatatttattataaaagttttaatttgacacgttttttaagtaaattctttgattagcaaaaacaacaatgtaattgaaaaagcactgtagcgtaccttagcattagggcgttacaattttagtatcagag

SEQ ID NO: 347031 - DNA, 894 bp, Cannabis indica
tgttgttgttgttgttattgttgttttttaacaaagtttataatccaactttgaatgaaagtttttttaaaaaaatataaattaacatatgattttacttatctttaatatttaaatttatagtgaaaatatgtcaaaaattattatagtaaaaagatcttgttttattaacttagcacttaaatttatatatttatgacgttaactagtcaataatataataatatataatatttttctttggataaacaaacaataaaaaaggaattaaatctaaattttgagtcaattctcatcaaaatttgatagtagtaaaaaaaatatattaggtgattctacaatacatccctttaaaagagatgtactgatacactttctatttgtttcaacatccaaaagaatttttgtcttattttttctattttggtggatattataactatttaagatatcttataaatttttgagaaattgagaataatttacaatataaaaaagggttttttcaattttacacttcaaaatatttttttttttgcatttttacgaaattttacatagaaactcctattgaaactagcgctgcaacctaaattgcaacaaaaaatcgtatagaaaccgctattgtaactagcgctgcaactactttaaaaacccaaattgtaaatttgaaattttttttttaaaaaatagtatataggataattctcctataaaaaataatattcaaacatgcaaaacactatttgaatgcaattttcgacgtgttaaactatttcaaaatttttaaaaatttgcaagatgtctaaataactatataatatatatgtagcaaggggggggcagtcgccccccctgaaaaaaaaaaatcgagaaaaaaatgtatatgtattt

SEQ ID NO: 347032 - DNA, 920 bp, Cannabis indica
cttctataactgtttttggtctcagccaatccctcatggattcaatctttctcggatccactttgattccatccatactgaaaatgtgcccaagaaaagaaacacattagatagccaaacctcgtacttcttaaatttggcatacattttatgttctcgtagctcttgcgaaaccatccaaagatgctgctcgtgctcctcttctaattaagagttcacaaggatatcgttgataaaaacaataactcagatattgagaaaatccttgaataccctattcatcagatccataaaaactgcgggagcgttggttagtccaaaagacataaccagaaattcatagtgcccatacctagtgcggaaagcagtctttagaatgtcctcctctcgaattctcaattgaagatagcccgatcagagatcaatctttgagaaagtcatcttcccctgaagctaatcaaaaagatcatcaatcctaggtaaaggatatttgttcttgataatcagtttttttaattctcggtagtcaatacacatgcgtaaggatccatctttcttcttaacaatcagaatgggagctccccaaggtgacacaataggccgagaaaatcctaggtgaagcatcccctgaagttgaattttcaattctttacgttctgtcggagccattctgtaaggtgccttagattatggttctgctcctattgctagatcaattacataatcaatttctctctgcggtggtaaaccccaaagttcatcatgaaaaacatctaaaaattcttgaaccaccttgatatgctctggccgaattgtcccaagccatgtggtatccaataccactgccagaaatcctaaacatttgtcttgtaacaaatctctagctgttaatactaaaatcactggaattcgggatccct

SEQ ID NO: 347033 - DNA, 1342 bp, Cannabis indica
cttctctctctcttccctcttgaatttcgaaaattcttagtattagagtagtgcccacacacaacaagtaatacctcaatcatagtgaggaagatcgtgaagaaagactttcggcaagaaggagtttcagcattaaagaatcagagaaagagattttagaaagttcatatttcgggttttaatcaacattcttgggagtagatctaagatcctggtaaaataatttctaaaagataaatgatttgcctcatcaagtttcttatgattagttcggtggatgcctcgctatatatttttcgagggtactttgagtaacttcacttattcctttaaaataaacgaatcttgtccttagatctgtgcattctgaggtaggttggtgtctcttcaacatagttattaatagttttgtatccttgtctcgcttaaaactatacagtcagcaagttatgaatatactctattaattttatatttaatgagttatttctttttgcattaaatgatacaacattatgtatacaaagtggttcatattccactaattgacacgtgtcatcctctaaagtgtagccaaattttgggtataacaaaaagcatcttttgatttctcaaatcaaaccctattaattaaattatatttaattatttaaataaaatatctataatcaaattcagtggaatctctcaaccacttgagaaaatatctcaactactttgaaatatctttaactattttttatattctaatatttatctaattaaattaattaatccaaaaaaacaaaaccaatagggacaccctacactagggtgtgcgcctaccatgtctgatttaggacaaggattgtatcttttattgagaaaacttttgtctcaacaaatattttcttgaaaatttttgtcttaacaacttttggttttctctctatttaattaatttgccataattatctatttattacaaagataaataattactatttttccaattcaaaataagtttttttgaacaacattatactactcttcatcgcttcccttgacaatgtttcaaggtggtgtgattagtccatattcgtctgataaatatgatcaatctatgtattaatattcttacattgattctttaaattattgattagtgcgattttaattgttttggttattttaaagactaatcataaatttgacgtcttttggagagattttggcatattttggtagaaaatagtggaagtcggcgagctcagtttgacaaaactgaacgtaaatgagatttttgacaaccttggaagcagaacttgttggattttgtgccctaaataaaatccttttcaat

SEQ ID NO: 347034 - DNA, 487 bp, Cannabis indica
tttgaaatgaaaggaatcagttaataaaaaataaaaatatacaatatatagaattttctagtctaaatgattctgaatctttttcaactctttgaaatattatattttcaactctttgaaatattatattgaaaaagtaagaggttaaaataggtcaaatgatatgattcctttttttaattgaaaaaaaagtacttaaaaatatattaattatattaaaattcattatcattgaagtaaaatacttgcttaagattaagtaatcactaacataccataaaacatttcataaggaccatgaattgtgcttaagtctttcgaatagatattgcaaaatttcctatcttatcctcataattctgataagttattactatccatatgaatggttagatcaaactccataaaggacacaaaccagcaacatacttgtaaagcccgcttagttaatttggaaattagcggttgtttatgtttaattatgaaa

SEQ ID NO: 347035 - DNA, 1477 bp, Cannabis indica
caaatgctcattctcttgttagtcgggtatataaggcccgatattatcctcagggttcttttttgagtgcttctcttgggccgaatcctagtttcatatggaagagtatttttgaaacgcaagctttgattaaggagggagctcgtcggggggttggtccaggtacgaatattagtgttcaatttgacccgtggcttgcggatgattctcaaccgtgggttacttctagagctaatggtatggagacgtggacggttaataatctcatggtggtaggagaacgggcttgggatttagaggtggtttcagatatattcaatgaccgagataaagagattatcattcgaactaacattgatcaggagactcctattgatacttggtattggcataaggatctttatgggttctatactgtgagggaggcatatcggttgctgcaccattcagagatcactaatactagtgagtctgagattaagatatggaaaattgcatggaagcttcatgtccctcccaaagtgcaccaactcatgtggcgtgctttatctggttgtttggctactaaggttcaacttaccaccaaacatattcctctagaccaagcttgtcctatgtgtaaccaggtgcctgagaccatttaccatttgttggtgcaatgttcttttgcacggtcttgttggcatctttcggttctaaattggagtcatacgcctatggagtctttttgggattggtttagccacattctgctacaacactcatccacggcccaggaagaattgctcatggttctttgggcgatttggtatgcccgaaatgaggtggtttggcgggacaaatcaatgtcagcggcggaggttattctattggcaagagtagtccttaatcaatggagaaatgctcaacaaaggagaatggggtctttacttgttcctacgggttcaagagaggacttagagcattgggtgaaaccagttatgggaaagattaaggttaatgtcgatggtgcaatctttgcaagtgatggtcgatttggagcggcaggggtggcccgggattctcagggtcgattcattgaaggcttcacagttttacgagtggggtgtgtggattcggctatggctgaattggtaggggttaaggaggccttgagttggataaagaggaaacattggggaccggttgagcttgaaaccgattctttggttgttgtccaggcagtccaaagcacggtggagataccttctccttttggccttcaggtggcggtttgtcgttctcttttggccgatttgccgttagtctcaattaattttgttaaacgttctgtaaacaaagctgcacattgtcttgctcgtagctcttgtttgtatccagatcgtatttttagtgaggatgatgttcctcctgattttctttctattgtaatggttgaatcttcttattaataaagttaccattttccttcaaaaaa

SEQ ID NO: 347036 - DNA, 897 bp, Cannabis indica
gtgtaacaaagaatgtgaaaaagctttccaagagctaaaggcacaacttgctaaactttccgtattttcaaaacctctggacggcgaggagctgggaatatacttagctgtcacggaacatgccgtgagtgtcgtgctgatcagagaagagaacagcgtacaacaccaagtctattacatcagtaaaagactcattgaggccgagggccggtatccgttgatagaaaaactcgcctactgcctcattctagcaacaaggaagttgaggccttatttccaagctcatcttgttcgggtatataccgaccagccactacgacaaatactgcaaaagccagatgcttctgtacggttactcaagtgggcggtagagttgggtcagtacgaaattactttccaaccccgaagagcaatcaaaggccaagccttggcagactttgtggtagaatgcacaggaaaaagagaaagcataccagaaagcaatctcgagctagcactaatacctcagccaagccacaatgaggacaaacggacctggaaactacatgtggacgggtcggctacagatcaactatctgatgcagggattgccctcgtcacgcctggggggcaatacctacacgctgcagtcaagttcggatttaaagcatctaacagcgaggtcgagtacaaaactctaatcgctggactaagactagcccgagagatgaaagtgttacgaaaattgtaaaacaatacgcaagtgcacgcaatcaagtagtaaactcacacaagtgatgtcgaaccacagggaattggattaattactactaaattatacttatgattctatctggcaaatcaatactttttaagatttaaaaagaataagtaattcaagaaacttaaagaaacaag

SEQ ID NO: 347037 - DNA, 507 bp, Cannabis indica
agttgccctattataggagtaatgttatttggtattaataaaaaaagatttatcttctaatttatttattaatattaatatatatataggataattatatggtaggtcctactctttctaccctatagtatagggaagaaaattcaaccaataagaattgaaagaaaagagaatgtataaagtgtttgtttacataggtgtaagagattattacaattaggggtgtgcagaaagtcatccaatccaattccaaccgaccgatccaatcccaaccgatccaatagaatcggatatccaatcataattggatcggatcggatgcaaattttaaaaatccaattggatcggatcggatattggatgagacatccgatccaatggataaccgatccaatccaatccaatatcatccaatgtccatccaatcatatttaatatttataattttatatatttaattattttatttaatattttattatattattttattatttattaggtttt

SEQ ID NO: 347038 - DNA, 950 bp, Cannabis indica
aaaaacataaagggagtcagaaactgactcaaagattcaagtgtccggattcaagcaagcctgaaatcgctgaaagctcttcagcaactttgaagccagaaaactctctctttttgctctgaagtttgcttaacaacgaagggtgatgaaatgaggtaatgtgccagtactccaagtatttataggcaaaagggtaactgtacgtaaaggaaccttagacgcctcgacttcccgccttgaaagcaaatatgggaaatcaaaataatcgagtgcaaccgtcagccgtggagagagaaattcggattttcaaaatattaattgtcagagcattaattagccgaaaaccgaagggacgcccagtcagcttcacatcgagtctcgaacggtcatgctcgacacgtgtcccctttcaaaggcagagccagctcggaagaagtctatacgcaacctcggaggtcccgcacagacttggggggcaaatgttatcccaaaattggcactctgacgtggcatcacaagaatggtgacacgtggcatcaacttagagcacctggtcggatcaacatgccgagcaggatgcctcgctggcatgtccatgatggaatactcaacgagccgtgcagaatgagcaacacttagcgaattcagccaagcacttcgtgagtcaccagctcaatccctataactcagggatcaacttgcgtggatatggcatacacacgattccactatcggtgtatacggcctcaatcccacgatcctagcattcagcaatgatcccacgatctttgtgtttatgcgctttgtaacgagagaggaaactcttcctcctcaagtttcctgccctataaatagtgaggaatgttcactgggcaagggggagaaatcatacgccgaaacgctataagctaaggctatctaagaattatatattcagagatattattgta

SEQ ID NO: 347039 - DNA, 1099 bp, Cannabis indica
ctagctcactatttcacatgttgttgtaatagaatggatgtcaggcaaaacatgcagagccagggtaattcggtcagatccagtggaactcaaggagttcaatttcctctgaatatttgtttccgaggcagaggcctaagaggtagggcccgcggtcagggagatgttaacccaccaaaagctgcctaggattggaaacatcggtttgctaaaatgtaaaccaggatcaatgaacaagatgaggaaattcgacatttgagacagcaaggtgctcctacaatacctgcacctgaggtgcagatggttcatgcccctactatgctagtggggccagttgctgttggcaattgaatggaaccattatatgaaatgttctgtaagcaagcacctctagtctttttgggaggtctagacattatgaaagttgagcaatggctagccgttattaatagaactctgaactttatgggagtcactggcaatgatagagtgacatgtgctactttctagttctataaggatgccctagtttggtggggcatggtatccatcacccagaatgtcaccagaattacctaggaagaatttgaagagctgtttaatgcaaagtactacaatgaagcaagtttacagtgcaaaaagataggatttcactcaattaacccaaaaagagaaaatgtcagttacagaatatgcaacacagtttaatagactggctaggttggcttcgagaattgtgccaatagattttagcaacaaagaaaaatatctggatgggttgaatcccaagattaaacatgacttgatgatcataacagatggtgctactacctatgctgatgaaataaatgctcggccaacttacatttttttattaaaaaattgaatttatatagtgtttgaataaaaactaactgtttatatccattagcacatttttcaaaaagatcttgggaaaaaagggtctatcgtttagaaaacgtagatcgaaaacaggacaatggaaaatcccattttttttgctctaaaacgcgcataactctttactcgattattcgattttagaaattctaattttgttctcttagttaaatgatat

SEQ ID NO: 347040 - DNA, 754 bp, Cannabis indica
attatctatcccttttctaggttcaagtacttttatcaaggcgtcgtgatgcctcgttttgtacttttctacctcgcgagaaccggtagtatttagttttatacgcaagttataacttttgattttccttttccatcggataggtttcaaataaaaaattatagttgtttgatcccttctttgtcaaaaaggtttgatcaaggtgttataaagattcgacccctctctcgtcaaaaaggtttggtcagggagttataacagttcgactccactctcgtcaaagaggtttagtcgagaacctttctagatgaaatggcaggtttgcatcataccatgtatttccagatgaattctggttaatcatacataaatgccccttaagtaatttttaaataataaactttgtaaatacttaatataaatgattctctttattcataactgaagtttaaagtttacatcatgaatgcaagttacatcatttatttattggtagtagagtcgcaagtgttctgcatttcagtacttttttattagcgagccgttgagtcgagccaatttataaactccagctccaactactacttcgatgatatatggaccctctcaattcaggttgaacactcctgtagatgtatctctaatatttgcaaacactcattttagcaccaattctctaacattgaatagttttttctttgacttttttgttgaagtatcttgtaactcggtgcttgtatgctgcgttggtgat

SEQ ID NO: 347041 - DNA, 643 bp, Cannabis indica
ggtaccaagcgctaaaagaagaagtcaatcgcctcctagcctgcagctttatacgggagtcgttttaccccaactggttagcgaatcccgtactcgtgcccaagcctaacggctcatggcgcacaaataggtgactttacagatttaaataaagcctgtcccaaagacagcttcccacttcctagcattgaccaacttgttaatgccactgcagttcatgaacttctgagcttcatggacgcatactcgggatataatcaaatcccgatgtatgaacccgaccaggagcatacctcattcattactaatcgaggattatattgttataaagtaatgccttttggtttgataaatgcaggtgtgacttatcaaagacttgtaaatatgatgttcgcagatcttattgggaacaccatggaagtatatgttgacgatatgcttgtaaaatctcagcatgcgaaggatcatatcgcccatttacgggcaatgttcgatatattgcgtagatataagatgcgactgaacccgctaaagtgcgtctttggagttggttctgggaaattccttggattcatggttaatcaacgaggtatagaagccaaccccgcaaagatcagggcattggtggaaatgccatcaccaa

SEQ ID NO: 347042 - DNA, 611 bp, Cannabis indica
tatgtgtttattttatcgttttagaaagttcatatttagggtgttaaacaacatacttgtgagtagatctaagatcctggtaaaataattctaacaataagtacccaatgtttgcaaaactgtaatttttctctaattttgtcagtacagactctgatattgtcttaaacaggacacatataaggcctaaatttttgatcattgggtctagatagaaatatatagtatcagttacttccaaatattcttttaataaattcaaaatagagtctgtactaacaaaactggaagaaaattacagttttacaaacattgggtacttatgtcactaaaaataaacattgagtttatgccgcttataaacataaaactttgggtaattatgccactatttaccctatacaaaattcagagaatgatgttattatgtctattgtatttaaatatttttaagtagtttttttttagaggttattttttagagatttttattatcacacagaatttttttacaaaaatactgtatttttataaaacaactgtgaaacaactaaacaacaaccgtagaataacaatgaaaacttaacacagtacacagtataaacttacac

SEQ ID NO: 347043 - DNA, 600 bp, Cannabis indica
tatgttatttttgtaatttttgctcggtgacaacggaaaatgcaatggatggctagtatgatcacatgtgtaagtttagaacattatttcttagcgggatatattttggagaaataaaatatcagagttgagcggggttatggaatgtgaccattttacccctaatcttgaaaataccctagtttaagctaaatgacattttagtcatttgttaaaggggagggttaggtggctgcctaattatatgacacctagcaaagttaatttcagccaaggtttaatttagttaaaccattatttcattttagaaagaattaaagaaaattagaggaataaaccaaaaaatcaagaaagctcactcttcctttcctctctcttcgaactagcccagaacaaaggaagttgtttctgatttttagtgttttcagcaaggattcaaaggaaatcaagccaaggtaaaccctagatactttctagctatgttttctcaagattttagttggtttcaagtagtgattttgcaagttaggagctgttagggttaggttgtttgataattcaaattctagggttcatttgagttggtttcagcttctagca

SEQ ID NO: 347044 - DNA, 599 bp, Cannabis indica
aggactttcaaaggcttttgagtcatgaggaggaaaatgggaaaatttgctcggattaaaagcttacaaggaatgccccgtctgtctctcatctgttattcgctgatgatagcctcctattctgtcaggctaacaacaactcggcccttgccattaaagaagtgcttgatgtctaccaccgtgcttcgggtcagttgctcaataccccaaaaaatcaatcatgtcccttctcaccaaacacttcgaatgaggcacaagctttctttagccaaactttggaaatgccgatctgtgaatgtcatgaaacatatcttggtcttccagcatactcttctcataataagcaagagttgttcagcaatgtcaaggagaaaatttggaaattactacatgcttggaatgacaaacttttctctgttggaggtaaggaagttcttttaaaagcagtggttcagtctatccctacatatgccatgagttgtttcagattgcctattcgggttttgtaatcaaattgaatccatgatggctaatttctggtggggtaacaaataaagatggactcgaagatacattggaagagatggaaattattgtgc

SEQ ID NO: 347045 - DNA, 658 bp, Cannabis indica
gcagccatccttcttgttagggcctggacatccttaggctttgttagtgatggcatatctatcaaagccttgattttcttagggtttgcttcaatgcccctcgcgttgactatgaatcccaaaaattttcctaagaaaacttcaaatgaacattttttcgggttaagctccatattatacttctttaatatttcgtagcattctgggaggtccatggtatgactcccactttttactgattttaataacatatcatcgacgtaaaccttcatgttttgtccgatctgatttgtgaacatctcattccccaatcgttgatatgttgccccagcattcttcaacccaaatggcatgaatttgtaatagtaaagtcccatgttggttacgaagctcgtatgttccttatctgggacatgcatttttatctggttatatccagaatatgcatccatgaatgacctaagcttgtgaccagcagttgtatcaaccaactcgtcaatcctgggtagtggaaaacaatcttttgggcacgccttatacagatcagagaagtcaatacaagttctccaagtttcgttaggttttgggataagaacaggattagctatccacgagggataaaacacctcgcgtataaagtcattgaccaacaacttat

SEQ ID NO: 347046 - DNA, 686 bp, Cannabis indica
ataatttataattagctacaactctttttgtctttagtcacaaattttattgtaactaaaagtaagattttttgtagtacaaatgagcgtaatattaattggactgagatgctattttaaagggccaagatgcaaaatagtcataaatctaacaattaagttaataaatgtccctttttatgaaaattaacaaaatgtccattctgttaaaaatttgatgatgaaattacaattataaccttgcataattaagtggttggtatagttattttgaacaatagtatatcgtttttatgtgcaattatatattaaaaaaatcttaaaggtagtacagtagaacctctatttaagaataccctattcaagaataacctctaatttgttataaaaaaaattaagtcccaatttgggcctattataaataagaataacctctaaatcgtaattagttatacaatttctaagttccgtattaacaaagtatacctctatataagaataattacatcttaataaaaatatatacatataagtttaagattatagtatattattttaatgtgctatggtatataatgaacaaaagatggaaatttaaaaatgtgaaatattaatataagtttgaggtatagttatatttcactaggaaatattgtctttatgttcattagtacatcatgaaggaa

SEQ ID NO: 347047 - DNA, 1105 bp, Cannabis indica
atagtgtctggaggggcactggaagaagccttcgatgggggtggccatctgggaagaagttggaggaaggggagcatcaggagtgtgagctccggcaagggtggccaaaattgcctccatgggattagctgctgcaacaagagaaaagagttaagtgttagaatatctgtgaaagcagtaaacacttaaaaaagcaatcaagctagtcctaccctgactctctaattcggccctagcaaagttccgaatcttaatactggctgcatcatccccgagatagctgtccgagggccggaaccagctagaagaaagataggccgaaggatccaagggaacgggctccggaggtccagaacccatccgggaccgacctaaataatctcctaagttggagaaataataatcctttgcatgatccccccaccgggtcgagggcatcctaaacctaaggagacgttcatcgaaccctacaggcctaaggctagcatattcgctaacaggagggacataatgtattgctaaaggggacttaccagagccggaagtgctggcgtcaggagcccctgtattcggcacctggacgataggccttggcctgggagccctcttctcaaccggactcccaatgcgaagggatctcccagcagccgtctggctcctcctctcaaccgggctcccaacgcgaaggggcctcccggaagccgcctgggccttagtataagccttttcctgggccttccggtagaggtaatcttggtacttcttttccgcggtggcaataatctcatcccggaaggtcttctccgcagccggaaccctcacgttcgggcagatgaccttggaaaggttagagtcctccaccgattggtgtgctaggatcagcctggccttccgacagttctccgtcgtgacaaatcccttgacgtcgagatccgccctatcgtaagtcgcaaaggtcttggcccgctgaagaaagatttgagtaggcgcggtccgctcgtacggagggatcctaacccactccgtaaggagctctaggtgctctactgctcggaacccgaaggagaagaaaaagcgatggcggtactgttgggttttgtgccct

SEQ ID NO: 347048 - DNA, 1109 bp, Cannabis indica
cttgtcttcaggaggtgctatcacttgtactgcaagaatatcttcaggaatgtcagtccattgtgagtttggaggtacaggataaatagtttcagcatatgctaacaaccaatattctgatgtgtagtactgtgaacacatagaatatatgagttccccagtattttggggttgtgcctttcctgctgctgctattgcatggatacatggaagtttctcaatatcaaaaactttgcacgtgcaactctttgaccttaaatttactattgcatcgagttctccacacatcacattgtactcattctcatttaactggagagttatcaatgaaccggcttcatcccatctcttgcgtaatatttcttccctctttggtgttaatggagttgtaactacacatgcttcccgccgacgttcaaaaaaccattgtcccatcgtgctaatgataaaatcaatcatagcaataattggatactctctggcctttcgcatcatattgttcactgactcaactatgttagtggtcatgacttcatatcggttaccaacaaaatgtgctctagaccactttctgaacttgacatcattctcaagatacttagcgacacgtggatatgttttgcgaagttggtcgaagtgtttattaaactcttcgatacggtacgctattgcagctttcttatacaatttagtcccagcagcacttttgaaacggtgttttatattttgctttacatgccaataacatgccccatgagaagccataacataaacacgacgaactgcatgttcaatactttgatgtctatcagaaacaaaacataagtctgagctatcaggtatcaagtccttcaacttctctaagaaccatgtccatgaagtgttattctcactgtcaaccaaaccccatgcaatggggtaactatggtattcactatcttgtgtagttgctactaataacacacctttatgcttagtcttgatccaagctgcatctataccaattacttttctcatgtaagtgaaccctcttatggccacacctaaagccataaaaaaaatacttgaatttattttctaaatcaagttcaatgtgggtaactgtacct

SEQ ID NO: 347049 - DNA, 932 bp, Cannabis indica
taatgtggcgcagatactgatggagtatctcacttataaatatagggtctcggtccccgagctcttcactcattctataacaacaaaatttcatttaaagagaattaagagagcgaggaagcccaaactccaatactgaagctatcgcaggaattgaagctcaaacattaatggctagagttatttcgattctttcattgcatatacatttcgatatgtttataatttattctgtattacatattgtttatatattctgtattttcatattatattttatagtctaacacctaatccacctatacctgccctaaggtagtgtgtccaatttaattatgtcacagtcattagtattttacctaaggccaggtatattaatttataaaagctttatttactgtgggattcaaagttccaactagtaataatagaggcattatgacatggccggctagagggtggggcagccgaggccgaggccctaggccccacaattttggaggccctaaaaaattaaacttaatattatatatataaaaataaaaatataatatatgtatatatataaattttggtttaataatttttataaaaaatttacagcacaattggtaagagaggttaatattggttggtgggtgctgggtttgattcctagcatcttcaaatatcaaatatttttaaagaataactaacaaaaatagtataacttaaataaaaagtacatttattaattattatttaacttcttaaatttataaaaattaacataatttttgacatactattgattttttttataaaaatcctaaaatatataacacttcaataaagatgctattaattataatcaaatattacattaagtggttatgtgtgaaaaaaattatttattatatggagataaaagagttaattatattgtgtcaaaa

SEQ ID NO: 347050 - DNA, 773 bp, Cannabis indica
gctccccctccttggcatccttctcctccttcatctggagaagaactggtcacagagaagtcctctcatcttgaagactgtttaccttagtagataagatctcgatggtctcctcaaaatggtcagcgacctcgagatccttagtcagcacggagatcttcttctcagcagcaaacagcttcttgttggcctcgcccaactccaaccgaacagctccggcttctgccctggcttcttcagcttccttcttggccaagtctgcctccgccttcaaggtgtcggacatagccacggtcttggaagcaacaacttagcccgggagtaagtgtaggccaactttagaccggcctacacagagaaaaaacttcagcatattgaactaagtgtggaaagttaaagggaagtatcaaaaaagacttaccctggtcaactcctttaagactccgcccactagaacatccaaagacgagtcattgtcagcaccagccagttgctcactgacctcaggaaccagccggttcatgtagtgggccagcatctccttgccctttttggcctctagaagaactggcaaaggtggagttggtgcatgcacccgttcaggatcactcctgaccagttcagtcacggccattggtggtccagactccttggacttggcagttttgggggtagaggggtttgcagcagtcagctcctcggaaagatcaataacctcgccggaaggtctcttttcctttgaagaggactcctcaccgcccttagacttcttg

SEQ ID NO: 347051 - DNA, 630 bp, Cannabis indica
cctctgtctcatattcaaatttttctgagtaaaaaaatatttgaggctcttgtgatcggtgtaaatctcatacttctctctgtagagatagtatcgctaaatcttcaaggcaaacaccactgcagcaagctttagatcataagttaggtatcgctgctcatactcctttaactacgggaggcaaaagcaataatcctattcgataacattttatttgtattttatctcctatatttttgggcctccttcacctataaaaggagagctcctttagttcattttttactttcagaaaactacccataaggccagagcttctctctctagaatttgaagcttctgatacctacacacttactgtaattaccatctcgtgagacgtaaaaaactagaagtaaacgtagctccattactatcgtgatataagggtgaactactataaattgatatgtctctcattaattactttataactttttttattctcgccaatcgtgcgtgcaggtgtgcttagaagtctagttcagatttctgagtcaacaaatactttttgttatgtagtcatatttaatataagaaaataaaaaagatatgtgtaatgtgtttaaattttgaattgtaattttaaaa

SEQ ID NO: 347052 - DNA, 680 bp, Cannabis indica
ttcaagaaacttttcaaataatcattttgtgattctttatcactttgattatattagattatattggctcactaacaaatttttacgataatattagtaaattatatattcacttctgggaatatgcaaactgaattaagtggtaaatgtatatatacatatcttgtaccaacaatagtttgaaactattaattttaaaaaataataaaacatgtatatattaatttgtttctggcattactaatatatgcaaaatctatattctttaaaatataatttcatgtctattctctttaggaaatgatatttaaatattctaaatgtacaataaatttgcgatatattaaaatatgtgtacaattcgcattctatttaatagtcaaatataattttattttgattataagtgtgttcgtacaacaggtacgtcaccactattattcaattccacatatgatatataaattttatgcactttaattgtgtgtggtatttcatcttctgtttttttctaatttcttttgaaaatatttgagtagtgaataatgccattgattaatctaaattattgcattcacttcagggaatgacgttaaacaagaagaacattattataagaaattattcagtaattttttttacaatatttcaaagaatatatatgaatatagtttttacat

SEQ ID NO: 347053 - DNA, 535 bp, Cannabis indica
ctgatcaaaatatctagaacatgcccctttagtttttctctgtagaatctgtaactaaattatgttccagttgtgtctgggttgtataggtgttatgtctggtatttatactgattatactgattataattgtccaacttaggaaatgatttattagttggttgaccaagttggttacaattatcttttctggattagttttgagttgattatatatagaattttcttattctattacaactattatctcagattgtagagcttggattcattttctttgagatcgaatgttttcttttctttttctgttcgttttctcttggtgtgtatcttctttcaggaactccattgatggtgatttgacgttctaaagcaagatcaaatttaggtgtgaatcgttgaagggagtttagcttagtcttagctacacagattcgaatggagttgaatcttgagtttgttgaatttcaacaagaacataatagaatcttgtgtatgaccaatggttttggttttgggtatttctttttaaatg

SEQ ID NO: 347054 - DNA, 1002 bp, Cannabis indica
gtatgagcctcttcaagaatctctttaagttctgcactacttggaacacaaactctggtcatgaacaacaacatctcaccatctgatactgtaaaatctctggcttgaccagctaaaacctcttccctgatcttcactaattctagatcagttaactaagcagctttaattcgttctaatagatcagattgcagcgtcaagttatgaagtttgcctacaataaactcgatgcttgatctgaccatgtcctcttctaactggggtgaaatctgaatcgtactagttgcttgcccgggacccttcttgctcagggcatcagccactacattggccttctcaggatggtaaaggatttcacagtcgtagtccttaaccaactctaaccaacgcttctgtctcatattaaagtctttctgagtaaagaagtacttgaggattttatggtcagtataaatttcacatctctctccgtagtgataatgctgccaaatcttcaaagcaaacactagcgcggaaagttctaaatcataagtcaggcatcgttgttcatattcttttaactgacgagaggcgtaagcaataatccgatcagcctgcatcagtacacaccccagaccttgtctggatgcatcacaataaaccacaaacttttctttatcagaagatagggctaacactgaagctatgattaacctctgtttcagctcttgaaaacttgcttcacacttgtccgtccacacaaactgctgattcttttgggtaagctcaaacctctgtaactttttttggtctcggccaatccctgacggattctatcttgcctggatccacttaaattccatctttgctgaaaatgtgtccaagaaaggacacctgagatagccaaaacttgcacttcttgaatttggcatacaacttatgttctcgaagccactgtagaagcatccggagatgttgctcatgctcctcttttgattgagagtacacaaggatgtcgtcgat

SEQ ID NO: 347055 - DNA, 990 bp, Cannabis indica
atccccaatctccattagagagcttttcctctacctccggcgaactgcgattcaaccttggcagtgcatcgcagccatctcggatgataccgataggatcgactgaagaatcatccattgaatccaccgctgaaggtactacatggccttcagtgagttcttcgacatccacgaattcctccatatttacaggagttgatttcagagtagattgtgccgccacatataattgatcaaattgatcgttaatagttttaaagtgttgctcaagcatagaactaatcttctcaaattgagaatccaaagtttgcttgaaaaatgactccatagatttgaagagttgaacaatctcttcatcttccatggttgagagttctttcactgtaatttctctcaatgagagcaccaattgttagataatagtcctcttcgagacaggacaaatctcctaaaatgcactcttcgagtcagtgccaaactccaattgaaccaaagttctatttactcattccatatctcatatctcataatagttacacaattacatatttatagtgattcacactctttacaaattactaataagcccctacactatttcattgtgtaacacattgggtattaatggtgcctagcaccaataacagtatgacactgaggaaggtgctagacaccagtagtacttttagcattttttatatcttagctatttgattgttaggtcaactccaatggaaatttattagagtggtcttgccgcatttgcaatgtgatccaattttcaagagtaattttatgtaagtgtttgcttaatatcgaatgaccacatgacatttttttattagaaaaaagttatttttatctaaaaagttattaactcaatgtgacgtgagatatagtaggcaacttttagagttgtcaattatttttagagttgtcaattattggagtatttttttaagagaagaagacaaatcttatgtggatgag

SEQ ID NO: 347056 - DNA, 596 bp, Cannabis indica
aatcgcttggacacacaccaagctattagtttccaacatgactctatcccacgaatgagttgcaatccaactcaatgcttctttaatgcctattatcttagcaatttcaggttgaacacatccaatcttccccttcttgaatgcttctatcatagcactatgatgattttgagctacacaacccatgctaaaagactcgaaccagaaaaaactaaaaagaaaatactaaaaaaccatgtcaaaagacaagactaatgaaaaaactaaattaatttcaacacataaatacgatcacaacattaaaattaattaaggaatgaactccttataattctaaccccataaaaatattaattggaattaaactaataatagtaaaataataaatgaaaacataaatctgaaacggagtacgtcgttgagccgaaccgaaccactcttagatgactgctcttgaacccctcacagaagaaaacattgatgtgggaataagaaatattttggcatcaatcaaaaagatcaatacaataatatcttctccttcgaaatgatctggcttgatattttttttaatcataaatataataaaaatattt

SEQ ID NO: 347057 - DNA, 642 bp, Cannabis indica
ctaatttttgcatcatttatctccaatttggatttgggtttttgaatttcaggtttgtattggatggcaagttcagtaggatactctatttctaaatcttctggatgataaacttttgaactagattgggagattgatgcaaggagaaagcaatcccgattcctagaagaaatttatcaaactagtagttggtaaattggagaatctcaaaaacctacgttctacctaaaccctaacacttacccagatacaatccactcctaaaaattgctaagaccaaatgaggtaacaaatatgctgactaaaaaattggtaattaaacccagaaataaaacataacaagcatgtaagaaaataaggagaaaagtcacttactgtttggagttggttttggggacaatgagcgtctctgcaatctacgaaataacaaacgacgcgaagatcccttcgaatgcttgaagtcgaaaatcaaattggataaaactcgcaggaaaaatgttaatgacgaagatgacatgcaaggttttgggtaaatctgggaatggtttttctgcaaaaaagctggaaaaatatatgtagtttctgaaatggcaaaagtagtgcaaaggtggttccttttctcattttatactcttgggttaa

SEQ ID NO: 347058 - DNA, 678 bp, Cannabis indica
agcgaggcatcaacctcgttacgtatgttgagatgtagacgagacatgttgattgttaaaagacttagcgcataatatacattatacaaactaagcataatagttgaatgaacttgaacaacgcaaatcgcgaggcatccatctcgctataggaaagcatacctatggtactttcactaatcagctccagacatctttaaatgatacccactgctccgtcgagacagctctcttagaaagaagctgatatttaaatgatgttgactgctgaagttcaccttatcaccaagaactacaattgtcagatggagcgttatgtcttcaatcccagaaacgacgagatttacattattaaccttggaaagacatgggaaaagctctagctcgctgctaggattattattgctatgttccaagcgagatgtcccagcacgatacactttgcagcgtatttaatccacgtacgcattgacctggtaaaagtggataaaccacagttgtgtgattttcaaattataatcgcatttattttacatgggatgtaatcaaatcccataatttcaagggattattgttgtgaaatatcagtatgattgtaattaactgccctcctatgtaaggaacaaaaaatcttttagagaaaaaaaccctagttttgtatcagaaatctaataagat

SEQ ID NO: 347059 - DNA, 467 bp, Cannabis indica
gaaagcagttttgacatccaactgctcaacttccaagtcattgtgtgcagcaatggctaacatcattctaatggttttgtacttcacaaaaggtgagaagatatttatgtaatcaactccctcaacctgtgtgaatcccttagctaccaatctagcttcatatctaggtggttcagcctctaacattccctctttttctttgaacaaccatctgtaggagacaactttcttgtcttttggtcttggcaccagaatccaagttctattcttcttcaaggaatgcatctcttctcccattgcagcaagccatttcttctttgatttgcatgcaattgcttcttcataggtagttggttcaggttcattctcagattgtatcacagccagggcataggctatcaaatcagcttcagcatacctactgggaggtctaattgttgggttttatgccctaaataaaactcttt

SEQ ID NO: 347060 - DNA, 871 bp, Cannabis indica
ttaagtcaatacaactaacgaggattaggctattaccgaattgctcggggttgaacctctataaaattcatgtgctttattattgctttattatatatttgttacgacaaatcgtttatcgcttataaaatagactcattgtggttggctaaaagagaagtcaacattttggtgctttcattgagagaaggattacaaatcactctttattcgacactcaactgccaacacaatggtgcaaactcgtagaggcctgtctgacccagcaaattcacaaacgctggattcggcattataggacccagggagttcaagggtcctgcctgctgttaatcccaaacagacgggaagcgtggtgaatggtgaaacaactcctattaatgaaactgcgccttgtgtgcaagagactgggaataacagttccgcacccaaccagggcattcataatacgattgttctgcctggaaccaacgtcgagacgaccatcggagacgcaacctgtaaagaccgcttagctttaatttggaaattaacagataattaggtatttattatgaaagttgatttttaatattgaattaattatttatgatgatttatttgaattcaaaatgtatttttacgtcacatttagaaatttcataattttgcatattttggcgcccggcaacattcgaacgcggtgtatggcttttgaatcacatcttagtatttttagtatagtgggacaatagttagacatttggaatgtggggaatagacgggattttagagtttcccaaaatacccctaaataccccttttatgcctcttagtgtgggaagggaaaaatggtctttttgcccattttagttttgtcctttagtggact

SEQ ID NO: 347061 - DNA, 570 bp, Cannabis indica
tgtttccaccaaagattcgttgcgaatcattgttgctatagttgcccattttgatcaagaactcaaataaatggatgtaaggactgccttcttgaatggtgacctatttgaggatgtgtacatgactcaacctgtaggttttgagaagtctagcgaagaacacatggtttgcaaactcaagaagtagatatatgagcttaaacaagcatcaaggcagtggtatctcaagtttgatatgattgtcagtgggagaatatggtggatcaatgtatatacatgaaggtcagtgggagcagtttcattttcttggtactgtgtgttgattacatccttcttgcatctaacaattctgacctgttggctgacacaagacaactcttttttgacttttgacatgaaagaccttggcgatgcttcttatgtgcttgggattcaaatccttcaagatagggccaatggtattcttcttttgtctcagaaaacttacattgatcatatcttgaaaagattcaacatacattcatgttcttctgggaaggcaccaatagtgaagggtgacaagttctcaaa

SEQ ID NO: 347062 - DNA, 504 bp, Cannabis indica
atagtcaatgatattgaggcaatatgcaggaatttcctgtggaaggggcaggctatagcagctggcccggggtcaattgcgtgggattctttgtgtcatcctaaagctaatggaggactcggttttaagaaggtccatgagtggaacaaggaagccatggggaagtacatatgggccatttcaaacaaggaagatagcctttggttgaaatggattatttgtgtctatattcgaaatgaagattggtggcaataccagccgcctactcatggaagctggtattggaggaggctggtcacactcaaaaactagtttagagagcttgttgaggttaatgatatatccccttatagtgttgctgcatgttataaaattcttcgaacacaacaggataaagtgaattggagtaaacaagtttggggacgcttaaacacaccgaaacacagttttatatcttggatttctattcaagatagattaaaaacaagagataggctgaagcga

SEQ ID NO: 347063 - DNA, 316 bp, Cannabis indica
tctctctctctctctcttcaaggaagccataaccaccatcaccaccactctctggtggcccatctctggccaccatccggccccacgcgccaaacaaatcgaaagcccaagtcctagcgatctcaccccccaagcggcgccgcttctttcgctaccgttagctaaggatcgcaagtcaaagtttgggggttccatctttgaacggattttttcgatcacctccggtgggtgtccgtttgacgagtcgtcttcaccactaaactcagctcattgaggagaacaacctacactaagctatcttgcccaacacactact

SEQ ID NO: 347064 - DNA, 582 bp, Cannabis indica
tttcaaacctacaatactaatctttttcttcaacccttatttctaattacataaatatcctttcaatgttgatattgaaaaaaatattgtgcacttacaattatcaataggattattcctttgtcttttttttcttctaaaaaatgataataaaagccaaatattacatgttagatcaataaaaattagcaaaaaatattagtgatatgcaacctaaaaaaatatggtggataataaaatttgtattactagacttagataataaataaataaatattaggggaattactctatatattatttttgaacctttttttaaaaaaaaaattacggttaggttgcttcggtagtttttttcgtagtttctatgtgagttgctatacggattttagttgtgatttaagttgctccgttagttgctataagaatttctgtgtggaatctcgtaaaaatacaaaaaaaataaacataaaaaaaaaccctaaaatattattggcgcaatatttttaataaaattttaaatgaaaattagcatgaaaagaaaaaaaaagacattaacaaattaaatatttaaaattatta

SEQ ID NO: 347065 - DNA, 638 bp, Cannabis indica
tattaatgatgaaatggactctcgagtcaaatggaacttgtcatttagttgtgttaccaccaggttgtaagacaataggtcgtaagtggattcttaaaaagaaattaagactcgatggtactactgaaaaatacaaggcacgtcttgttgccaaagggtttggacaaagagaaaatgtagatttctttgatacattttcacctgctactagaattacatctattcgtgtacattttgctcttgctgctattcataatctcgttgtgcaccaaatggatgttaaaactgctttcttgaatggtgaattagaagaagagatttacatggaccaacctgaaggttttgttattcttggtcaagaacagaaagtgtaaaaattagataaatctttgtatggtttgaaataggcatctaagcaatggcatgagaaatttgataatcttgtcatctcacatggatttaaagtaaatgaaagtgacaaatgcatttactataaatttgaaaataatgtgtgtactattatttgcttatatgtggacgatttgctgatttttagatcaaatattcatgtcgtgaacaatgtgaaatctttgttatgtgaaaattttgacatgaaagcgaatgtaatccttggtata

SEQ ID NO: 347066 - DNA, 539 bp, Cannabis indica
agtgggttatagaatcgatggaagtgaaaaagccagaaatcacaaagggaatgggtttgagagaaaaaatgtttagagagaggaataggagtaaggatctgtagaacacccaaaacattaaataggcagggaaaagagcatacctcttaagaagagccttgatgtaaaagctagtagcaggaagatccttccgtcccttcaagctattaagaacatgtctgtagcttctaggcgtaatcatcaccctctagagggaaggaggaaacaacaacatcacgaagagaaaatatgaaaattccaatgcaaataaagaacaatagtcgttaaaagccatgggaagatcaaaaacctcattgagaggatcaaagaattaaattagcgtacattattactaggggtgttcatctgatccaatccgcacttttttggtcaaacaacatccaatccgcactaagtgcggatttcatattttggatccaatccgatccgcataagaatttaaatccaatccgcaatagtgcggattggatcggttattt

SEQ ID NO: 347067 - DNA, 701 bp, Cannabis indica
gcctttttagtgggggtctggtctcgagtttccaggtgaagagaaatctcactataacaaaaagaggataaattaactcgacgaatttaataatcaaagtctgatattctcggatcacaatacgaaactcatgcatgttcttctcaaagtaaataaatatttacaacgttaaaagcaaagacaatcaacaatatattcccgaggatgctaagctagcttgtcaagacatttagaaatattcctggtgttgacattgttaacaatgagaggcttaataaacttaagcttactcctatttatcaccttagaaatacaaataatgtgttatttgaggagtatctacctaaggcatgtatctaaaggttgactaatttttcaaaaactttacaattaagtgcctcgacaactgaatgttacagagaagaagaccaagtaaaataagacacagttatatcatttaaaataaaagcagttgcatgctatttccaacctattagataaaatatatgaaatgtggtgaatatacatatttcataacaattgtaaggattttagatcaaccataattgctatcctactcctataatatagcagttaatcacattgtaaaagggacgacctattctctactttagaggaaattctatcaaattgtatttgtaattatagagcatcaaaaataaaatagatttgtagactat

SEQ ID NO: 347068 - DNA, 585 bp, Cannabis indica
tggtttatttggcatattgatacgaaatttttatttttttttcatatcatttcatttcatatagcttaccattatgtatgtcaataaacctactagtttctgtttgttagaacaatatttcatatttttcaatatagagtataatgatatacaccaataaatttatcaatctatttttcatatattggaacgacaattcattttttattttaaacaataattagtctatttttttcaagtctagaatcaaatctagttgtatacaaactacatgactgtagcatgtcttacatagtaaacttggataacaatatatacacttgtcaaagatttgaatataatgaaatgccttgttcacataaaatgtcttgctcataaatttatttagcatatatagctatattatgcctatactcatgtaaaagaaactgattagtttattttagcatattaaaataaattttttattctttgtttacatagtagccctttcttatagcctatactattgtatatgctaataaatctattagtttattttggcatattgaaataaatttttatttttcttttcgtatattggaa

SEQ ID NO: 347069 - DNA, 778 bp, Cannabis indica
ataactaatattcctaaagaataattagataatttgagggagaatctctatttttgggtataaagttgtcccatagctaactcaagttgtaacccgtccaggaagttttctgcagacccctccaatcattcatgttttctgtactccttgcacatgttggctgacctgtcctactcttaaggcctggtcagcacaaaggttccattgcctggctagggtgtggtccggccagaacccctttggctggtcattttcgtcaatattggtcttccccaactatttagaacccttgttaattggcatgttgaggaaggtaactttgctcacctattgataggttgtactccacgtggcttcaaatttacctatgtggacatgccacgtcaagtgggcaaaaaatgagatcacatttgttgggaatattttaccaagatctagatttactaacaagtatgttgaattagcatcctaaatatgaatatctctaaaataatgaaattaaacacataagagtttagaataccctacattggttgcagtggaatataatgactccttccactcagatctctaacccttgttcctttctgtcacagagtattattaagatctcagcctagatctctttctctcctccgcgtttgattaccaccatcttactcactatgagtgagtacttgacttgatatttgtgggcatggcacactatcactaagggttcgagtatgaataacaatgaaggaggcttgaaaactgtatagaaagtgtctctcatcta

SEQ ID NO: 347070 - DNA, 555 bp, Cannabis indica
tcaatagcttcttccttcttatcaggagaggtacttatcactgtaaccttaacctctatagcctatgaatgtgtcaaagagaacagaatatcgatctatatgtgttaaaaaaataaaataaaaataaaaaataaaatgacaaaggttccattacatttcttcagagattttaactggtataatgaaaacaattacctagctagcactgctggtggtacttcaaccaagtctttcatatttctcttcggtaggataactcttttgatgtcgtatcaatgtgctgacaatatctgcacagatacattttctgcattaacttgtgtgcttctaaataactcatttacaacaaatcgttgtttcagtttttacaatgggctgaagactttgatttcttgaaaaatttatagagctgaagttacaaagccaaaggattaaaaaatagagtgagaaaagtaaaccttatccttaattccaccaatgggaagtacgagacccctcaacgtcatttctcctgtcatcgttgtaccaatcgtcaacgaagcttcaaacacattg

SEQ ID NO: 347071 - DNA, 742 bp, Cannabis indica
aattaaaaacaaacaaataaaaaccagtttcttgaaataatcaaataaaaaattgaaacttaaaactcaattatgaacaacaataaaaaaaccagttatgaaaactagttacttaaaaaaaaaccagttatgaaaataataaaataatttgtgtatcaaaaattgattatttaaaataaaataaaaattgctgttcaaatatcatacaataataaaattggttttatacaaactaaaaaaaaaatacaataatattataaaaatggagcaaccccattacagaacagttaaaacctgtgaaaccagtttcgacctgtgaaacgagttttgacgctataaaaaatcataacaaaatataaatgttaattatattattaagttaactgaaaccagtttcattagacaatcaaataagaaaaatacacacagataaaaatacaaaaaaaatactaatcacaaatataatcaaaacaacacactatgcgtagcaatattaaaaacaaaatataagtgtaagtttcgaacctagaaaaaaaataataaaaaagtaacctaaaataaaaaaaaaataaaaacatgatgaaactatttttttattcttttaatgaaattattagtttctttcaatgttgatgaaactgatttttaaagtttgtattatttttatattatatttttttatattgttttttttttccagtatgatgttgatgaaactggttttttttttactgctgctttt

SEQ ID NO: 347072 - DNA, 1156 bp, Cannabis indica
cttgagtaaaactcaaaagcttgctcaaacaacctaataaccaccaattcatgcataaatacacataaaaactcatcactaagtctctgaattcaacaacaaacaactacagcaactatatcaaacaaaacctcaaagcatgcaaaacatcttttccttaaaactcaagaaacttaagaaaaagctacaagagtcttaccaacaacttgagatcaaaatctttgctaaaatcagcttgaattaccaaggacttctttgctgctcaaagagaggccgaaagagagagagggcttgagagaaaaatttggattttgtttcttttcttatttttccaattttgtaaaaatgaaagataaaaataattttatttacttatttcagccaaaacttattaatcaaaatcaataataattcatttgattgatccacataaagataaaacactaaaagggtaaaaagaccaaaactaatttaaaggacactaagggtattttgggaaattctaaattcccgaccaatcctgacattcccaatgtctaaataaaccgtcccgctatacaaaaatattagattgtgattctactgagccatacaccgcgttccatgttgccgggcaccgaaaatgcaaaataatgagatttcactaaatgacataaaaatgcattctgaattcaaatataacaacataaataattatttaaatatctataaataattttcataattaaatctttatctgctaatttccaaatttaactaagtggtctttacaactatccaccccttaaaaggatttcgtcatcgtaatataacctgaacaactccggatactggattctcatatctgattctaattcccaggtggcttcctccaccttgttgtttctccagagtaccttgaccaaagctatggtcttattccgaattactttatcctttcgatcaaggatctgtactggctgttcttcatatgtcatgtctggctgcagctcaaggctctcataactaagtatatgagtagggtctgaaacgtattttctcaacatagagacatggaatacgttgtgaactgctgaaagagctggaggcaacgctaaccgatatgccacttgaccaaccttctcgagaatctcgaaaggtcctgtaaacctagggc

SEQ ID NO: 347073 - DNA, 831 bp, Cannabis indica
ttgctcttttttgttttcgcagatagaccagctcgacctacgctcgacgcgaatcgcagagagacagctgaagttctcgggagcctacctgtacaagatcccgactggcgattactgtgtatgactgccaagttgcgagaacacaagctgatcccagagaacgcaagtctttagagagagccggtatacaaggaaccttccgaaaagcaacaagagcgaattgataaacgcctctctaagcaaacttctcgaccatcatcaggtagtttatcacatacataaaatagtgcgttagaacttcacccttattagtatgaatcattatttttgctgtaattacagaaatgactttcttgaagtccgcacccactcttaaccgcaagctgaaatctggaacaccggcaacttcccctgtcgttcctcagaagaggaagagcgatgtggtggttactcctatcgcggattcttccaagaggccagctaagggcattcaagagaaagggaagaaggtcgtgattgacccagcggttccagcccgcaacatattgtctcttcaagagaagtttgtaagtgatgagttccaatcgaagattgacaagactcctgctgaggagctgctgcctcgctccgcagagttagcttcgtagttcattgctatgttctcgagggcttttgttactggatccaaggaggttgaaatcgcaaagagacacaacgttcagcttcaggaagacattaagaagctgaaacaagatgcgacttctaaggacaaagagctcgaagaacttcacaaggccaaggagcaagtcgagctcgaggctaagaacgctc

SEQ ID NO: 347074 - DNA, 714 bp, Cannabis indica
gctaaggccaattttttccagctgagtgtatcttgtttcagcatctagcaatgtcttcgaaacgtagtaaatcggttgttgctttccttcatcttctcgaactagtgcgacgttgaccgctacttctgaaactgccagatacatgtacaacgtttctccatccttaggctttgctaggagtggaggggagctgagatagctcttgagttgtcttagcgcttcttcgcattcctccgtccacacaaagtctttggtctttctaagagttgaaaagaataagtggcagcggtcggatgactttgaaatgaaacggctgagcgctgctatccttccgttgagacgttgaatatctttgattgactttggagattgtatattttggattgatcttatctggtctggatttgcttcgatccctctttttgtgacgaggtaacctaagaattttcctgaagagacaccaaaagagcatttagtaggattaagtttcatattgtatttttctaatacctggaatgcttgcttgaggtgatcgaggtgattctctgctgctaaagatttgacaagcatgtcgtcaatgtaaacttccatcgtctttccaagcatgtcggaaaacattcgattgaccagccgttggtacgtggcccctgcattcattagtccgaacgacatgactttgtagcaaaaaagtaccctcgctcagttatgaatgat

SEQ ID NO: 347075 - DNA, 460 bp, Cannabis indica
gtaaaaatgaaagaggacaatatgaaaagggtatagagtgtaatttcctcatttcaataccaagattggtgtcgttattgttggcaatttcggcggtctaggcccgtcattattggttatgtaatcaaggcgtggtgataagaatatttgtcctaatttatagcaccttgggacacctcactcgacaggcctggtctcctgagattggtcgtcacaacccgagccctaggccgtgatagatttgtaatatctataatttgggtggtcaaaagtcacacttcgacccttgtaggaagataatgcttataaatgattctttaatttatatcacaaagtactttttaaaaataatggattaactcctatatcgataagaaaatattagtaacaaaatcaggaccactcatcaatataaaagaacaataatatccccacagttatgtagtcaccgaataaatag

SEQ ID NO: 347076 - DNA, 577 bp, Cannabis indica
gtaataaatagagttttttttttttttgaaaaatagtgttttatagatcgatagaaaaaaagttagacctcatggtcattacaaaggatagtagtcggtattgaagaaagatataccataccgaaaattaagttagcataagcccacctagccacattatgagccaagaaattacaagttctggaaataaacgaaaaattacaacttaataaaaagtagagagtcgtttctgaataaatagatttaataagtcaataaaataccaaaataatatctagcattcatcattcctcatttctaactagtacatagctaatttaagtcatctaaaccattcattcaagcttaaaaacaaaatcagtttcattggaaagtttgataagtagaataagacaaaactattaacatttttcttcctcaacagtaccatcctcatccactagcatcaaactgagttcttagaattgaaaaaaataggagggtgatcttataaagcccagtagaaaaataactaatattattaaaggactcttagtttaataaaaattcctgcatggttagcttttaaaataaaata

SEQ ID NO: 347077 - DNA, 645 bp, Cannabis indica
tggacctgaatgtttgtaactaatatatgtagcttagactctaaaccacaaagttacattgcctgtagtttctttaccaaaaataaaataataaataaaaaataaaaattgaaagagataatttcgagtgtaagattgaaaggaagagagagagaagtgcagagaaaagagaaagattgggttttgggatttgtatgaagaagtttctgtagatgaagaagctttttatgtaagagtgtgagagataaacactttgagagaatcctaacagagaattgatattgactttgttaactcagaaactagccctaataatgtgaacatcaatgcttgacatgtggcaagaaaaatgacatctcaaagttgagtagtcacaagtcatagcaggtaaacttgggaagggtcctagccctgcgcctaggttgacttcgggaactcctgaatggaatagttcagccttcaataacttgaatccaactcactctcttttagtgctctataccatgaagacatggagcaacctaatacaaggtctgtgagctaaaattacacgaacatgcaacccgaaagccaacctcggcaccaagggtttccacccggcacccaagttgttaggtccttttttggcaatttagttgtcaaaat

SEQ ID NO: 347078 - DNA, 710 bp, Cannabis indica
actactgacgtgataatacaataatagtggtttacgttactacttagacaagtggtaagagttttttcctaagacattagtaagtagattgtatctgacgtatagtgtttacattggactggagcgatattaacagtagaaaaaatatcataaacttaccgtcatatcttttctaagtcaatatcaattagttgatcatagatcaatttgatctcaatcttgagatggttaaactttaagctaattatattgcttgagatttttgacttgttcgttactagctttgtaatgaccgacatacttagacatgatattagtaagacacttaacactaattaattgtattatgtgattaaatttatattttatgtcatttgagtcatattctcatgaagtaggcatttggtttattatttctcaatttcttatgcatactatgtgtgaaatttcatatcttcatatttttatgcccagtaacagtgttaatatgtcggacggatattagagttacatggatatagtttagtattattgtgaaaattatatatatatatatggaacacttctcaatgggtaatatccattaatgggtattaaaaaaaggatgatgtggtaatatgttgacttcctatattaggttaccaacaagaatttttttttaaaaatatatatattttatttaataataggaaataataattctaaccaat

SEQ ID NO: 347079 - DNA, 892 bp, Cannabis indica
aataggatttgtggtaatatgtattttgtggtcgcacacgcggttttgttggaagagaacatgtagaattttttagagtataaattacaaataaatttctctaatgatatttggtattagggaacatggttttaacactaaatgccgttcaaaattgcatttgcagcctctgatttttcaagttcttacttcttgtttgttgatagacatttgtaggtgaaccactaccaaatgacctcataaagatatacctaatactcatatccaaatataattgaatatttgcatgacttggaaacaagaacacccactacggcacatacatatgttggccttttgcatgtgaatatgtatgatgcaataatgacttttaggttgaaacaatatgttaaaatattatgttgccacacgagaaaaaaaactacatcaagccatagtagttgttaagcatagttaatctgtacacaatttaagtttatttgttgcgatatgtataatttcataaactatttttttattaataaatatatataaataaatgataagtatgaaaatttaataataataagaataattatagaaaataatattattttattggataatgaagaccttggatataattatgcaatcattgaccacttttaaagtttgttactaaaaaacataatgttggacaaatttatcgaatctcaccatttgtttggagttctaaactgatcctacataataaaaacatgaaattagaacgatctatgcacttttgttttcttttttttagttttcccctacaagtaaacctataattacgtaaaagatcatctatgttattatattaaaaagaattaaaaaatttatttagtaacattttacgttttctaacaaatttcat

SEQ ID NO: 347080 - DNA, 521 bp, Cannabis indica
tgggtaaagttcaagacacacgcataccaaggatgacacttttgaaagctaaagatctgatgagcagaggttgtctgggattcatagtcactgcagtggataccagccaacttgtgacatctggacctgagaatacaagattggtatgcgaattccttgacgtctttcaagaagatttaccgggattgccacctacccgagagattgaatttgtaattgagttagttttaggagcgaaaccagtatcaagagcaccgcatcgaatggctctagcagaattaaaagaattaaagatttaattgcaagagttactgaatctgagattcattagaccgagctactctccttggggtgcaccagtattatttgtgaagaagaaagacgggttattgcgaatgtgtatttattactgggatttgaacaagcttaccatcaagaacaaatatcatatacctcaaattgatgatcttttttatcaactgaaggggaagatggtcttctccaagattgatcttcgctca

SEQ ID NO: 347081 - DNA, 515 bp, Cannabis indica
ttcggttctagttccatttttcgattctgagttctagttttggtgtgagtttgggtcagagttcgagtcctggtctgagtttggttcgggtctgaatttcagtctaggtccaaatcaagctccgggtgtgggttcgcgtcctgggtcttggtataggtttggctcgagtcccaagttccaatcccaatctgactctagattcagttcttagtctaagtccttggttctgatcttggtctgggttcgagtttgggtccgggtccgggtctagctttgggtctgattctaggtgtgggtttgactttgggtccgagtcagtgtccgggttggtgtcttggtctggaccccgatctgggtctaggttcgggtacaggtccaagttaaggtccctagtgtgggtccaagtttgggtgtggaccaggatctcggtctagatctaggttccccaatacgatcccagtctgggtcttggtccgagtccaggttcgtatctggatccctatctaggtccaagt

SEQ ID NO: 347082 - DNA, 611 bp, Cannabis indica
ccctttacttttgaataggcagccgatcaggcggtctttaatcctggctttgactttttttgttagacatgtagctgactgggcaccttttaatctgagacttatgcttttttatgtctaatctaaagtatgacatttgcccttacttagcttttaatttgttttcttatcaaagctttaaatttttcttaagtttagttgtgcttgttcgatgttgtacggtgtgggtccccccaagtgattgagcagacttatggtctcttggtcatttgtaattcaccaagtactatagacctctgcctatatattttcttggagggacctgtttgtacacatgttgaactaaaaataaagattaactttaagaagttatcttgttagcaagttggttgtcacaatctggaaagagaaactcttttatccatttattggtctaacttatgtgttgatgttgtgcaacatacattttttgataataaaagcttacaattataaagtttgcttttattcattattttggctacccctaggcgacatgtcaggcaggggccaccactgaagagtggtgaaaacttagctcttttatactaattcttgtacagtgagttgta

SEQ ID NO: 347083 - DNA, 636 bp, Cannabis indica
ctatccaggccgaactagtggtgacagtgagtcgtatggaacccctgtatgaaaggttccgcaagcaagcacctctagtttttctgggaggtcctgatgtcatgaaagtcgagcaatggctaacagtgattactagaatctttaattttatggttgtctcttgtaatgatagggtggcctatgccacttttcaatttcaagaagacgctctggtctggtgggacatggtgtctgtgattcatgatgtgacaactatgacctgggaaaagttccaggaactggtcaatgctaagtattacaatgaagcagtcagaagtgctaagagaaaagagttcacccaattgactcagaaagaaaatatgagtgttactgagtatacaactcaatttgatcgtttggcgaggttggccttgggaattgtgccaaccgacttcagtaagaaagagaaatacatggatgggttaaatgcaaagatcagacacgacttgatgattactactgatgacagtaccacttatgcaaaaatggtggataaggcactgcgagctgagggcgcagtgagatgcatagtagagtctcgtgggactccagttgttggtggggctcctacccctcctgcatcaggttttagtaggg

SEQ ID NO: 347084 - DNA, 684 bp, Cannabis indica
ttttaagctcaaacaattatcacattgactaaaaaatctttttaaacttttgagagaaaaaaaaaataaaaaaaaataatactaattaatttagtaagcgtgtatacacattttcaaaaaaaaaaaattaaaaagacctgtacattttacacaattaaaggtcacgttaattgtaatatttattttaaaagggaaatttgacattttatgtttaaaaatgtctaatggtgttaaattatacctaattataacacatagaaaaaatataccaatctttctcttttcttccaaaaatacccctctcatttcaaacttcccacattccctctaactacattctctctcttctttccctctcccaaactcacgaactcacgacctctcgaccagacgacccctcgacccagacgacccagacgacccctcgacccaggcgacccagatgacccctcgacccaggcgacccagacgaacccctcgacccagacccctcgacccagacgaacccctcgacccagacgaacccagcgccacccgcaggacccctcgaaccgacagccacccgcacgacccagacgacccagacaaacccacggcgaccgaggagacccgcgaacccacccacgacgacccaggtttgttctttatttttttttaactttaaattcacaatctgcgaaaaac

SEQ ID NO: 347085 - DNA, 608 bp, Cannabis indica
atctgaatcaaaatcacacacacacacacacacactagaagtatagtgtatagtacaccatacttagcagtttcatattaaagattctcattactttaatacactaccgacttgtttaatttatatcgtataatcttaattctcttgtacatccttacaagattataccttctccttatcaataaggaattttcatatatttaataattatactcttataattataatatattatttatcttataattgtattttatatattaattctttaatatgttatccattaattacttacttttagggcataaatcccaacataatgagttctttaaaagcttggaactcattgacccacatactcgtgagtatgttgaaagattaagggatatacacaaaatgtgattcacctcggaataatcgcaaacaatacaagatgacaatgtctcacgtaaatatattcagtcagcactaacattatagaagagtgcgagaagcactttagaaatcatacttaggcacagcaattgccttcaaggtaaacatcagaaggtgattatcaatattcacttcaagaaaagggctttttgccggcgcatttcgtgacatgc

SEQ ID NO: 347086 - DNA, 647 bp, Cannabis indica
tttatatagaatagatatactagatattagtaatatgcaatgtatgtttgcttagagttctaatattagagttgctataacctaattattaatttaaataataataataataaaaaattaaacctaatacaattcaattatattgttaaatatgtaaaatttgatctagttttaaatttatttataagaaaatatatgtaactaattttattaaataataaaataagtaaataagttaagatattttaaacaaaataactaataaattatttataaagtatgattaattaattaaattaacatctaatttaaatttaaatttaaattaagatatttatataaaaaaataattatataattttgctgatatttttaaattaaatttagatatttcaaattatttttttttaaaaaaaaagataattaattgaatgatttaacggtattaattttaatcgttaactttaacgaaaataataataaaaaaaattgctaaaccatcaatttctattagatagcaacatttattataaaagagatacatgattataaaattcaagatatccgtaatatttagagtgattttaaaatatcatatcaccgttttatatcttaactttatatataaaatatttatatacataaaa

SEQ ID NO: 347087 - DNA, 746 bp, Cannabis indica
caatttctattagatagcaacatttattataaagagatacatgattataaaattcaagatatccgtaatatttagagtgattttaaatatcatatcaccgttttatatcttaactttatatataaaatatttatatacataaaaatttgtttccatcttagattttcaatcatttagctcaaaaaagtgtgcgtattgtaacaattttttattcttaattaaaaattgtaaaaatattttttaaagatatttttttatttttgaatttttaaaatgagaatttaaattttaaaattaaaaaaaatatatataataatatgactttcaaaattatttaaatagttttctttttataattatagtctaattgtattctctcaatttggactttagaacccaaccccaacccctagcacgaaccttgacctcaagcccgacttggtgctcaatttcgacacgacccctgaaccctagcctagacctggacctcgaccctagccccgtcccgatactcgtctcaaactcggaccccaaccacaacccgacccttggacttggatcccaacccttggactttgaccccgaccttggacctagacctagaccttggcctccgagccaaaccccgaccctggccaaaacctaaatccccgcttgaaactcagcctagccctaaacccaaagcctagcccaaaccccgacctcaaccctagcccttggcccgatgtcggtgttgtaccccgacc

SEQ ID NO: 347088 - DNA, 506 bp, Cannabis indica
atcaaaaaatgccattaaagctccaagctttgagttcaaaactcaaacttggttaaatctaactaacatgcattaaaccttgaataaaattacataatcaagcctatagaaactgcagaaaccaacagcaagcatcaacaaaagcaacagcaacagattcttcattttttctttgaaaactatatttttgagtaaaaactttcaagcttgaaacaaagctactatcatgcatcaaactagctctaatctactcaaataatcatgctttaaacttcagaaacaacatcaaaacacagcagcaacatcaacctaaactaagcatgcaaaccattaaattctttcaaaatttccaagaaacaagaaaagaagctagagcaaggtttacctccactagaaatactttgatcttgctgaaaatcacttgaatcaagcaagaaaacccagccctagcagctcccaagcttggccgaaaagagagagagagagttcttgaaaattctaatttt

SEQ ID NO: 347089 - DNA, 561 bp, Cannabis indica
tccttcttttgttctttttacaggttttctctatttcaggatcaacaagtaatgtgacaattgcactttgacttcttataaactaaagaacctgaaaagaaaagataagatttaaaacaaatagaattagtactataattgaaaagaaaaaccaaattagaacaaaatttaatttttaataatattaactatcaatcctccgcaaccgcgccaaaaaattgtgatattttacacacgcaagtgcacgtatctttccaagtagtaaactcaccaagagtgaggtcgatcccacaaggattgtagttaagtaagttaaaattaaactttacttttatttggctgaataaagattaagaaaggattaaaactagagaataaaaaaaaatagtgaaagaataagcaattaaactaataagaaaattaagagttaataaaaactagggctgcgatttgaattgtttctattgattataacttaatatgattatctccctactaccaatttctatgcaatagcatgtttactaagctaatttatagtcttctcagatatataaatct

SEQ ID NO: 347090 - DNA, 689 bp, Cannabis indica
taagatatttttttaaatatttatttttaaaataaaaatattttaacccaactttttcaaatcctgctacattatattttttgtttattctaattttttttttcaacaaacctattatttaattgctatgattaacttgttgatagattcaacgatctaattttaatcatagtctaattgttaatagattaaataaataatttgtaataggtaaattttgtaatttctttcatctgtgataaacttagtaacatgataagacttatccaaatcaatttttaaataggttttttcatatatatgggaaaatgtaggagagattacttttatatagtataaataaataatgtaaaaaaatatgggattaaaaaataattaaagtttaaaatatgagaaaaaaataataaataaatttaataaaacttgtaataataagtttcgccagaaaagtcaccggtgccgaaaaagttagtgtcgtcagaaaagtcaccgtcgccagtcaccgaaaaagtcaccgtcgccaaaaaagtcattagaagtagatgtctcagatataactaaaaatagaactggttctataacataatgaataaaaataaataactcaaagttataattaaaatatatcatgttttgtaacataatgaataaaaacaaatagcacaaaataacttaaactagttataatt

SEQ ID NO: 347091 - DNA, 685 bp, Cannabis indica
aacattaaatgttatttctgatctatattaataagtaaatctgaatatattgaaatgagttttatttagggcataaaacccaacacgtacatggtttccttagaaactatgtatgaagcttaatggtgagtctattataatcgaatgttcaacttaagacctcacatggctttgatcatgtaaggatctctgtcttagtcgtagcccggtatgtggcccctataggagctctatctaggtcttttctgggggccttggcctcatgcattcgaaccgatctcatatccggccttagggctttcatgttcttgctttggcgtatagtccatctatttttgaacattactattatttagcctaaaagccatctatgacgaacttatgattgtcctggctgtcttcttatggccttgacaggcaagggtctaaatttactttgtcaaggcgaaggatgcctacacgacttagagggaggtttagtagcttattttaaccttaaaatatctctacgtaagttcattgtgctagttcaatgccttgtacggtatgggcacccctaaagcaccatgcaagaaagtctcatggtcacttgctattcaccaagtttcacaaactttgcctgggttcttccttggggtggtgtccatagtacacatgtggaactaaaagagtaactttaagaagt

SEQ ID NO: 347092 - DNA, 523 bp, Cannabis indica
aaattttattaaatttaaattataataaaatttaaataaaaaaacaataaaaaaaaaaaaatctcacctgcatgggattatttatcccaccctgctggatgggataaataatcccagacagatgaggttaactggattagttatccagacttctaacatgcccaaacactggattggacaaattagcctgtctaatccaatccagtcctgcgtacaaacgggccctatgtatactattactgctatcaatgtactctaacaggcataaacgacatgtatgttaaacatgtaaatacatatgcataacattacactaattttaccttgtttccgaattcagctgtgccggccaacatgagtggaacaactgcttggcgaattacaggcccctaaatcacatcgttcataacatggataagtgacacgctaaatcacaaccggggacttaggttttaaccaaaaatctacccactgaaagttaacatggaaatactttaaactaacagggaattaaccaaccaaa

SEQ ID NO: 347093 - DNA, 707 bp, Cannabis indica
aggccttagaatggttcatctcggttatgattaccgagtcaaacctgattatgccttgaacgcataacccttaaatttcattataatcatatacttagcatggcatagcatttactcagcttatatcactagggtaataaaccctaggctattaaccgctcatgttagggtaataaccctaatcctgattacaattactcacatatataatattaaccatcagtgccactgtgcatactctacgtgcaacctactgtcttacaagttgtcccgcaaaaacagagattccaaacccctgggttctcctgatcaggtgccggtaatcctagtcacacaatctaggatttcacaaatagggttaatccctaattccactttcaaaaaatataaagtttgcattcaaaatatagataatcataaatatctcgaaacaagctttccaatgatataaagaacgtccaaaacggagtctcgagtcaaaagttatggccaaaataaaatcaagaaaagggatggctctctgctgggtttttggccgcggcgacaataaatctgaccgcggccactggtttcgaaaaacccagaaaacaagaatttaaggtctaaaaatgctcacttttccatatattcgaaccttaatcaaaccatacccaaaattagcttcttatagataaaaatacatcacaacagagagcaaacaacatcaa

SEQ ID NO: 347094 - DNA, 1031 bp, Cannabis indica
tgtagtaatagaaaatgataccaataaaattcttggacatagtatcacggtacttatctgagtggagaatttaaatctagccatcttatttggatgacactattgatagcatactataggaactttaaataaaactaagaaagtaaatctaaccgttcatatgggtagaaataacttattagaattatgaggataagatagaatattttgcaatgtctattcgaatgacttagggaaaatccctagtccttatgaaaaattttatggtatctttaatgattacttaattttaagcaagtattttacattaatgttaaaacttgattgctatgttaatgacttagtctagaagaaacttattatttcagactaagataataagtcacaacaagaggcccctaagaaccaatagtgagaggttaaatatactcctatgtacgagtttaaccagactcccactgttgagtgagagtcatctaaaatgtaatcaaataaggaatattaggagacaatcaagaaagaattatgaaagtgacctatatgttagatgataggggtgtatattagaatccttttatctacaccaactcataacctattcgagatggtggttactctggggtggaggaattattctagaaggatgtaaaatctataataatttagttccaccagtgaagttaaacaactttgttgctttcaaaaagcactggaaagttattcaaactgaagaaagttcttaattgtgttatctctattacttttggatagaattaaagatatgtcttctgtatattcaaatacacttaataagcagtaaagaattcagtatccctagaggagtaatacatatagtaaaaatgatgatgcataatactttatgaacacaaaggaagtaatggtggagaaagcagttgcgtaccacagacttacagttcctgtaatttgggtttagtcaagtacactacacttgatgtaaagcccgcttagttaatttggaaattatcagttgtttatgtttaattatgaaa

SEQ ID NO: 347095 - DNA, 1402 bp, Cannabis indica
ttgttgtatttagtgaatagaaactgttactcatttattgatgtttacgttttagtttaattactgtaaatcaatgtataaatggattgacaatgaatgcaatccttgtgtaactaactggacacttgctttgtatataaaggagtgatccaccatgaaatgacacctacaaaactcttgcaacagtggactaagcagaccgtgatctgactgaaccactatactcctttgtcttcttgatatttctagtttttactaagcatttacgttcccagttcgagtactcgccgtcttaggttgaatactcgcaatcggtcatcatattgtttctccttattattattattattattattcatttttggtgttgcaaaattcgttcaacaatatttggcgccgtctgtggaaacgaagaagtacattcttgctaatacagaaagaaaatcatcatggctggaaaccaagcaaactgaggttttaacaatgaatccatcaacatcggagtgatgaacgttccgttgtttgggggtagagctccacctgtggatgtcatcaatggcggagtaggtcgaggtaatgtcagacctctcaacttattccctgaaactactggccctcaagccggggaaacatctacaccagcagccacagcggggcactttccacccttcactccggcgacggtgttcgagggtatcgtccagctaaccaccgatcagtataccacaatccaggaccaactgcgcgccctgcaagccgaggtggatggacagaacagggcccgacgtcctcctcgagcacccactgctcgcacaaaaaaccctcaggtaactaattctagacatcgtaataatcgtactcgcagggaacggaggaccaacccagaaggactcgacttgaatcaaccaacctcaagggaccaatttgcgaggtatcccaaccaggaggcacagaccgaggaagaccccgaacgacgcaatcctcacagcacacttttgcgagacaatgacgtacaatctgcctcctcatcctcacatggtcgcacacccagcaggtacacgaggtctggttctgtggaaacaccgcagggaggacgatataaggttcacaagggtgatctacgtgatcaccttaatgctgttttcaaagcacgctcccacgcacctcgtgatgttgaagagccccgtgattcccaaatgggcgattagggtgtaaatactcgcaccaacccgcctaacgcaccagctgcgactactggggttaatatcccagcaaacctcgctgcaatagcaacagcccttgcaaccgcaccagtcactgctcccttagtcgggggtattgaccaaagcatgctcctgcaggttttgaaaatgctcgagcagcagagaaagcccatatacaa

SEQ ID NO: 347096 - DNA, 824 bp, Cannabis indica
aaaaaagttgacaatcaacatgcccaataaagttgggtaaaatagcctcttaaataaaattttaaagatttgtgtaaaattgtgttatcatatttaataatataatatgtacctatattaaaatgtaacaatatatattattatgtgaataatatatattaaatatatggtaaataaatgtgtatcctatatggtcctaatctatactttgtaacctatatgatgtaacttcactacaaaaaattactatttttagtgacaactttttagtcaaaacataatttttttgtgactaaatgtgaatttgttactggtgactaaaacatagtatttagttacaagttgtaactaatttagttttagtcacaacaagtattgtgactaaaaatacatttagtcacaacaaatcataatttttgtgaataatgtatttggccacggaccttttagtcacaatatataataatttataattagttacaattttttcacttttagtcacaagttttgttgtgactaaaattaagattttttgtagtgcttgagagaaattacaatttgttgtcactagtaataactcttttgttaatcacacataattattgtaattaaagagttgttacacaatttaatttaaggaattcaaaactatgatgatttagttcttacaaaatagattaatactcattcatgtgagataaatgatgtgtggtgtgttgaattcgaagtgtgacactacaagaaaggggactttttatcccacttttttagttaacaaaaataaaaaatgggataaaagatatataaagactttttatcccact

SEQ ID NO: 347097 - DNA, 549 bp, Cannabis indica
attctcttctgtataaagaagaaacttattggaaacagcgagcaaggacccaatggttggcccaaggagataagaacaccaaattttttcatcgctatgcctctcacagaaagaagataaacaaaattcaaacgctccatttggccaacggcggtattgtctccgacgaggaaagcattacccgtgaaatggaatcccactttaactaactcttctcgtccacgaacccctcggaggaggaggtcaataaggccctgcaaggtgttacaaactctctctcagagttagacaaatccctccttgctgaggagttctccttgaaagaaattgaaaaagcttttttccaactcccctcagacaaagcccctggccccgatggtttcaactctaatttctataaaacaaactggacctctatcagaaatgatgtcctcaaagctgccaccagttttctcaatggcaatggggacatcacccctctaaataccactctcatcacccttattcccaaagtcaaacatccttccacactatcggaattccggccga

SEQ ID NO: 347098 - DNA, 502 bp, Cannabis indica
tttgttattttaaatacttttatgttacttttttattttgattttgtaaaaataattatgttactttcaagtctattaaataaattaataagttataataaagttaaaaaaaaatctcacttaacttattggtaaaattggtaatatttaaatttctaattaattattttaaagttatatttttagtaaccttttaagtttatagtagaaactaattaattttcatacagtataacaaataagcatagatatgaaatagttttatttagtatactttatagtaatatttaaattaattacgatttcgataatataccaattgattactttttatataataatctactttaaataaaaatatctcttgtagataatattcaattttcagaaacttaatataaaactatatattcatttttagtttatattgtgttgattaagatgtatttttattttattttattttttttttgtttaacaatatttatgttaccttccatac

SEQ ID NO: 347099 - DNA, 479 bp, Cannabis indica
ataattggtttgagttattttgtattatttattttattcattttataactgaacagttatatttcaattataatcggtttgagttattttgtgttatttatttttattcattatattatagaatcggttctattttgtgttatttttatttattcattataattgtttaagaaaaaaatcaattctcataataattttcacatgatattgacacttcaattcgataattatgttccatatattgcactggtactcagctatggtattgcacctttcttatttttatttaatcaagtaatatttagttttttatattaagaatattaaattttaaaataaaataaataaatgtaatgtatatgggccctccacgtgtccatatttatgagttaacggaagtagtagtaacggtgttaggggtgttcattggatcacatccaatgtttttaggtctatccagatccgatccaatcatatat

SEQ ID NO: 347100 - DNA, 798 bp, Cannabis indica
gctaaaagatttattttattttaaggtgttttcaccataagatttgatagaaaaccctaggttattttatgcgggttttaaacagtgttttggaatagacccttattgttttactttggtcgtgacataggactcgagattgtcaagcatcgttccactcaggtggatccgcacactttagttctgaattgaggtaagaaaagtggtaagcaccgtatgtggctaaatgttagcgattgaatggttatagccttgattattatcaagattctaattaaatgtttgttgagtctcggttgtgaccgaggtttggaagcggttattaccattatgagtaattactccttaaaccgcggataggtttcttacttatcgtttgcttcatcgggcaacgatagtgacataatcagctcgtggttaacgagtggtaaaggggtactttataaagtaccaggattgtgtgtttatgatattgtgtaaatgtgtaagcatgttgatatgagattgaattgatgaatattactggttattattttattcacttttcttgctgagtctctgtgactcacgggtgctttatggtgcaggtaaagggaaggcaaaggttgagcagccatgagttcgaggtcgtagcagcaatgtacatatcagccgcagtggcacggcccagtgaacaggatgctctattttgaatgtattttgggaatacaaagtttatgttgtaaaaaaatactattaaaccagtttgtaaatattttgaaaacagggggaccccatagttaatattacttatctttt

SEQ ID NO: 347101 - DNA, 821 bp, Cannabis indica
ccgaacctgaactcagacccaaacatgcaaccagagtaggtacacaaaaccagggtccgaacctagaactgcaccccagtctcgatcctcaacccatactcaaaaacgggacctgggacctgaactagaacaacaccgagacccgtgacagtgatccagatctagactcgggattcggaaaactggtcctggaatagaccagtcgtcaatgtctggatctgggactcagactaggaccagaacctagacgatgaaccaaacccgaacacaacctagagttgggaccaaaaattagaacttgaacaagaatcgtcgaaccaggaccctagaaagagactaggatcgtgaccaggacccggacccagacctagaaccgaacacagacctaacctcaaaaccaaactgagattggaactcgggcccagacacggtcgtgtaccaagaccggaactgagacctggacctggacctaaatctcggacccgatcccaaacacagacttggacgtagatagggatccggatacgagccaagactcggaccaagacccagactgggatcgaaatgcttgacctagatttggaccgagatcctgatccagacaaaaactttgacccgcactcaggacccgaacttggacctggacccaaacctagacccagatcggtgtccagacctggacacaaacccagacacagactcagacccgaactcaaacccacatctagtatcagacccaaagctagacccaaacctggacctaaactcgaacccagaccaggatcagaacgaaggacttagacccagaactgaatcaagac

SEQ ID NO: 347102 - DNA, 535 bp, Cannabis indica
cttcacaatcttccacactatgattgagtacttaacttgatatgagtgggcatgtactctatcactatagggaaaacattgatgaagagaaatagagggagaagttgaaatctatagaaggagactcttaatatttagttgtctgacagagctagaatactaggttatgaaagattaatcagaataagagccatcttattccttatataggatttctcctagagtttgatttaaattacatggaaataaaaaaagataaaaaaaaatggctaaaaatacactttagtggccgaccatacaatgggccccactatttataagtttgccattttattcaacaatttatcttttctttcactgacgcaatattttctaatttcaatcatttaaatgtcaaaactatttatttaataattataattaattgttaaataaaattgccatttaacttatttattaattagaccttataaagtctctcaattaacaaataaatcccaaaacctcttttcttcacaatgaagcccttgcttag

SEQ ID NO: 347103 - DNA, 564 bp, Cannabis indica
caagtttaaaatgccaacttggaagatgtacactggaaaagaagatcctctttcccacctcaagtatttcgagatgcaaatgcatctgcatggaatacgaggagccgtatgttgcagaatttttcctgctaccctctcggaagccgcccagcaatggtatttcaaattggcacctggaaagttctactcatggaaagctttctcctcagaattccatgcacaattctcctcctctcgccaacttccgctgcacctaggagacctggtcaaagtcaagcaaagaccaggcgagcctctccgagcctacatcagcagattcatgacggaagcgactaaggtttcatgggtaactgaagatggaaagttgtctgcaatactggggggcattgaagtcctcggtgagctttagaaagacataaggaagaacggtctggtagactcgatgagcgattttctcgaccgtcctgaaggcttcatcaaacttgaagaagcttttcaacgagcagaaggtaagcaaaaacctgacaagcctaaagctccttccactggaacatctgcccaact

SEQ ID NO: 347104 - DNA, 688 bp, Cannabis indica
tattgaaaataataataaaaaaacctagttttcactttgtcagacaacttagaaaataaagtgagagtctcttagagtttgaaatcctcttcctttcttcttcatattttttgaaccctataatgagttgagaaatttcttacacaattcaagtcaatactcaggcctttgtggaagattgtatagaattccaacaatagaataagatccagatttagatattgatcatagtctgcgatagaaaggatcaaggattagagatctaaatagaaggagtcatattattctgctgccatcaatgtaatatttttttataaatttttatgtgtttttccattgttttaggaaattcatatttataattttagattatagagttataatcaaacatacaagtttgtaaatctagatcttggtaaaacaagttctaacaactagtatcagagctatggtaatgatttatttcataaaatatggatttaaaacaatatttaattaatttggatgtgttcatgttagtttatgtgatatttgatgattgattatgatattatgaattattttatgaaaaataatttgatttttgatctagaattattttatttgaaaaattggtgaaaaagtaagaaaattattcttttacagaacttaatttgaattaaaattgaaaaagatatgattttttgaa

SEQ ID NO: 347105 - DNA, 430 bp, Cannabis indica
ggaatcacgtcagtcaaaagggattaaggactgccctcataaaatccctatagaacctagggattagaccatgcatgacctatgataaattcattgggaatgtgaagctttattgatagttacagaaatgcatgtaccttaattctagggatcaccccacaaaaacactataaataccccccaaagctcattaaagaggggtcgagaattctgggtatcataagaactagaagagtaaaaactcaccaagaacattctctgtattaaatacaatcattaatacacagactcgtggactaaggctcattaacgcccaaaccatgtaaaaattcctatcttaattttttacagctctttaaattattattattttattggttgccgaaaacctcggtcaacagtattaaattcaagaaataaataattaagt

SEQ ID NO: 347106 - DNA, 675 bp, Cannabis indica
ttttttaaatataaatttaattattagattaaaattattttttattaatttaaatttattttatatattatgagactttgaatttgaaaattgattcttatataaatttgctattatggttattttaaaatttatttattttttattaattttacttattgtttaaattataagattagatattatcatatttgatatatttattttacatataatatgataattatcttgataaaattttaaattatgagactttgaatttgaaaaattgatttttatataaattttctattatggttattttaaaatttaattttttttattgtttaaattataagattagatattatcatatttgatatatttattttacatataatatgataattatcttataaagaatttaaataatgataaaattttaaattagtctagatattttatagatatcataagcataattattcaattttaaaattgagattttaattattatttttattgcttaaattatgaatgaagaaaaatgatagcataaatatttttttttactaaagatattttagggaaatttgaatttctatgcttgcattaggggataattttttccctaaacttaaaataggggatattggtaaaatgggataacattttcttaattcccacaataccccc

SEQ ID NO: 347107 - DNA, 969 bp, Cannabis indica
aaggagtttcaacctgggcaacaagttctactttcaactcaaggctaaagttgtttcctggtaaattgaagtcacggtggtcagggccatttacagtggttaaagtgtttccttatggagcggtggaattgaaaggtgaaggccctaatactttcaaggtgaacgggcagcggttaaagctctacttgggaggtcaaattgatcaaaccaagttcgccatgattttggcgccactatgaagactcaatcaacgtccagctgtgcgacgataaaggcagcgctaattgggaggcaacccaagtgttctttatggtttagttgaactcttttatttgttttagtattattttctttttctgttctggctagttttctttaagaaactggtaaaacaactttagtttcttgttaattaatttatataaaaaaaaaaaatttaaggtacgacccagtggccgcggccagatgtaggccgccgcggccaaaagggtcttacagggggccagtttttttgaagtattttggccgcggcgagagaatgtatggccgcgaccaaaaggtctgggcagaatggccaatttttgggcctatttggccgcggcgagcccatttctagccgcggcgagatgggtcacacgggatttaaaacccaaaattccaacacatttcaaacttcaatcttttctcaaccctaaccatctccacgccgaatacccctctcctacaccatttttcttcttcaaatcccattcaaaacctttttccatcaaatctaaccataaattttcatcccaaatcatcataaaccattatttctctcatcaaacactcttttcctctaaaaatccaaccctaaatccctataacctcacccaaatttcaaaaatcactattcatcttcttcttcctcacaaaacttcaagactttcttcaacggaggttgaataaagatggattctcattgaggta

SEQ ID NO: 347108 - DNA, 646 bp, Cannabis indica
acttttagtcacaacaaaaaaatacttatgactcaaacgtagtatttagttacaagttgtcactaatttagttttaatcacaacaaatattgtgacaaaaaatacatttagtcacaacaaattgtaatttttgtaactaatatttttagccacgaactttttagtcactacacaataatgataatttataattagcctcaactttttgatctttagtcacaaattttgttgtggttaaaagtaaaaatttttgtagtgtatacatatatattttttctattaatgttaaccaaaatattgcacgataaattctgtataggaaacaaataaaacacatatgaagataacatactctttacaaaaaaatgcataagtggttatttggagtctgtttagctgtatttttaatttttagttatcagaattatattttcaaaagtgagaatagaaaacaaattttgttattttaaaaagggtaaattgcggcataaatatctaatgtttcagattttatacacttaaatacctaatgtttatttttaaaggcaaaaatacctaatgttacaattctcttacaccgttactactatttcagttaactcataaataaagacacgtggagggtttagatgcattacatttattt

SEQ ID NO: 347109 - DNA, 477 bp, Cannabis indica
ttttaataattttattcctctcgaagaattcagtgaacaagtcgccataaaattaggttccattattggatactatcttcatggggattccgaacctgcagataatgttcttaacaacaaaatcaaggactttcttgcatgttatggaacacggggctcggcctccgtccatttagtgaagaagtcgactgctactatcgcatacttactcctcctcgcccagtgggtaatgccccagttagatcaatcccccatatagtgaatgggtaaggcaaggtcatcattctatgttctgttggtggtacacaaggtatatgtgaaaacctttgacacttatcacatttcttgacaaactcgtgtgtgtccttattgatcgttgcccagtaatatccttgtctaatgatccttttagacagactttgccaacccgcatgatccccacaagagccttcataaatttctctaatgatttcattt

SEQ ID NO: 347110 - DNA, 640 bp, Cannabis indica
gtcttgatccactcctactgttgtctactttaaaagcatcagtcagtcaattatctctgagagacatgttgaaattgggaaaccgagtgacgaccattgttcctgcatttaaggtagtttcaatagtagctatactagcatgttgatattttctcattcaagtatcaagaagaccaatacgagcgctaactggaaggcgcttacggccatgataattgagagcaagtcgaatagcaccaaagtggatgtgggtataaccctgtgttatccattgtggagggagttgagggggaatttcaacagtcacaaattggacctttggtgttggtgcaagttggcactggctgaattttgaggcttgaatgtattcttttggagctttgacagatggtttaaaaagtactttaatggatctagtaaaagaggaaggggtcttggtgaaaggttgatatggatttaagagaggaacagaatcagaagtaattttattttcatctggaacttaagaaagttcgtaaaggaagtctagcttattagaagttgatttatgacaggtaggagagggtgtaagtgcaacaaatcgtaagtgtatgttaattttattttagttttttagttttttcttaatatcataatttta

SEQ ID NO: 347111 - DNA, 666 bp, Cannabis indica
cagattactcccaagggcattaaatagttgttcgctctcttcgtcctctacgcttcccagggatgggatggtccttctccccacgaggtcgcttggttctttgacctgaactctacccccaagcaaggcaagtcgtagtatttttacttctcgcagccaggcttcaagtggttgagcgggacggaccacaaggccatcagcaaaatagggcattttgttgatgagtacttcatggtgaaagatccgaacattactcggactcgtttcagtagatttcgagatatcaccgtcctcccctcacccttactcttagggatagggctcaaaaacttacacggttgccggtggaagacagggatctcatccagttgacctctgatgaaaatctggtgcagtacgggctttagccagaggactttacttctaagcccgtgatggggaagaaggggaaatctgctgcttcccggcctgaacgagctcataaggaggatgagatcattcaacttaagcgagaggctaagttgaagggaggtgctcgggcaaagcagcatgctcgaagtccatgaatcctgaagatgaagctgaggctgagggtgagcaggtgactcctttgaagaggaagaagaaactcccggccaagccaaggcccgttgaacatgccattcg

SEQ ID NO: 347112 - DNA, 616 bp, Cannabis indica
atacattatatatataatcatgaaataaatcatgtgaaccattcaacataaaatgttatttctgatctttattaataagtaaatctaattatattgaaatgggttttatttagggcacaaaaacccaacattgccttactcaacctctcatggtctttgaaggctgtgttggaggaccgagtaattctttagaggctttttgcttcttttcatgggttgcttctgaagtttcttggtgggtggctatctttatatatatagaaaaaagagtaaagttagcaatgtcattaatgaataaacacaataagttaagtaaacaaattgaaacataccaaatattttccaacaggtgtaagatagtctttcgaccattttacataagattttatagcaagacctactttgtcaatgaatcatcgactatgggacatgggagcagtgcattctccacattggcttctttgataaattcccgacaataatctttgtgtaggtattcatccatgttattggataaatttccctctttcaaatatttctccttgacaatgttgcccgaagtaaccttcagtaccatcccactaggctccaagagacagtgcatccaacacggtaa

SEQ ID NO: 347113 - DNA, 1088 bp, Cannabis indica
ttgaccatatttataattttgcattatattaattcgtaaaataacattaagattacctcttctgaactaccactagtaggtggcggtgctgctgctggagaaatttcctctctaaaatgcagtggtgatggactagagacattggcagcacccgactgttgtgctacatgatttggtggagagtagacattggcagcacccgacggttgtgctatgggatctggtgcagagtagacattggcaggacccagtggttgtgctactggatcaaaggcaaggtcaatatggggttgttcatttgatactcctccaacactggaaccagacgcaacgcagctacgttgggaactaataagaagaatgagctcatccactttatgctgcagctttttctgttgctttcctctgtcccacgcacgcatctttccaaatcagatgatgcctggttctacccatcagcattttttcttttacggcataatgtgttaaaatattttgtttgggtgacactgaaacccatggctcgaacccgtccaccatgctgatttgtcccgagcgccattgtcagcacatcccttttaccttccacttatacaataccctcttccacttgcttatgtaatttttcttatgaaaaaaacaaattgagttacaaataaattatgaagcataaaaattaatacaaatgaaattaaactttaaacttgcaatccgtttaacgatttctgcagctgggccctccaacttgcctttcgtgttcacatgaagtcttttccagatttcagatttatcaaatttagtaatttggtggtctgcctctttctccatttgttcttggaccatccttacaccacctcatccggtgcgatggttgtaaatattacaagccctactcctttgggccttcttcctcttcacctcaaattctagatttaatctcgatgccacaaactctctccattgttgcaaatcaattattttttcataaagtttaggtggtgtcttgagaagatggggagccacatctttgaatgtaaaaataccttctataaaggtatttttccaatctttcacctatctccaccttt

SEQ ID NO: 347114 - DNA, 693 bp, Cannabis indica
tcatgtgccaataatcatgcagaattcctgaagaaatgtgaccatcctctttggaaaaatcaacagttcttcataagccttccttttaagcttaatgaagatatcaaccctacaaaggctagtcacccaggcatgaatccagaacaccaacatatggcgtccaatgagtgcaaagagctagagcagcagggtttaatagagtcaacttcctctccatgggcatgtcatgcattttatgtcaataatcgatcagagcaagctcgaggaaagcaaaggttggtcataaattacaagcccctgaatgagttcttagcagatgataaattcccaataccaaataagaattcattgtttgccagtttatccaaagcccatattttttcaaaatttgacctaaaagcaggattttggcaattaggcatcaaaccagatgatcgacccaaaacagccttttgcattccaaataatcatttccagtggaccgtcctacccttcgggctcaaaactgccccttccctattccaaaaggctatgaccaaaatatatggcccaatattggaaaaggctctcatctatattgacgatattttgctcttttctcctgatgcaaaagcccatcaagcgttattggcccagtttgcttctatcactagagcccatggtatcatgttgtctgaaaagaaaatgattatt

SEQ ID NO: 347115 - DNA, 495 bp, Cannabis indica
ttttttaactcaacaataaatcattaaatatctcatggtattagagccataattcatactatcctatggacgagtgtctactttacactatggctaactttgacgattcctcaagctcactcactgttcttctttcagcccctcttgcactaacaccctctcctacgtgtagaaaattgacttcaaataagttagattttctttaagagctttcttatgtttgagataaaaattaaattacctcagattctcttcctctattcaatccatatcaacctttcactaagacaccttcctcctttactagatccattaaagcacttattaaagcatccttcaaaactccaaaagaatacattcaagcctccaaattcagccagtgccaacttgcaccaacaccagaagtccaatttgtgactcttgaaattccacctgaactccatccacaatgaatgacacagggttatacctgcagggttttgtgccctaaataaa

SEQ ID NO: 347116 - DNA, 585 bp, Cannabis indica
aaaaatactcctgaaataccaagcttacttagagtaagtttgttacatttttataaattattttattaaatttttagtttttattctctatttccctctatcgtaccttgacattatcatacttcacagtgaacatttggacaagatcaggcatgaatatcctaatggtaatcacgatgtcttgcataggcaaactttccgtccgtggtttcataagaaggtataatgacaaaattgtaaagttttaattcaaccatttatattcctctcatattaatacattttatgtatttagatatatgagttgcacaagcttggaactttacaaaatggtgatgagttactcgctctagcttctggctccgattacttagcaacattttacgaaggttgtgtggtgaatggtgttcggtttattgcgtctaagagagaccaaaagcggaagacacaaaatagtggtgttactgttgctggaactgaagggtttaattattacagaacacttgaagatgtaatcactatatcttatactggtgcatatacagtgacattgtttgaatgtaaatggtatagcactaatccatt

SEQ ID NO: 347117 - DNA, 671 bp, Cannabis indica
gggtatgagatgtatatatatgtcttaagtgaagaggtttagggttgatggtaataagttgaaagaggggatagctctacatagtgttatctctaatattactttgagtttgtatttgtcttcattttggagattcttggatgctctaatatggctctcatggatggatcatcaatgggaggtatgtgtgtttatttttgttttgtgatgctcttaataaaatatagatcttgattaataattataagtaaggataattagtatttaatatgtgtgtttggatagctcataatctattcaaatttaacatcaatttgttataaaaccagtctaattatttattgctgggtgttctttactttcttttttgttaagtactatactaattagtttttgggttatatatactaatttttgtgtagacatctttggtacttgttttcggttcctttggtttctggatctgttttattttgctgtatcaattaattatggtgccgtttggtaatacttttgttttttaattttttaatcacaaaaagaaaagaaaactttaatttttaaaaaaaataattttgaaaaacaaaaatgcgttctgtaaccacttttgtttttcaattttaaaacagaaaacaaaagtgtgtctgtaaagttcattttttattttattt

SEQ ID NO: 347118 - DNA, 917 bp, Cannabis indica
gaatttgggggcatggacgaagtcatgaagatccttcaagatttgactgctgaaaggcggacgtaccaggaggatgctgagcgtcaggtggcccttgccaaggccaagtttgaggaaaaggccaggcggagggaggcacaagcggaggcgatgatccgggatgaggcccttcggagggataggctggaggctaagcaccaggaggagctggggcgaagggcgaggttactgccaaggctaaacgtgagcttcgggaggctagggaagccttggatgaaatggctgccaaggtgaagttcctagaggaagttcaccaggcagacttggagtctagggccaacttggccgtggagctgaaggagctcaaggacttcaaagaccaggccttgaagaaggctaagaaagatgagctcctttctcccgtctcttgtagccggtgtgtcaagcgtttcgacgatggcatctacatggcctggtctacaaatggccaaaacatcaagctcgacttctaccccaaacccgcggagatgattgctaaattccggagaagaagaagaaacttgatgccatgctggaggcacgcattggtcctcgccttcctccgcgaattgactaggccgttgtgaatttgacccagatttttcttattattattttttatttacagtcaattctcttacatttaagacaattttatttatatagctgttcttaatttaaggggagacaatggttaacgcctgtccccgggccctttgtatatgttttttgacctcccctgagggccagggttttttatatatatgatcttattcgatgcacatatctctcttttgaacctgccctgtgggtcaggatgtttatatatgcttcttttttgtgcatactctttttttttacctgccctttgggtcagg

SEQ ID NO: 347119 - DNA, 748 bp, Cannabis indica
aacgtctaacaccaatgacaacttcgatttctaacaatggtgacttccagttatgaagacaacttcaacgaaatttttaatgacaatctgacaacgataacaacttcagcgaatattctcattttattttctactctttttgcggctaatattttattttagtggataatgactattttggataatgtattgagttgatgattaaatcttggagcttttgagaagtttttaaccaattttattttggtattgtattttatttattcaatattccatacaatatctagaatataagcatgtaaaatttttttataatttttgacatccatataataactgttttttttttcttcattaagataacaactctagcaatttactctcattctatatattttctacttcttttgtgactaatattattatttagtggatattgaatgttttggtagtgtgttgatggtctagtattggagtttctgataagtttgtaactggttttaatattagtattatgttggtattagttttggcattagttttgaaagtgggttgatgataagtttttgagcttattaaaaatatgaaaattttatatatgaattttaacaactgtatagttggttttttcattaaaagttggctttgattacttaaaataaactgttgtcttaatttattgccttaacaaaattatattacaattgttttagcttatatagttttttttttgtttgttaaaaaaaaa

SEQ ID NO: 347120 - DNA, 510 bp, Cannabis indica
ccctgtccggttggtccacgtatattgggcaaaatcaggggcaacacacatagagctcatattacattcacatgtatataaatctccgtaatttataaattacgtttatttactcacttatagcgaatttaaaatttttgttgaaatagattagtaggatcatacctaattaacccacaatataattatcaatcctaatcacttaccattaggcttattgggatattacacttagcttgttagggcttgaagaaataggtggaacttattgtattattcctaaaacctccaacaatcattcagttagctagttagtctttaactaacttagttgtcaattatgacaacttgcatattgggtctattggcctatataaagtagactactcctctcatttcataagagataatcacaagagaagaaacacaagaataatggcaagaagtagagagacaatccacagtagagtgagaaatggagagagatatctaagagagagagagagagag

SEQ ID NO: 347121 - DNA, 591 bp, Cannabis indica
aagtttgggagtctttctaacagttcaaaactccttcaaatcacccgcttaataccataaacgcctaatttatgattggtaatatccaagggctttatggtggtcattcatgcttatatgagaatgaaaactctataaataaaggccatattgttcaattgagagagatgtagttgatatcatttgttgtggttataaccttgtgaggatatgctcatccttaaacactaagctgagaatatgaggcttgataaatccataagagcatttttagagttttccataggtggcgtttggttggaggtaatgaaatggaatggaatggaaatgaaacaattttcattccattattttgtttggttgcattttaaagtattggaatgacattcgaatggaatggctactccattttaaaaagaaaggaatgaccattccaatgtaacaagaaaaaaatttaattatttttttttattcaattttttgtatgcattttaaattttattccattcctattcctattctcattcccattcctattcctatattttcattcctcccaaccaaacgcctatatgagggaggaaatgactt

SEQ ID NO: 347122 - DNA, 870 bp, Cannabis indica
atgctttggttcaaaaccaatcaagtaaaacattaaagatcttgcaaactgataggggtggagagtatatggataggaagttgaaagatcatttgaacttggaattgaatcgtaatatactgcccctgatactccacaacaaatggagttgtagagagaagaaatcacaaacttttagaaatggttaggtctatgctaagctatttaactctttcaacgtccttctaaggatatgctattcagatggccaatgatattttaaatgttgttccatctaaatcagtccccaagacacttgtagaactatggaatggccgtatatctagtttatgatttatgctattatagaatatgggagtgccctgttcatgtcttaagaaagaaagaaggcaaactagaagtgcaatttgagttttgcatgtttgttaaaaattctaaagatactaggggtggactattttattgtcacaaggataataaaatgtttctttctacaaagtaaagtaaagtagtattgaaggaaattctttcaaatataactccagctattgttccatcttcttctactcaagtagaggatgatcccactccctcggttgaaccaatgcaagttgatacaaccgagaaatctaccactgatgttccagttcagaaggccatgacttctcgtcatagtgggagggtttccacaaaactagctcgttatgccttggatggtgaaataaatatggtcattgttgatggtattgatgatgatccattaacctataaacatgcaatggcaagtcgagaaaggaaacaattgtcaactaccattgattcagagatggattccatgaaaagaaataaagtctggaaatatgtagatgc

SEQ ID NO: 347123 - DNA, 1282 bp, Cannabis indica
ggccgcgcagtactcgaggtacatgtccttggcgtcgtccaagtagtcgaagttggcctggggattagccttccaaaaatcaaagaagagctcgaggccagcagtctccaaagcatcgactttctccttcaagcggtctgcctcggccgcttgagcatccttatcgtccttaagccgaagaaggacctgccgcaaagaagtcctctcatcctgaagacgatcaacttcaggagataaggtctcgatggtttcctcaaagcgatcagcagcctcgaggtcctttgtcagcacggtgaccttcttcttagcggcaaacagcttcttgttggcctcacccaactcatggcgaacagctacagtctctgccctggtctcctcagcttccttcttggccaagtccacctccgccctcaaggtgtcggaccgagccgtactcttggaagtagcagatttagcccaggagtaggtataagccaacttcaaaccgacctgcgtaaaggaaaaagtaagtatatgaagctaagtatgaaaagccaaaagggaaatgtcgaaaagaaaagactaaccctggtaagctccttcaagactccgcccaccagcacatccagagatgagtcatcagcaccagccagttgctcaccgacctcaggattcagccggttcatgtgatgagccatcacctccctacccttcttgacctcaggcagcacgggcatgggtggagttggtgcctgcacctgctcaggaatcctcctgacctgttcggacccagatgttgttggcccagactccttagacttgggagacttgggagtggaatgatttgtagtagttaactcctcagaaaggtcaatgacctctcaagaaggcctcttctatgaagacccctctccacccttagacttcttcgccggaggggaggcgctagagacatgtttgcacagagcaaagacatgtgtccgctcatcctcttccttaaggcgtccatcatctgccgagacatgtttgcacagagcaaagacagcgtggttagcaaaaacatgcaaaaaatacaaagtatgaaagttaagaagctgaaagagaagtaaagcgtagagtgactgcccgcccagaaagtcagaagtccatcatcacctaacatcaactttatctcagccataacggccttcccttttccagtatagggatgggatggccgaacaggtgaaatgggctcccttatgcgaatagcatgttcaacgggcctgggcatggccaggagtttcttcttcctcctcaaagg

SEQ ID NO: 347124 - DNA, 642 bp, Cannabis indica
aaatctggactcgggacccgaacccagacctgaacttagactcgaacattgaacaggactcgggacccagaactgggattgagacccaaaactggaccccagtctcagtcccacacctagacccatacctagagcgggacctggggcatgaattgaaactcgactgggaccggtgattaggatccagatcttgtcccagcatccgagaaccggggcttggacaagacccatagtcgatgtcttgatctgggactcagacaaagactcgaagctggaccaatacctggacccagacccagaccttggacccgaaacaaaaacttgactcagaatgtgacgaggaccctggaacaggaccgggactgtgaccagtacctagacctgggcagggacccgaattacaccagaacccaaccccagaactcggcctcaaacccagtccccgacccagactaggactgagacttgagcccaaaatcgggactcgatcccggaatcaaacaaagcccctgacctaaattgggattcggacctagacatggacacgaacccagacccagacccgaataccaacccacacccaaaccgggatcaaaacactggacctggacccagacctagacgtagacccagacacgaacc

SEQ ID NO: 347125 - DNA, 829 bp, Cannabis indica
aaatttggggaattaccccatatactattttttttaactttttttttcaaatttacggtttgagtttctaaagtggttgcagcgctagttgcaataggggtttctgtacgattttttgttgcaatttaggttgcagtgctacttgcaatagtagtttctatgtagaattccgtaaaaaatacaaaaaaaaaaaaaaaaaaaacctgttttgaaagtgtaaaaataaaaaagccctataaattttgggttgatattgtgtaaaaataagagtttaaaaaatttatttaaaataaaaagtgcacatagtatggatggtaaaagttggcactagtgacattcattttggtaccaaattattatttatcacgtgacaaccatcttttaagcatattaagagtatctacaatgaaagtaccatttatagtaatcaaaatatacacatcatttaaaaatattacttttatttttttattttctctattattcatatataagatttgacactttctcattaaaaaatactctaataattgataattttaaaagtttctcaccatgattaacataaatattaaatcaattagcttctttggtaaaaagtaatcttctcatttgagagagagaaaaaaataccacttaattgttgtctctattgagccatactcaccccatatttatagggaaatttgaaattctatacataataaatcctaatattatttccctaaacctaaatgttataccataggccatatatgactacatatcctttatccccataatacccctcacatttgaaccaaactaatccaaagcttctctctctctc

SEQ ID NO: 347126 - DNA, 449 bp, Cannabis indica
tttcgatctggaattattttttccggaaagtagacaaaaaaaataataaatttaggctattacagaacctaatttggattttttatgaattagttatgattttttgaatttgaacgaaaatatcaggatttggaacacatacgcgcgcacagggtctgggacgctcggacaacaccaattcagacaaggcgctgaccgagtttactcggacatggcccctgtctgaagggtagctcgcgcctgtgtccctcggtcaaatgaggctgcttgcagcctctgtcctcggccaaaacattgcttccgcgcgcgcaggggtatgcaatgcatacccctgtgcctcaaacttgttttcttcataacttttgcttcaaaaatcgttttcattgaaacaaaagccaatttttggtagaattttgtgtagaatctgaattttcaattaaaaatctaat

SEQ ID NO: 347127 - DNA, 1064 bp, Cannabis indica
gggattcctgtcggaaaagttttataaaaaaaggctaaatgcaacaacaagccaatactaaatcaaaatgcatggcaaatacagcccaaaaataactattggaaacttggcacgaaagccagtaaggtcaatatgtacattgctggagaggattgtcacctcatggctgaactagcttttctttgcctttacctgcaccacatagcacccgtgagccactaggactcagcaagaaaagtaataacaatcatttaatttattattagaatattatcatttatactcagaaaattagaatcaaacgatcacgcattactcataagatgaaatccaaatcactactagcatctgctacgaataaacatcagtgtaaggatatttagtaatacaaaaccattatatcaataatagaaatcatatttatctaataatataaatattatatatatgttaccttataaagtgaccatctctattacatcacattgtctaatcaggcaagtcgatgctttaatctgataatcctgtattgcattgcctaatcaggcaagcctgtgccatggcttggcactcatacatcgcataactgcatcactaaatcaggtgagcccgtgccataatttaacatcatacataatatcattgtgtcaactaatcaggtgagcccatgcaacaacatggcaccaatatatcacattacctaattagacgagctcgtaccataacttggtactcacatgtgactgctgcccgtacctaataaggtacgccgccaggaagaaacccaaaaatagtttcaatctatgccataacctagcattcacatgtcagtgtcgcacgtacctaataaggtacgccactaggaagaaacccaacaatggtttcaatctatgccatagcctggcattctcatatcattgtcgcccgtacctaataaggtatcatcgacaagtatgtcgcatcacctaaccaggtgagcccgtatatcacattcatggtatcatcacattgtcatgttgggttttatgtcctaaataaaactctttacaatctgattagttatc

SEQ ID NO: 347128 - DNA, 917 bp, Cannabis indica
tatatatatatagatatagattaccttcacccatccccaatggcggactcacaatttaaagtgaggggtaactttttttttttttttttataaaaaagtaaacttaaaaagaaaaaaaattgtgatttgaacctaacctctattatatatatgcagtctagttaaccattacgccaaaactaatattatgtttataaatattatttttattataaatatatattgtaactaattaaaatatatatatttttttaaggacaactgtccctcgcttcaatgtgggtgcaccactcacccacagaataaatttctatctctaatcataattataattatattgagtgatatggtttttttactcataaagaccaagataaaaaaaatatagggttctattttaaaattattagaggtacttattagggctgtacataaacttttgtaaatcgcccaatccgaataatccgctcaaaccaaaccgagataacctgacgaaaaatataaaccgaaaaacctaacgaaaatataacccgcccaattaacccgaactaacccgaccaacccgattaagagggttttatatatatatatatatttatatgattttattatatatatttatatatcatataatttatattactattttaaaaatataaattttaaactaatatagttttttatggtggctaatttgaacatcaaattcaatctatatatatttttctcattattacaattaactaatatataataattgtatgtaaaaaaaaatattagtattcggtttggacgggttaacgcaaccaaattgacaaatttaattgggtgagttactattttcttttttcttaattgagcgggttgcacttaatttttgtaaccccatctttgagttgaataaaatatagcataaa

SEQ ID NO: 347129 - DNA, 644 bp, Cannabis indica
aaatcaattcagggtcctatttgtagcattttagaaagtacatggtccattttttcatttaacaaaacaaatggtccaattaataacttgcaaaacacagggtccaaaatgatatttacccaaaaataataataaagtaaaaataattagtaatatttaaaaataagcttatgcgatataagtatctaaaattttaaatttgtaaaacggtataaattaagtaattttgttagcggaaaaacccaattttagtaaaacattaatttttgtctagttttctcaatacaatctattttgaatttattttaaaaaaattaaaaatgattgatactacatatattttcatccacagtaatgatataggacttatatatatcatgtttaaaacaataccgaaccaaagaattactgaatgaaaattacaatttttttaatattaggtatttatgtcattaaaaaaatatttcgatttatgtcgcgaaccgaccgatccaattacaaccgactacgtaccaaaccttgaatatccaattgatcagatcggattggatgttattctttaatatccaattggatcggatcgaatgttggatggggtgtctaaaaatccaatacatccaacatccaatcaaactaattagtat

SEQ ID NO: 347130 - DNA, 873 bp, Cannabis indica
atcccagggagaaagaaaaaggtgcaggatccacgaaaggtccgctcaaatttcccgaaagggaaaggtccgtagaggggcaaactccaaaaagggagtcttggccctcaggatcgagaggaccgagagagcatttccgtgcaccaagagcccagggagagaggaagggaaatcggagatgccctcttgttgatttaagacgccaaattaacgaaaagcacggtgatctgcgggatcacctagacaaaaagaagcaaatatcatcggtctctgcagggacactgaatgaaggaattttagcagagttggcgacattgcggaaagacaccgctcgagtctcccgaaggcaaaaaagggatgactcagactccgactgcgaggaccgagagccatgtgcccgacacgtattggaggcagagcttcccaaaaacattaagatgctcgagatggcagcatacaacggagactcagaccccagtgaccatatgtctcgttttaaccgagtaatgacagttatgagggtcagtaatgatgccaaatgtttaagctttccactaacattgagcagctatgcggaggaatggttcaagaaattagaaccaggatcggtggattgctggaacaagttgcaagttagtttccagagacagtttgtcgcagcgagaaagattaatcttgaagttagcaccttgactaacatcaagcaactacccaccgaaaccttgaagaatttcataaagaggttcaaagaaaaagcctcgaaaaccaaaaaagttgatgacggacaatagcttgcacttcttcaagccgggatccgtacggggaccccattctagaatgaattacagcgggaaggagctgctaatctccaag

SEQ ID NO: 347131 - DNA, 612 bp, Cannabis indica
cggtacgctagtcatactccaactgtaccgatgtgatattttatcagcctatacttggtacgctagtcatactctagctgtaccgatgtgatactgtcaaattgcacggtactatcgaccataatatcagcctatactcggtacgctagtcatactctagccgtaccgatgtgatactgtcggatagtataaaagccaacatacatatctaatgtaatctaatcggatcactaacatgcaagctaaacatgtaaatacctatgcatactgttatactaatcttacctcaattcggaattcaggtgtgccagtcaacctgagtggaacaatctcctcggcgaattacaggctcctaaatcacatcaatcacaacactgataagcgatacgctaaatcacttctcggggacttaaacttgaaactaaatatcacaacaatgggaaaaactagggttcccaaaactgccccaaccgttagaccgattcctcaaccggaattccggttctgggaaaaattcctggaagcaaactggaattctggttcctacaggcctctttgaaccgaaattctggttcagtgcaggaatttttcaaaatttcatatctcatgcaa

SEQ ID NO: 347132 - DNA, 542 bp, Cannabis indica
agacagccggtctcgagcttctttttttttatttttggaaggctaatccccgagccaacttcgactacttgggcgaggctaaggacatgtaccttgagtactgcgcggcccaagtggcttatggtggaaccgaggcggctgcttcaacctccgatcaggctactgatgctcctcccatttaaacaacgattcctcctgctccagttggcccaaaagaaccgaactaagagccttggactccagctgtttaaaaacttctttttatatcattttttttatatatatcttattcggccttagggacttttctaagacatccttaatgaatttcattctctgtttataattgtcatgcaattgtgattgttttatttttaccaaatgctttgtacaggtataggtgccccctaagtgaccgagcagacgtatgactcttggtcacttgtcttttacaaatatattgtttatctgttcggtgttttgggtttgaccaaaccttttgtacacattgtatggtacattataaacatgctaattttttc

SEQ ID NO: 347133 - DNA, 819 bp, Cannabis indica
agtgcaggaaacactcaaaaccttctacattactcactttgatcccaaactacacaataacttccagatcaccaatttataccataatagataaaatccatgcaataaacaacccaacataaccagaatcaaactccgccactagatagagaagcttgagttcataaacttaaacctctctcaataccacaacaaccaacaagaacaacttagaataactcaaataacctcaatatatcttcaaaacacaaaagcaaacaaatcttaaaaccatagaaccctaattcacaaaacatgcaagaaaagttatcttgaaacttaagaaatcacaaaaggatgagctaggaagcttacctaggattggaacctcgacaaagatgttagaattgctgaagaaaactctaacctcttgctggtttctagggagctcgagaaagagagagagcttggagagagaaatggtattttcttgatttttttcgaattgaataaaatgatttattttttgataatatctaactaacataatgatttaaaatcagattgtttaacttatttaatctcactaaaaggcaaatattcctaatggcaaaaagactattttgctcttacacaccaaaaagtacatttatcacctaggggtaacttggtcatttctaaaacctcgaatatttctgacattcccaatgtatatctaagttgccccactaaaactaaaatactaaaatatgattctattagacaaacgttgcgttccaatgttgttggacacaaaacatgaaaaacataaaatttcatatatggcataaataatacaac

SEQ ID NO: 347134 - DNA, 2220 bp, Cannabis indica
gtattagccctaccatcagataaggaaatttttgactttacggcgatgcatccagatagggtctagggtgtgtactgatgcaggttgattggttcctcacctatgcctcccgtcaattgaaagaatacgaacaacaatacctaactcatggtttagagcttgtcgcggtggtttttgctttgaagatttggtgacattatctctacggagagaaatgtgagatttatactgaccataagagcctcaagtacttctttactcagaaagattttaatatgggacagaggccttggttagagttggttaaggattatgattgtgaaatcctttaccatcctggaaaggctaatgttgtggatgatgccctgagaaggaagggtcccggacaaatagctaatatgattaagatttcacctaagttagcagaagacatggtcaaattgggcattcagtttgtagtaggcaaacttcataacttgacactacaatctgatctgttagaacgaattaaagctactcaattaactcatccagagttagtaaagatctaagaagaggtttcagctagtcagaccaaagattttacgatgtcagatagtgggatgtttttgtttaagactagggtttatgttccaagtagtgcggaacttagaaataagattcttgaggtggctcatatcactccatattcattgcatcttggctctaccaagatatatcaagatcttaaatcctacttctggtggtgcgggatgaagaagagtgtggtagaatttatgtcctggtgcctaacttgtcaacaaatcaatgttgaacattagagaccagcgggtttattgcaaccactgacacttcctgggatgatatcaccatggactttgtgattgggttaccaagaaccccgggcatgtacgattcgatatgggttgttgtagatcgattcacgaagtctacagattttctaccagtaaaaacaacttttacagtggatcaatatacaaatttgtatgtgaaagggatagtgagattacatggcgtgccaatgtccattatatcggataaagatcaaatgtttactttgaaatttttgtagagtcttcagcgggctatgggtactaaactaaaattcagtatagttttccatcctcagactcatggacagtacgaaaggacaattcagataatgaaagacatatttcgagcctatgtaatggattttgagggctcctagagcaagaacctgccactaatagtgttctcgtacaatagcagctatcagagtacaatagggatggctccctatgagttgttgtatgggaggaagtgttggtctcccatttactgggatgaaacgggagaaaagaaatatttgggtctgaaatcagtgcaaaggactaatgaagctacagaaaatatttaaggccagaatgcttgcctcttagagtaggcaaaagagttatgcagattagaagcgcagaaatgttgataagataggggatcatgtgttcctatgggtgtccccaatgaagggagtcaagcgttttgagaaaagagacaagttatgccctaaatttataggatctttcgagattcttgagaaggttggactagtgtcatatcgtccagctttgcgtttagctctttcagcagttcacaatgtatttcatgtttccatgttacgaaagtacattttagatcctactcatgtgttgagttatgagaatcttgagttgcaaccagacctatcatgcgaagaacaagcagttctgatcttagacagaaaagataaatttcttcataataagaccatagctttggtagaagtacgctggagaaacaacaaggtggaggaagccacctgggagttagagtcagacatgaggactcagtatcaagagttttttaggttagatttcgaggacaatgatggtttatttaatttggaaattgcagataatgagggtttattatgaaacttgaataataattaagaattatcattttatggagatttatttgaattcaaaatgcattatatatgtcatatatagaattttatgttttctcatgttttgtgcccgacaatatcaaaatgcggtgtttggccattagcatcacattttagatctttagtataacaaggcaatatagttagacatcaggaatgttgagagttatccgaggtttggaaatgaccaaaatacccgttaggtggtttag

SEQ ID NO: 347135 - DNA, 665 bp, Cannabis indica
tgatgagacaatatgtatttatagagttagggaggggacttagctacaaaaccctagttgggctgggcctgctcatcaaaggcttcagtcaactagaaaagtccacacttctgcttcacctagactttacacacagatgctaagcccattaacaattgatcaccaacaacatgggctaacacaacaaagaactatccaatcaacccaagttttaataaaaccaataaaatttaatgtaagcccaaataaaagtctaacaaggggaagattcatgtcttcttctatatcaagcactatgaaattagtagggaagaaaaatttgtcaacttttactaaaacatcttcaatcactcctcttggtgggttaaagatcgattggttgggtttctaccctaaataaaactcattttaatataatcagaattactaattaatgaaatatcagaaatcattttatgtttcatggttcacatgatttatttcatgattatatgtttactgcataaattttattaagtccagaacatatatttattcatgattatagtgttgtcaacacagtggaatataatcatgattatatgttcaaaagtttaagtctcatgatttgtcagtatactggatttagactgacatgataatcaatgataaggtatacttacacc

SEQ ID NO: 347136 - DNA, 709 bp, Cannabis indica
caatattccactcgtgccgtgaagttccgaccaaacgatggggtagggttcttagagggaatcagcaatctgctcgggaatgttacaaccttgcagtggccaaggctaagaaggaagtatcctccagccagggcccggacaagggaataaatattcccaagtaggaaaccgcccaaggcgaggatgaagatgtggatcctcgacttggggacccaagcaacaatgttggacctgtggatgaattagacgagatcgaggtcgatccagctatcacggccagaaagctaaaaatcgaaaagggtttgttgctcggagtaaaattagaattgataaaatttctgagagcaaacctagacgttttctcctggtcacatgcggatatggtcggaataaatccttctattatttcgcacgtcctgaatatcgatcctaatatccggccagtttagcaaaaatgaagattgctggataaagaacgggcagtagccctgaaagacgaagttaaaaagctgcgcaacaacaacttcatcattgaagctttctacccggcttgggtgccgaatcccgtactcgtgcctaagctgaacaagaaatggccagtctgtattgacttcacaaacctcaacaaagcgtgccctaaagactatttcccacttctaagaatcgatcagctcgtcgatgcaacagccgggcacgaaatattaagctt

SEQ ID NO: 347137 - DNA, 1390 bp, Cannabis indica
tatccatttaattttactaccggttcgttgatatggacagaaatttcgagggtaaaatttagtacatgtcaaaatttaagggacacacaatttagttcatgtcatattatttataacatgatgatatgtatttattttgatatattattattttcataaataataaaataatgtatatctaaaatatgcacaaaaatattactattttctaaaacattagatcagagttttttttaatgttatttgttaaaatatacatgatattttagggtgtgttataaaaatttgggtttttattttttatttttttaaaaaatataaataaaagcatttttttttgttattttctttaaaaaaaattgtatcatatcgatttttgtttttgattttacaaataaaaacttatttagtaattttttttgtttttcttccttttttttttaaaaaaaaaaattaaaggactaagaaagagaaatgagagaaagtgggctagggtctaggtccaagatcgagttcgctcagggcgtctaggccagggtttggctctaggccaaaggttaggatctgggctccgagtaggggtctaatgcaaatagtatggttccaagctagaggttagggcccagggtcgaggtctaagtcagggatcagggtcggggtcaaggctggtggcctaggatgcggtttggatccaggtctaggtttgggcctaaggtcggggttcaagttcaggtatggctagtggatgcgtccaggtctaaggctgggttcaaggtcggggttcggggtataggtgggggtctggcgttgggatttggttcgggtttgggtttgggtctgagcgacgggggctggggtccaagtctaggggcttgatctgcgtcgctgtggttcgaggcggtgaggggctaggtgttggggtccaggctaggtgctcagttgaggtcgtgctttgggccaacaaccgtgtcagggatctggtccaagcttgggtctttgtcccaattagggtctgagttaggttcaaggctacaatccaagtctggttccaggttagggtcaaggccatggtttggtctgggtccgagcaaatgggtccaagttagagtcagggctagtgtccaattttgagggtcggggttcacggttattagggggtagcgacccaggttggggttcatgtccatgggtaggaagtcgaggttagggcccaaatttaggctgaggtgtgagtcaaggctggggttgaggtctgggctagagtcgggagctagggttggggtcggggttggagtccaattgcgaggttagggttcaaaattgattaaagagaattcaaattgagtataattaaagaaaaaaaaattgtttaaataaattttcaaataaa

SEQ ID NO: 347138 - DNA, 821 bp, Cannabis indica
tttttcttagagcttttggtcatgaaggtgtagggtactatgaaatgaacctatatttcgaagctccaataaacacttaattattattgaactcttcaatagaataatctactttattatttctattattactccactataaatataaagttgcactctttaacaatatagaattgttttttttttcttcagaattcttacttgtagtccattgatataatcaatataagtagttcgtcttccaattattagttcataattagagttgatcaaaattatcgttttacctttttaattatttcttaaattctttttatactattaattcaatgtgaacaattaatttataacccaattaataaaatgatactattttccatacctaataaatttttattttcaaagaaaccttttaaatttacattaaaaggtatgaggcctattatattttaaagccttagttattgctaaatttgccttaattaacctacctaatttatcaacttcggaccaacacgacacacacaaatttgcagcactacttcaaagcaataatttttatcatttctctctttctcttttcaaagtagcgatttttttatcattttttattttgtgaaatcataatatggttatgaattgagaatctttttttctcacatggagtgagacttaaggttgggtatctgatctaatctaatatttttttctcatctgatctaatccaatttgtaattagatttagaaaatgctaattaagatttttgtcccctgaactttgcatgtaccaaatcatgccccctgaacttttaaagccattg

SEQ ID NO: 347139 - DNA, 614 bp, Cannabis indica
ggagtagaatcataaaaaaaaaattgcaaaagtttgaaaattattgatcattattggttattgatcttgaatatttattattaaaaggtttgaaagttactaattgttattggttgttgatcttgaataagtgttattaaaaaagtttgaaagttaataattgttattggttattgatcttgaatatgtattattgaaaatatgtcagttattaatttttattggttatgaatcttgaacatgtgtgttcttgataaacttaactatcgatgttattgattatggttaataattgattttgattatgtattgtcaacaaagttagtacatcattactagttattgatctcgaatatttgttactgataaaatatacatatatgaagttgttggttattttcaagttgtctctaaaacatgtaacttgaaaatatgctgatgaaatgggtgtttagatatgatgtataaaccatgaattctcatatcttattatatcgctctattcttagacttagtaaaataattattcgaaaaaataatttagtaaaggggtagaagtttattttttataaaataatagagttttattgtaaatattataattaaatggctta

SEQ ID NO: 347140 - DNA, 1118 bp, Cannabis indica
cacttacagttttgatgaaattagagatatgcatacttacacgcagcgataacggagagtatgagactgtacccacctttgccggtggattcgagagtgtgtaaaaaacgacgacgtttggccagatggaactttgggttaagaagggtagtttggtgtcgtttcatccgtacgcgatggggagaatggagagtatatggggtgagaattgctacgagtttcagccggagaggtggatggtcgacggagtatttcggccggagaatccgtacaggtatcccgtgtttcatggaggtccgagaatgtgtctgggtaaagatatggcttatattcagatgaagtcgattgcagcttctgtgcttgggaggtttgaggtggacgtattggataaagacacgtgtcctgagcatttgcttgttgtgacttttagaatgaaaggcggtttacctgtgaggattagggaaagaaaaggtcctaattaatttaataatctttttcttgcttatgtggattaattaatatacaagtatgaatgaagggtttggatcatatggtatttgataagtcaccattaatgattggaaaacaatttcatttatagaaatataatcacaaaactgaaattttgtttatattatcatctctttttgcgtgcaataataatatgtgtgctgttgctttcagtatttaaagatgagaatcttgagcataacgacttgtcgcgagcttatgatcctatataatttaaatgaatttagttattcgatttgatttgattcgattagataacttccaactgttaactgtaactagttttttactgaattagattatatccattcaatttattttaattacttgttaaattaatttaataaaaaataactatatacaaatataatttaaaacttaataatacaatctacataataaatattaatataataaatattaatttaatctaacttaattatcataatcctataataaaattgaaaaaatgaaatttattcaatacttaataacaattttattaacgtttaaaaaaataagaattaatattttagatttaagattttttttttaatctcacgtgttaaatatatattaaatatata

SEQ ID NO: 347141 - DNA, 802 bp, Cannabis indica
tttgaatagttatgttttttaaaaaattgaaaaaatcagggtgggagtcacccacgtacgctcatgaaaactcggtttccttgggtgcacggggttcggacaggtcttatgttcgagttttctcggtcagggggtagattttgtctgaaaaccccccatccacgcacgggaatggtgcttccagtctcccctatgcatgaaatctcggccagcttccctgttgcatgcgcgcggatggtatggaatgcataccattcgagccaaatgcagtttttttcaatttttttaattttttcatgctttttcatggaattaatttcaatttttttgtgtaattttgtatttagaattttattttgaaaatatcaaatctaattatcagactgaaattaattaattttagatattagtagattttgaacctaaaaagagataaaatcttatcttttgcttaattagttaccttatttttgtaatttgattatttatattatttttaaatttaaggtaagatattttatattttatattatttaaattaattttataaaatgtccttatttgaaatttaaaataagatatattttaatctagaaaattttaaaaatctaaccaaatattctgtcaacttttaaatttttattatttcattaaaattaaattataaaattagataaatgatatttatttatcattttattctattagacatttaattttatcttcttttaaaaaataacataaattttgaaaagttagttggcatttttgaatagatatttaggtttgttaaaaacctaat

SEQ ID NO: 347142 - DNA, 661 bp, Cannabis indica
tttagatttttcaatccaatccgcgcaagtgcggatacctgcattttgcggattggattggattggatcgtgcggattggattgaatcggatacttagtgaacacccctagctttcggtaccagaaaagtcgctgaagtagctgtcggtgtcggaaaagtcgtcggagttgttgccgacgccataaaagttgtcagaattggcattgtcgtcggaaaaatctccgaaaaaaatcaccaagaaactggtttcttcatcaagaaattagtttcttcttcaagaaatttcttggtaatttttccagcgactatgccgattctgatgacttttctgaagtttgttgtcggtgttaaaaaagtcgtcggagtagctgccagtgtcagaaaagtcgtcaaaattgactttgtcattggaaaaatcaccaagaaagtgatttttcatcaagaactagttttttggtgattttttcagtgatttttttggcgataatgccaattccgacgaattttctggcgtcgacaacaactccaacgaatttttccgacaccggcagcaaactccggcaactttttcggcactaatgacaattaaaactcctaaaacaaataaaaacattaaatatatgatttaaaaacttagtttacatatatatgacatatcaa

SEQ ID NO: 347143 - DNA, 656 bp, Cannabis indica
ttccttttacaatcaatgctcgccgaatatttagataggaaatccattcctaaaataatatcgaactctactaaactcatctctatcaagtcagcacttaactctctaccatctatcctgatcggcatagacctaatccacctgttggagataaccaattctccgccaggtaatagggttccaaaccctgattcataactatcgtacggtctatccaatttactaaagattctggcagccacacaaaacaaccttgacccaagcactcacccggaggatgcctcttactaatgagacactccagtaggaataacgggtctcaacactaccctgacgaccaccttgattctggttccctcggaacctcttgttctgccctgagccaccagatgcagtggatgatttcctcctctagtccatggccgaaccactacctcccctgctgaaacctgacgcaggaggggtaggagccccgccacatactggagtcctaactgattccacatacatctaactgcgccctcagctcacagtgctttctccaccatctcagcatagatgatcttatcgtcggtagtgatcataaggtcatacttgatcttcacattaagtccatccagatatttttctttcttactgaaatcggttggcacaat

SEQ ID NO: 347144 - DNA, 641 bp, Cannabis indica
ctgtttgttttctagttttattttgtagttatagagttttgttccttagttacaaaatagctgttttagtaccatattattattttgcatttaattaattgattaattaaataataaattaataatattaaaatacagaatttcaattggtatcatagcaagttaataaactcttagttagatttagagatttgtattccatttaattctttttttgtgtgagatgtctttgtttgtagaaggaagctccattactcgaccacccttgtcgaataactcgaattatccatattggaagatcaaaatgagagcgttcatcaaataacaaaatgaaaaggcatggagggatatattttcaggttggtctccacctactgaagtggatgatgaaggtaatactaaggtaaaacctgaacttaagtggacttcggatgataaggttcccttgcctagtacctttaattttactttattgtccatttgtatctcatggttaccctttgactcttcaaaggtcttcaacaatgatttgtcataagtgacatgaacggtgtattgggttttgtgccctaaataaaacccatttcaatataatcatatttactaattaataaagatcagaaatcacattttatgttgca

SEQ ID NO: 347145 - DNA, 605 bp, Cannabis indica
ggatttaacacaattatacaacattatgaacataattacaaaaaaaatctcaataaaacatattatggcataatgataaaaaaaaaaatgattaacataccggatatgaaagattgtaactgacataaaatatttaaatataaaataattattaatactaattactattattcattaaaaaaatatataataaaaaaatagcatgtatctaaaaatgaaaattggtgtatattgaccaatatttttggcaacaattaattttgattgtggggaacaattaatgtgaattgaagaagagaatttttacgtggttagggcattaatgagttttaatccacgagtcacttttagatgacatttgattggaggtaataaaatggaatagaatataaaagaaataattttcattctattcctttatttggttgtattttaaagtattggagtgtaattctaatagaatgccctttccatcattttggtagaaggactattccatattgaaatggaaggaaagaccattccattgtaacattagaaaaaatttaatgatttttttatcaattttttatgcattttaaattttattccattccatttctatt

SEQ ID NO: 347146 - DNA, 482 bp, Cannabis indica
tataaggaaataaattattaggtaactattaggttataacttaattattatttatttttctttaatttctaaattaatcacaaccattcaatagtaaaaaaccgagtttttgcaaatgccaataattattatagaataatagtaataattcaactttaacactctgcagcagcagaatataattatgtcaccctagaaaataattttgcagaaacaaagcagaactagaaataaaataccagaaattaaaatcaattgacacaaggaaattatacgtggtatcagtgttctttcgaacacccctagtctacaaggtcacgcctagagaaagaatctctcttcaccaaagaaaatatgcaagaaaatgaaagctacaagagttgaaccgattggctgctctttagggttgctatttatagaacatagcaaccctaaagacaactataaaatcgattccacagctgtacaaactttcttaaaaa

SEQ ID NO: 347147 - DNA, 796 bp, Cannabis indica
aaataattaaaaaaaaaattgtaaacaaaaaggtaaatataagtaataataacagtgtgtggattattatgtaagaatataaatgtctataaatattaacactataagataattgtaaaattgtctaaaaatctttaatatgttgattttttaaacaagtaataaatgattgatgacgtaagaaataatatgtaaggatttaagtgtaagtggggatatatttgtcttaaaaaataacacacttaaattaaaggctatatttgcatttgtaaacatcatcctattaagagatttttataataataagattagataaaaattataataataaagacaaaataaattatttgtaataaaattagatgataatggtaaaataattaagtttgtcataaaattaaatgataagggtaaaatagtccaaatttaatataaatactaataagatatttttaatatagtaattacaaaagtctaagagtttttgttgattttttatttttatttttattattgtaattttacaaagttgttaagagtaaaattggtatactaatatagacaccatttaccatacttttataatagtaagatatgtaaatatgtagctgaaacaataattaaaaatttatataaatgaaaaaaaaaataaagaatagaagagaaaattcatatagattgtcacatcaaccttttgatgctttcctttatatatatatatatatatggacatgattttgtcccgtgattgtactttcacggaatgtattctgtgatgtacgatagtcgttaaatg

SEQ ID NO: 347148 - DNA, 2193 bp, Cannabis indica
ttcttttcagtttctctttcaagatcgccatcaactgatgaccgactttcctatgctgcagctctatacgttagcaattgcgagccaacatctggtaaccacgcaccactcccacgccatctggtgtttgtaatttcaaggataggtgcttgattgaactgactgctactactctgatcagtgctggacgacccaacaatatgttataagcagatggaaggttgaaaaataagaagtcttgcataacagtagcagataacgcggtgcctcacctaggttaatgcgagctcgattatgccaagattggtaatgctgtccctggtgaatccgcaaaggtttaccatacaaggacttaatttggctttttcgaggcccatttttagtagtctccttataaaggatatttaccgagctcccattgtctattaacaccctcttgatccttttattggcgagttgtatggtaatcaccaatggatccacgtgaggatacctcaagtttttctcgtcttcctccatgaatacaatgggaggttcctcgtttttcaccttcttggaaggttctggggcaaaggctgactactcattctttatctctttcacatatcttttctagcgttattgctttcccctgcaatatgcggccctcccgaaataaccaggatgtcctctccgtcaacaggaagaggttgtaacccctggttgtttgggttattgggcagactgggctggttgtatccatggccctgtcttttcacgtattgtttaaaaaagccttgagcgatgagactttctatcttatctttcaattgatgacattcatcggtcgtatgcccaatatccttatggaatttacaatactttttaggatctcttttgctcctcgaactcctcatgggctcgggcttgccgaaggcaaccttttactcatgtgtgaggtaaatactctcccgagttttattaagctcggtataaatagtatacactggcacgtacttatcatgcttcttctgtttatttttatccttcgacggttctttaattctgtcctttctctttgaaccaggagcccttgagttatcaattctcgtggaaacagtacctgctgaaacatttctgggtttgcttcccgagcttgttttcaacagattcatttccttttgggcttctaccttctgaacgaatacctgagccctttcgttgaactcagtgatgcttctcactggacgcccttgtaagtcatcccacaactcgccccctacggttaatggatcagtagagatccctgcttgaagggctgtaagttgcgtgctttcatccaaattcctaaccttagacagatccgtgctaaaacgacttaagtatgccttaagtgtctcaccgggctgctgctttatattggttagcgaggccgcttcggttcgtctatccctagtagcctggaattgtttcttgaaatccctagatagatgctcctaggaagttattgaatgatgagtaaatttgttaaaccagctactcgctgctccaacaagcgaggtggggaacaaaatacagcataacttgtttgtcacattacttgctcgcattcttgtattaaagttattcaaatgcgagatcggatcagtggttccttcatatgacgagacatgtggatttttgaatcccgaaggaaaaggggtattcactatttataattacatagtggtcagttaattacaaagttgaccgtaatactgtatgtttacaacaatcatccctaaaatcatgggatttgactacatatcacgtagtgtaaatgtggtttatgatttgaaaaccatatagctgtgattttctagcttttactgggtcaaaatgatcgtgttataaacacgtctttaattattgtttctggagttgtctcgacagaaacttagttccagtgatctcaatagtgagctggggccatttttccttctgaggtcgacgatggatgtcttgtgtcgatcgcaatttttacaaagagttcttcgaagctcatttgaatgttacttcttgactttctaaggttttgagcctcgctagcattgacgggatgaagttataggaagttttcccatagcgagacaggcacctcgcttactttgtctcgagccgatccaacacttagtttgtacaatatgggcttttgcaattgatatatgtcgcttt

SEQ ID NO: 347149 - DNA, 1717 bp, Cannabis indica
gcaattctaattcttaaagtttttcccactgggtttcaaatagtagtgaatcttttattagtgttgttgttgtttccaacaacaagaacctctttctttcggtcttgtttcaagtttcctcctcaatttgaaggtgagcaattagactttccaatgaaaattcttttattttgtgcctaagagtattttttaaaatatttccatgaaaggggtaatttatcaatcattacagcaacttgaaattgttcatcaatagtcatacattttgacaaaatttcgtgagctattttctgaagctcgtgagactaagctttaactaatttatcatcagtcatttgaaacttcaagtagtggctcacgacatatttctttattccttgccttctcgatataatatatatataatttttttttgtaatgcttcccatttttccttggcagatttgtcagaattgtagtaatcatacaaataatcagataaaccatttaaaataaatttcttacacagaaaatcattctctacccaggagtcccttttccttaacctgtgattcgtacttctctacttcatccttcttctcgacaagaggtggagttcagacacaactagtttcaaaactgtcagcacaaacacaacttttttgatagtcagaaaaaataacatcttctatctccaatgtttaaaatacaaaacctcaaaatgaaaaggcttattaatgtcaacagtagaaccagaaaaataattggtagtattcatagtagaatgaacgtcataaattttttgaacagactgctactgaaaataaaagaggatcaatattactgtatgaaatttctaggttgagtcgcagactaggtcgctctctttaagacgttcgcagtattacccagaaatatgcaagcagtcgaaaatcgtcgatcgtccaaaagataaaagagtccaatcaaaataccacagtatcagagctctactacacgatagagaaccatcaaagtagcacaccaaaaaactatagctcagaatacttatataatataatcataaatataaactgtaaaggtttttttctgtgtgagaaaagataattttctcgcgtttgttctaatgcattatacagggaatgcatagaaggtagtaataggaagaaagacgatgatcatagaaacattaagtgtgatcgtgagaatgatgctgaaaataaggaggagaacacgtctcttcgtaccaattaatttaaatccatttaagaactatttgaattaattaaataaaaataaaaatttaataaataaattttctcaaaatataaagtgacacctcaccacatctgctcggctcggcacagtaagtcaaatggtgatggtgcgtgtgcgtgtggtggtccagtgtgtgagtcctcaaccttgcgcacaaaactgggtaccccttggggccccaactcatgtgccaaagttgcacattatatacactattaatgaagtattcctatcccatgtgggactcaatgcactcatatacttcacttctcatacaataatttaagaaaattacagctaaagttaccaataatattaattattattattattattattattattattattattattattattattattattattattattattattcttgcattgtctttttttcccaccaaaattcaacttccacgcatagggttaggaaaaaagaaaacaaaatttt

SEQ ID NO: 347150 - DNA, 623 bp, Cannabis indica
tcttaatgaccataggatggtccacacctaatcactttagaatagctatcaaacatgcaaatcttagttagcagttctagcttttcttaagctcatgatcagggcacccatgaatctagtattggtgtacactaagtatatgaccattccatcattctaaggttttcttgggatcatacttagttgggacgacatagaatgtcgtttgctatctctaaggtatttccctaaaaggattcaggcaactgctgctagtaactaatcatagaccttacattttcatcaatatgcaattccgaagttctggggaggtaagtttggatgcaatttgaagtttaattttaaggatctttgaactacataaccaaatatttcaccacccctatcagttcgcaagatctttaaccacttactttaatagttttcaccattactagaaattcaagaaatttctcaaacattttaaatttctttattaaaggtataatctagaatgatcgtctaaaaatttaacgataactcatactcacccctaaatgtacatccatatgttcgaatacagataaacatactttcaagtggatattggtatgttttctctttgcagagaatgatcttgtcaa

SEQ ID NO: 347151 - DNA, 807 bp, Cannabis indica
cttaaaagggatgcactgatgcaccatctacctgtttcggcatctggaagaattttttaatttttttagtaaattgcagcaaagctccccaaagtatcacctcgctagcaattaaaccccaatttttatttttgatggtaaaactccgaaacccatgttcaattagtagtttgctgctttcatctacttttggctgttaactgtcaaggtagattgtccatgtatacatacattatgtacacatgtacacaatgtacacatgacacaatttaattggtccacatattttaaaagtaaatttaaagaaaaaataaaaataatttcttttttttccttcttcttttttgtacacatggtaaaatttaattggttcacatactaaatattttaaaaataaatttaaataaaaaataaaaacaatttctttttcttctttcttttttacttcttttttctttcttttcaaactctaaggtggaatgaaaacataagagaggaatgagaatgagaataggaataggagtggaattgaataaaatttaaaatgcataaaaaattgataaaaaaaattattaatttttttgtcatcatacattgaaatgatctttccttctattttaaaatagaataatcattctaccaaaatggtggaaaggtcattccaatactttaatatataacaaaaaaaaataatggaataaagattgtttcctttccatttcattacatccaaccaaatgccacctaattttttaaaataaaaaaataaaaaaaaatcagaagcaatatattttttttaataaaaaa

SEQ ID NO: 347152 - DNA, 628 bp, Cannabis indica
ccgtaattaacaaattatgcttatatatccacttatgtagtcttcagggtccccgaacctgaaaatatttttattctatatgtagctcatattacattcacacaggctatataaatctccgtaattaacaaattaagattatttactcacttataacaaaatttaaattttatactaaaataaattagtaggatcataatcccacttattacttgattaactcataatataaatataaaccttaattacttaccattagaattattcggatattacaatgttgctacaaatcggtaaaccatgaaatgagagaactttaacaggcatcaaagaaaattaaacaaaaacaaatttcgttacaatcaaaccaatttccttaaaactaacaaaataaacttgaaaactcattcaaaatgaaataaaagtttaaaaaaatacatttttcacaattcgagatttggtttagcaatttggattcgggctttgaccacggggttccgtcagggtagttgggtttcatcggtgggaccagtggaggagatggggtagaggttaattgagattggtagttccattgggtcgagagagagagagagagagagagagagagtagagagagagagagaga

SEQ ID NO: 347153 - DNA, 1330 bp, Cannabis indica
ccttagttttggacttatattcgtaggagcagatactttagacgtcgacgtccacgtcgtcaccattcttgtgatgccacgcagagtagtaaaattgggatacatttcgccccaagtgtgtatgggacttccgaagttgcgtgtagacttcatccgagctgcctcttgcatttggactgggtgacacgtgtcaagcgcatctgttcgcgactcaatgtgaggctgactgggcattccttcggtttttggctaataaatgttctgacaattaatatttcgaaatctgattttctctcacaacggttgacggctgcacttgattattttttgtttcccatattctcttttaaggggaaccgaggcgttgaggttcctttgaaatgattatcccttttcgttgttttcctataaataccagtaactatttgtacacaaactcattttcaccaaccttctttgctaagtaagttcagagcgaaaagagaggtttttggcttaaagtttgctgaagtgccttcatcaaaactgctcgtttggcttggcgttacctgaatctagacatctgatccttgagtaagttctcgatttcctttatgtttattttgcatgtttactttttaaatgcaccttcgactttgctgcagaagatatgtaggaaaccctaagtttagaaactcaacgattctccttcgtcatgggttcatgcgatttcatagtccataatgtttgctttctgaacaacataatgcttgtctttcatcttgcttattctaagcttcatgaaattttttgccctaactcgagaaaatttcaaacttcttcagttttgacttttcgttgaatattcttattcttgaatctgttgagtacgcctggttggcatctttgcttgttttaacgttctatattccgaccaaacactcatcttgtgtgttgtcttttatagatgaacccaggtgagttttgggagagcaaacatcgaatcgaccaggacttgcttcacctcttgcacaaggaccatcctcgtctatgttctagcccaccttcttcgagtgaaaggcattcctccttaagtctttcatctagccataaaatgatggctcgtaccaaaaagacaatgcgtatggttcacgcatctgaccctcaaggggctcggcacgtcactctgcccagcgccgaacaagatccaaccgtccaggaggagggggatcatgaaggggacgctgaggtctaggagattgaagagcaggattatgtccttcctaccagtccttccgaggtggaggaagaggaggaggttgcaccccaaactatgggggatacaatgagg

SEQ ID NO: 347154 - DNA, 567 bp, Cannabis indica
ttcatccaccctcttgtacagtttataatgataaggataagtcatcctgaaacatgaggtttgaaatgagagtagttatggttttggtcagaattttacaaatgacagaacccatttgataccaaaaaaggttgatggctaaaaaatttcaataaccatcaaaagcctaattctaatcattagcagaattacctaagaaaatgcaagaaactacaatttgggataaagaaactcaaaaattaacaaagagaagaaaatcaatttcaatagtggaatacatttcaatgaaaatccaatagattaaagtcaagaagaaaactaaaacctgcttgatttttcaagcaaatttttaataaagagctggcagaatttgaaataaatacaggcgtgtttcgaagccctggtgttccctaatcaacgagagctcagccatacgactcaatcctttggacaaaaatggtgtgtgggagtcgtcgatggttgtggttgcagctgaggtaaaagtctttcacagaatcaatttatccttaaaggtcagcatttgcatttaaattaaaaaaaaaaaaa

SEQ ID NO: 347155 - DNA, 537 bp, Cannabis indica
ttccttactcagcacgcaaatggagctgtacaatactacaagatcatctatccattgatttggtagttagctcttcaatcgtgtagtgcttaatggacgcaggttaccacgtgaggatatggacatgtgtcgttcaaaggtttctcctttaaaagtaatatcccagacaagccgttggacaataagcactacaggggcactacacacatgttgtgaaaattatatacgcaagtatacgcagtcacacaagtaataaagtgataagtaagattgtctccacagggattgcaaacaaaatacgatgtaaaaccaactaattacaacttaaagcaaaaataaaaatatgagaatgattgagctatgattcaaaattaaaatgactgtaattaaatttgctaaaattaatattactgttgcaagaaaaatgctttcaagaagtgtaatatggtaaaaagtggcttgaataactaatccctcctagttaggtttttcccagttgctatagcattacctcagcattcttgcacagtgataaca

SEQ ID NO: 347156 - DNA, 962 bp, Cannabis indica
tcagcgtgggaatggtcaaaatcatgcaatgggggatgagagcccaatcgtacccagcctatgggagaagatacttatgaaacaaaaaactgtcgccttagacgtcgtttagaagaggcgcagcagcgaaacgctgaattagagcgtgatgcagtcgcggctagggcatcacaggggactagtgctcaaaatcaacctaaacttggagtgagaagaccacgaggcatgcctcgtcgctcacgaaccaggagacaggaaaatgcccgagaaaagcaacccatggaaaatgagataccccctgaaatcaaaatgatcagccagaaccctctcatagacatgagaatgggaggctaccagaaactgataaacgagaaattcctcatgacaatgaggaggatcttgggactcaacctagagaatgtaggtcacctgtgagaaatcaccaacattcttcccgaacccatagaacgaggcctcgtacaaaccttaatgggggaattacggcaaaccacactcagggggaaaaatagagcgtgaagaagcaagtgtgatcttgaggcggtcaaggacccacagtcgatcaactcgaagagaaggaaatactcaacgagttaatgatcgagaaagcatgggaaccagtaaatccgcgagccactcaaggaccaagtccatgagcaagacgaggtctgtgagtaggatgcaatctatgagtaagataaagactgtcagtaattactcccaatcggatctacgcgagcacttgaatcgaaagaaacttgatcatcgccaacaacttgatccaaagcaagaggtgttgggttttgtgccctaaataaaaccctctacaatctgattagttatcaatataagaaatttgaagtgatttatgtttgcatgaattttacatgctaatggtttaatatgtttatacacaaaatatgttaagtccagatcatatgttt

SEQ ID NO: 347157 - DNA, 585 bp, Cannabis indica
atattggaagatatgttacgagcctgtgttatggagtttgaaggctcttggagtaaatatctaccattgatagaattttcgtacaataacagttatcagagtacgatagggatggctccctatgaactgttatatggaagaaaatgtagatctcccattcattgggatgagataggggagaagaaatacctaggtccagaaacagtacagcgaaccaatgaggcaattgagaagattaaagctagaatgcttgcctctcagagtaggcaaaagagttatgcagatctgaaacgcagagatgttgagttccaagtaggggatcacgtgtttttacgagtatctccaatgaaggggatcaaacgtttcgggaaaagaggcaagttatgccctaggtttacaggacctttcgagattctcgagaaggttggacaagtggcatatcggttagctttgcctccaactctttcagcagttcataacgtattccatgtctctatgttgagaaaatacgttttagaccctactcatatacttagttatgagaaccttgagctgcaaccagacatgtcatatgaggaacagcca

SEQ ID NO: 347158 - DNA, 1079 bp, Cannabis indica
ataaaataattaaataaaacaaaatatcctaagtttgaaaattttatggttagaaaccctaaaatttctattcaaacctaaattaacaaacttttcaaaatttcatgttattttgccaaaaaataattttaattaaaaaatatctaataagataaaatgttaaaactaacatttttcaaatcttataatttaatttaataaaaaatatttcaaaaataacaaatttttgaaaaactaatatggttagcaaattttgaaatttaaactagattatttctaaaaattattaatattttaatatcaaaataagatcattcaaattttaataataaaataagtaatatctgatcttataattaaaataaaataatcaaaaaattcaaattaaccataaggctatttttgtgaaaaaatcaaattttcaaactcaaaggctactaatcttctattgataacaaatcaaattgcattgaaatgggttatattccagccatcctgcatcctacagatgcatggccggccaaaacttggcctggcaggactttggtgtacaacattacatggggacaggaagctagactgcgaattgggccttaacaacccacaaaaaatatagggaaaatatatattttttaagggaccttttagtcatttatattttactaatttaatatgtaaatatctacttattttactttattaaagtgtttaagctctcttatctaaagggccttaactaaaccctaaagccctatgctatctaagtcattaagtgctaagtctgaactttaagcctgaactctctctctccctcggtatcaatacaactaaaaggggagtaggttattactcgctaaccaaggggaccaaacctctataaaatcctttgttcttttactttctagttcttattgtgtaacacgtggcaagcatcaatattaatctgaatccactatcgattggccaaatctaaggtcaacaatttactcctttcattgagagcgagttgatatcatatctgatcaaatgccatggataacacgaggagaaatctagttgcaccatctacatcatcgagt

SEQ ID NO: 347159 - DNA, 513 bp, Cannabis indica
aatatttgttgggggttgtcaacacccttagtggaattagattgaaagaattgaaaacagaggttaactattgtaccaatgttaacattgttagccagtgaggagaaaatgtgattcaatgtgatacttctaagattagattgtattttgacacagtttaggagagttgttgcctaactacctaggctattgaaggaatatgagaagtggtatttcagtcatgatattggattggcagtaatcattttgcattgaaagttgggcaccattttctatatggtgaaaatgtgatgtctatacggatcacgaaagtatcaaatacttttcttttgaaagaatttaggtgggaggcagtggtgaaggttaaagttgattgaaaatttttaacggtgtgatttactaccactttgggaagtaaattagtagtagataccttaaaccgaagaggtttaggacaagtttgtaaagcgaaaagatcttactattggttgttgggaatgtaaccagaatagg

SEQ ID NO: 347160 - DNA, 827 bp, Cannabis indica
ggtgcctaggcaggggcttggggagggattttacttttttggcaagattgtatggatgttaatgtactctcttattccctgaatcatgtagattgtattataaataattttaatggaaaaacttggcacttttctggttattatggctctccttatgttaatcttaaatctgttacttggactttactcaatcgtttatttgattctgctcctcttttgccatggttagttatgggcgattttaatgattatctttccctaaatgataggaattctcctcagcacccccctcctcatgctatgatttcttttcatgattttttgaataaccgcaatcataatcccatgcctcatgttgggcctaaatatacttggaagcatggctctatccttgaacgcctggattggtgtacctcaaatcaactctggcgtgatcttttccctcatgctactcttttccatctcgggttttatggttcggaccatagagttttaaagattagactccaagaccctcttttggccacctcaagatcaaatcgttttcactttgaaaatcattggctgaaagatccctctttctccaatcttcttacctcttcttgggctttttctgggcctcctggttcatcccccttgcagctctttcttaacagacaatctaactgtgttgctactattaggaattggagtagaaatcagcaccctattaaactccaaatctcgcagactcaagctgaacttgattcccagttgagtgccacctcccactcccccaactctctttcactcattgcttcccttcaatccaggcttgatggcctcct

SEQ ID NO: 347161 - DNA, 630 bp, Cannabis indica
gatcattaggttaggtcttatatttatcaattgtattttagttttaattggaattattttagttgcatgtttattaagttttataattacgttattttttagttgttatattattgttttaatgttgttcagtacatgatatacttgcagtattgtataactattaattgtatttttatcagttcattgttttattaatgttgtcatcctaatattttcaagtgtgtgatacgacctctgacgttgttgacaagtggaaacttccaaagaaaaatattgtcaaggtttataatttgttttttcgatttgtcttgtttgaaatattctctaattgtagttcattcatttgaaaaaaaaaaaatcatagcagaaagttattttatagtttgtttaatgttgttttaactgttgtaagacttgatttctagtgatgatgaacttcaaagttgatctgaatagatttgttgttcatttctattcttttggtagaatgaagtgagttgcatacattgaaagtgttcaaagaaaatatttcaaagtattttaagaaagttgacgctactttacatgaattaatgattgagaagtgtgttttgttttgattgtatgcactgaagagcaacatttttt

SEQ ID NO: 347162 - DNA, 1013 bp, Cannabis indica
gtagaaccctctcgaaattatacctactttgggctatacttctccactattgttctaaacccaataactccatctgtatatattattgttactccttgctagtttggttttttttttaactaataaaaaataagatatattgactgagaactgagaaaattctctttattttttgcttctcttttttggtcattgatgcctgtaagttctaccttaaaccaatcattaaagaagaatgagttttttattcttaataaataatgaactgttggacattagtagcaccaaagctacaaagtacaaacaataggtaactgtatataacattctatgattgagattgagtatttttaataaagcttcatatcttttttaattcttatagtcaatttagtattgataagattgtaattacaaaattttaatattttttttaaggatatttgcgttgaaatctctaaaatatttacaattattacacatagtcatcttaaaaaagtagtagtaaatgtactttatttcataattttgttgcagtggtactttttaattgttaagtgccagttcaaaaatacgtcgctgtatatttttttagcttatttaatatatagtctagataagatttttttgctgctattttttttattagtgtcatatgtaataatcgtaaattataaaggagttttgctgtaaatatctttattttttatttgaattatattgattttttttatattattaaattaaataaaatagagcaacaaagtttatttaagggataattttaaaaaaaacataaaaataacaaaaaaataaataaaaaaaatgtggtttgtaagaaatttttattattttacggtttttagtattttacatacataaaatacgatttttttgtgttatatttttgttattttgttattgaattttttattattttgtatattatttttttatattgttttgttgttattttttttattattttggatggtaattttttttgttatttt

SEQ ID NO: 347163 - DNA, 721 bp, Cannabis indica
ggtaggttaagataatactattttaaaattaacatattttcaaaaaaaaaaaaaaatcttaactagaatttaaatttaggttgttagaaaaatatttgaaaatatttaaaatctaacaaatctcctaaatatctaaaattcgaagatgaaaattaaatattcaactagttttcaaattttttagtttatttaaataatttaaattagttaaatatctaataagataatataataaatatcttaatttgaaatttgagatatttctgatattatatttctaatcttataatttaattaaataaatttaacaaaacaaaaaattgaaaataagatattttgaaggttataatattatcaattttatttaataaaaacaaaataaaatgtcctgattttgaaaatttgatggttggaaaaccctaaaatacctattcaaaccaaaattcacaacttttcaaaatttcatgttatttttacaaaaaatataaaattttaattaaaataaatattcaataagataaaatgtcaaaactaacatttttccaatcttataatttaatttaataagaaaaaatattttaaaaataattaattttgaaaatctgatatggttagcaaatttaaaattctaactagattatttttaagttttattagtatttatatatcaaaatcagatcatttcaaattttaataataaaataagtaatatttgatctta

SEQ ID NO: 347164 - DNA, 666 bp, Cannabis indica
ataggcgcatgtttttaatttccaaataagcggcattactaaagttcttgttgatcatgatctgacgatgctagctcttggttacgcaggttgtttagactagattgacgccaagcgaaataccaggagttagggcaactcggtcgtgtcaaatgaaggtcagggagctcagttttccccaaatgctcggggccgaggtagaggtcccaagggtagggcacgtggtcggggtgatgctaacccgccacaggctggccaagctactcaagaagcccagaattgggaaaatagatttgcaaaaatgcaaactaaaattaatgaacaagaagaggtaattcggcaactaagacaacagagtgctcctgcagttcctgttccacaaatcccagtggcacctgcccctgttgtccaggccgaaccaatagttgcagtgaatcggatggaacctctgtatgaaaggttccgtaagcaggcacctccagtttttctgggaggtccggatgttatgaaagccgagcagtggctaacagtgatcaccgaaattctaaaattcatgggcgtcaccggaaatgatagagtggtgtgtgccactttccagtttcaggaggatgctttaatggggtgggacatggtgtccatgatacatgacgtcactacgatgacctg

SEQ ID NO: 347165 - DNA, 995 bp, Cannabis indica
ttcatgggcgtcaccggaaatgatagagtggtgtgtgccactttccagtttcaggaggatgctttaatggggtgggacatggtgtccatgatacatgacgtcactacgatgacctgggaaaaatttcaggaacttttcaatgccaagtattataatgaggccattagaagtgccaaaagaaaagagttcactcacttgactcagaaggaaaacatgagtgtaactgaatacacaacacagttttatcggttggcgaggttggcctcgggtatagtgcccactgattttagtaaaaaggagaaatatctggatggattaaaagccaagatacgacatgatttgatgattactactgaaaacaaaaccacctatgctgaaatggtggaaaaggcattgcgagttgagggcgcagttgggtgcatgactgagtcggttaggactccagtggttggggggctcctacccctcctgcattaggctttagcaggggaggtagtggctcggccatggatcagaagaggaaggcatccactgcaaccggtggctcaggtcaaaacaataggttccgggggaaccagggtcgaggcagtcgtcagggtagttctgagacccaatatacttacccagagtgccccagttgtaaaaggcaccatctgggggagtgtagaggacaagggtgcttctaatgtggcatgcaagggcattacaaaagggattgccctcaactcagaaccgaagcaccaaaggctccggcgaaacccactccagtaagggtgttcgccattactcaggccaatgcagaagctagtccttcagtggtaacaagtcagctctcggtcaacaactctttttattctatgctgtttgattctggggccactcattcttatgtggcagcgagaatatttagtaaattggatagaccacacgatagttatgaatcagggttcggaaccctattactgttgggttttatgccctaaataaaactcttt

SEQ ID NO: 347166 - DNA, 799 bp, Cannabis indica
gtcgacgccggagctgggtacaccgtggacggtcgtcggtgagagtgggtttgggatgggtggcgtcggctgtgagagtgggtttgggatgggttagtttggctgagagagaggaagagagagagatggtttgaaatgtgaggggtagtttaggaaaatcattaaagtggtcatatatgaccaattttaatgattatacatttaggggaaaaattatagggtatttaaagcatggaatttcaaatttcccacctaaaaactacaaaaaagcttctcaattcacacaatggctcaatgccatgaataaagaatttttggctcttaaaaagaacaaaacctggactgttgtgtcccttcctccaggttttcatcccattggaaacaaatgggtttacaaaataaaatacaactccaaaggtgaaattgagagattcaagacacgcttagtggccaaaggatacactcaacaacatggcattgactatgcagaaacttttaccccagttgcaaaattcaacaccttgaaacacttcctagccttagctgccatccataattggtctctccaccaaatggacattgataacgcttttttacatggggatttaaatgaagaagtatacatgtctcttcctaaaggatatgtgcatgagggggagcttcctcccaatccggtttgcaaactacacaaaagtctttatggcttaaaacaggcctctagacaatggtttgccaaactaagcaccaccttaactcaacgtggcttcatacaatctgcctatgatcactctctcttcat

SEQ ID NO: 347167 - DNA, 691 bp, Cannabis indica
tccaaccaatggagcacttttgggatatactaagcttccggctctgttagttgctaaggcacaaagagctcataagctaccaaattacctcaaggacctaatcggcacgaaccgacccattggctccccttgtctgtccatgaccatgcgagtccgctaaatacaaaagacacgtgctcttaaagctattttgaaaatatagttaaaaaatgataagtgaagaaatatttattttttgaatgattattttattattatattttgtatctcaaacttaacccaactatagttacgggaacgtacacaatgattaaggaattttaaatcctagatgaaaatctatataaggagagtgaagtcacttgtaaagggaccctaaacttgatactcacgaaatcatactcttgagctcccactctcaaattctaaaaacttacttaaggagtgaactcttggagaacataactgtggagaactctcctcaagcattgagatcaataacactccaagtggactggcctattatcgctgaaaggggtgaaccagtataaaattcttgtgttcgtctttgatgaatttacttttacaaaccggtttacttttattgactattacttgtgttcatcttgcttgttttacgatcttcttatattcgttgacgaaaaactgggtcaacagtttggtgctttca

SEQ ID NO: 347168 - DNA, 1166 bp, Cannabis indica
aagtttcagaaaaccttacattgcgcgcagcggaataatatgtctccttccactcagatctctaacccttgtattctgtctgtcgcagagtatcaccaataactaagctcgaatgtccttctcttcaatttggattcttcacaatcttccagactatgattgagataccacttgatgtgtgtgggcacttactctatcactcaaggtttcgaaaaattgaagaagaaaagagggagagagaggttcggctatagacaataggataggaggctcaatttttctgagggcaaaaattctatctgaatttaattcacttcactctgctttttttataagtgtgagccatcactatctatttataggtaaccactaggtttaggttaggaattactaggcattaaaataatgaaaatattaattggaaaaagcctcataagtgaccggccatagagtaatgggccccacttggtatttttccaattttgacaattttcatatctattttctcaaaaacgccaattttccaattctaaccattaaaatgtcaaaactaattatttaataagtaaaataaattattaaataatattgtcatttaatatatttattgattagacataataaagtcttccaatgaataaataaaacctatctcttttcttcataatttagcccttgcttagtgaaaattcataaactagacatagtctaattttagaattataattgattaattaaaatcaattatttgagtcttacaagcagtatggtctcaactagaatggggaccatgggcctatataactgagcttccaataagctggactagaatttatagggtaaattccataacttattaattccttgttgcatccactcatacaacttagaattgcactctcaaaacgctctatatgttccaccatgtaaatacactatcaaatttaaccatcgttataatctaaataatcaaagatcctctatagatgatttacaccgagcaggaataaatttaccctttcactcctcaatgtattttatccttaaaacacttaacttcctataaatgatatttcggttaaatataatcactaaaataagagctcttccatttacatctattaagccaagctcgaagaaattatcatttcacttctaagtaccta

SEQ ID NO: 347169 - DNA, 545 bp, Cannabis indica
ttttttatagttattaattgaaatttaaattaattatgtatacactcttgtacatgtatgatacatatatattgatacacctaatattattagtataaaaataggtgccaaaaacatgtttataatagtaataatattattattaaaattcactaataatttagtagtttggacggttttacttttaaaatttgagtttagagagttaaatataagtgaaaactgaaagatagttgtgagagtttatgtaaataaaatctaaaaaaaccgtaaaaatgttaaaattctgtataaaccacatttttgtaattttttttgttgttttcgtatttttttttttaaaattatcccttattttttgtttataatttatatttttttattaaatgaatcctctcatcataattttttttttatcacattaactctatatttcttacaattctaatacactccatcccaatggaaatacatatttacatgaataaataaataaaaacattttttttcataaaaaatgcctcattcactagctatataaaaac

SEQ ID NO: 347170 - DNA, 1191 bp, Cannabis indica
taaattttattatattttttaataattaaaatgaacatttctatatattttatcactatgttttttatttgtgtttgctatgtcatttatgtataccatccgcataaaatttatgtataatgcatatatatgttattgctaataacataaaaatagcttagttaaaaaaaattgatctcatagactaaatatatattgtaaaattttatttataatatcaaaatattaatggtatttaaatttattttttaattcaaaaatgttattcaaattaatataatgaaaggaaataatttaatcccactattttttaagctatcaacatcacactccttgaaggtagttatattactaagggaatcacaagcttaaactgtaacaccttactagattaggtgtgttatcgtaattttacattaattgttaattcgttgctaaccaacagatttattgaaaaacgtgattaattaaaactttactggattactcttaaatttcaaagtaaataacatatataataggaatcccatatttaaaatatttacaattgagttacaaaatatttgatacaaaagttttcgcctagcaactatacaaaatatagattgttgtcctaaagatcgtagctccaggcctaaccgccctagcaagtacaatcttcatccgcttgagctcactacttctcagccttagctttacccttacctacacatgcaaacaataactgtgagtcgacagactcagtaagaaaagtataatcatcatcataaatataaccttggattacaattaggtgcccatacacccaaccataaccctattttcacatcctacgcgatactgagtctagaacgttcgtacgacagtactattgactataatatcagtatatactcggtactctagttgtattactgtgatagtgccaatcattacttaagccaaacatatatttatcggtatccaatacatctctacgtatattgacactgctattttaatgtaatctaataggcatcataaacatgcacactaaatatataatcacataggcatatcatcattctaatctgacctcgttttcaaattcaggtgtgccgatctacttgtgtgaaactgctgctcgatgatttataggcccctaaatcacaatattcataaaattggcgagtgacgcgctaaattactttt

SEQ ID NO: 347171 - DNA, 792 bp, Cannabis indica
attaataaataaaccctaaaaccttctttcctctcaattaagcccttgcttagtaaaaattcataaatagtataaatttaaaattctaattggttaattaaaaccaatatctaagtctacaagcaaatattatctcaactactacggggaccatgggcctatataatcaagctgccaataagtagttctagaatttaccgagtgaatttcttaacttattaattcttcctgactccactatagattcgaaattgcactcctgattacatagaacactctatatgttccaaatatagatatgctattaattatccattgttataatctaaataatcaaagatcctctatagatgatttacatcgagttgggaaaaatttaccattctaccattcaatgtattttatccttaaaacacttagcttcttatgaataatatttcagtaaactaacataattactgaaataagagctcttctatttatctttataaaataaagctcgaaggaaatcatcatttcacttctatgtcattatagaaactatagattctgtatctattgttagcgctctcactcaattgtactaccaagttcccaaaatgtaagtattgaatcaatctatttggtcagctttaacgaacaagtcaaagaacataaataatacaataaagctcgaacctaaccatctcataattaagatctattaatctaagatcaactaagtgatattgatttagaaagatataacggtaagtttaagatatcttgtccaagttcaatatcgttccagtc

SEQ ID NO: 347172 - DNA, 700 bp, Cannabis indica
caattcaagtacatccgcccctgcatgccaacaagtagccactcttaacattatagaccttatctcgatcatagtgccagcaccacccatcttttgccgcttgcctcgctaatggaatagacagaattatatccacattcattggcaagaaaccctgttgtagcttcaccacatcccgagcaccagagggaagtataaactcactcacaataatcataatcctcctcctgattggcttaaaagacgtcggatgtgggagccaagggtccttgaatgcccaaacttgtgctccatcacaaatggatcttcgaagaccgcatttcagcaactctaatccctagatcaaactcgaccagagatgagatgaaccatccttttcagtggcttctaggatagagtaatttggaaaatatttaagtttcagaattcaagcatatataaggaatttgggtatagaaataatctccacacttatttagccaaaagagcttgattaaaaagttaaaaatcctgaaatcctagcccacccattgccttaggctgacataccttttcccatcacccaaggaatcttcttttgatcaacataggagccccacggaattatttgacaattaattttaatatttcacatgttgtcatcgggaccttaaagacactcacatataagttggaatagcttgaagaatagatttgataa

SEQ ID NO: 347173 - DNA, 639 bp, Cannabis indica
ccaaacccaaaagtggacccgaacctgtaccctgtacccaaaattggaagcaaaaccgaaagttgactgggactggaactaggacttggacttggaatcataactgaaatcgaacctctttccagaaccataactggaccaacacccggactccaaataagacctagacccaaattgggagccgaaccatccaaacccaaacctcgactctggacccgaacctgaacctgaactcagaccgaaacatggaaccagactagggacatagaaccaaggtcgggacctagaaccgcacccttgtcttgatcacgaacccacactcagaaatgggacttattacttgaagaagaaccagaccaagacctgtgacagtgatccagatctttattcaagattcgcgtaactgggcctggaacagactaatagtcggtgtcatgatctgggactcagactaggactacaacccagacgaagaaccacaccgaaacctagaaccagagctgagagccaaaattagaacctgaacaagaatcgctgaaccaggaccgtagaacaagactaggaccgtgaccagcactcgcacccagacctagaaccgaacacagacctagccttagacccaaactgagactggaactc

SEQ ID NO: 347174 - DNA, 601 bp, Cannabis indica
aatagcttgaagaatagatttgataactatctctcttccacctgctgaaaacaaactcctcttccaccctcgaacacgtttcctcaccttctcacaaatccccttcaacactcattttttttttattctaccaattaccataggcaaccccaagtacttgtcatgagtagtcaatgatgttaatcccaatactctcagaaccccatctcgatccttgcacattcagactaaaaataatagcaaacttctcaaagtttatcttctgaccagaagctgcctcataagttagaatagtttcagtatcaccttcattagtgtgatagttagtagtcccgtgatctgtaatgagaaatatcgggtaagctgtataatcccacatcgcttgggaaaggtcaagtgggatgattttgagattatgtaagcatgtgactacacagttgaagagggtttaaatggattgattggtactacctatattaacaaggtgcatcttgtttttcagtagtccatcacgaaagaactccacggttaagcatgctttatttggagttttcaaaatgggtgacctcttgggaaaactaggaagtgtgcgagtgaggac

SEQ ID NO: 347175 - DNA, 692 bp, Cannabis indica
gtcgtctaacgaccagttacaaaaattcagccttgctgtcccgaggatcgtacgctccaggcctaaccgccccgacatgtacaatctcataagctcgctcacggtccatcagctatagccttgcctttacctacacatgaacataaactgtgagtcgacagactcagtaagaaaagcataataatatcatacataattctaactgccgtgtccaacacgatactgagtcccgctactgccatgtccaacatggtactgagccactactgccatgtccaacatggtactgagtttttgaacgtacacacggacgggtacgtacttagtacgaacgtaagttactcccttccgtagtacggttccgggtaacccgggtaacccggtactaacttacccggtcccggtcgtcgtcggttcggtactaacttaccctaccgaccgtccgttaccggtaacccggtacggtacgaacgggttagggggttaggttagttttcggttaacggaaccgtaaaccttaaaactaactaaacttaaaacttaagttaagttaacttacgtacacggacggttccctttaccctaactagtcgaccgaccgtaaaacctaaaactagttaagttaacttacctaactaattagtcgactactacgtcgtatactaatcttacctggattccgatttcaggtg

SEQ ID NO: 347176 - DNA, 509 bp, Cannabis indica
ttttttcgtgtaattattaactattttgtcaacaagatattaagaattaatatgtaattgacacctcatattcaaaaacatcttgtattttaaaatatattgtaattactagattgtgtaataattactaccctaataattaccactctagaattttgtttttggaaaattaccacatatactattttttaactttttctttttcaaatttatggtatgggtttctaatatggtttctatgtgggttgctatacgatttttggttgcgatttaggttgttcctttagttgcaatagtggtttctatgtagaattctagaagtgtaaaaattatttttatacttcaaaactgtatttttttttttgtatttttacggaattctacatagaaacatatattgcaactaacggaacaacttaaatcacaacaaaaaatagtatagctactcatatagaaaccactggagaaataactttaaaaactcaaactttaaatttgaaaaaaaaaaa

SEQ ID NO: 347177 - DNA, 914 bp, Cannabis indica
ttcaccaaatgggtagaagctgaagcctttgcacaagttagagatcgagaggtaaaaaactttatcttgaaaaatataatatacaggttcagaattctaaaggagatagttacggacaacggttcacagttcataagccaagacttctagaacttctgtgcataatgggggatacaattgtcattctcaactccatgatagccttaagcaaatagacaagcacaatcaaccaataagacaatagtcaacacactcaagaaacatctagagaaagccaaatcgagatgggcagatgagttaccaggggtactatggtcttaccgaacaacagcaaagacctcaactggagagaccccaatttgcattgacatatggaagtaaagcagtattcccagcaaaaattgaaataccaaccatcagatatgaacactcgataaatgatctaaatcaacagaacatgaacataaaacttgatttgttagacaaaaagagagaaaaaacgcttattagaataccagcataccaacaaaaggtggcccaacatttcaataagaacattagggcctaacaattcaaggaaggagaatgggtactacgaggagtgttccaaaacacgaaggaagaaggagcaggcaaattagaacccaattgggaggggcattaccagatttcaaagatagttggccaaggaggatacaaactccgagcagcagatgaaagaaacacaggaaatagctggaacgccgtacaccttaagaaataccattattacagtattttccagatttaccaaatttaccatccggtaaaatataaaagtattttccatcattatagtatcaccatatgtaatccaggtaatcttccttaccttagtgatatcactactctccctggtgttcttttatacgtta

SEQ ID NO: 347178 - DNA, 776 bp, Cannabis indica
gaagcagggacgttacaaaaatagtcttgaagagggagcatggccccggccataaggtgtgtctggcttcaggctccgaagcccccgtagttgtggttgggcgtctcctcgtcccagggcaaccgatggtaggtctcggaggtggaaggcttgatgcctgccaccaccacgatctgctccagctgatgggcgcaggtcagagtagaatgaagctcacccgcttcccaactgttggcacggaacttgtgcccttcttgggccacgggacccttcatgacctcctccagggtggccagacgcttctctcccttctttgaagatttagaatcggatgtagaagacatatttggttctgaaaaagattgaaaaaacccagcagtcatgccccaaaccaaaccctaattcaaaaagggaatgggggtcccctaaccgctggaaagaggccccctcgggacacttgtcaaaaaagaaagccccaaaaggttttccttgacaaaagtcgggtgcaaaaatcccacagatagtaacattaccaaaatgtaagggaaaaggaaaaaagggtaaaaatcgagtagacaaagtctactctaagcccttaagtgtcattgcatgggacgaagatggctcctcgggaaaaacacagtgaaaagaagcaatctaaacgcaaaaaaaaggaggaatctaacgcgttgtacagaaactcaaacaaaaattcccagaaattcaacatccaacccaaaaaagtaaatgaacagtaaagcatgctatgtaaacaa

SEQ ID NO: 347179 - DNA, 811 bp, Cannabis indica
ccagaaattcaacatccaacccaaagaaaagtaaatgaacagtaaagcatgctatgtaaacaaacaataaactagtgtacaagatgcaaagaacttacataaagcttgggaactgggtgttggtgttgatcgctggtaaaaggttgattggcaacgacgaaggaaaatgagtaagaaatctatggtgtttgaggtttctcttcgctctggggaactctgagaaaattttggcaaaaatgctgaaagtaaccaaatgaagtaagaaggttggcttttataggccagagcatgtgtgagacagctgtgatcagccaccatcgaacggctgggatagcaatcgattcaaattccacacatccaacggttggattgaattgtcatcaaggcggtgaaaacgtttgagtacccgtctgacacccattaatgcgccgtatcaataaatggacaagaaataaatcgacgcctgcaaaaaacgaataaccgcaataatgatggtcattaatacaccaccacgcgcccaaagcacgtgccaggaagctgataaggcaaccggaggcatctaggcaagccttgttcacttcataattaaacaaggcttggggggtaaatgttgtccctgattttgcccaaaatacgtggaccaaccggacggtgacacgtggatgggaaggggttagcatttaaataaaatagctaagtctccttaaagcgcatgattaccttagacatgcctcccagagaaggcatgtaagtctcgtatgctcccggagagcaagattgcaacaaagcatctccgggtggtgtcagattc

SEQ ID NO: 347180 - DNA, 628 bp, Cannabis indica
tcacaaagacttagcaaataattatagcattaagacgctctgatccacgtgtccctgtctagttggtccacgtatattgggcaaaatcaggggctacatttacctctaagccttgtttatttaaaaaataaagcgaggcttgcttaagtgcctacggtcgactccttagtttcctggcacgagctttgagcacgtgagggtgcatttaatgatcgccattaatgcagcgattcactttttgcagatgtcgattcgtttcatgcccattgattgatacggcacattaatggtgttagacggatactcaaacttttccaccgctttaattatgaatcgatccaaccgtcgatttttgggaattcgaatcgtgcgcctccccagccgttcgattggtaggtgatagtgcctgttcctcatgcattcttgcctataaaatccaccacctttccttaatttcggttacttcccgtttcttgccaactttgctcgagtttcctttcctttgtttgatcgacaacagaacccccagtttcaacacttcactgtaagtttctcgcatcccttgctttactgtttgcgttcatggcatgctttacttatctgtttgttttttctgggtttggtattt

SEQ ID NO: 347181 - DNA, 571 bp, Cannabis indica
ccactcttcttacctcagttgctaagtatatccttttctctcccttgaagctctccccaagtttctttattgagaacaagatcctccagaagcctctgaacggagtgtcgccggagttctcgtcggttctagtgtcggtgaatgcaaaactcttcttcgggtgcttttgacatgtattttttattggaagaaccttccaatgaatccaggatcccaaaacaaccaagaacaaccaagaaaaatagctgaaatagcctaaacccgattatcttcttccttggcggtccaccgttaaaaatggagtccaaaaatggtaaattccgttttagaccttaaagctttgattcttcacgttaaaattgatctttggggtcccataaacttaaacacaacctcctttcatctccgaaacagcttaaacacgttcaaatccaggtccgtttcaagaaccgtattttcgaacataaacaatggtttctgtcaaaaggtgcgattacagaccttctaatcgcatttaaaactcctcttggatgaaataaaactcaataaaataatctagggcagcccaaaa

SEQ ID NO: 347182 - DNA, 608 bp, Cannabis indica
gaaatgctaagtaaaacttttcaaaaataatagtataaaaggtgtgtaatcaaaaaaaaaagtataaaaggtgactaaggtgaggatcgaatcttgaatcctcaaggccaattaaagctccacttaccatctgtactacatgtttttcatctaatttattaagttaaatatttatatattatacgtttttatatgtgtatatatattaattttaattttttcggggcctccaaaattgtgggacctggggccgaggccccggctgccccaccctctggccgaccctgatgatactcatgcttaggaactttattactaaaaacgatacatacacttatagtatagattttacctatcaaacgcaaggttaataatcacgtttctttggattctttctctggcctagttcttcgggatattagttgtaatcagtggcgaagcgagaaatttgactgagtaaggacttgaataaatattaagtcaaacaatagtattattttgtttttttttaattaaaagtgttatttttttttatttatttgtattgggttatttttaaaatgggtcttgattaaatgagagtaggctcatgaatcgtgattaagata

SEQ ID NO: 347183 - DNA, 500 bp, Cannabis indica
taatacaacataccacacaagccctaagtgcagtcactaatatcacaaaacgatataaaatacaaatctcaaaattccattaaaagtcattcacctaaaaaaaattccaaattttcaataatatacaaaaaattctttaaaaaggtcatatgtaattcttatattcaaatcttaaaatatctctataaactacaaatagtttgatctaagtagacagatcaatatactaaacttagggcccgtttggcacaacttttggaaaagctagaaactgctttttgaaaaaactgtgataaaaatgtgtttggcaaacaatcaaaaaacagttttttgaagaatttttggagaagctacagttaaaatctgaagctgctccaaaccaacttttagaaaaaattattttaagtaaaagactataataatttttttttgtactaaaaccataattacttatttattacatattaaaaaataaaaataaaataaaataaactaattat

SEQ ID NO: 347184 - DNA, 1978 bp, Cannabis indica
aacataaatgacttctaatctttcactcataacaaatcagattagattgaaatgggttttatttaaggcataaaatcccaacacatacctagtgtggaaagccatcttcgggatgtcctcctcttggattctcaactgatgatagcctgatcggagatcaatcttttaaaaggccgtcttcctctgaagttgatcaaaaagatcatcgatcctaggtaagggatatttattcttgattgttagcttattcaattcccagtagtcaatgcacattcgtagagatccatctttcttcttaacaaataatgccggagctccccagggtgagacactaggtcgcgaaaaccctatgtaaagcaacccctggagttaaattttcagttccttaggttctgctggagccattctgtagggggccttagaaattggttctgctcccggtgccaagtcaataacaaaatcaatttctctctgacgtggtaaacccagaagttcatcgggaaaaacatcaagaaattcttgaactcccttgatgtcttctggcccaacagagtcaggccgagtggtatccaataccacggccaaaaaccccaaacatccctctcgtaacaattcccatactagtactaaaattaacatgatccgagatccatgaaccgaaccgacaaaaacaaacggtttgtcgccttctggttggaagattaccatcttcctcttacaatcaatactggctgagtacttggacaagaaatccattcccagtataatatgaaaatccactagattcatctctattaaatcagcactcaactccctatcctctactctgatcggcatagacctaatccaccttttggagataactaactcctcgccaggtagtagggttccaaaccctaattcataactatcatgcggtctatccaatttactaaaaattctggccgccacataggaatgagtggccatagagtcaaacaacaaagagaaataagagttgttgaccgagaactgacctgttaccacaaagggattggcttctacatcagcctgagttatcgcgaacaccattgctggagtgggtttcgctgctgtctttggtgcttcagttttgagtttgggacaatcccttttgtaatgccctggcaggccacactgaaaacacccctgccctttacactcccccagattgtgctttttatagctggggcactctaggtaagtgtatcgggttttggtgccactctagcaatttccttgaccctggttcccccagaacctcttcttctaacccgagccactgattgcagtagatgcctttcttttctgatcagtggcggctgagcaactacctcccatgctaaagcctgatgcaggacgggtaggagccccaccaataaccggagtcccacgagactctaaagtgcactcaacttcgccctcagcctgcaataccttatccaccatttcagtataggttgtactgtcatcaatagtgatcattaaatcgtgtctgatcttcacattcaatccatctaggtacttctctttcttaataaaatcggttggcacaattcccaaggccaaccttgccaagcgatcaaattgagtcgtgtattcagtaacactcatgttctccttctgagtaagctgggtgaactcttttcttttagcacttctgactgcctcattgtaatattaggcattgaacagttcctacaacttttcccaggacattatggtaacatcatgaatcatggacaccatatcccacaaaactaatgcatcttcttgaaatttgaaagtggcacatgccaccctatcattacaagtgacgcccataaaattcaagatcctggtaatcactattagccattgcttgggtttcatgacatcaggacctccccggaaaactggaggtgcctgcttacggaaccgaatttaccaagtaaattccctaacttattaattcttcgtt

SEQ ID NO: 347185 - DNA, 751 bp, Cannabis indica
aacaaaatagaaagagaaaaaataacaccatatcaactatgaatgagaagccaaggatttaatcacacagccacagtttgtgaatatatatacataatacataatatatttattaacatggcataataaaagtaaaaatcctaacgtgtgtaaagtgtaaacctaaccgtctcaatttgataaattaacacaataatgttagttcctttttcgttgactctctcaaaagtaggtttttcttttgggtctctatagtagttgataacatatacaaattataaatagacagcaataataataatttaacacttaaccgtactatattcacaaaataattacaatccctattgtataatgtaccgtaataattataataattatgggattcgtaatttacccaatttagaaagaaaaatattctatttcaaaaaaaaaaaattgttaaagaaggacactttaaattatcaagtatcataagaaaaaaaaattacccattcccaagatgatggatctctacatcatatgaggaggtaatatattttagggtacttctataatacaccctattaaaatgagtaaactaatgcaactcttaattgtttcagtatttataagaatttttatttaaaattttttcataatcgtgtacatcatagctattatttaaaacatcctacaaaattttaaaaaattcgaaataatttacaatatagaaatcaatgtttaaaccgtctatttcaacacgcgtata

SEQ ID NO: 347186 - DNA, 363 bp, Cannabis indica
tagttagggcacaaaacctaacaaactcccacttgcactaacataaacaattagtacatttcaattaatcatttattctctatgtgtttttcaaatgtagtttctatcaaagtcttggtgaataggtcaggtaggttgtcttcagtatcaaccttttctaccagtacatctcctcttgccacatattctttattgatgtgatacttcctctcaatgtgtatactcctcttttggcttcgaggttctttactattggctatagcatcagtgctatcacaaagtaacactagtggtttttccattcctggaactgttcgaatttattttaccaggatcttagatatactcacaagtatgtttatt

SEQ ID NO: 347187 - DNA, 905 bp, Cannabis indica
ccataaccaatcatagaaaaaaacttagatttttctgagcaacctaagtatttttcataattaatttaataaataacacaaataattcatgaaaaatacaaaattaaccgaaattcgaatctaccaattttgcaatagtttatatctcataactaatcatataaaatatatttagatttttctgagtaatctaagtatttttcctaattaatttaacaaataaaccaaataattcataataaatcaaataattgcaagaaaattatcaaacttcatagtaggcctaagaacacctagcacaagtcaagaactgaaagaaaatcgaaaaataacctccagaaacccctgaacggagtgtcgccggagttctcgtcggtttcggtgtcggcgaatgcaaaactcttcttcgggtgctttcgacgtgtatttttgattggaagaaccttccaatgaatccaggatcccaaaacaaccaagaacagccaagaaaaagagccaaaatggcctaaacccggttatcttcttccttggcggttaaccgttaagaatggagtccaaaaatggtgaattccgtttcagaccttaaagcttcgattcttcacgttaaaactgatctttggggtcccataaacttaaacacaacctcctttgatctccgaaaaacttaaacacgttcaaattcagatccgtttcaagaacggtattttcgaacgtaaacaatggtgtttatcgaaaggtgcgattacagaccttctaatcgcatctaaaactcctcttggatgaaataaaacaaagaaatattctagagcagcccataaactctcaaactcaacaactcaaaatctcacttttttccaccgctcagtttggttcgatcatcctctctctctctctctctctctctc

SEQ ID NO: 347188 - DNA, 717 bp, Cannabis indica
tcgcaatatggtatcagagcgagcactactacaaaaataattttttgcttcagttgtaaaatgatacataaacattttgtgtcggttctctaaaccgatgcaataacggtagacataaatagtcaagttatttgcttcatttccaaacggacgcaaactgttttttgcttcggttgagaactgaagcaaaatatatgctctattagcgtcagttcttaagtgaagcaagaaacttagcttcaaattataacagaagctaattagattattgtgtcggttacaatttgacacataattttgtgtcagctataaaatgacgcattgtgtcggttacaattttctccacctgcattttcgaatattttacaataatcgatgtcataaggaccctatgccctcggttgttatgaaaaacccaacgccatagggtcttagttttttttttttagctttacaattttgtattttagcataatttatatatattattttattattaatataattaaattaagtataaattatatataatataagcatatataaaaattaaattaaaaagttaaataaatacacatttacattaatctaagtatttgtatattaactatttttttattaatattttatattttatattatgtgtttgtatttttgttgtatatgagtatcatttttataattttttaagttatgttgtataataattagtatatt

SEQ ID NO: 347189 - DNA, 690 bp, Cannabis indica
acaagtgtgttcctttcttcaacatccttcgacgtaacaagaaatttgaatggacagaggaatgcgagaacgccttttaagaactaaaaagacaacttacgaagcctcctctactctcaaaacccatggacgaagaagagttaggaatatacctagctgctatagaatatgttgtgagtgccgtgctgattagagaagagaacaatgtccagcatccagtctactatatcagcaaaagactcgttaaagctgaaggacaataaccattgatagaaaagcttatttactacttaatcttagcaacaaggaacttaaggccttatttccaggctcaccctattcaggtatacaccgaccaaccactacgccaagtatcacaaaaacctgacacttttgaacggttacttaaatgggcggtagagttcggttagtgcgaaataatctttcaacattaaacaacagtcaaaggataggcccttgctgactttgtagttgagcgcatgggcaaagaaaaagcaccttaagggacaacccaaagccagtacaagaatccctgctgaacaataacgaagatagacctacctagaaattgcacgtggacgaataatctatagatcaactgtttggtgcagggattgcccttgtcacacctggggggcaacacctgcacgaggcagtcaaatttggatt

SEQ ID NO: 347190 - DNA, 669 bp, Cannabis indica
catttcatgcatcgaaaacacataaacaaagactttaaaattaacaaaaattttcgggtctgaaaaacatttccaaaaattttgagatttctttgttttttcaaagtggattttcatgcttagaacaatctttattaatatatgaatgtattgatacatatacaatgtatatataaatatatatacatatatatattgaaaaatatatattataccgtatataatatatatataaataaaatgtatatatgtatgtatatgtatttaacatttatatatgtaagcaatgatataaaatgatgaatatgaatcgaaacaaatgtatgaaaatgtatatatataaacaatatatatataactatatataaccgaaaacccgatcgtatacgtatatataaacgcatgaataaatgtatatatgtatataatacatatatatgaacgtgaatgaactaaatgtgtataaatatatacgtatgaaaatgtacatatataatatgaatatatataattaataaaaatatatatacccacccgaaaataaatataatatatatatgaacaccgtatatacgtatatatatatatatatatatatatgaactacaacaaaatacaagcggagataaaccgactctgataccaactgttagactattatatgtataa

SEQ ID NO: 347191 - DNA, 941 bp, Cannabis indica
tcggaccaccattggaccccatcggaccagatcggctaccaattttttttttatgtttttgtacatacaaaagtagcattaggtgaccagcggaccaccatcggaccaccatcggaccccatcggactaccaaattttttttattttttttatgtttttgcactaaaaaaaagtatgggaaatttgagaggggtatttttgggttttagataaagtggtcatatattttcaatggtgatatgtattagtttaggaataaaatattaggtatatgtaagtatagaaaattaaatttcccttttataaagggcaaaagtgtcttcacaactatcacctcattaccatacttttataatagtaagatataacatacattatatatatacatatatacatttatatatacactaatatatattagggttttaatatacatatacacatatacatttacatatacatatatatatacatttacacatatacacacatataaattaatatacatatatatatacaattacatatatatacatatacacatatatatatacatatatacacatatttataaaaaaaaaatatttttatacacaaataacctgaaattactatatatactcaaataaaagctaaaataaataaaatagagattaccttgagtgtaaatatgaaatacgaagaacaatcggaggctcgggcagcggtggccggaggtgcagcggcaacttctcgtcggggtccagtagagtttttttttattagtttttggaataaaaatgacaaaaaaattaaaaaaaaaaagaaagaaatgaagattcggtggagaaagtaagagattggatggtgaaaatggtgattttttaggaggagatggggcggccggcggtggtggctcggagaagacgcagagagaaaggaggaggaagaaagagaaaaaa

SEQ ID NO: 347192 - DNA, 686 bp, Cannabis indica
tctgtgtcttattattgcttttatctatctgttattatatatcgtttatcgcttataaaatagactcattgtattggctaaaagtgaagtcaacattttgatgctttcattgacagaaggatcacaaatcgttctttattcgacatccaaccgccaatatgatggtgcaaactcgtagaggtctatatgatccagcaaattcacagacgctggatcctacatcacagaaccctaggatttcaagggttccgcctactgttaatcctggacagacgggaagcgtggttaatggtgaaacagttcctattaatggaatttcgcctggtgtgcaagagattgggaataacagtttcgcacccaaccagggcatccataatatgactgttccgcctggaaccaacgcccagacgaccatcggagatgccaccaaattacaaaacctccgtgacgcgctcggagtcatgcagggtcataacaacactctgcatcatgatcaggatgaactacctgctgtagtaaatctcgcattcgacgaacaaaggcgtatgttcgctgaatggatagataaagagatggaggcattaagggctcaccatgcagagattgaagatcgtagttggcaagccaccgtgttgatacaaagagcctaccaaactgtaggtcagaaattgccaaacgtcattccc

SEQ ID NO: 347193 - DNA, 880 bp, Cannabis indica
aatttttgtaatttttcaaacccctaaataaatgttaaggaattgaacctttacatagcaatgtgactaagatgatttgaatttttccattgttgatgaagagttttttgggcaacaatgctaatatcagtaagatcaacataattttcttctcacatacattagtccaaatctattatgcataaagtaattttcacatctcgtttccataccttaaagttggacacatttaaaatttggatggaagcattattgttgttcataaaaatgagaccgaaaaatccaaaaaaattaaaacttgatcgagctatatgagcaatgcaactagaaaatattgtagagtcaactgttcattataaaaaaaataccttttagaagatatatattttttaaaatttcatttatctttatagtaagggtccaattttttttttattatttatttatgactcatttcaacgcaaggccagccttgcacacataatctaccttcaagaagttaacaataaagaaagaaatacatattaattaagaatttattacctttaagaaaataaatttctcaaaaaatatatattaatccaagccaaaataataataataaaaatatatatttaaattattacttttgggcaaataattaaaatatacacatttaatatgaactcacttcaatgaaatgtgaactaatatatatataactactatctttgggtaagtaattatacatatagccaaccaaaataaataatattttctacgacatataaaatttggtggtaaaaaaaactattgaaaattaataatttgtagcctaatttaaaaaaaaataatatatatattaatttcttataacatatcgataatcaaaaaataaagt

SEQ ID NO: 347194 - DNA, 682 bp, Cannabis indica
ccccctactacggttaatggatcagtagagatccttgtctgaacggctgtaagttgtgtgctgtcatccaaatttctaaccctagccgcagtcatgctaaaacgacttaagtacgccttaagtgattcgccatgctgttgttttatattcgttagcgaggctgcttcgggtcgtctatccctagcagcctgaaattgtttcttgaaatccctggacagttgctcccaggaagttattgaatgttgagtaaacttgttaaaccagctactcgctactccaacaagcgaggtggggaaaaaaatacagcgtaaattgttcgtcacattactcgctcgcattattgtgttagaagttattcaaatgcgagatcggatcagtggttccgtcgtatgatgagacatgcaggtttttaaatcccaaagggaaaggggtgctcattatatctgggtgatacggctcaagttcctcgtcagagtcgtatcgagatagtttcccttattccccacttgatatctcctgaacttatcctccaactcgtttatccgcaattggattggatcctcttgctttggaccaagttgttggcaaaggtcaggttttttccgattcaagtgctctcgcagatccggttgagagtaattgctggcagaccttgtcttactcacagatcgcgtcctactca

SEQ ID NO: 347195 - DNA, 544 bp, Cannabis indica
ctcacacacccaagtgtgcccaaactagggttcatgggcttgcacgagcattttcagcctagaaacctcaatctaccaaggaaaccaacaaggacttgacttatttgggcataaaatggcttaaatttgtgcataaagtcaaaatggcataaaactcccatggaataaagcctatgcgcccactgccatatagaaatggcagtggtctccaattttgggagagcagtgccacaagaagatggcagtggtcgccacttacaaagtaccaagaggaaattgatcaaatgtgctccctcaatgagtggcagtggttgaccatgaagaaaggaaatgagatttcttgctaaaaatgtattttcaccaataatatgtcaaaatcaagtgaaagaagccaccaagtggtgtggaaaccacttggtcgaccactttcacacttttgggacgattggtggcagtggtcggccaccacataggaggaggagtttcatggcaaaattttatttccaacatctatgcatcaaatacaagtgagaaaagtcaccaa

SEQ ID NO: 347196 - DNA, 664 bp, Cannabis indica
cgcagtacaaattggcaggttgtttgagagacgccaaagtctttgaggagagcaaggagccatgtcaattctgaagtagcattagccattgcaggatattcagcttcagtcgaggagcgagaaaccacttgctattttttttacttccaggatatgagagatttccccaaaaaaatgtagtagccgaaaatggagcgtcaagtatcttggcagctgccccaatctgcatcggcaaagaaggaaacttggacattgtcgcgtgataagctagtttcagtgtaagcttgcagttggggtgctgtatcagatgagaaaaaagaccttgaccaggggtttgtttgaggtattgcagaattcgatttgtggcctggatatgggggacccgaggacatgaaaggaattggttgagatgattaacatcgtaagtaatgtccggtcgggtgatggtaaggtagattattagtttgcctattaagcttcgataaactgagggatcggggaggagtttgcctttgtctttgctcagtttaagattgagttccataggtgtagaggctggtttaactcctagataacaagtatctttgaggggttgaagggtaaagggcctttgtgaaaccgagatacctttggaagttctaccaacttcaagtccatggaaaaa

SEQ ID NO: 347197 - DNA, 865 bp, Cannabis indica
aaaaacaataaatgaaaatacaaaatcatcacccatccgaccatagttaatcgcagatcctacttcactacgtatgaatatttaagatattcaaactcatttaacatgcatattattccacccattcgaccgcagtataatctcagaacctacttcgctagggatagatatctaacattttcaaactctaaaattttcataatattgttaaacaaaataattaagtcattgtacatacgtctggcaatgaacaatcaagaaaattttaattttttttgtgaaaataagacttgctaattatcaagtagtcctgcatacaatattaagaatatcataataaaactagaaaaataataaaattaatatacacatattaactaatatccatccagtatatatataattgtacaaaaatccacataatgtgtaaaataatatttataaatatttttttggtcgaatcatcttgatcaagggttgggttaaacttatattcaatcataataaaaattatgtcacattttatttttctgaaagtaggagggtgctcaacgagtgttataaattcttaagctttataggttgaatggaaggacatatacatacaaagaaccataattctaaaaacgcaaacaataaacaatcaaacagacagattgaaattattaaatatatatatatagttttgatatcattagtcgaattgtgacatagctttttctattatagaattatacttttcaaaaggaacaaattaacaaacctccaagtgatatatataaaatatatatatatataaagtgtgcttttataacaaaattcttggtttatgagaaattcatgggtgactttttatttatattaa

SEQ ID NO: 347198 - DNA, 611 bp, Cannabis indica
tatcaataacccatcgataatcccattttggccagaaaatcataccctccaccaccatctaatgtctcaaacaaatacgaattcaatgagcttctagttgggggagggttaggtgggcggtggcgaatggcgatggtggttgagagaagccgaggaggaggaagagagaaagatttgggtaggtgagatttgggggttgttggattaagttttgggaagatgagaaagttctgtagtagaggagaagaggttcagtggtggtggttggtggtctcggtgtctcagtggtgcgagaaagaggaagagaaactgaggaagagaaactgagaaagagacaaagagagaacaaaaatgaaagggagggtattttaggtagaaaataaaaataataacattaaattgtataaattaattcagaatttaaatttattagaaggtatttttaaacattaaaaatgaaatttcctttttaaaattacaatttaaatattaatataactgacaaaaaaattaaaatttcctacttatttatttacaattgcagatgcccaaattagtcaaaatatttctttcttaaatacataaaataaaaacaataattgtgtgagtaa

SEQ ID NO: 347199 - DNA, 695 bp, Cannabis indica
agtatgtgtgatgtaattgataggtgtcgacaaaatattaacaatatattgataatattatgtcgataaaatctcaagatgcatgaatcttaaataccttaaaatcgacattatgtcgacaaaatttcgatataatatcaacatatctcaacatgcaagaatcacagaacattggccattacattaataaaatatcaacaatgtttcgataatatgtagacaaaatttaagatacaagcatttcaaatgcagactttaacatctaaaaaatgtcaagaaggcgtcgataaaccatcgataaactgccggtaaaggaaaaataagaagttttatataacaaatccagttcaaaaaatatattattacaactaatattattacaactaatagtagactacgcctcaaatacgggctttgcatgttgctctgttgtggcttgaactgccacagaggctgcagtttcaaggtatcgtaactttcttatcaccaaacgggaaatgattctcccgtcttcttccagccttgctttttcttggacgacctgctagttttttccccataggaccccaactttcatgttgttgatgtgttctaggagaactaaattatcctcatcactagcaagattgatggtatcatcgtaagtcttcttccacgtatctttcgaataataagttaagaaaagcatgtacaca

SEQ ID NO: 347200 - DNA, 1218 bp, Cannabis indica
cataaatattaccatccttacataacagattaaaaatcgagcccttaaatgaaaactgccattaacgtcggactaagctttagaaagttccaaactcaatttctaaactcaaaaatcaacctcaaattcaacaagtaaacatcgaaactagtcccatgactacccgagaacaaatcctataaggtcagaaaccttcataactattttaattcacaaaaccccaacggaaaacaaatggtattttaacttaaaacgaaattaaaccatacctaaagctttccctcttcaaggattagctatcatgttactaccggagcttagatcgctaagtttcaaattgaaaaatcaaagaaaatgtatatagaaagagaaggttttgacgaaggtagaaagaacgagagtttcgttcgttcttttcaattttaagtttactgtaacttaatatatatatacttaaacgataactttttatatacataataatattataataataataatatataatattattataaagttttattattaatagttatcgtattattttttagccgtgaagaaatctatatttctagggtatttagttgactccgagtaccccaaaatattttgatatttctaaaatcaatttatcataataatcccatcaataattctaactaaaacagttgtgacatttttggcctctaatcaggtctccagggtcgccgaactagaaaatatttttatttcacaaataactcatattatatccacgtattttaaataaatctctgtaattaacaaattacgcttatatatctacttattgagtctctagagtcgctgaaattgaaaatatttttctttcacatatagctcatataacattcacacatgctacataaatcttcgtaattaacaaattacgattatttactcacttatagcaaaatttaaattttatgctgaaataaattagtaggatcataatctcacttattatctaattaacccatcatataaatataaaccttaagtgtttaccattagacttatcgggatattacaatcattccctgcttatagaaatttcgtcctcgaaatttatttaaacaatgcgggatattacccccatatttatgattctaactctcaaattattgtttctatcttgtttttatatagcactttctcaactcatggaatggtctcatttcatagtacttccttttt

SEQ ID NO: 347201 - DNA, 1066 bp, Cannabis indica
tttatgtacgttttaggggtgggaggggacaaaatggtcattttgccccatttgtcttttgtcttttgtgagtttggatcttagtttataatcagatttttattattattagctgattttaattcaagtaaaaccattctttttattttatttcattcattttacaaaattaaaaaaaaaaaaaaaaagacctttctctcttacaactctctctttctctctctcaaaaaatcctagggcagctagggttctttgttttcttcttcaaattgctgtaatttccagcaagttcttagtgattctaagccaaggtaagctctagcactttcctctctagttttcttgaatttaaagaaatggaatttttgcatgaattgatagttttgctgctgtagttgctgtagttatttgttattattttcagaggtttaattatggttcattatgttgatttaagtaggttttggtagttttttgaaagtttaatcaagttttgagtttaagaactcaaacttagagctttaatggtgaaattcaaatctgagctttgattgttgttttgttgcttgaaatatgtttattggggtataatatgcaggtctggaaagtttggttgggtttggaaactatttggttaggggtttgaatttttgttggttgtcttggtaaaactgattacccggattttgcagcagggagaaaactggttttttcagcttgtcgtttcgtgccagttttaggtttctagttagttgattccctgctagtttgggatattaccatattaagttgcagtagatagagttttggttttaaaccttagcgagtcacttatgtgtgttgttatcgatgtgatttaggagcctataattcaccgagcagttgttccactcaggttgatcggcacacctgaattcggaattgaggtaagattagtataatatcatgcatatgttattactgttgggttttgtgccctaaataaaactcattacaatctgtttagttatcaatttagaattttgaagtgatttatgattacgtgtatgttacatgtttatggttt

SEQ ID NO: 347202 - DNA, 894 bp, Cannabis indica
tgttttttctttttggccttcttcaatgggggaattgctagagtaaccccttcagacggggctgcctggccactaacgcccgcctcgcctccagaacgagaacggggaataacggagacgctgcctaaacactcgacttatgggtcgtcgggaacttcaacgttttcagtctccataggaggagtatcagaaactaacaatgattcgacgaatccaggagcaatactcgaggaaagagaatcggaaaccgaaggagagacacctggacaatccgtattcggcattacaccacagctaaaatgacaatcgggatccaaagcctacccaaaaaaaaagaggaagagagaaaggctaaccctaagaagaaaactacacttacgaaacgaggaaatgccaggactgaaagggggacatcggagaatagggtagaagaaaggggaagatcctagaagaaaaatgggagggaagacaacggaaggatggaaatacaaaaatatacacggtaattaaaacaaaacgtataaaaggggtaaaaatgaacgagaagaaggcaaggatgaaaggaagatataaaaaaaaggggagggagaaataaaaagggataaaaaaaagaaataaaacttaagttaaatagagaagcataatatatatacctgaagacagcaagatctagccctgagaagttgaaacgagcaacagagagaaaaacacgaaatgaatttttgaagttggtagtcttatactcgagagtgcgccgccaaaacacagagggaggttagggaattactagggcatttataagaaaaaatggttctcgaggttccaccatcacatcaagggtaaccgccacttcttaagaaattgaaaaaaattcaaaattagggaactgtacac

SEQ ID NO: 347203 - DNA, 1012 bp, Cannabis indica
ttaaacaaacataaagtaaacaaaatacaaactcccactaaatcatgatatcctcaagtacactacccccatatatgagcagtctgcccatgaaagacttgggtggtaatcattttgtgagtagatctgctatcatgaagtttgtcccaatgtgctctatagatatctgtccactctacagcctttctttcacaactagaaactttatgtcaatatgctttgacttggatgagctcctattgttattggaatataggactgctgatttattgtcacaaaataacttgagtggtctttctacattctctaaaatacgcagcctagtaacaaaatttctcggccatattccctgatttgatgtctcacatgttacgaattatgctgccatagtggaagaagctataagtgtttgtttgacacttttccaggatatagctcttccaaactaaaagaaaaatataaactaatgtagaccttctgctatcttagcatccagcaaaattagaagtagaataccctacgattaccaaatgatctaacttcctgtatgtgaggatgtaatcttttattctctgaagatacctcataatccttttggctactatccaatggctcatactaaggttgcgtgaatatttgcctaacaccccaacaatgtacgcaatatctagacgcgtacatacctgaagatacattagactcccaacagctgatgcatagggaatcttttgcatttcttgaatttcaaggttacatttagggcattgtctaagactaaatctgtctcctttagcaacatgagtatcacctgttctacaactttgcacgccaaatattttgtagtactttttcgtatatagctcttttgttgataatctaagaatatcccgagaacgatgtcgatgtatttgaattcctaaaataaaagaagtttcaccaagatcttcatctcaaattgcttagacaaaaatctcttagtttcgttcaataagcctatatcattagtggcaag

SEQ ID NO: 347204 - DNA, 832 bp, Cannabis indica
catacacatcacaaaagaccctaaaacaaccccaaaaaacaaattttcataagccaaaatagattcaatactctccgaagtgtagaaaaatgaaaattcgaaatcagtttttattatacctgaaatagaatcttgagcgtgagagagagagagagagagctatggaggttaggagttccactgagaaaacaaaatcagatctaaatcaataataattaaaagaaaatgcagatatgtgtaatatagagagaggtacacgtacataccagacgaagaaatagatccaagaacacttgggccgaaccagagaagatgactgaaactccggccaaatcggccggagaagatgactgaaaaccagtgaaatggaagtagttgtggcttgtgagaaagagagtacgggctaatacaagcaaactctacaaaataatacaatacatcctaatggaggacttttattcagtatataataatacagaataggttgtattaaaaattaaagttgtaatatttattacaatacatggtgccaccaaacattgtaatattacaatttaatacaatacagggtccttatacatggctccaaacgagccctttatggcttaaaaaataccgattttcatgtgtttgggccacattttaatcacttttatttcttctcttttattttcacaaatactatattttcaattaaacacaaacaaaattaaattcaaacaaaatatttttaacataaaatatatcacaataattttaatgaaaatatttatttaaattctcattaatttgtattttttttaaaaaaaaaacaatgcattttcttaacttt

SEQ ID NO: 347205 - DNA, 552 bp, Cannabis indica
acgtggttttgcagttaaaattcggcatagtccacgagtcaatcttattagatttctgatagttttttagggcctttttgtatgattttttcgtccctttttctatctaacttgccactatatataatcacatagcatgcagttaattacaaaattgactgtgatctttacaacgtttcttccctaaaatcatgaggtttgattacatatcacatagtataaatgcggttattatttaaaattacagctgtgattttttcgcttctactgggtcaaaatgattttgtgtttaaacacgtctttaattgtagcgttctgggatgtctcgacaggaacttggttccaataaccttgatagcgagctgaaacttttctcccttatctttcgaagatcgatgatgtacaccttgttgcctcttcgtctgaagacttaatgattcattctaactcgatttgtctcgtcaagattatgtcttactgaaagatatctgaagttaattgatggtagttataggaatgagccttcctatagcgagataggcgcctcgctta

SEQ ID NO: 347206 - DNA, 544 bp, Cannabis indica
tttattgatatttaaaagatagagattatattgaaatagagttttatttagggtataatacccaaccagtatgtcaattatggtaagaatgaacaataacaatatgtaagttactaacttcgtcactggttattttcatagaatgaattaagagaaagttagcactggtgaaatcgaagctaaggctcggaataatatctgaacgcaagctttaggcacacctgagcacccaggtcgtgttagagctgttgggtattatgtttctttaattgagtcatattacttcttttttcatatttagagtctaactaagttggtacattatgttgcaggtcatttgccaagatttctaccgtgtttggtagaatgcaaagaaagaaaagagttgaggtcgatgtcgatagtaaacatgtcgctgaaatcaaaagattaaaagctaaaattaaaaggctaaaagcacaaaaaaaatgcacaaacagaagagcttcaaaagttagacaatgaatatagagatgaagagtgacatgaagactattatgaggac

SEQ ID NO: 347207 - DNA, 683 bp, Cannabis indica
atacgtcatataataaataatgctcacttatttcttttgtgcaaaatcactcaaattattcatattttaataatttgctatttattatttcttttttatttttgaaataactattattataaatcaatatgtaatatatttcaataaaattttgacatgtattttaaaaataacctacacctggtttaacatgtaataataaaaatagatataaatttatttagttttttattgaaatataatgttttttagttagttatgattatttataaattttcataaaactttaagtactttctaatactaaaaataaaatataaatatttatattttataatttttttttctttatatgtatgtgtagtaagtaattatttaaattttatctacaaatggtcctaaataactgcaacatagacgatcataaaaaataaattaaaaaattctgaatgtcgaaacaaatagttggtctactaaaattctcttcaaagagtctaatgcggaaaacttcaaataccatatgtacaaaaataattttatccaattcttccaaattcaaaaaatttcaaatgtagatttggactatagtattcaatctcatgaatcaaacatgacataattaatatagaggcgtaaatattattacacatattaaaaaataaaaatataatttaaaaaaaaaa

SEQ ID NO: 347208 - DNA, 508 bp, Cannabis indica
tttttttaaaaaaaataaggtaaatactattttggattatgtgttttgtaaaagttactaactggaccacctattttgttaaatgacaaaatggaccttgtattttctaaaattgtacaaataggacccttaactgatttttttcattaaaataaaacttaataataatctgatttagagatgttatgacaaaagtaattacatttttttgtatctgttcgtgttaaaaattgtcttaattggtcatatttaaagataacactgttgaaaattgaactcaaagtcctatttttaacatttttgaaaatagagggtctattttatcatttaacaaaaaagaatgtccaattagtaacttttataaaacataaggtccaaaatagtatttcaaaaaaaaaaacatagcatatgccaccgaaatgggacaggtaggcggttgtaaaagatatatctattctatataaagtgtgctatgagaaattcatgggtgactttttatttatattaa

SEQ ID NO: 347209 - DNA, 944 bp, Cannabis indica
ccttcatgaatttctttgatgatctagtttgcttctgtaggaagaacacaccgaagtagaggcattaaataacctcttctgtatattttgccttcaactattgtgtagcgaggcactgactataagagttttcgcgcctcgtttttctcagttgcaagttgcccgtctagtaggcagttgattataggagtcatccatgtagttgagctatatatcatctcgatgtcttctttttcacatatacttgactcgtttagcatctccaccaaaaccaattttaattcatccaagtcgttctgcgaggccagttttgctaaggcatcagcgttagagttttgttctcttgggattttcttgattttacagtaatcaaacttttccaagttcttctgaaccatatctaaatacttagccatttttaggcccttagcctggtatttcccgagaacctaatttacaatcagctgtgaatcactatgactcacgagattcttaaccttcaacgcttctgctatcttaaaaccagcgatcaaggcttcatactcagcctcgttgttcgatgtgtcaaattgaaatctcaaagcatagtgaaacttaaagcattatgggaaaatcaatatcacacctacacccgaaccatgctcgttggatgcactatccatgaataatttctaaaggatccgcgtctcgctgaacaagtggattttcttctggagttattccttctattaaataatcttccaaagcctgacccttgatggatgtttgagggcgataggttatgtcgaattgccccaattcaattgaccattttatcaatcttccaaaagcctctggttttgataaaacttgtctcaagggttgattagttaacactttgattgggtgtgcctggaagtaagttcgtaacttgcaagatgcatggattaggcataaggcaagtt

SEQ ID NO: 347210 - DNA, 645 bp, Cannabis indica
ttgtccatcttaataaggaaaaaatattaagtgttgggaaggatcctgtctcgtaatattcctattgtggcttttgcaatgcgaggtgatcttctcgctatgtgtaacccaaggcttttcatatatcattacattttaaatgctcgagtggatgaatatgctctttttttgtctatgtattctaaggcagctgtatgtctcgtcaatattgtttcactagttattgtccttgtctcacttaagactaaaatagtcaacgtgttttgaatattatctattaaacttttatttaataataacgagtgattttaatttccatttaatgatataactttatgatattatgagttatttgcggtataacctccttaagtggcccagtttttgcaagtacccccaattctaaaattttggtggtaaaacctcctaaacttaagttctgttagcaattacccctttccgtctatttttgggcgtttagtgccaggttggcatgtcgacgtgtacacagtgtacacgtggcacaatttaattagtccacgtaataaatatttaaaagtaaaataaaaaaagtaattattttaaaaataaaaaaaaataaaaaaattatttttctttaaaaattaaaaaaatttaaaatttaaa

SEQ ID NO: 347211 - DNA, 645 bp, Cannabis indica
ccatctcgaaagaactccacagttaagcgtgcttgacctgaagcaaattcaggataggtgacctcctggaaagttttcccaggaagcgtgtgagtgaggacaaagcacgctgaaaacactcgtgttggtctgtagggtcagtcatcagtccatgaagcagccagagtgacgtactcgtgtataagagccagtcattccgtgggtgtaaggacccaatggaggcttgaagcggggacattacagatcaatacaaatttgcaaaggaaaggaagggcctttcgttgtctcctatgaatgatgggggccgaattgtgagcattggattgcacttgtgttaaacaagattaaatttaatgttgatggggcttttatttgaacaagaggggcggtgtggagtgggctgtgtagctcgagatcatcatggaaccatggtagaagctttcaagaagggaaaggttgggtatctccaacctgaaattgctgagatcataggcatcaaagaagctttgagttggattgcaactcatccctgggacaatgtagtgctagaaacagatagtttggtgtgtgtccaagcagtccaaagtaatgtttttatgtcctcacagtttggtcttattgttcaagatgttaggaatttacttt

SEQ ID NO: 347212 - DNA, 550 bp, Cannabis indica
tcctcctcaacataatgaatttattgacaccaactatgttgatactaaatcagtcattggatcagaaaatgtccatttcttagttctacatttcaagcaaaggaaacgtgcaaagcatgatgggtctagttgtattgaagatgtctcttttccacttactcaaagttcagagatgccaccatctgatacttgctttggagcttttagctctagggatgaagaacttatcgactttgatgagtttgatgattatgttgataaaggatttgacagtgaggaattgcctgtagagccaatcattctaccataactgattgtctcagcaaagacgagtgttccaccatcagttgtttcctcaaatttacttattcctttaccagacccaatgttgacaatgtcagcttcaacaatcaccaattccgacttgaatgagtataccaaaaggtttgtgattgaatgcatgaaagacattcttcatttgttatcttctcctttgacaacagcagacatttcaaaacatcgtgctaatgtgggtatgcaacttgacgtg

SEQ ID NO: 347213 - DNA, 881 bp, Cannabis indica
ttgagcttgggcagtgattacatggtatttctatgttggaatttcatgttttaaatggtgctatgctgctgaattgtaataggtttgagttgggttgagttcatgctcttgaatttgagattttgatgagtttgaagcacgtgtttgtgtagcatcaatctgaattcttggtttagtatgggattttgatgcttgaaatatattagttatgcatctagtaatttgctagtgatcctaattgtgaatttggatgtttgattgagaaattggagtgaaaagtttggtttggaaactgaaaattcgaagaggggctgctggttttctgggttctgcacctagagcatgccgcggcgcgctcctttgagtggacctgggaatttgtcccaggtgccgcaacatggtctgggcatgtcgcggcccgccctcgtgtttttgggcagttttgagttgattttcgaaagttcgtaacttttgatgtcgaactccgatatgtgagttctttatatcgttggaaagctcgttccgagctctatatgattatctgaattgtaaatgccatgcttgaattttattgagttgaaagtcaggggttaaccctaagtgtaaattatcccagatttgtgtgactaggactaccggcacctgatcaggaccacccggggattcaaaatctccttctattgccgaacaacaggtaagacagtgattaaaatgtagagcatgcacagtggcgcttatattgagaatgatatgcatgaatgtttagtaaccgggattagggttattaccctaataggaacagtctaatagcctagggttattaccctagtgatatatgtgtgtaaatgccatgccatgttaattgaaatgagatttaggga

SEQ ID NO: 347214 - DNA, 1053 bp, Cannabis indica
atcgtacgctccaagcctaaccatcccaacttgtacaatcttcatccactcgctctcacggctactcagccttagctttgcctttacctacacatgcaaacaatatctgtgagtcgacagactcagtaagaaaaacataatcataacatagatgtaaactggattaagattaggcacccatacccctaaccataacccttctccgcgtcctacacgatactgagtcaagaatgttcaaacgacaatactactgaccatagtatcagcctatactcggtacgctagtcgtactcaagtcgtactgatgtgatactgtcaagtaatacagtacaatcgaccataatatcaacctatactcaatacgctagtcgtactctagtcgtaccgatgtgatagtgtcgagtagtacttaagccaacatacatttatcgatatccaatataatactaaatattctaatacagctattataaggtaatctaacaggcttaactaacatgtaagcatgtatgcatatcattatactagtcttaaatcatttccaaattccaaattcaggtgtgtcggccaacatgagtggaacaactgctcgacgatttacaggcccttaaatcacattattcgtaaaactgatgagtgaaacactaaatcacttttcagggacttaaacttgaaactaaaagttttcctatcgatggataacatgaaaataccctaaatatcgcaaaaatatgaaaaactagggttccctaaaatgccgtaaccggtagaccggttccccaactagaattctgattttgtggagttttcctggggaccaaccggtcgaccagttcttacaggtccccatgaaccggaattccggttcattgcaggaaacacaaaaatccccccatacatttcaatttagtcccaaacgtcaccaaactttccagacctcctttttacaccataataagaagaatacatgcaacaaaatgaagaatcaaccatagaaacacaaatcaccaattgtgagcaaagtttgagctctaaaactcaaaccttgctcaa

SEQ ID NO: 347215 - DNA, 374 bp, Cannabis indica
ttaattttttttttgaatttcttaaaattttacaagatatcttaaataagggtaatttgcggcataaccaccgtaagtggccaagttgttgcaactaacccccaaatctagaattttggtggtaaaaccacctaaaccactattccgttagcaaatacactcccccgtctaactgaccccgtttttttcttatgtggatgggtagcccaagtgccaagtcaccgaaatccatattacgtggcattatccatttaaaacctgggattgtaactgaaaattaaaattaaattaaattaatagctaaataagataaaaaaaaaccccattaaacacaaatccactttaccagcataagaactgttgggttttatgcc

SEQ ID NO: 347216 - DNA, 589 bp, Cannabis indica
aaatagtgtcttgtgtaattatttcaaaaaaaaagttatactcttatttaaaaagaaatgtggtatttttaaaattaataaaagttatttttgggcacatgtctagccctcctatgcctaaaatcggtcatgtatacttctatcttaaatcctaaaatataaaattttaaatatatatatatatatatataaacatttctcaataagtattatttattgatgattttaaaaagaattataaatatcaattttaaaaatgctaaaccatttctcaatgtaccattaaagagaaaggaaattaaacttacctgagcgccacatcagtatggtggtagtggtggtggtggtggtggtggataaattcaattgggaaacaacccacatcttgcatccataagggcccttgtaccaaacgaagaaaattgtcctccaacgttgtaattttgaaggctatccctaaactgagagtcaccttcacaattcacacacatcaatcttttcatacatcgtcgaaaagttcgaaagtgttctttggacttccctttcttcttgttggtagttacttctcgaccatcttttacaacttcca

SEQ ID NO: 347217 - DNA, 746 bp, Cannabis indica
cttttttttcgtacaaagtgtattttgggaagttattaagtggagtgaggtgaaggaagatgaagagggtgttgcacacaacacatataggaggggagggagatattttttttttcttttctttttttaaaggagaggggagggagatttatttggctattaaattattaggaaattatagcatatggcaataaataatagactagttagtaaataagtttcatttcaaaatttatagcaaaatgactatattagattttttcttaacaaaaaaaaaactttaatcaaaccccagcaaatacattacaacagaggtagaacaccactacaaacacacggttgcagcaacaacagccccaaccgttagtaatattattacaatggaagaaaatcaagacattataattctatggcaatataatataaaaattaacaaatagattaaataaatgttaaaatacataatatacaatatatatattatatatattatatgagaaaggtagaagaagaagaagattacaaatgtaatcgcagattttcgttaaccagtatttgagcccgagttatgataaatttgcacataatatagaaatagtaaagaaaaaagtaagaacacaaaggacgtggttttgtagttaaaattctgcatagtccacgagtcaatctaattaaatttccgatacagttctagggcttttttatgaattttttcgtcccttttttcagtataacatgcctctatt

SEQ ID NO: 347218 - DNA, 824 bp, Cannabis indica
caagcttgcttagcaagaagggcctggttgaagtgaatcagggagcggaaacccaatccgccatcctttttggacttacacagcttttgccaactttgccagtgaattttaggccgattattgtcattgaaaccccaccagaaatttgccatgatcgactccaaagaatggcaggtggccgaagggatgcgaaagcaggccatggtataggtgggaattgcctgaatcacagacttgagaaggatctcttttccccctttggagaaaaccttgttcttccagttatgcagatgggcccagactttgtcatgcaggtagtggaacatttgcttcttcgatcttccaatgtgctggggaagacccaggtacttttcaaaagaagagcgaataggaatttgcaagaagtctgagattaacgtttgatcccgaagctcaacattcggggagaaataaagggaggatttctgaaagttaaccttttgccccgaagccctttcatacatctcaagaatttccttgatgatattgcaagactggatggatgcattacaaaagaggaaactatcatccgcaaagagcaggtgggaaacagcaggagcgcgtctagcgactttgtaacccataagagagcgatttctctctttctgctggataagggaagacaagccttcagcgcatagcaggaagagatagggggagagggggtcgccttgcctaatgcccctggtcggaacaacattgccggccacttgcccgttaaaattgaattggaaggtggctgtggatagacaagccaagatcaaattgatgagccgctggggaaa

SEQ ID NO: 347219 - DNA, 483 bp, Cannabis indica
cccaaccacgtaaaaaatctctctcttaatttcttacagccactctaaattattattattttattggttgccgaaaacctcgatcaacaaatgtatttattattatttaagaaaaaaatattaaaatacagaaaaatataaattaatatgatgttatatatttatatatatatatattttttctaaaatatataaaaaaaattatttaaaggcgttagtgaatctaatacctttaaaagtattatgttcatattggtgtaattaagtagccttttttatataatttaatataatattttttttttaaaagtatcgttaatataagggtaaatattattttagaccctgtgttttacaaaagttaccgattagacccttttattttgttaaatgataaaatggaccatgtattttttaaaacagtaaaaataggaccttgagtttactttttgacaatttttttgtcaatataaccaacttgaa

SEQ ID NO: 347220 - DNA, 864 bp, Cannabis indica
aattaaaaaaaaaaaagaatagaaaaggagagagagtcaatatacacgcgtatgggacattgggacctgtcttttctttatttattttttcttttttaattttttttttattaattcagcattaactttttctagtggaccccaatattttcctagagtaccgcgcttaatttattaccataaacaattaattaaatttagaattatgatatagtgacgcgccaaacatgttgggatacgtttacctagtcatacctggcgcgtcactatatgttaatttttttaaaaaaaaaatagaaattatgggaattattctttagtgacacttcatatttttagtgacaagtattgtaagacactaacattgaatttcagagtctttttgtgtgtgtcactaaagctcacccttaactctttagtgacccgcacatttgtgcgtgtcactaaaaggtaagtttgtagtagtgcaacaatcctcccctgaaacacaggaccacatacttgtggcctcccctccagcaaaaccaccttatgctgccattattaccaagggaactcaccgcctgaccatcacctttgtcaggaagactttcaacacaagttctaacatcgatctccatcttgtaccgccgtaatcatcaacgggacatgccacgtgactactttaatatcagatagactttcgatacaaggtactatataaatcttcaatcgcgaggtcataacattgagggtatcttccacacattgcaaatgcagcccactatcccaacgcttgaacctttggctctgatactacttgttgggccccgctcatctaccttgttgggtcgctacctcaccttgactcccacattagtatga

SEQ ID NO: 347221 - DNA, 1076 bp, Cannabis indica
tttaacattcagtctcactagtagagttagagacttcagatagtctttcacacttctctgaaaatctccgctccaccccagagtaatctccatctcataagaagaatttctagcatcaacgcaagtctagaaaccttatttggtgtagtctaagattattaaaataccacccttataacctaacatatagttcctcttttgatcttaagatttgtttcattgtctttcaatgttcctttcctggattaaactgatacctactcactacacccactaaatagcaggtgtctcgtctaatgtatacaagaagcatgcatgagacctctcattgttgatgcttaaggaattcttttcatgacttatatcttctttagaatagttgaaactgtttcttacatatataaaatctacgtctaggagccaaaaggcttcctttagaattagccattagagaaatgctttcaacatcttactaaagtaagttacttgcacatgagtaagtaaattaccaggcataccacaagccaccggttttagataatcccaaacctactacactaggatcgagaagttttattaagtccatttgaatagacttatttttcaaaatttgccctcttgtccttgttatagagatttttttggttactccatatgaatggttttaaccatagttctcttagctttgcttcttagttccttattctgactatccattacttgtttaaactaacaatggattttatcacaagtgtctcccaagtcataacaaggtgggttccttgaaatcctcccactacgacaaggtaccgtgacttgaacaataattgtattgacctcatccgttgtaccaaaacaatatagaggcaatgggaccatcttatatagaaaaagatgacagaactctttggaattgaaaatatctcctttactttgctactttattttcagacttagtcatattcttagaaaagtagtatttatcgaaacaaacactttcttatcttaatgatgaaaggatggtccacccctaatcactttagaatagttatcaaacttgtaaaccttagttaaca

SEQ ID NO: 347222 - DNA, 617 bp, Cannabis indica
gggttcgcgtcctgggtcttggtctaggtttggtccaagtcccaagttccaatcccgatttgagtctgaattcagttcttggtcttggttgggtccttggttctgatcctgttctgggttcgagtttggttcgggtccgggtatagctttgggtttgattctaggtgtgggtttgagatcggccctgagtttgtgtccgggtttgtgtccaggtctggaccccgatctgtgtctaggttctggtccaggtataagttgtggtcccgagtgccggtccaacgttgggtcagggtcaggatctcggtccaaatctaggtccagcatttcgttcttagtgtgggtcttggtccgagtctaggttcgtatccgtatccctatctaggtccaagtctttgtttgggatcaggtcccagatttaggtccatgtccgggtctcagttccggtctgcctacacgatcgtgtctgagcctaaattctagtctcagtttgggtctgaggctaggtctgtgtttagttctaggcatgggtccgggtcctggtcacagtcccagtcttgttctagggtcctgattcggcgattcttattcaggttctaattttgggtcccaggtctagg

SEQ ID NO: 347223 - DNA, 607 bp, Cannabis indica
atactttaatttttatattacacgctataaataaattagtatataattttaatttttcatgttttaataattttaattataaaattataatatttaatactatatttaaattttattattattttatttatttataattgataaatacattttttcttattattaataaattataagatttttatttcaaaaaaaaaaaataaattataagatttttaatatgtcgtgttgtatttttcgaacttatcacgtgtcatgccttcagacgagtttattcgtgctactcgtataatgtcgtgcttaaggatatatttttcgtctcatgtcgtgttaatttgtagcatcatattgtgttgtgtctaaattcgtattttttcgtgtctacttgtattcatatcttcgggctcatatcggtttcgtgcagtgtcaaaaagtctgacccgtatttacaatactactaaatagtggtatagtgctatatattagcacttttaaggaaattaacttttttaatggtatgttaaacttagaaaatataaggcacctaggtaccacaccataaaaaggtgacatatgctatggtgcaatttaatattatgtcccacaa

SEQ ID NO: 347224 - DNA, 745 bp, Cannabis indica
actggccaagagatagactctcgcgaaccatggtcctcctcatttttgtgagtcaaagtctcacccattcgagagcagagactgtttactgccgcgagggatgtggatctacatgaccatgccatagcgtcacaccagtcctaggtacgacttcgactcacgagacctttatccacacgtgtcaggctacagacctagggaccaagttgtttcctatacaatgtcagaggttttcccccatgacacgctatcgtgcaaagcatgcatgtcctcatgtactgagctaaacaatccaacgactaggagaaaaggaaattttaacaagaatgaccctaggatgacacgcgttcgaggtctagccagtacaaccagtatgatctgacacccttataagccacataggaaatacgcaacctaccaatctaatggtgggatttcatccccacggtgacctatccaacaatagcccatgcaagagaattggcctataaatatctcacagatagcacaaaaaggggatcctttttttggacctttacctttagattggaaactgattcttcatcaattcaacacattacagtaacccttctattaactcttgaatattcctactaagcgtcctcttattcaagaggaaaacggtggaacagagaaaaagttcattgtatttgtatttgtataaatagccaccgaccaatgagcctaataaaatagactcatggactaaggatagttaatgcct

SEQ ID NO: 347225 - DNA, 625 bp, Cannabis indica
ttggagggatgaaagaccaacaagctgaacaaattctaatttagaaagcaaatcaatcctgtctatctgatcatgataagtactttctttttctccaggttgatctactactcttattatgtctttcatcgcgttacaatctctgacttgtatactctttaagtttacaaacttttgagcaacagaagaagagaatagatactttaaattatggcagcttcccacttttaaggttgttaagttttgcatgtaaaaacttgatgatgatgatgataacaaaagttgttctggccataacatttctatatccattttcttcatagttaaatcctccaagttaggaaaagaaacctgcatgcaaatatattaattattgtaataattgaatatattaatctactcatgaattacatatcaacaaattatataaattaatatattaatttattgattctaaatataaaattggtatattttgaaagcagaatttctttatacgatatgcatttattctattatctttacttgtccgtgttctatgtatttttttaaaaaaaaaataaataaacagaaaaaagaaaagaaaaaaaaaagtagtaactgtttcactgaataaaggctttga

SEQ ID NO: 347226 - DNA, 548 bp, Cannabis indica
ttattgtaagaaaccaggccacaccaagtttgagtgtaggaagttacaatttaagaatcgacaacaacactctgccaatattgcaagcactagtgatgcatctgacaaatcggtccttatttctgctgatgaatttgccaagttctcaaggtatcaggaaacacttaagtcttcatcttcttctgtcactgcgattgctgattcaggtaactctaatgcatgccttctttccaaatcctcaaaatgggtcattgattctggtgccacagatcatatgacaggtaattccgtctcttttccacttttcagtctcacagtcccacttctgttgtcaccttagctgatgggtcaacagcttctgttcttggatctggcactattgttcctacacctatgctatctttatcatcagtcttacatttacctgatttgtcctttaatttgctttctgttagtcaactcactcgtaatctaaattgttgcatctcattctttcctgatcattgtttgtttcaggatcttatgacgaagaagattattggtaaagg

SEQ ID NO: 347227 - DNA, 570 bp, Cannabis indica
tattcaaaaatataaatttttttcctaaaagtactctaagaacatctctaatggaagtgtaaataagtggtgaaaagctacttatttatcaagaagtgtgctccaatagtgtatcaaaaagtgatgtaaatttagcacatagcaaattttgtgcaaaatttggcacaacatttgttacgatgtaaaatttacaccacaataactacttttttatttatatttatgtcatttctattattttattagtatatttaactatcacattaaattatgaaatatttatattatttttttattgtcttacatattaaaataataataaaattatttatagagttattagattttatttatttttaataaaacattaattagatattaaattttacatcaaagttttgtaattgtgcatttgagtaaagcttaaattttgtgtaaatttactacaaaactatttttgtgccaaatatagtaccatttttacatctttcattgaagatgatctaagactaactaacactaaaagtgatcattatagttacatactctattatttaatatattatttat

SEQ ID NO: 347228 - DNA, 679 bp, Cannabis indica
cgttttgacgctgcgcctcttctagacggcatctcaggtggcagttttccatttcataagtaccttctcccatagactagacacctccacgattgagctctttatcccttgtcccagggttctggccactcccacgttgagttctcctcgagcgtgttgtctacgtactaggaccaacattgggttgggtcctccgagaacgtgtggtccgtgtgctagggccaccctcacgttgagtcattctagaaccggtggtccatctggaccgcgggttggtagaccttctggagcccatgggctctttcccagatcgatgattagtttccccatgtggaatattaacattttctagattttcagccatgaaggaggtggtttttcttcaaaagaatggagggtttttctgagcatttgcacagaagctctcaatgaaagcaccaaactgttaacgcagattttcgttaactaaatatgaggctaaccattaaaatctcacacagaataaaaagttataaaataaaaattacgaacacacaaggctttttacgtgattttgcagttaaaattctgcatagtcgacgagtcaatcttattcagatttctgattatctttcagggcctcttttgtatgagtttttcccctcctccttttttgatcttgtttgccactatttataat

SEQ ID NO: 347229 - DNA, 984 bp, Cannabis indica
attattaaaaaatatacatattttttaaaaggtatttttttttatttgggccgctaaaatgagtgggccctaggcgcgagcctagcccacctatgcttagggtcaccctgcgtggcaatctctaattgattcaagttctcaaatttttaattttttttaaaaattagtttaaatatactaatgaaaaatatgacacgtgaataatgacttgacatttaacgaccacgaccagatatttacgaaattttagaaatataacttaagtattattaccacaaaaaattaaacttaattatttatttacaactgaaagttaaacttatttatactgagattactcaattaaatttgttcatcgatcaaataaatctatatagattggttctctcactagaagtctatatatatagaaattaaattaatatgctgtaaatgttgataatatttgtacaatatggattttcgatctttttcattttaatttgtttttgggaccttgtctgtacccttcatcatattaattgatgatatccaattagtagctatgcatattcaatatcgtgaagcaagcttaattaatttaatcgaatattatttttctgtagtcgagatcgtgacaaaaaaatataattttaattgaattaattgcatgatgatttttggtagaataaatattagttaaacatcattatatatatatattgatagatcgatgaataatgatatctatatatatatatatatatatatatatgttgttgtgaaggtattaaataacatcatagagtgaagattgggatgatatctcatgataacattttatgctaaaagttaaacattgataatttcaacatttgttttataatagaaaaattatatataattattataaaaaataaggcttgttattaatttagaagtttatatatatagtacagtgtttttcgatctatttatgaagatatacatataaaaatataatat

SEQ ID NO: 347230 - DNA, 627 bp, Cannabis indica
aaaatgcaaaatttgttaactactgaaaggacaagacaggaaggaaaaggtgaaaaatcgtgttgaaattctgaaggctcaccgtggtgaggcctttggtggttgcgactaattatcgtcgcggggaggattatttgtggtcgtgacgaggagcgaagatagaatcaaatgattttgactctatacaattgtcgcgatggagctatttgtagtcgcggtgatgtctctgtacgggacgtggggtgctttcatctttttgttattttgagttgttaaaattgatttttttttataagagggttttgaatttttagaagaattatttagaaaagaaccctagaaacaaaagaagaagactcttggagtgagcgtgtcgatctgattgagttctccacctagtttctttctcttccctttaatttattatgttttattttgtttttaaacatgggtttgaatgttgagattatgaactaatttcccaattgagggaaatgatgagtgttggatgatttagttcgaaaagttaatgtgatttgttatttcttctttttggatttttatgatttttttcatattcgtgttgatatatgttctagattgatcacctttaacatgatttatgat

SEQ ID NO: 347231 - DNA, 516 bp, Cannabis indica
ataggatcagatgacacgtgtcccataattttgatacctgggcaaaagaaggtatccctagcagcatgcacataattcgtcagcatctataattgttgattacccgagcagagttgtggagaagatacccaccaggtagaagcctgttgtatcgagcgactaacaagagatagcaacttcagaataatcttgttatgtctagacatgaagacaatccctataatcgtgagattgagtcagaggaaaatggcaacatgttctagcttcctatttcatatcttgtaattataaaatcattgtactttcttattttatgcattgtaagcaaaagggaaaccatctctaacgcattaagtccctataaatagtgacttagcctcactatgaaagggatcgagagaactgttgcagaaatatactctaaagagaaaatcgtgatcaaagagagttactcagatatcagttgtaagagcttttaagaggaagaacactttattctgttggaattattttacc

SEQ ID NO: 347232 - DNA, 639 bp, Cannabis indica
attgaaactcttctcagctacctcagggctacaacctaacaaagaaaaatctgtaatctattgctgcaatgtgatagaatcagatgtcaccagagtcctggaggcatcaggtttctcacaacaacaaactccgttcagatatcttggcattcctattttccataaaaggatttcgaaacaggaatgcgcaattgtatcagagaaaatgacagcaagaatcagatcatggagcactagacacctctcttttgccggtagggctgtcctcatcaattcagtgcttacagctataccctcctatttgtgccagattctcaagcttcgaaagaaggtaatagatgagattgaatctatatgtagatcttttctttggaagggtcaatatatgatgcagggagctggtttagtagcttgggaaaatgtttgtcaatcaaagattgcaggaggcacgggcattaaaagaataactgaatggaacacagcagcgctctttaagtatgtgtgggctgttgcgaacaaggaagataatctttgggtcaaatgagtacatacagtttatacgaaagatggaaattggtgggattaccaagcaacaaatcaagagagttggtattggaagcaaatagtggcagccaagaa

SEQ ID NO: 347233 - DNA, 531 bp, Cannabis indica
cttggctggcgacactatcaccagtaaatccacacaaattaaccatgcaaggttttaattttgcatcttgtaacccaattttcttcagcgtatccctgtaaaggatgtttactgagcttccattatccaccaatactctctttattcttttgttggcgagttgaactgtaataatgagaggatcgacatgtggatacctcacgtgctttgtatcttcctttgagaatataattggagtttttctgttttggcttttttcaatggttttggagtaaactattggaatatattttaccaggatctagatttactattaagtatgtttttaacaacgtaatatgaatttctaaaaatgatgaaaataaacacataaaaggtatgagaaaccttacagtggttgcagcggaattaaataactcctcccactcagatctccaacctttgtatcctttctgtagcagagtatcaccaagatttgagcctgattctccttcttgttgattggattcttcacagtcttacatactatga

SEQ ID NO: 347234 - DNA, 598 bp, Cannabis indica
tagcctagtattccccgagaaccagatttacgataagttgtgaatcactatcacatatgagattttttaccttcaatgcttcagctatcctcaaaccagcaataaaggcttcatactcagcctcgttgtttgatgcatcgaaatggaatatcaaagggtaatgaaaattaaaaccttttggtgaaattaatatcacccctgcacccgagccgtgctcgttggatgcaccatccacgaataacctccaagtattcacgtcttgcaaaacaagcattttcctcttgagttattccttctattaggaaatctgccaaagctttgcccttgatggatgttcgttggtgataagttatgtcaaactaccctagttttattaaccattttatcaatcttccaaaagcgtttggttttgataaaacttctcccaagggttgatcagttaacacttaaattgggtgtgcttggaagtatggtcataacttgcgagatgcgtggattaggcataaggcaagtttttcaagagggggatatctcgattctacccttagtaaccttttgctgacatagtaaacaggttgctggtggtttccctcttctc

SEQ ID NO: 347235 - DNA, 1170 bp, Cannabis indica
ctagccttaatcttttatatggcttcattagtccgttgcactgattccagaccaaggtctttctttcctcctctttcttcctaatgaataggagatctgcacttcctgccatacaacaattcatagggagccatccctatagtactctggtagttgttattgtacgaaaactctatcagtgacaggtatttgctcaaagagcccttgaaatccattacacaggctcgtgcatgtcttccagtatctgaattttcctttcggattgtccatcagtatgaggagggaaagttgtactgaattttagtttggtacccatagcttgctgaagactctgccaaaactttgaagtaaacttcagatctctatctgatagaatggactttggagcgccatgtaacctcattatctctttcacgtacaaatctccatactgatctactataaaggttttttttatcagtagaaaatgtacaaacttcgtaattcgatctaccacaacccaaatcaaatcgtacattcccgtggttctaggcaatccaaccacaaaatccatagtgacatcctcccacttccactcaagaagtgtcagtggttgcaataaccgtatctgtctttgatgtttagccttgatctattgacaagttaagcaccaggatacaaattccaccacatctttctttatccggcaccaccactagtagggtttaagatcttgatacatcttgatagtgtcaggatgcaacgaatatggagtggtatgagctttcaagaatctcatttctaagttccgcatgacttggaacacaaaccctgatcgcaaataatagcatcccgctatctgacaccgtaaaatctttggcttgaccagctgaaacctctttttcagatcttcactaacttcggatcagttaactgagcagctttaattcgttccaatagatgagagtgcagtgtcaaattatgaagtttgcctacaacaaactcaatgcctaatctaaccatatcttttgctagttaagatgaaatcttaatcatattagttatctgcccaggacccttcctactcagggcatcagccacaacattggctttcccaggatggtaacagatttcacaatcataatccttgaccaattccaaccaatgcctttgtctcatattcaaatcttt

SEQ ID NO: 347236 - DNA, 515 bp, Cannabis indica
gtaataggatctgacaagttgattcaacacaacctttctccaccattacatatccttaatcacaaaatccttgatattgtgaaatttctctctatatgtctactcctttagggatattggattctttactttttggcaactacttctgtgttagtcaggaagtaacactagtagttaattcattattggtacaacgccaaaaactgtatagaattttccatagactaactaagtatgtttcctgcaactttaacattcagtctcactagtagagttagaaacttcatataggttcttacacttctccaggatgactgctccacccccagagtaatcaccatctcatcagtagactttctagcatcaacgaaagtctagaaacataatttggtgtagtctaagagtattaaaataccacccttatcgactaacatatagttcctctttttgatcttaagattcacttgattatattccaatgttcctttcctggattaatctgatacctactcatt

SEQ ID NO: 347237 - DNA, 1086 bp, Cannabis indica
aaatttgatgagcatatttactttttttttttaatgaaagtctcagagtatcaaatcccgggttgttttttttaaaaaaatttgttgtgattctcgaatatttagcatcaaatatcagttcaaatattaatggaatttattttattattattttattatatataaataatatttattattttattaaataaaaattaaaaagtcacctaaatatcagttcaaatattaatgagatttattttattattattttattatatataaataatattttattattttattaaataaaaattaaaaagtcacccataaatttctcaaaaactaagaattttagttatataggcacactttatatagaatatatatatatatattaaaagcctactaatatatatatatataattatatatcatcttcttaagtgtatgcctgaatatttgttggggattatttcacaaaatatataaaaataataaaaaaaattataaaaatacaattgtatagaattttaaatatttttatgatttttatgattttatttataaaaaatacagtctttttatgttgtactcttgttaatttattgttgttgttttgatattattttcttgttacttttataatttttttattattttttgtgttatttctataaaaaaactagtaaaattatataaaaataaataaaagtctttgtaattttcctttaaaaataatattttatgtaattacaataaattatcatatatatatatatttatttgctacataatcccaccttattgggttgaaatgctaaacataaaatagtcatctattatcttattgaaatgggcttatctcatcccattacaatacaatgaatccattattgcattttttttaaataataaaaaattggtacccacccgttcgattgaagcgggcagaacccgaaaatatgatgatgaagaaatggaaaatgactacaatgcccttcataatgataaaagttcaatggagacaggacatggcttggaagcaaagagtggtaaaagttgtccaaacaaatgcaatgtaccagcttttgtctcaaagtgacc

SEQ ID NO: 347238 - DNA, 509 bp, Cannabis indica
cttcttgaaactgactatccttggtaatataattcctgtattcagagttccttgcaggtatctcatggtccatttaagtgcttcccaatgttctgaaccaggttcagagatatacctgcttaccatgctcattgcatgagctaaatctggtcttgaacaaaccatagagtacatgagacttcccacacagctagcataagggatcttactcatttttgctatttcagcatctgttttgggtgattgtgcagcagacagtttgaaatgctgtgcaataggggtagcaactggtttgctcttagacatgccaaatttggagagtaccttctgaagataagaggcttgagacaaaacaataactcctattgaaggtctcttaatgtctatgcctagaatcctcttagcctttcctaggtctttcatttcaaactcctcactgagtttgcttttaagcttgctgatttctggtttagacttactgaaaatcagtatgtcatctacatagagca

SEQ ID NO: 347239 - DNA, 708 bp, Cannabis indica
catagtcatgactttataacggttgcctcacaggcacagcctgaatatcggtatccacatatcacattacctactcaagcaagtttatacaatagcctagaatttatcatttacatatatcacattgcctaatcaggcaagcccatgtcataatttggcattcgtataccacatcaccttatcagacaaacctataccatagtttggcatcatatcatctaattaggtatatatcacattgcctaatcaagcaaacccatactataatctgaaatccatatatcatatcacctaatcaagtgagattgtatgtcacattcacattatcactaatgagacaattgatgattacaaaacatgtcatgccatgtggagggccggccttgaagaaattggagcctaagacgatataaaattttgggccccttaataaataaataaataaataaataaataaataaattaacataaaaaatttatatgctacatttcctgacataaaagtaaaaaaaaaaatatattaaaaatctaaaataacagatttgtatttttaaatttgctctatcatccataataatattttaatcttgccaaaatttcaaccatacaatacatcaaattcataaaaagaaatataaaagaaaaaactatgaattttatatttacctatagctaaaataatttttaacaactacattaaattatagt

SEQ ID NO: 347240 - DNA, 571 bp, Cannabis indica
tctatcgaggcacgcattagctgacgcgtgtcccctatggcattggttattacaaaataaccgatgccatagggtttatataaccgtattcagccctttttcttccttactttgtcttctcccaaaaaaataaccagcagccccttaacgaaaccctcgcccaaccaccgcctcccatccccaatttctttatttttcatccattttcgcctgtttttttaaatcttgcatttttcatacccaaaaagatatccccagagtttgatcgtcttttattttatttttcagggtaaatcgagcttagagatggtggttgtggtggttttagctctggtcgtcgcttttggtggagaaatagttgaatctcaatgtccatagtataaatctaatctctaataatgttagtaattgggtcagatccttgtttaaattctttgttttggtacaaaaattacacaattatttatttctcgaatagtgaaagagagtcacacattgataatgtgtaaaaagataataaaatatatacgatgaatgagctactcatcctattgccaattggttttgagat

SEQ ID NO: 347241 - DNA, 629 bp, Cannabis indica
caaacacttacagtttttatattttcttatatacaactgatatttgcaaaaacacggttttttaatgtcttattcttttttttagtagagaaagttaaaatttcttttcaagagataaaatcaaggacaaagtttattataatgctcaaagataagcaaacacaaatcattctcgataagggcgagctaatgtcaacaagaccaatagactgacatagcgaagcacagagtcatctcttattcaataacatctaataattaatttgtctattattcgttaaatttactgttaatattgaaaaatcgagtttttgcaaatattaataaatattacagaaatataataaatataaaactgtaaacgtctgcaccaacagaatgtaattctgctatcgcagaaaccagttttgcagaaactagccaaaacagcagaatataaaaataattacagaaaattaaatcacttgacataagagatttgtacgtggtatcagtgttctttcaaacactactagtccacggggccacgcccagagaatgaaatcaattagtaatgtatcaaagtttacaaaagcaattgacttaaacaaatttagacttcctctagtgatttgtcgcaaccctttgta

SEQ ID NO: 347242 - DNA, 544 bp, Cannabis indica
tttacatttgtctgtgtggtatgccttactacccccctgagtgtcatgaaaattatttttagggcactctgctttacaaatattaatttagaggttgcacatacttgtctggtacaaatttactttacagagcataagtttatatttcttcactattggtaatactttcagaggtgatgagccttccaggcgctaggcaccatggttttgtccattcttttgagcttgtaggtcctggaaccgatttcttcctcaattacatatggtccttcccaattaggcccaagtacccccactctaggttcttgggtggctgggaagacccatcttaggaccagatcaccaatagcaaattttctacttttatcttttgagttaaagtgtttagccaccttcttttgataaggtgccattcgtatttgagactccatcccggagttcgtcgaatctgatccaacgcttcttgtaataaagccttgtttgttgttggatcataagtcgttctcctgtgggatgggaatagcgtttccaccgggaccattgc

SEQ ID NO: 347243 - DNA, 1295 bp, Cannabis indica
tattatgtctacctaaagtattagagtatttataaaaattatttttttaatattatttctaataatttattataaaataatatgatatcttgtcatacatacttcttgagttctcgatactttgttgaaaaaattactataagaaaatattaaaaaaaatatatatcatgtaccattttgaaaaatagtttgtatgggtgtgctctactcgtcgaggtggttgttttgatatatgccactcctatttttggtaacatttctagtacatcaatttttatcatcaccgatagttaatgtgcactgcttaggtgaagttctagaactctaaagtttaaatatagtcacgttatatgttgttagactcaattttgaatgtagaatgcaatgataaaaattatttagtgatttgatggtcatagatgaaagtaatatttaagattggactgaacaattagagcttgagacttaagagcttaggatcgtctttttggataaaatttaattgacttgggagaggtatgggctcaacttgattaatagacttgattttattgtgatgaatatcatgtgacatattccaattttagtgatctataaaatgtttaaaaaatcaaaaacttaatctgtatatttttctggactattttggagacactcagtggcaaatatatttttgtacacttatttatacaggttatgatttttagattttatcaaattataactgttatatatgctgccgaattttctaaaataaagagaatatgtacttttgttgttcttaatgcctgtatttgttatactaatgggtgacatacttatcatgtcttgtgcatattgttgttttacgacctagtctctttgtcatcataagtagattaagtgtgcactcacctgtaggtgtaagacctagaatatgtacagaaagtaaattaaatttgagtcacaacattttggtggttcgcgacaacccggtttaggatgttatttttttattggcattgagagctaggggtctagtggacagtgtaatatgtatttgaatcttttttttattatttgtggtctctctattttgtttatacatgattatgatgaggttaagatatttttttaaagctaactatgtaagaatatttattaaaccaagggtcatttgatattagttattttcctgggctttataagctcaccctctattttctcccattcaaagaacttagtttgatgctagtggatgaagatggtgtcgttgaggaagaatgtcgttattagtttagtcttattttatttat

SEQ ID NO: 347244 - DNA, 1547 bp, Cannabis indica
agatcattatttctttgtccagccatgtcgtgaaccatattttttagttcgtctagctgagcctgtatggctgggctgacatgctcggtattctgctcaatttggattatgtcagcatctttttgagtggggatttgagtacgggctccgagctgcacgattgttgtaacattctgatcatctactcccctccttctgtttagatcattccttaggtcatgggttgtccataacctttcgaacacagaagcacctggctgccttagcggttgattttcttggttaacggttggaatggcaccattgatctggttggaaccatcaggtatgactcctcctgatgaattaccagacaagttctgctcgactaccgctgggcccacgagtggaactcgtgaccggggattgggcggctgaccatttgcagtttgggaaatgtccagcattggatcctcgtccgtctctcccaggggaatgacattcggcgattaccgacctatagtttggtaggctcttcgtatcagcacggtagcttgccgactatgatcttcgatctctgcatggtgagcccttaatgcctccatctctctgtctctccattcagcgaacatacgcctttgttcgtcgaacgcgagatttactgcagcgcgtagttcttcttgatcattgatgtagggtactattatgaccctacatgagtccgagcgcgccacggagattttgtaattcagtggcgatctcaggaactgtttcaccattccccacgttcgtcggctgtccaggattaataacaggcagaaccctcatgtttcttgggttccatgatgcaggatccatcgtctgtgaatttgctggatcagtcaggcctctacgagtttgcaccatcgtattggcaattggatgttgaataaagagcgattcgtgatccttctctcaatgaaagcaccaaaatgttgacctcgcttttagccaacgacaacgagtctattttataagcgataaatgatttataataacaaatatatgataaagcaataaaaagacacaagaattttacagaggttcagccccgagcagttcggtaatagcctaatcctcgttacttgtattgacttaagatcaaggagaaagattccttttcttatagctcttacaacagtatctctgaatatataattcttagataatatatttagggtatagtcttagctcaactgctttttgaccgatctctcgcccagtgaatatgcatcactatttatagggctagtaagcttggggagtaagagtttcccctctcgttacaatgtgtataaacaggaagatcttgggatcaatgctaaatgcaaggattgtgggattgaggctgaatacaatgatagcgggatcgtgtgtatgccatatccacgtaaattgatccctgagttatagggattgttgctgatgactcacgacgcgaaagttgaactcactaagtgtttggccattctgtgaggattactgaatactttgctctgggcatgccagtgaggcatcctgctcgaact

SEQ ID NO: 347245 - DNA, 645 bp, Cannabis indica
gaataatgaattaaactcacctaagtcagggtggcaattgtgtggatcaagaacattaaagatccgcatttacatctctacttttagaacacatcgagatatgttgaacgtttatgcttctgtagaccactttcgaagtacacatagtacaatggtaattgtcattggtatttacatttgcatcgtccatggtttattctttctttctaagaattgaaagaaagagtggaagaaagaacaaggagtggagagtggaaaataaaaaaaaaaaaagttacaattatgtaagcaaatttaagttaaataaactttttttttttgaaggacaagttaaataaacttaatacaagtgtatataaaaatttttttatttaaaaaagcaaggctattggtggcaaacaaaagcccaatgcctaaagttattcgggtggtagatggcggggctctatgcccaaagttctgtagctcatataagaaggaaaaatgaggaaatgcatgatgtgaattagaaaatttacactaaatactaattttttttcaagctttatatttatactttgaaaagaaaatttttacatctttctctacttaattttttctttttacttttttttttctttctatctttctcttctctctctctct

SEQ ID NO: 347246 - DNA, 884 bp, Cannabis indica
tgttttacaaatgaaggatccttctctattgcatttaatttctaaaatccattgttgtatttaaaggattttttttatcttttcaaattatgcatttaaaatggtatttttgtaaagtaaggcaaaatatcagggcgttacaaaaatattgggcaaaaaattacatagtggccgaccacttaagggaccaatctttagttacaattttaccacttcatttcaaccacttattcttctttcaataataccatgtttatttaataattataattaattattaaataaaattgtaattaatcaatgggcccatggtccctatactagttgagacaaactacttgtaagagtcagttaattgattttattaatcaattataattctaaattagactatgtcttatttatgaatattcacttagttatggcttgattgtgaagaaatgagattttaaggtttatttgttaaataaataattttgacatttatatgattaaaattggaaaatatggcgtttatgaaataatagataaatggttaagaaaaacagaaaaaatataactagtgttgggcccacatcatggcccaccactatgccctatttttgctattattttatcattttttattccatataattcaatcctaaccctaaatgaagtagtataaaaagaaaaaaaatagtctcattatccaactaatgctttcaaacctagttttcattctgtcagacaactagtgttttgagacttcttcttcttctttttcctcttctaattcaaaattcaatagtcttcttcacagacaaattcgagccttagtgattgagtgcatgcccacccatagcaagttagtcctcaatcatagtgtgtaagactgtgaagaa

SEQ ID NO: 347247 - DNA, 613 bp, Cannabis indica
caaagtctgctaaggcctgtcctttgactgttagtcgaggttgaaagattatttcctactgacccaactctactgcccatttaagtaaccgtccaaaagcgtcaggtttttacaatacttggcataatagctggtcggtgtacacccgaacaagatgagcctggaaataaggccttaacttcctttttgctaaaattaggcagtaagtaaccttctctatcaaaggataccatccctcagcttcaacgagtcttttgttgatatagtagactcgatgttggacgttgttctcttctcttatcagcaaggcatttacatcgtattctgtaatagccaagtatattcataattcttctccatccaggggtttggagagtaccagaggccttgcaagttgtctttttattttttgattgcgttctcacattccttcatccattaaaatttcttgttacctcgaaagatgttgaagaaaggaacacacttgtctattgtcttcgaaacaaatctattgagtgcggctatccgactagttaagctttggacttccttagtatttttggcaatttcatatccaggagggcttgtattttctctggattggcttcgatac

SEQ ID NO: 347248 - DNA, 623 bp, Cannabis indica
agaaaagagaagatgaaaaatagagaagagaagaaaagaagaatgctgaaaaccctgagcagtatgtctcagtattgcatttgatctctctactctgtatctaaactctcactttcttctctctgaaattgcttgctgaaatcaactctctgctgctctttatataggtattcaggtcctaaaaaggtggaaattccattcggatttgaatttttgggaaacctcacgccagatattttagatatttttctctctgttgacaaagaggcgggccgcggcatgctaaacccatgccgcggcccgtgtggccatgtggggtactccttcgtgcttcttcaagtaggtgggctgtggcatgctaataccatgtcgcggcctgtgtggctctctgctccaaattctacatgtttttatctttttccgaatttgattctgatattttccaccgggatattttcatgtgatattttatcctttttctgaatccgaatatgatattttccccaagatatttttatgcgatattttatcctttttctattgatattttccaattcttcatctattttaaatctgcaaaattaaaagataaaagcgtaaaaatgctccaaacatgatttaaa

SEQ ID NO: 347249 - DNA, 767 bp, Cannabis indica
ttgtggtatgcctggtaatttacttactctagtgcgagcaacttactttagtaagatgctagagcatttttctaatggccatctatggaagcttctcgacttctagacatagatttcatttatttaataaaaagttttaactataccaggtaagataaaagccatgaaggaattccttacgatcaacattgagtggtctcagatatgcagatatgcttttagtataaattagaccagacacctactgttgagtgggagtaataagttggtaccagattaatccaggaaaggaacattagaagataatcaagtaaattttaagatcaagaagaggaactatatgttagtcgataagggtggtattttaatactcttagactacaccaaatcatgtttctagacttgccttagtgctataaagtctactaatgagatggtgattactctgggggtggagcagtaattttggagaagtgtaaaagccgaattgaaatctctaactctaccaatgagactgaatgttaaagttgcaataaagatacttatttagtctatggaaaaatgtatacaattttggcattgtactaataattaattaactactagtgttacttcctgactatcacagaagtagttgccaaaaagtaaagaatccagtatctatagaggagtagacatatagagaggaatttcacaatatgaaggattttgtgacaaaggaaatgtaatggtggaggaaaggttgtattgaatacaacttgtcaaat

SEQ ID NO: 347250 - DNA, 982 bp, Cannabis indica
ttggcagcaaataattgttccatccgaagacaaggcttgggatcacttggcccaagcacaataccttcaaagtactgcccctcgggaatccggtgaaggagcatcccgaggtaatcaatgtggctggtcacctactgtgctcagggctgagcgtaatacattagttaccttccaggactcccatcttaatttttatacttggaattctattctcgttgaccgtattgctcataagtttgacagttggtacccttgatttcatgtctagatcaactatcacgagttattttatggtatagccgagtaatatggcaccatggaagatagggcaggtcacaaagatgcgagctgggatttaaaaccaattgagccttttgatatattccgaattataggttgtagggattttagcgaatattatggtccttctaccctctcatctagtgatagctcacctcctagtgattttggtaaatcccttaggtggaaatttatactcctccttttttaatcgtcttttataatgattgtaacgcctcatctcgttttgcatacatgggttatgaagacatcctgaaccgtaaggggaagaaaaggtcatccaaccctggagtccccgttgctgccaaggtggttcctcccaagaagtaaaggaaaaccaccgctcaaaagaagatgttaccaccgcaagttcctcctccagattttcttcatgccaatgcccctcaatccgaggtgactctcgttaatgcttctctgagtcaggccattgagaccctgtagattgcagctggagaagctggctctgagtttgcccaggcatacagggacgtcgcttgttggcgcaaacttaaaactctccttcccccagattgggattttctcaatcttaggagtccagaggagatgctttcaaggaccttgcactgtcacttcatggtatgtcagctttgttaatataattatactatctttttatacc

SEQ ID NO: 347251 - DNA, 578 bp, Cannabis indica
ttattaatcttccagaagcatttttgataaaacttgtctcaggggttgatcaattaacaccttaatcagatgtgcctggaagtaaggccatagttcgcgagatgcgtggattaggcataggcaagttttttaagagggggatacgaccttgattctgcccccagtaacttcttacgaacatagtaaacaggttgctggtgctttccctcttctcgcactattattgcactaatcacatttttcgagacagccaagtagaggagtaatgtctctccagttattggttttgccaaaactggaggtgttgacaaatgtctttttattcttttaaaggcctcctcacattcttctgtccactcgaatttttgtttcatcgcaatacattgaaaaatggtagacacttatcaattgacttcaaaatgaatttgttaagtgctaccattcttcctgttaacgcctgaacttcctttggtttagttggtgatggaatatctatcaaagcctcgatcttctcaaaatttgcttcaatgcccctcgagttgactatgaatcccagaaattttcttgaggaatctcca

SEQ ID NO: 347252 - DNA, 1027 bp, Cannabis indica
tctactaatagtatgtttaaaaaataagattgctcttaataaacgtattgctgatcttcaaaatcgttcctttagaagagagtcatgtggctgagattaagattttacaatctcagttggagctttcttgtacaaggaggaagtgtattggagacagcgtgctcgtgttaactggctaaatgctggggacaaaaatactaagtttttccatagatttgcttctaaaaggaaaaaaactaatactattaaatttcttaagactgatcatgagaggttgtaaatagcttagatggtattagtagtattgtttcttcatattttgccaatcttttccaaacccaaggctgtgattctggttctgttgatcagattctttctgtgttaggtccccctttggataattttgagattgactatttaggggagccttttcgggctgaagaggtaaagaaagctgttttccaactttctggggacaaagcacctggtttagatggcctgaatgctttcttttatcagaagaactggtctactctaggccatgatcttgttaaggctgtgttggattgtcttaataatgataaagatttttcttatattaatcaaactttaataactcttatccctaagaaacagcatgctcatttcattcaagattttaggcctatcagtctttgtaatactctttataaaattatttctaaggttttagctaatcgtttaaaagttattttaagtaaaattgtctctcctgctcagagtgcttttgtttctggtagggttatttttgataatatacttctggctcaggaagttgtacatgctattaacaataggaaaaaaggaaaattaggttgggctgctcttaaacttgatatggccaaggccttcgatagggttgaatggcattttttacacagtcttatgtcccattacaattttccccaacgatttgtgtctcttattatgaggtgtatttctactactcaaatttcttttttaattaatggtagtgttactggtagtg

SEQ ID NO: 347253 - DNA, 782 bp, Cannabis indica
acctcatacattcgctcggacgaagtcctcagatcgagcattgagcaatcctcacagcaggccaacacttagcaaatttcagctttcgcatcgtgagtcatcaaggaaatccctataactttgggatcagattacaaagctatggcaagctgtccaaatcccacgattagtgtattctgtatttactatgcaatctttctgcttgtatcaatttgtaactagaagggaaatacttcctctccaagcttatagccctaaaaatagtgattcaaggggctactgttgtaagagctctaagaaaaggaaccattttccttgttcttaagtcaatacaaataacgaggattaggctattatcgaactgctcggggctgaacctctataaaattcttatgtctttatttgctttattatatttcattcatatcaaactacttgtcgcttacaaaattagactcattgtcgttgactaaaagcgaggtcaacaaatgtaatattattaataattatcttatcatttcttagccattaagaagtctatacttctagggcgctaagtcaaataccacatactcctaaatactccaataactatattgtcaacttatcacaatatttccaccaattctatcaattaaacccattatgacatttctgtctctcgatcaagtctccaaggttgccaaacctaaaaatatttttattccacatagagctcatattacattcacatatatatatctccataatttataaattatgccttatttactcacttatag

SEQ ID NO: 347254 - DNA, 497 bp, Cannabis indica
ctaggggtaaaattttcaaaaaccataaccccgcgcaatcctggtattttattttctcaaaaatatttcccactaaaaaataaggttctaaacttacccatgtgatcgaactagccattcatcccattttccgttgtcgccgagcaaaaattacaaaaataacatatttcatatataagtcaaataatactcctagattttaattaaatcttcagaattgagaaattataactctaatgcccatttctaacagtggggtccacaaataattaaattcataaataattataaatacaacataaattagtgctaattgccttcactaatgccaattactaaaagcggtcattacaattatcccctgttaaaaggatttcgtcctcgaaatctaacctgaattgctttggatgttgagtcttcatatcagactttaactcccaaggtggattcctccaccttactgttcctcagcagcaccttaaccaaagctatggtct

SEQ ID NO: 347255 - DNA, 577 bp, Cannabis indica
aattagaatattttttaaattaataattaagtaaatttttctaggaaattagttattaagatattctttaaaaatatatttaagttgaaaagttgttaattttagatcaatttaaattgggatttttttttaaattccggtgattagttcaagatacttcatttgttatttaatgaaattttttgaaaattatataagttgcaaatgtagttattttggaacaacttaaattagatacttcaggtatttattttattatattttatttaattttaaaattatacatataaatatttttgaaattaatcttgaaaattaattttagaccaacttaaattaagtaatttttattattaaaatatatagattaaaataaatgattaactaaaaatatattattttaaataatgaactttaatcaaaaggacattcgatctccgttgttggttctacatagttcttattttaatttgatcatccctaatagatgtttattcattagcaatttaatgccatagaatcttgaaaaataagtattattgtatgtcttttattcttagtaacgatcaccccaata

SEQ ID NO: 347256 - DNA, 798 bp, Cannabis indica
ggagcctccaaaggaaagaaggtaatgtcttcatcttaaaaggccaaaagtctcaaagaaaatcccccttctatttctttgtcggattctaaacatgaagaagagaccgaagaggatcaagaattagagggtgtttctgattcaagtgaagagtttgtgcccaaagaacaatcctctgctgatgattctgggtctaaaagtgaagtgcctgaacctgaacctgtcagtgtagaacccgttgctgtccctgctgcatttccaaagaaggataaaggaaaacaacccattgtttctccaagccctattcttcctcagaaaagaaagaggccctatggtattactcttgaaaatttcaagccccattctttttactattgattcaatgataatgctaaagacatgaaattttatgagaatcgaattttactgttgagaaaaatttcaatgttactgctcataagccatttggggtttataacatgttgaaagaaagacaatgggttgatactttgattagttttgatcgttatgtggatcgaattgtgaaggagttttatactaacatcactaatgagtgcctcgatgaggactcttttatgttttgcaaagtctttgtgagtggacactggcattcatttactgtgaaggatgtggctgatgctctcaatctgcctgtgggaattgaggcaaccgatgtggaatttgatcgtcaaaaagagtttgggtatctcactagagataatgatgtggaactctccgacacaatgcatatgtctcaactcacctatcgacatgatg

SEQ ID NO: 347257 - DNA, 507 bp, Cannabis indica
tttattttttttcttatttttcaaatgtaacgactaaaaaccgtcgctaaaaaaaattcaaaaacataaccagattataaggcacaatttaaaactgtcgggaacctcacattagcgacggttttgaaccgtcacctattttgcccaatttacgacggccaaataggcgacgattgtaaaaaccgacgaaaatactttaaacgtctatttaaaaatgtcgggaaaacccatgtttatagtagtgcgtcgaaattgcccaccctatctataatgctagatatgtctatgagacaaaggacacattcctttcttagataaagcatttaattctaaatgtagaaaatgtacaaaattatttcttaattatcatatatgattaatgcatataattattgtactatattgatgttataatttatacattacaaaaaattgtaacttttagtgataagtttttagtcacaacttaaattttttgtgattacatgtgacttttagtcacaacaa

SEQ ID NO: 347258 - DNA, 582 bp, Cannabis indica
ttatgccaattacaaatttaaaactttggaaacttaattatatcactgtttaccctaaataaaataaataaaaatgacttgcaataatatattttaattatttacttgcttacaatgactattcatccccaaggagaatcctcattgtctcgtttaaattccaactatacgtaaagaatgaatttctttttggattcttttagtggaatattatacagtacgtattacgtgctggattttaaatattttagtttatctcttaattaatttaatttgctcatatatatatacgctttacgaatttttgtttgttcttaattatcctgatcattatacaattattggttaatattcaatccacaaagaaaatttgatctaatataaaatggtgtctcagtactataaataaatttgaatgagatcatcacgtatatatttatatctatttatatatataatatgtatgctttattccaattttaagttcagatatatattgtgttatttattattatttttttgaaatggttgtgttatttattatgggaaacttacaaaaatattagaatttggattaacttt

SEQ ID NO: 347259 - DNA, 609 bp, Cannabis indica
gtaaatattattttgaaccctctattttacaaaaattaccaattagaccctgtgtttgttaaatgacaaaatggaccccgtattttctaaaatagtacaaataggactctgaattgattttttgtcaaaataaagtttaattataatccgatctaaaagtgctatatgacaaaactgtttacatttttttgtatctgttcgtattaagtattgtcttcaagttggttgtaataaaaaaaaagttatcaaaaattaagctcagagtcctatttttactattttagaaaatacagggtccattttatcatttaacaaaacacaaggtccaatctgtaacttttgcaaaacacagagtccagaatggtatttacccaaaaaaaaataagtgaggaaaaaaaaagtaatataggatttgtattttcaatgttttttttttcaagaaatttaagttcattctattattagaggacacaaatctatttttacttctaaaacttatatatatatatatatatatatatattagttttcttttttcttttacttagttattttcttttttcctctacttaccaactaatacaatacaatactattgtctagtattag

SEQ ID NO: 347260 - DNA, 1004 bp, Cannabis indica
ttttttaaaaaaaaaaaacagattaaagttaaaaattaatcattttaattaattttagatcaccttaaatcatgtaaatttttcattaatgattaattaaaataaatagactaaaatatattatattttcattagaaaatgaagtaattagttattgaaaaatctacatagttattttctgtatgcttgaattatttttctagctatatttaattaaatattctagctatatttaattaaataaaaaattaatatttaagttgattttattcattatacttaaatgtttgataattttcttagaaatttaattaaataggaaaattatatttgtgttgaaaataaatttattatttaattacataaattaaaggctaattagtaatttttccccccgaactttgacatgtacaaaatcgtaccccctgaacttttttggccggtaaaaattccccctgaactattgagattgtttagtaaaaaaaaatctaacatagatgaaaagtcaaggggcataatttagtacatatcaaagtttgaggggcatgatttggtagatatcaaagtctagggagcatggtttagtacataaacaatcactcaaacagtaaaattgaatgaaattagacaaaagtccttaaatttaacaatctcaatagttcggggggaatttttaacggccaaaaaagttcaaggggcacgatttagtacatctcaatgttcggggggaaaattactaattagcctaaattaaataacttttttcaggatttattttattttattttaaccaatttcgaaaatgtgtttatttttaaatacattggatttcgaacttttctatatatatttatagaaaattgaatttgagttgaaaattaattttaattaattttggatcaacttaaattgaataattttcataatatttattgagaattattactaagatgtaaaataattttatttatttttcagatctatctaagtataattttataata

SEQ ID NO: 347261 - DNA, 1070 bp, Cannabis indica
gtaaaataaattccaacatttcaccccacctaataaaggctctcaaagacaataaaaaggaaactagaacaatgaaaaaaaacaatgggatttcgccccctattgaagactctcaaagacagaaaaaaggaaagttgccatttgccatgaaaaacttgatcagcttaatttgaatctaaaatgattctactttgatgagcaccgtaaatctttgttctctttccgtgttgaccacggtctcctcttgttttaaaattttgttgactaagttgctgagttcttctttgaatctcttggctcgcgccctgtcaacagggcaacaaatttgacatgtttctttggccttagtgttctcatcacataagccctcctccatggggttcccaaactaacaaacctcgtaaagaacaattaggtacacacaacctatgctccctaaacaagaaaccctcatgcctataaaacttaccctcaccatatttttcacaagcaccataaatctccccaaaatcatggtaaagagaataaagttccttaatgtgttcaaaacctagtaacttagcatcaagagtagagattaaggcatacatgcgagaaagggcatcaacaaccacattctccttaccttgtttatttcgaatgacatatggaaatatcttaatgtacttaacccatcgtataggtcttctgttgagcttgtgttgccccttcaaatgtttaagggattcgtgatctgtgtgaatcataaattctttgggccacaaatagtgtagtcatgtttctaaagctcgcaccagtgcatacaactctttatcataagcgtggtaattaagtgcagccccacttagcttctcgctaaagtatgcaacgggcctcccttcctacataagaacaatgccaatacctataccagaagtatcacattaaatttcaaatgtgctagaaaaattaggtaaagcgaatactaaagcgtgagtaagcttgtgtttaactagttgaaatgcctcctcttacgattcaccccattcaaaagtaacattctttttgataacttctgtaagcggtgctgc

SEQ ID NO: 347262 - DNA, 1099 bp, Cannabis indica
cctgtgctagtggtgggtaactagtggttcatgatgccgcatagagattccgtgtttgaacggattgtgaagttacaacctccgacttttcttggaggtactgacttaatgaaagctaagcagtggatgagtacaatcacccgtatccttgaccatatcggggtgatgggaacagagagagtgaattgtgcagctttcatgtttcaagatcatgcctgtgtctggtgggatattgtgggatagactcgtgatgtcagtgtgatgacttaggatgagttcaagagtctgtttgaggaaaaattctataacatcgttgtaagtacttcacatatggaagattttgtgaaactaactaaggggaaatgtctgtggctgaatacaatctggaatttgatcgactgtccaagtttactagtgatctggtgcccacagatttcaccaggaaacagaagtatgtgagattactgaatgccacaaccagtcgggacttgaaactaccactactcatgacactttgtacaagaaagtgctagagctagccttaattgctgaggaggctgagcaacatgtaacaaaagagtagacagcaaaggatgccgccacggcatcaaaccctccttctagtggtaatatcagtaaggggactgacagtggtaaccctaatcataaacggaaggctgatgcttctgaaacatgagggggtaatagaatgtttttgggaaatagaggtggccgtcagggacgcggatcttcattctgatgttatcctcagtgtccgaaatgcaagaaacaccatcagggtgaatgtcgggccaagacttgtttccagtatggcatggtgggccacttcattagagattgtcctcaggccaagaaagaggagcctaagaagaatgctactcagaactcgggatgaatttttaccatgactcaggttgacgctgatgatagtccgtcagtggtgacatgtcagttatctacaaatggtcgttccaatactgtattgtttctttcgggagctactcactcttatgtgtcgaatagagtaattgaaagtttccataatccatgtgatatttatgcttcggggttcggtacc

SEQ ID NO: 347263 - DNA, 926 bp, Cannabis indica
tttaaatactcagatccctcattaattgggatcacgacacgtggcagttggaatacctagagtcgcccaatccaacggccagagatggccacgcctacacagaaaccgaagagtttcgtgacgtggcaccataaatgcaataaaagtaatgattatagccgtcattttttgaaaaccctcgaggggacaaccaaaggtcacctcctcgtgacaacctttcacttgtctctcgagtaatagtttccctttgtgcccgcacctgtcacatcgaaaaactaggggcatgtgttatagtgagatttctctcacctagaaactcgagaccagaaccctatttagaggacacgtatactcagatttcccacagaaagctgagatgtccctaacggactcctcgaagttttaaacctcgcttaagatagaattagcgagaggtaacgagcatgacttaagtctaatctcgtctgagacaagagagtagctcgcatatatcaaactatatgcgagtatcctcttcgtgtccgtgtataacccaggtgaacgactctctgtaaatgcgagttggtcttaagaaaccctgcagcctttataatgcaatatagactcgcatgtctaggttcatcagctcgacatgggaggtctataagaagcgactacctaaggacgcagacatcccaaacgtaataataaccctgcgagtttaacatcagaacatgaacagtcaactcgcagatacggaagacgcatacgttgatgaacttagcaactgtcattcatttattaatgttaacgttgcttgatttaattcaatgtgtaaataacggattaacaatgaatgtaatcattgtataactgattggacacctgctttgtatataaaggggtgatccaccgtgaaatggcacctacgaatctcttgctacagt

SEQ ID NO: 347264 - DNA, 785 bp, Cannabis indica
ttttaattctgggtaattagccattagttaaaaccaaaaaaaaaaaccttaatcctattatttttatttccacgtcacaataatttatgacgtgtcgagctgctgcttacttggattgagccacgtaggcacataacggggtcaggggaacggaagtgtgtttttgataacagaatagtggttctgggggtttacccgcagaaatttgggttgtgggggtttggcgaaaccaaaaccaaagtattgaggttttgccaccattttccctatatagaaatttcataattttgcatgttttgtgcccggcaatattggaacacggtgtttggctattagaatcacatcctagtatttttagtataccggggtagtataattagacattgggaatgtcgggaatagtcagcattttagaatttcccaaaatacccctaagtgaatttatgattgtttaagtatgggcaagggcattttggtcttttggcccattttgtattttgtcgttttgtgaatttaatgaagtattataatcaaattttttttaagttatgttggctgatattttaataaaacaaaagccttttattcatttatttacaaaaataagaaaacttggaaaaaggaagcaactctctctcgttcaactctctctctctctctctcgaaattccgtagggttgcgtagggttggtaactttttcccagtaattcaagttaattttagctagttgttagtgatctcaaaccaaggtatagtcttttaaacttctactcttgttttcttg

SEQ ID NO: 347265 - DNA, 636 bp, Cannabis indica
tattttttaattttattttcattatatattttagctgtataattaattttttacataaatatttaaaaaggactaaaacgtaaaataattctaaatttaaaaactaagttagtaaatattcgttttttaaaaaaattaaaaaaaaaaaaaaaggaaatataataaattgactaataaaaatataaaaatatatttacacatattactttttaaaatatatatataataattaattaagttatccatgaaggaggctttgagttgggtcaaatcctgttggggagaagataagacttttgaggacgtttgacctacagcggtgattttggagtcggattgtcttgtgttgattaatgctatcaatagcaagagccacattctttctcctcttggtcttattatttcagattgtattaatcttatacggtccttttctaattttcatatttcagttcagtttgttaaacgatctgggaaccaagcggctaactggttagctcgttcttctagttcatgtcctgatcgtatttccagtaccgggtctgtcccttctggtttggaagctattttgttagctgatttgctttaaataaaagttgcaatctttgtttcaaaaaagaaatattgcatattatt

SEQ ID NO: 347266 - DNA, 911 bp, Cannabis indica
tcccaggaagcgtgcgagtgaggacaaagcacgctggaaacactcatgttggtctgtagggctagtcgttagtccatgaagcagtcggggtgacgtactcgtgtataagagccattattccgtgggtgtaaggatccaatggaggcttgaagcggggacgttacagtatggtaaggtgcatgaggttccatctcaaaactaattggcaatgagacaagtagcacatgcatcttatatatgatatttagtttcaacatgttatcaatgtgggactctctaacatttctcctcaagatggtggctattttttttgttcaccaatcgtacactactcgatcataaatggctcttttggctcacaacgactctttttggctctgataccatattagaatgtgaagtgtatggttagtagaataggtgagtgtatggtaaggtgcatgaggttccatatcaaaactaattgacaatgagaggaatagctcatgcatcttatatgcggtatttagttttaacacattatcattatgagactctctaacaggacaatattataattttataaataaatactctccatcattccatcgcttcattccatcaaacaattcaaaatgattgctactctcctctccctccatcttatcctacattctccatcctccttattttccatctttcctcacaaacaaacatcattctacaacaagacaattaatatatataaccaatatattttataaaaaaagtatcggaaaataatttattttttaaataaagatatttatggttggacttttggagaaatttttttaggaagtcactcatcaattaatttaagagcttttttcataaatgtacaacaaaaataaaataattacaaaaaatgtgcaaaaaaaaattattttaaa

SEQ ID NO: 347267 - DNA, 1440 bp, Cannabis indica
attgcaaaatttacctattacaaattatttatttgacctattgacaattcaaccattggttaaaatcagatcattgaatctgttaacaagttaaccatggaaatttcgaacaaacaataataggttttataaaacttgttttaataataaacaatataaaacacacacatgcaacaaattggatagttggatataggatttatttaatctcaattaattaaacaattaaaaaaaattattattttcgaaaaaaaattaaaaaatttaaattgaattattaatttcaaaattaaacctataaatttgaaaaattaggttttcaacaaacctaaatatctattaaaaaaatgctaacaacttttcaaatttaatgttattttaaaaaatagaataaaatatccaataaaataaaatgataaaaaaagtatcatttatctaattttataatttaatttaaataaaataacaaaattttgaaagttagcaaaatatcttattacaatttaaaatttcttgattaaaataatcttattttaaattttaaataaggtcatttcataaaaattaattaaataattttaaaaataaaatatctgaccttaaatttaaaaataagataaaataatcaaattttaaaaagaagataacaaactaagcgaaaagatagattttaacctattttcaaggttaaaatatcactaatatcttaaattaattaaaaagaatattaattagtttaattctgataattagatttgaaatatgaaaaataaaaatctaaatacaaaactacacaaaaaattcgaaattaattccatgaaaaagtgaaaaaatggaaaaatggaaaaaaaaaattgtatttggtgcggatgatatgcattacataccatccgcgcgcgcaagatgggatgctgggcatgatttcacgcacacggatgctgccagcagcattctgcgcgcatagatggggttcagacagcacctgggcgtgcaacttcggacaggccgtgtttgaacacgggtgacacccgtgtgtcatgtgcatccgcacgcgcatggggtgtgtaccacccctaagatttcttaaatttttaaaaaatcataactcattcaaataaaatcaaaattaagttttgtaaaagtgaattgcttaattttttccgtactatccaataaaaataattccagaacgaaaatcaaattattttacgtaaattttttgcaaacataaatcaatcaccaataaacaaatagatcaacatgaatcacatccaaatcacacatacatcgttttaaatccatatggctctgagaccagttgttggattatattttaccaggatctagatttactaacaagtatgtttttaacttcctaatatgaatttctaaaacaatgaaaataaacacataaaaggtatgagaaaccttacaatggtt

SEQ ID NO: 347268 - DNA, 749 bp, Cannabis indica
gtgtttggagaatttttatgctttttatcttttatttttgcatatttaaaataaaagaagattagaaaaatatcagaggaaaaagatatgaaaagaaagattaaaatatctcacaaaaagatgatatttgaaatagaaaaaattgtgtaagaaaataaagctgaaacttcatgcctaaattcgactatcttctgattagattttggaaaaagtcaaaacataaacattctagatctctcttttatctttccaaaacatcttgaattgtccaattccaagcaatatcgagagagttatgaccaaaatattatcagtgaacgcagcagaaaaaatcaccgttgaaacgtgaaactccaacacgggccgcgacatgataaagctgtgccgcgccccccccccccctaaatagcacaaaatcatatttttttgtctcacgtgagttttggtggtttcctagttcgaataggcatttaacatgtgcgtttttctatctttttagtccctgaaagcctatataaagggtgaacttgagtttctttcagtcaagcaatttcagagagaaataaacagagaatacagatgcgaattggagagatcaactgcaatattggaggcatttttcagaggtttttcaacattcttttcttctctattttcatctcttttctaaagttaacatgtgtgattgtgctctcataaacatgagtatctaaacatttaatagggttagatggatgtgtttgatattg

SEQ ID NO: 347269 - DNA, 610 bp, Cannabis indica
atatatattttttctttttttttcatatagaaccaatcctttttctttattattatatatttttatataataaaattaaaataaaaaaaaaaaagttcaacaatgacatttaaaaataaatataaagttatttataaattagtgaaggtatttagttaatgacataagtgtaataaaatgataatattatgactaactattaagtaaaaaaggacattatttaaagatgaataagataaaatattttaatcactcctaatttttaaatatgttgcattcaaaactacagtattacaattgaattgcccaattagaacaaactaagaatttttttaaattccccaccttagaaaaatcctataaacatatatcttttcttgagaatgatgagatcacatgggttgttgtctaaatttaaaaaaataataataaaaaacacaaatgaaaacatgtattaaaagatgagtcaacttttcattataaaatttaaataaaaaataaaaattgtcacaaaattaacatgctcaatcaaatcaacaaataaagtgtctgtctttactcatttatttaaaataaatatatatctttatatattaaaagtgtctatcta

SEQ ID NO: 347270 - DNA, 538 bp, Cannabis indica
ctttgctccaagttggtagaagaatgctggaacaataatcatcatatttctcttgccgaaagaatcaaagcttgcggcattgctttggattcttggggtcaaactcttacaggtaatttcaaaacccgtatttctaaaagcaagcagaatttggctcgtttgaaaagtagtactgatgctactgatgtgcagaatttcattactgagcaaactaattattttgaaatcctggcccaacaagaactttattggaagcagcggtcaaaacaacactggctacatggaggagataaaaatagcaaatattttcatgcttatgcaagcactcgaaaatgcaataatcaaattaatgttttgcaagatagtcgtggggttctgaaagattgggattcgggtcttgaaactgtcatttctgattattttctgatctctacactgctaaagtttcccagtatcattcagttactaatggggttaattgctcggttgacattgctcaaaataacgatcttctacagcctatccaagatgaggaagt

SEQ ID NO: 347271 - DNA, 661 bp, Cannabis indica
ccagcgatgaaagctcatattcggcctcgttgttggatgctttaaatccaaacttgactgtagcgtgcaggtgttgccccccaggtgtgacaagggcaattcctgtgccggacagttgatctatagtcgacccgtccacatgtagtttccaagtcggcttgtcttcactattacttgggtgtggtatttgtactggctcgaggttgccttcggatatgctttcttccttgcctgtgcattctaccacaaagtctgcgaaggcctggcctttgattgctgttcggggatggaaagtaatttcatacttaccaagttctactgcccacttgagtaaccgtgcagaggcgtccggctttttcaatttttggcgtaacggttggtcagtgtacacccaaataggatgagattgaaaatagggccttaactttcttattgctagaatcaagcagtaggtgagtttctctatcaatgggtattcagcctcaatgagtcttttactaatgtaataggccagatgttgtatgttgttttcctctctgatcagtataacactcacggtatgctccgttatagctaagtatatcttaagttcttctccgtctacaggtttcgagagtacaggaggttttgcgagttgcgtttttagctcttgaaaagcttt

SEQ ID NO: 347272 - DNA, 3461 bp, Cannabis indica
cttggtactacaacgagttgcatttttttcgtaatacttacctagtttttatgctcctgattccagaacttcgatcccctgatatggtccttcctagttcggtctgagcacacctaccgtgctatctttggtgttcaagaatacccttatgaggaccatatctcccacaattcaaagcatttctgtgctttcactttcttgttaaagtaccgagctaccttctattgatgggctaccaatttcaggcttgctgcggttcgcttttcttcgatttcatcgagtgattctacgaggagcatgtgattaacttcttggtcatatgtcaatcttctttgggatggaggctcaagttctagagccagcgtagcttcataaccatatgccatggaaaatggagtctgtccagttgctgttttctcagttgtgtggtacgaccataatacttcagggagttcctctagtcaatttcctatagcatcttcaagtcgtttctttagagtatctttgagtgtcttattgactgcttcgacttgaccatttgcttggggatgtgccactgcagagaaacttttaatgatcttatggtttgcacagaaatcaatgaaggattgactgtgaaattgttttccattgtctgagactatcttgtacggtagtccgaaccgacaaattatattttttataatgaagtcttgccctttcttggatgtgatggttgccaatggctcggcttctgtccatttagtgaagtaatgaactacaaccactacttgctgtactccacctttgcccttgggcaattgtccgatcaggtcgattccccaaacggcgaaaggccaaggactttgcatctaagtcagttcgttgggcggtgcacgaggtatctttgaatatctctggcatttatcacatttcttaacataggccttggaatcttcaatcatgatcgaccaaaaataaccttgccttagaattttcttggataaactctgcccagctgggtggttgccgcaaaatcaatcatgtacttcggacaacagtcgtgaggcttcttcttgtgtaacacacctaagtagtggcatatagaatccccttctatacatgattccatctacgatgatgtaccgtacaacctttcttctgattttctgagcttcgttcctgttatctgggagttccccagtgttgaggtaggctgctattggcgtcatccagtttggagatgtgtcaatcatttcaatctcctctgtgccagtgatactaggtttttcaaggaattggatggggattagattagccttatcatttatgttgctgctcgcgagtcgggctaatgcaacagtagttgtgttttcttctcctgggatttgcttgagggcatagcttttgaattgtgtgagtaaatcatgtattttgcttaggtaggctatcatcttttctcctcaagctttgtaatccccaaatacatgatttactactaactgcgagtcactacagattgcaatgtgatcgacatgcaattcccgagcaagttttaggccggcaataagggcttcttattcagcttcattgtttgatgccttaaacccgaacttcacttccccgtgtagatgttgccccccaggaatgacaagggcaatccctgcactggacacttgatccgtggctgacccatctacatttaatttccatgttggttcatctttactattgctcggctgaggttcttgtactggctccgagttatttttgaagtgttttcttctttacccgtacactcaactacaaaatttgctaaggcctgccccttaatcgatttttggggctgaaacatgatttcatactggcccaactccactgcccatttgagcaactatccagaggcatcaagttcttataaaacttggtgcaatggttgggcagtgtacacccaaacaagatgagcctaaaagtaaggccttagctttctagttgccaagattagccaataagtgagcttttctatcaacgggtatcgcccctcagctataatgagtcttttgctgttgtagtaaaccgaatgtttgatattgttctcttctatgatcagtacggtacttacggcatgttctatgacagccaggaatattcctaattcttctctgtccagaggttttgagagtacagggggttttacgagttgcattttaagctcttgaaaggaattctcccattcctccgtccattcaaattgtttgtttcctcagaggatgttgaagaatggaacacacatgttcgttaactttgagacaaatctactgagtgcggcaatttgacgaattaaaatttgaacttccttggtatttgtaggcgatttcatatccaggagggcttgaattttctctagattttcttcaatacgtcgggcattaatgataaagccaagaaacttacctgagctaattctaaaggagaactttaaggtattgagtttcatgtgtatttcttgaggactttgaagcactcatccaggtcatctatatgcccccagccttcctggatttgacgagcatgtcatccacatatactttcatatttcgttcgatctagtctttgaacattttattttccaatctttggtatgtagctccggcgttcttgagaccaaatggcatgaccttataatagtatagacccatatctgttcataaacttgtatgttcatggtccggtggaagcattttgatttgattgtaccctgaataggggtccacgaagctcaatatctcgtgtcctgctcttgcgtcaacaagttgatctattcttggaagtagaaaacagtctttggggcatgccttattgaggtcagtgaagtcaatacatactcacctttttttgttcagcttgggcactagtacggggttagctacccaagccgggtagaaagcctgaattatgaaattattgttgcgtagcttttctacttcttcttttagggttaaggctcgttctttatccaaaagtcttcttttttcttgaacgggccagaagtttggatcgatgttcagggcatgtgaaattatagaaggatcaattccgaccatgtcctcatgcgaccaggcaaaaatttctaggtttgctcttagaaattttatcagagctgactttacttcaagcaacaaaccttttccaattttgggtttcctggtcggaacatttgggtcaatttcaatttcttctaatccttccaccgacccaacatttgtatttggttccccaagtcagggatccacatcttcatccctgcctttggcggttccctatttggcaatgctcttccccttgtctgaattctgacaagaggattcttcctttttagcctctgttagggcaaggttgcaacattctcatgcaactggttgattccctcttaggcaccctaccccgttctttgttgggaacttgacgcacgaatgaaatat

SEQ ID NO: 347273 - DNA, 834 bp, Cannabis indica
cgtcagcaagcgcatgataggggcggagacacggtaccccatcatcaaaaaattagttttctgccacctaatggcctcaagaaaattaaggtcgtacttccaagcgcacccaatcaaggtgttgaccaatcacccactccggcaagtcctgcaaaagccagaggcgtccagaaggctcctcaaatgggcaatggagttaagtcaattcgacttacactacataccccgcatctccataaagggacaagcattggcggacttcatcaccaaatgtaatgaagccgaggcaaccgcgaacgcaatggtacaatcggtccccacatggagagtattcgtggacagagcctccaacgaaaacggatcaagagcgggggttgcaatgatatccccgaccggacttcgactccaggcagccctacggttcgacttctcagcttcaaacaacgaagccgaatatgaagccttaatagcaggactgagattagaaaaggccgtaggggccagaagagtagaagtctacagtgactcccaactgctcgtacaccagatatcgggagagtataaaacgcgcggcgaacgaatggccgcatatgtaacaatagtccgggaacttctccaccagttcacagactacaaagtagaaagaattccccgagaaaagaacgctcacgcggactacctggctaagtaagcttaagagagtgaaattgaaggactggaggtagtacccgtggaacgcttggcagagccaagcatcaaaataaaagaggccatagtaacggttgggcaagaacccaactggatggtccccatcatagaatacataacaaaagg

SEQ ID NO: 347274 - DNA, 1614 bp, Cannabis indica
atcagttgtatcgattgacggttttttcttggtttggatcaattggacaatcttcaaccctgagatccttcatttccaattcgaaccgagatttgaagtcttggggaatgttagggaaagataggtgtttggtgtattccagagctacaggttttgcgggataaatttctgagcctggatgggacatctccgtaggagaatgaaaatccaatttttggatgaaattcattttatacttagaacccattaacggtaaggccaaaggttgggaaatctaatagtttggagtgaagaagaaagggaaggggcagttcattaatgctaataatgaacctcgaaatcgtgaagctgttaagtttaagagcatacgtggtcttgaagaaagggattatgacaaatgtacgctctgtgatcatttaaaaagccatttttattaaaaagaatttttaaatgggcaattgttaaacctgcatttcagctaccatttcaatgaaagacacgtgtcaaattggaaagaatatgaatcaatgcgtgtaacggtaattatatttaaaaatgcaataactcataaatgcaaaagtgacagagtatatttacaacttgttgactgtaaggtcttacgcgagataaagatatacaatctgttgcctcgtgcattaacgaaaaactatacgacattgaatgtgcaaagtgagatatcaacctcgttacgcatgagtagacgtaagcgagatataatgactgtgaagacacttagtgtataatatacaatatataaactaagtataacaattgggtaaacccaagcaactaatagcgaggcgccaatctctctaggaaggcacgctcctggtactttcaccaattagcttcagacatcttttaatgagattatagttttaacgagtcagttctcttgagcagaagctgacattcaaatgatgttaactgctaaagtaccccttgtcactaagaactgtgattgtcaaaatgaagcgttatatcttcaagcgaagaagcgacgaggtttacattatcaacctcgaagagataggggagaagctccagcttgccatcaaggtcattgcatctgagttcctatcgagacatcccagaacaatatgatttataacgtgtttactacacgattaccttgacccagtaaaagcagattaatcacagttgtgggatattcaaatattaactgcatttattttacgtggtatgtaattaaaccccacgattttaggggataattgttgtaaagatatcagtcatctctgtatttaactgcgtgactatgtaattataaatagaggcaagatagactgaaaaagggacaaaaaaatcataagagaaaaggtccgaaaacagtattaaaaatctaataaggtggactcgtgaactatgcagaattttaactgcaaaatcacttgaaagacctttgtgttcatactttttctttattgtttttatttttctgtgcatgtttatcatcgtttaggctcatatctggttaatgaaaatctgcgttaacaataactaattttgaattcaaaaatattattgtcagaatatctataaaaatatctatgttaatttcaaatttaataa

SEQ ID NO: 347275 - DNA, 578 bp, Cannabis indica
ctctctctctctctcatgaacttcgttgtctctcctgatgttacaccctccttctctgttcatctcatcctctattaggcttttttttttcaggttttattgatgttcaatgtgtattttttatttttttgttatacaaaatatgctcagatctgagtttaaggtggtgtggtggagtttttttttaggtgtgtggatctatgtgatagttattgtgtaatattgtttaaatcatattatttttgttgattaaatgagtttaaaagtttatgtaatttgattttgtgggtaaattgattctatattagtagtttgaaaaaattatgatattatgatggggattaattgtcctattttaaatttaagaaggtaattaattatatttttcaatttttataattttttttttaataattattatttatttgaataatatctaaatatttatttaaattaatatggatagaccaataaaaatatgacatgtgttactttagtgaacacacttaacatttaacagaataatagtaacggaaatggatggaaactaacatttggtatttaatccgctaaaaaaa

SEQ ID NO: 347276 - DNA, 531 bp, Cannabis indica
tgagcccttaacgtttccatctcattgtccgtccattctgcaaacatgcgcctctgctcttcaaatgcgagttttaccgcagcacagagttcctcctaatcatgatgtagggtgttggtatgaccctgcatgagtccatgagcaggacggaggttctagatctcagtgtcatctccaatggttgtttgaacattggtagcaggcggaacggctgtgttatgaatgccctggtcggctgctgaactggtattcctcgtctcttgcacaataggcgcgatttgatccataggagtcatcacaccgtgacttatggttaatggttgttcgggacttacggctggtggaacccttgtgttccctgggttctgcaatgcaggatccaccgctcgtggatttgctggatcaaccatgcccctacgagtctgtaccaccatcgtacttgtgattaaatttggattaaagagcaatccttgattctgctctcaatgaaagcaccaaaatgttaacctcgattctagccaacgacagtga

SEQ ID NO: 347277 - DNA, 789 bp, Cannabis indica
caagtgttacaaattcaacataccaaaaaatctaataaaaatataaaatatatattatatttttcaatattgtttattatataaataaatttttaatatatataaatgtaattagattagatcttttttaattgatttttgagattcacattcaataactgatccaatccaattagaatccaatttttagcatctaatccaatccaattgtaattggatatccaactttttgtaattagattagattgaatagctttggtttaattagattggattagatgatgcccacccatatggtacttgtatagattctttgcaaaaaaaaaaataaataaataaatacaccgtgtatacatcaaccatgtcagttctattcttttaagaaactagtttttggaaagcaaaagggtcaataggtcacgttttgctacaattatttgaaatgcaacgtgtaacatataattaagcgtaatttgtagtcaaactctctaaaagtttattacaatctaatgcccataccggaaaaattagtagaaattacataaaataaaatataatatatattttttttcattatttacttttttatggcataataaaataatgcctttgttatatgattttttttttaattttatttacttttcgtgggttttttaaatgtcatacttttgttaataaaatttatttgggataattacacttacatttttatcttttaaatttttttttttttactatttttacgatttttaataaaaataacacgaaaacaacaagaaaattaca

SEQ ID NO: 347278 - DNA, 998 bp, Cannabis indica
aaattgtaatgccctaatgccaaggcacactacagtgctatctttgatattcaaagattatcttcctgaaaaacgtgtcaaattaaagtttttctaataaatatcaaactttataatttacatagtcatttataaacaccgggatcccgtttctaaaattttatacaaaatatgtcaaaatacataactaggtcgcacaacgactataaaataatatccctagatgtcccaagaccgaacactccaggtcgcgccgccatgacatgtacaacctcatctcagccaagctcactcctgttcagcttttgcctttcctttacctacacatggaagcagaattgtgagtcaacagactcagtaagaaaagcatataatatatcatataataccgacttgtatctaggcgcccatacacctatttacaaggcttaacagatgagtaagaacgttccatgctagggtacaaccactatacaacatacattacgtacctcaccgtacgagtgttggtagggtttatttcgtaccccgagcaccattgagtgatataccacagacaccctgtactttcgtgtacctatgctggtatcactgtaatgtactctttaacaatacacactataccaatgcactctgtaccataactgtacgagtgttggtagtgtaacaaacatataagcatgcatatacacttaacatatacatacactcgcatattgatatcacacattatatatagttcttaccttctttccaaattcaagtgtgttggccaacctgaacggaaagtctcgtgctagatggatgccctaatcacataacgaaactaggtaaatcacatgatcgaaaccctaatccgagaaactcgaacctaataactttaggctctgctatatacaatagggattacactaactcaggaaacagggaaacacccaactacggcactgaaaaagacaagaattgagaaaatgggacattcggggaaccctgaaaaa

SEQ ID NO: 347279 - DNA, 1181 bp, Cannabis indica
tagtaaactcctcgtaataggatctgaaaggttgaattaaacacaaccttttctccaccattactcttctttaatcacaaaatcattgataatgtgaaattcctctctatatgtctagaccaaattgagaaggtccgcacgatgttacatgataacaataaaggtgcatacaagtctagcgtgtacaaagataacttggagtttgaacgtctacccaaatactgaaatagggaacatctttgtaagtactctcactagccaacttgtgaattagttcctctaatgtttcaccgtccagggacccatagaagagctaatacccattaataagcatgtttaaaccaaattgagaaggtccacacgatgttacatgataacaataaaggtgcatacaagtctagcgagtacaaagataacttggagtttgaacttctacgcaaatactgaaatagggaacatcttggtaagtactctcactagccaacttgtgaattagttcctctaacgtttcagcgtccaggaacccataaaagagctaatacccattactttttagcatggccacccgtcgctcttcaatgatggtcgttgcgtggtaagccacgcaggggtagccactacgtgatttaaaaagcgaacaccaagctgtaaacttttgttacacgtaagtccaactatgtctaaaccacttgctaacaagataaacttcttaaatttattctttcagttccacatgcgtacaacggacaacatgccaagaaaagtccaaggtaaggtttgtgaaacttggtgaatagcaagtgactaaaagacctaagtctctacggttacttaggggcaaccataccgtacaatgcattaaactagcacaaagaacttatgcagagaaattgtaacacttagaataagctactaaacgtgcctctaagtcatacatgcatactttggcttgacaagtaaatctagaaacttacatgtcaaggccatcagaagatagacaagacgattgaatgtctctcataaaaggctttaaggctaaataatagaaatatttgaaaatagagggcctataggcaaaagcaagaacattaaatccttgaggccggatatgaaatcgattcacatgcacgaggccaaggccctgcaagaactgtatgttggaagttattttaccaggaact

SEQ ID NO: 347280 - DNA, 607 bp, Cannabis indica
aattaaaaactaaatatttttttacacaaaatagagatctaaaacagaaataagttaataaatttatagaaaattcattatataattataaaaaaactatcattatcgtatctcatttgtagttactattgtatttaaagttaatgtcatcaccgtatcttacttgtaatcatcattaatattctttctaataagtttactttgtacataaaataaattaaagaatgatcagtaattacttttattatgtgagggaagagagtgtggtaaacataataagtttagaattttaatatttttggcatattagttaataatttttttttgataaattatattagttaatattaactattatctctctctggaaaaaaagttatatgtagattaatttttttaatacatatatatttatttcttagttattatatacaaatatatagttatttttactattttttaattgattggtgatctttaattaaataaagtaaaataaaaaaaattagaaaaatgagagaattaaggagaaaatttaaagtagaacaaaaaaattagaaaaatgagagaattaagaaaagaataaatatttagaaattttattttt

SEQ ID NO: 347281 - DNA, 629 bp, Cannabis indica
agccaacttcgcggcctgcacaaaggaaaaaagtcagcatctggagctaagtgtgtaaagttaaaaaagaattatagaaaaagacttaccctggtgagctcctttaggactacgcccaccaacacatccagagatgagtcactatcagcgccagccagttgctcactgaccttaggaaccagcaggtatatatagtgggccagcatctccttgccctttttggcctcttgcagcacgagcaaaggtggagttggtgtctgcacccgttcaggaacactcctgaccagttcagaccaagtcattggtggtccagactccttggacttagcagatttgggggtggaagggtttgcagcggtcagctcctcagaaaggtcaataacctctacagaaggtctcttctcagaggagccctcaccgcccttagacttcttggtcggaggagaggcgctagagcttccaccaatcctcttccttagagcatcgagcatctgccgagacatgtctgcacagaacaaaaacagtgtggttagaaaacagccatcagaaaatacaaggcatgaaagtcaagaagctcaaaaaagagaaaaatgcaaggtgactgctcccccagaaaatcagaagtccat

SEQ ID NO: 347282 - DNA, 618 bp, Cannabis indica
tgttaatgaaacatacttggtagtaaatctagatcctggtaaattatttccaacaatgttcaggaagcaagcacctccagtgtttctggaggtcctgttgtacttaaggcagaatagtgactgactattatcgaaagaatattgaatttcatgggggtggtcggaaatggtagggtggcatgtgccacattccaatttcaggaagatcccttggtatggtgggagatggtatccctcaccaaggatgttactagaatgacttgggaggaattccgggacttgtttaatgccaagtattacaatgaggcgatccgcagtgcaaagtggaaatagtttgtggaattggtacaaagcgagaatatgtcagtgactgaatacacaacaaagtttgatcgcttggctaagttagcattcgggattgtaccaacagacttcagtaaaaaagagaagtacttagcagggttgaatgccaagattaagcacgatctggttattacaacaaatgatattacaacctatgctaaaatggttgacatggctcttcgagatgaaggaacagttaagttgttgcaagaaactcgagtgacttctggtgctggtgggaccactactctccct

SEQ ID NO: 347283 - DNA, 330 bp, Cannabis indica
aaaaagaaaaaaaaaacccaaaacagtataaaagtaatttttgcccagtaaaattataaatatttgaccaaaactcagtattttagtaaaatccccattttttttttattagtccttgttatgtgagaccagtgttaatgggcttctcctactaatctaatttggccatttttacatgtgaaaattacatgaaatatgggatttcataacaaagttagaaaaatatggcatttttaggtttgccactcttctatggcattttttcacatttaagatttgttatggtatttgatatgccatatttttataaacttattataccaatcccat

SEQ ID NO: 347284 - DNA, 1563 bp, Cannabis indica
cctttcccctgtttcatcccaataaattgaagaacgacacttcctaccgtaaaacatttcatagggagccatccctatggtactttgatacctgttattgtaggaaaattctatcaaagacaagtatttatttcatgaaccttcaaagtccatgacacaggctcgcaataagtcttttagtatctgtattgttcttttagattgcccatcagtctgagggtgaaaaactatactaaacttcaacttcgtacccatagctctctaaagacttattcagaattttgatgtaaactttgggtcccgatcttaaacaatggattttggagctccatggagacgaactatctcttttacatacagctttgcatactaatccaccgtataagttatttttaccgggaaaaaatgtgctgactttgtgaaacggtccactatgacccacactgagtcatacaatcccgtggttctgggcaatccaaccatgaagtccattataatatcctcccacttccactcaggaagtgctaatggttacaataaccctgccagcctctgatgttctactttgatttgatgacatgttaaaaatttagacacgtaatctactatatctttcttcattccacaccaccaataatagaatttcaaatcctaatacattttggtggttccctggtgcaacgaataaggtgtaatatgagcctcatcaagtatctctttttgagctcatagttgtttagaacacaaacccaagctttgtaaagtagtattccactatccgagatcaagaagtccttaggccgacctgctaatacctcatcctaaatcttaattagctcaacatcttccaattatgtttttctaattctttccagcaaatctgtctaaatgtccggttatgtaattttccaaccacaaactcaattctagccttaaccatcttcgaagccaattgcggtgctattattacggtactaaaaacttgtctgggaccttttctgctcaaagcgttcgccactacattggctttcccaggatgatacagaatctcccaatcataatccttgactaatttcagccaccgcctctgtctcatattcaaattcttttgagtgaagaaatacttgaggcccttgtggtttatgtagatctcgcattttctccatatagataatgtctccatatctttagagaaaacacaacagcaacaagctctaaatcatgtgtttgataacactgttcatatcccttcaattgacgggaggcataggctataaccctgtcggcttgcatcaaaacacatcccagaccctgtctggatgcatcacagtaaacaaaacacttttcttagtctgatggcaaagctaacaccatgttgtgattagcagtgagcataaaatccagaaagctgaaaaaaccgtttaaaccgaccaaccgaacactattggaaccgaaaccaacaaaaccaaaaaccaaaaaaagtgctaacggttaaaaccgccattgaacggtcagtttttttgggtaataaaccgaccaaaaaaaccgaaaccgaccgctata

SEQ ID NO: 347285 - DNA, 602 bp, Cannabis indica
gaaacagagttttatttagggcataaaacccaacaatcttgttgaatgtccatggtgtgccttcaagggccctattgatatcaacttcgtgaaagaactgaaacaggtatttgttggtctctaactccttaacgtacatgccatttcctggacgccaaagagatcccattacgtttcggactgaatcaaaatctatcaatttatccgacaatagtctccccactaaacaccatcgagcattaaagtcatccatcaatccttccacctgatcaaacatgaaacccgcatcttcttcatcgtcaacattcagatctgcccacctattacccaaatcctccatcatccaactgctagaagccgttacaccaaacactcagcactgaactcgccactcaacaactcaaatttcacataaaagacatgtcaaaagacaagtgttgtcgagtgaatttcgcaacaccaaattatatgatattattagtgacaagaagcaatttacgtgaaaagacaagtgcgagtattcaacctagaatggcgagtactcaactgggaatgagaaatagttaaccaaaaactggaaaataacaatgagacagagaaat

SEQ ID NO: 347286 - DNA, 1152 bp, Cannabis indica
gtggaagcaggcaccttaacccccctaactcttactttgccatcctctctctcaggccagttggctaagaattctaaagctagagtttggttaccccgctcagtgacatctacaaacttagtccactgcctatttaagatttgatctctaatagacgcaaaggcaggagggatgtttgcagtttggcttaggtttacaatgtctatccctctatcttcaatgaatgccctatctttcaatttcaaaaaccgctcttgagcatccatgttggtaaaccttactctatcaagattagagcgacccctaggtgggttggatgatgacgctcccacttcctcactcactcttgacctttttggacccatagcacccaaatttttttctaactctcaagatttttcaaaattttgacagcacttccccttaaaaatccacttcccgggaattaaccctttcacaatcacactcaattgcactcaccacaataatattcaacaatgtatgagcaaaaattccaaaaatttcaacacaaagtctaatattctctagcaatccacaaataatccaatcaaacttgtgtagagagattaaaatttgttacctcaatgaaaatcaatctttagtcaacctccattgatgagaaccttgaagctttagggaagaagaaggtgaatagtgatttttctgaaatttgggtgaggtttagggattttggaatggatttttagaggaaaagagtgttagatgagagaaataagggattatgatgatttaggatgagagtttatggataaatttgatgaaaattggtttgaatgggattagatgaagaaaatatggtgaggagaatggtttttcggctggagaaggtagggatttgaatgtggggtttgatttgaaatgttagggatttggggtttaaaaagggaaaactgaccattctagccgcggccatataaagcctcgccgcggctagatttcgataaatttcaggtctctctgtaaggaccttatggccgcggccaaggtctatctcgccgcggccactgagcgagtccctacttttttttttttttaattttttttaaaaccgaaaaagaaaaataacagcaaaaactaaaaataattcactaaatcataaagaaatttggg

SEQ ID NO: 347287 - DNA, 1077 bp, Cannabis indica
tatggaatctgccgctatttataagaatataggttggcagttattttcttgggatcagtttaaaatgtaactgttcatgaaatgtggacaattcccatgtttcatttaattgtatgtgggataatatttgataactgctcaactgccttttgtttttattccttttcgatggttaatgctgatttggatgattatatctcgcttaacatgagttatcctccttgtccatcgtgatgtggaaaaaatgctaagtgttagtagattgttcacctcgttatgtctttgtattagagttaaaacggtgtaatgaccgttatttttagacatgggattagtgggacacttagcaataattaatatgactatgtgattatttatatgttttattctttatagaccctattttcatgaaaatatgtgttatgattattatttcacaattccggagattttattgaattatatgtgtgatatgcatgctatctctgaattttcatatttttacatttttatgcccggtaacagtggaaatgggtcgaatggcaattttagtcacatggacacaaatttgtatcaagtattttatggggcaatattattggatatcttagaatatcaaggtttaacgaaataacagaattagaccattttacccctagggctacgagataactttgcggggaaataagggcattttagtcttttcacccttagagcttagtcactcttttggaagggataggtggctgtggctcatgcttttgaggatgaccagctgcttaggaagcaaacaaaaaggaaaagcaaaattaaaaggaaccaaaaagaaaaagcaaagtaaaaagcaaaagaaaagtcaaaaaaacaccaaatcaccttctccttctccctctacttcgtggcttctgaaccagggccaaaactcagatttttccatcattttcaagcctcttcctagttggaattcatcaaggagttcaaccgctagctcctacaaacttctgaggtaaaacctaacctgaaatttattggttttctagggtttttgttagttttctagtggttgtttatagtaga

SEQ ID NO: 347288 - DNA, 678 bp, Cannabis indica
agatgatgcagagagagagagagaattgtggagggggttatttttggggttttaaaaaaaaaaaagtattagttttttatggtttaagtttttggtataataattaaatttttttaattatttaagcatataaaatacaaaattcccatctaaaataggcatcaaataaaaataaaaatagtatttatagccatgaacagaggtagttttggcagaagcccacaaatcagtaactatcaattgcaaaggttcattataaacagtaaatgaagattttggaaatggtagcttgtgaatcttgcctaaacaacatgctgaataaacagataagggatttttattgctagtgttgatattacaagtttgaagaacagatttcacaatcttttctgatggatggccaagtctattgtgccatagatcatactgagaaagttgagatctgttacagtgagtacaatttgaggaagttgactaagtgttgtgtgacagagaagcagtgaatgcacatgggacaacagctggtgtgttgggttacatatgaaattgagatggcttaaaaatatagaggccattctggtgtatcccagtgagaaggatggcttgtgtttcctgatccttagtaaaacatttgtcagcatgaaactcaaaaaagacatgattatcatgagcaaattt

SEQ ID NO: 347289 - DNA, 1894 bp, Cannabis indica
aatttcgattacctgggcgaggctaaagacatgtgtctcgagtactgtgcttctaaggtggcttatggtgaacccgatgtgactgcttcttccgctggctagaatgttgatgtacctcccgtttagacaacagatcctctagctcctaccggcccagaagatccgaaccgagagcctgggactccagctgtttaaatacttctcttttatccttcttttaataatttcggtcataaggcctatttttaagacatcattaccctccaacgggtctttaaacttggaattatttttcattttacagacaacaggctgactgggcagcttttaatcccagtattacgtgcttttgttatctttaatgaatttcattctctgtttataatcatcgtgaaattgtgtttgttttatctttaccaaatgctttgtatagctataggtgccccccaagtcactgagcagacttatgactcttagtaaattttttttttacaaggatacttttttatcaatttggggtcttaggttcgaccagaccttttgtacgtactggatgataaattagcaacatgttagtaatttcgactaaatttgaattttgaaataaatatctttattcatttattgatcgaaaatgtgtttgttactgtagtaccttacattagggctatttgatcttttagcttaacatgaaataaaacaaattgtagaaattagacattgtactttaaatggtggtcatccgacctgagtactttttcattttttcgaaacctttgagcatagtccgtccagcaggccgtgcacttaaaagtaaatgttcttttggtacttagtatggtcgtccgacctggtactttattggtagtattttcttaaatgttccccattcaataccgtggtactagaataagtttcattttttcatcatacttacctaatttgtatgctccggattcgagtacttcgaccacctgatatggtccttcccagttaggttcgagtacacctactgtactgtctttggtgtttagaaatacccttcttaggaccatatctcccacaaagaattttcgagccttcatttgtttattgacataccaagctactttttgttgatgggctatcaactttaagtttgatgtggttcgcttgtcttcaattttatcaagtgattcggccaggagtacgtgattgatatcatggttgtacgtcaatctcatgtaggatggtggctcgacttctacaggcagcatagcctcatatccatatgccatggcgaatggagtttgtccggttgctgttttctcagttgttcgatatgaccataaaacttcaggaagttcttccggccaatttcctttggcaccttcgagtctattctttagtgtatccttcaaggtcttgttgagtgcttcaacttgaccataagcttgaggatgtgccactgcggagaaacttttgatcataccatcgttcgcacaaaaagcagggaaggattggctgtcaaactgcgtgccattatcctaaactattttgtacagcaatccgaaccggcagattatgttcttcacaataaagtcttgaactttccttgatgtaattaatgcaagtggttcggcttctgtccatttagtgaaattatcaacatctaccactgcatattgtactcctcctttgcatttgggtaattgtccgatcaggtcaattccccaaatggcaaagggccacggactttgcatctgagttaactcgttgggcggagcctgaggtatcttcaaaaatctctggcatttgtcacatttcttaacataggcctttgaatcttcaatcattgttggccagaaataaccttgccttagaatttattagataaactctacccgacagcatg

SEQ ID NO: 347290 - DNA, 616 bp, Cannabis indica
attgtatattaaataaaaataaatatacttttagtactctcacatttttaggagtgcttacggtgcaggtggtacgatttttgactattttttcaaaccaacccgcacatgcggtttttttaatttctcaaaccgcacccgcaccgcgaaacaaaaaccgcactgccaaaaattgtgtggtgcggtgcggtttatgcgatttttgcggtttgaactatcactaaataattaaactatcacaaatacaataaaatttgagcaacacttgtcaaaaataccataaggcttgaaaataaatatgaaaaaaaaagtttcaagtttaaataatacaataattagtgagcttaggttgggccttcacatatgggacctaaataaatctaaaaaattagtatttttataatatgcggtgcgatgcagtgtgaaccgcatattaacaattcaaaactgcaaatcgcaccgacaccgcacggtttagaaaaaattcaaaccgcgaccacaccgcaaaaaatttcaaaccgtattttttttgcggtgcgggcaatttgagcggtttgatgaacacccctactttactacagccagttttattccacaaaatatattggctccaaag

SEQ ID NO: 347291 - DNA, 601 bp, Cannabis indica
gaaacaaaagaagcatgacaagtgcgtgccagtttacactatttataccgaacttaatgaaactcgggaaaatatttacctcgcgcatgagcacaaggttgcctttagtaaacttgagcccatgaggcacgcgaggcataaaagagattcgaccaggtactgcaagtaccataaagacattaggcacacaacagacgagtgtcatcagttgaaagatgagatagaaagtctcatcgcatgaggtcactttaagcaatatgtgaagagagagggcaatggacataaccagcctaatccgcctaacaacccaagcaacttgggattacaacctcctcttgttgaaggagaggatatcctggttatctcgtggagccgcatattgcagaagagagaaacaatacccaaaagaggtacatgaaggaaataaaaaacgagcagttagtattcgctccagaatcttccaagtaggtaaaaactgaggaacctccaattatatttttggaggaagatgagaagaacgtgaggtaccctcacgtcgatctattggtgattaccatccaactcgccaataaaaggataaagagggtgctgatagataacg

SEQ ID NO: 347292 - DNA, 1122 bp, Cannabis indica
ttgtaccaagttcaaagctcctatgtggacaaaggaagatataatggaaaatcatgagctaactacttgtttacaatgtaaaaaattaggagagatacaacttggcaatttttataaaaacaagaaagaattgagacaagtggtgggtaggtttgcacttaataacaattttgagtggatggtgaagaagtaagcccctgatatgttgtacattacatgcagggctccaaattgtaaatggagattgagggggaggaacaagatgcattctgataactttgaggtcactgtatttcacaacaaacacacatgtaacctgaatacgagacattcagatcaccgtcaagcagcaccatgagtggttggccaccttattaaggggaagtacacccaaaatgaactaagtacaaggctaaagacatacatagggacatgtttgacacctatggtatccagatgagttatttgaaggcgtggaggtgcagggagatggcacttacgtacgctaggggtacgccggagttttcatacatgaagtagttaggaatttttaccaagatctagatttactaacaagtatgttgattaacatcctaaatatgaattctctaaaacaatgaaataaacacataagggtttaataaaaccttgcattgattgcagcagaatataatgactcctctgttcaagatctctagcccttgattcctttctgtagcaaagcattatcaagatctgaacctggatctctttctctccttcgggtttggttaccactgtcttactcacaatgattaagtacttgacttgctatgtttgggcatggcactcatcactaagggtttggaatatggtgaagaacaatgaaggaggctgaaatcactaaggaaagaactctctcatctaggtttgttgaatagtcaagttgaccttagtttgatgagtgatagtatcatgttccttttatagtgtttcaagtagcgcttagggttgaattatatggattaaaaaagaataaaatattgggcaaaaatccacatcatggtcgtacactttaaaggaccaatttctagttagatttttgccactttatttcaaccacttattcttcttttcaataat

SEQ ID NO: 347293 - DNA, 1048 bp, Cannabis indica
ttaagaattttaatttacattcccacttattttacatcagggatggagtggggaattccctaataaaggtggggacggagcagagaatcccttaataaaaaaaagtataataaaaatttgaatatactaaattattaaactacataaaaattaaaatattatacattaattattattcaataaattaattattatttaataaacaacttaaaagtcataaaaaaaataataatatacttaagaaaatacaaacataaattataaaatattattagaaatataaaataaaatattaaacgggtccccgttggggcggggagtgtgatctctgtccccgcttcgttccccatttagacagggaatttttgctccattaggggcgggtccccacggggtctatcctcatggaaaaaatgtacctccctagttatatgaatggttaatcatttaaatatgatttatatatatatatttctcttattttaatgttgtttttgttttgatatcttaaaatagaataaataaattaataaaaaaaattaaaaaattgagagaatttaaaataaaataaaaaaattagaataatgagagaattaaggagagaacaaataatactaattggagagattttaaagtgttatgtcactacttcatatttcccatttatatatacataaatagagatatataaatataggggcagctgttgtcacgcatgcacgttttgcgtgactagtgtcgcacagatttatagtcattaaattgagtctcacttttaatctaaggactgatattaggcaccccatatattacttttttataatatttaatttagtaaacaaaggggtatttgacttaggaattagaaatgcaactggttacaaattttcgatttccacatccatttagtaaagtgaaggttctctcattgtctaagatcaaactcactttcagctcaaaaaaactcacttccagctcaaaaaaaaaaaaaaaaaataaagctcaagagatctcaaacttcagttctctttcattatttgaagatcat

SEQ ID NO: 347294 - DNA, 531 bp, Cannabis indica
atttatatgtttggaaatctcctttatgtaagttcgaggatttttatgtagggatgcacacgaaacgggaattagcggggagtattctcctgtttctaatccttaaagattttaatttacattcccgtctattttctatcggggatgtgacagagaatctcttaatgggagcgaggacgcgaacaaggaatctcccaataaaaattaaaatttataataaaaatattacactacataaaaattaaaatattatacattaattattattcaataaaataattattattcaaaactacaatttaaaaattagtaaaaatagtactaatatacttaaaaagtataaacataaattataaattataaattataaaatactaaacaagttcctgtcagaacggaaagtctaatcatgtcccgcttcttttaatattcaggaacaaaacataatcctcgttcgcgtcctgtttcccatttaaatgggaaatccctaccccatcataagcgggttccggcgaagccatcccatgagag

SEQ ID NO: 347295 - DNA, 2169 bp, Cannabis indica
gtagagcctgggattgaccaaactaatccaccaacaccgcctccacttccgaaaaattcaggggataatgtgggggttgggcaatgctaatcctcctactgactggcagcagatgttccaagaaatgcgaggtatcatacttcgtcaagaagaagagttccgttgattaaagcaaccggcactggcttcccctgttgaacaagtgttaccaccgacacctgtgctagtggtgggtaatctaagggtttttaatgtcgcgtagagattctgtatttcagtcggtttgtgaagctgcaacctctaacttttctaggaggtactaacataattaaggccgagcagtggatgaagtacaattaaccgtatccttgataatagtgggggtgacgggaacagagagagtaaattgtgcagccttcatgttgcaagatcatgctcgcgtctggtgggatattgtggatcaaactcgagacgttagtacaatgactttgggaagattttaaaagtctgtttgaagagaagttttataatattgccttgaggacttcacatatggaagattttgtgaagcttacttagagggaaatgtcagtggtcgaatacactctgcagtttgatcggctgtcttagttttctggtgatctggtgcccacagatttcaccaggaaaaagaaatatgtgagaggactgaacgccacgattagtcgggacttgaaaattaccacttcacatgacactttgaacaagaaagtggtagaactagccttaattgcagaggaggttgaggaacatgtagcaaaagagcaaattgcaaaggatgccatcacagcatcgaaccctcctactagtggtaatgtcagtaaggggaccaacagtggcaaccctgatcacaaacggaaggctgaggcttttcgagaattaggggtaatagaaagttttagggaaatagaggtggtcgtcacggccacgggtcttcattgtgatgctatctcgagtgtcttaaatgcaagaagcaccatcagggtgaatgtcaggccaaggtatgtttccagtgtggcatggtgggccactttatcagagattattcttaggccaagaaagaggaacctaagaagaatgctactcaaaacttggggcgactttttattatgactcagactgacgctgaagctagtccgtcagtggtgacaagtcggttgtttattaataattaatcttatactatgctgtttgattcgggagctactcactcttatgtgtcgagtagagttattgaaagtttccataaaccatgtgatatttatgcttcggggtttggtaccctgttactcttgggagaccttatagtatccactaggtggattcagtcattgtccttatggattgatgattgtgaattaatcaccaatctaatagaattgcaactgtctgaatttgacataatcctgggaatgtattttctatgtaaaaatggggcaacaattgactcaaagcggaagatggtggggtttgagcccgatagtgcgaaccgagcagtgtttgtgggtaaagtttaggggcacgcataccaagaataacatgttgaaagctaaggacttgatgagcagaagttgtctgcgattcatagtcactgcagtggatatcagtaaacttgtgacatctggacctgagaatacaagattggtgtgcgagttttttgacgtctttctagaagatttaccgggattggcacctaccgaggaaattgaatttgttattgagttggttctggaagcggacccagtatcaaaagcactatattgaatggctccagtagaattgaaagaattgaagatacagctgcaagaattactgaatttgggattcataagacggagctactcacctttgagtgctccggtattgtttgtgaagaagaaagatgggtctccccaaatgtgtattgattaccgggagttgaataagcttaccattaagaacaagtatcatttacctcgaattgatgatctgtttgatcaactaaaggggaagacggtcttctctaagatcgatctttgctcaggatatcatcatctgagattttgggagaaagatatcctgaaaattgcgttccgtactcggcatgaaaatatgaattcctgtgatgtcttttggactcaccaatgtccc

SEQ ID NO: 347296 - DNA, 763 bp, Cannabis indica
atggcaataccctaaatatctcaaaattgggaaaaactagggttccaaaaattcccccaaccggaagtccaaaaattgggacaccaaccggtcgagcggttttgtgttgggaacacaaaaaccaacccccttaactcaattcaatcccaaacttttgtaaaacttccagggtacctatacaatgcataaacaacagtttccaaccagaatttaacagaacaaaccatcaatactcaagttgccattaaagctcaaagcttgaaactcaaagttcaaagttgcataaaatcaacatcaaacactaaaaccagctactaagagttaaaatcaactgaaaggaaccccaaaattcgaatcctaagcctatcttaacctaacagccctcattattcaaaatcaccatttcaacctaactcaaaacttgaaaactaaagaagggtttcattagagcttaccttaggttgattcccccttgaattccttgatgaaaacaccacaaatcaacagcaaaaccccctggtttgcttcagccgaaatagagaaagagagaaagagcttgttcttgattttttaacttttcccttatttttccaaaaatgagaaaataattttctcaatcaaggcttgggctgaacttagtggccaagtgtcacacacctaggtagccacccaatcccctacttaaaattactattttgccctttaagttataacttaggtgtttctaaagttaggggtaaaatggtcaaattccataaccccg

SEQ ID NO: 347297 - DNA, 581 bp, Cannabis indica
ttttattattttattaaataaaaattaaaagtcacccataaatttctcaaaaaccaagaattttagttatataggcacactttatatagaatagatatggataccaaatgttttttttttatgtttaaatttgggatcataagtaagcatctatctatcatatgaggagagaaaggagtgcgtggagaagaaagagagatgaggataaggagagaagggataagattaaaaatgaattatttatcttattgattgatagtttatcatttttctttgtcaaatattttttaataaggatttagtagtataacatttgattttggctccaatttcaataaattaggcaccattagatacaaattgtccaatacaattatgaacaaatattaagtactactggtgcctagcacttttacgatatgttgcgttgcgattagttaatgatactctctaaaagatattatactaaattatataggacacaatacttaattggaccaatagcgatattaataggaaaatttacatagtatactaacttttgtcatttttttacaaaaatactgcgagacggtattttt

SEQ ID NO: 347298 - DNA, 655 bp, Cannabis indica
aaaaaaaaaaaaaatcaccaaaaaaatcagaaattaaattctaataatgctggaaaaaagaatcgtcgaaaacagagtcacaaaactacctcactctctctcactctccgacagtcgcgagtgggcttcgtcccagcaggttgtcttcaacctctagcagccaccatggctgtaaaacgggtttgtgcaacccggatcagatccatacggatcgggatgaaatttctgccaaaaaatgcacgaaaatgactggaaacttaggggttttgctcgggtttgaatttctaagagatctatggtgttaattttgggtataaatgtaagaaattaaataaatcttattgtgtaatccgaaaatttaagaaccccaagcaacatatttatctcatccaatttgaaaattaaacatgtagagacattgtaaattagttggtaatgaaatttgcacaatcaattttagtcaataactaatagaatcaaaaaacctaaaattaatttcataaaaaaataatacataaaccctaaaagtttaatcttaaaattctcttaatttactcaacgattttagtcatataagatatcaatagaaagagaattttatgatgaataagactcctaaacatttaagattaaacaacgaaaaatttaacaaaaa

SEQ ID NO: 347299 - DNA, 575 bp, Cannabis indica
ggaatttgaccattttacccctaactttagaaataccctaagtttaagtcaaagggcaatttagactttttgctaagtaaggttaggtggctgccttgttatttgacacctagcaaagtaatttcagcaagggaaatggattttccctaaccttcatttcatttagtgaattaaaagaaaataccaaaaatcaagagaagctctctctttctttctctctctcttcgaaaccagcaagaacaaggaggattgctgctgatttgtggtggtttcagcaaggaaatcttgggagaatcaagctaagttaagccctagtagcacccttccttagtttttaagttcttacttggtttgagtttatgattttgagaattagtggctgttagggttaggttgagttgtagttcagatttttaggttcatttgagttggtttaagcttcttgcagctggttttgatgtttgttttaggttttgtgcaagtttgagcatagaaaccttaactttgatctctaatggcatgttttgattcagtggttttttctgtggtttattggctggattatgttgtgtata

SEQ ID NO: 347300 - DNA, 631 bp, Cannabis indica
ttaaatttaataaactttaacatattaagtaacatcataacttaccataaagtcttctattattttgtatttaaagttatgatatagtataatattaacaaatttatttagaaaagaaattttgatatgttaatacaaaaacttataaagttaccaaatagtatcttaaacataatagaattatttacattatgaaaattattatatatatatatattaattttaaagttgactgatcaaaataagcaaccaaatgtgtatgagaaaaaattatcttgaatcaattttttttaataaaaagtaactattgatatataatttacatcaaaagtaaccaaaatggatgcttttttaaaaaaacttgcaaaacactaaaatttctggaagtgagatttttcaattttttccatttttagtaattattttagatttcgatatttatgttagcgtggcacattggtatttatgcaaataattttcttaaaagtatttttataaattaaatcaattttaggtataatattgagaagacccctaaataatttgtgtcggttggcactggcggacccaatgaaggaccagtgtgggcttaagcccatgctgaaaaaaaaatatttcttttacttcttaa

SEQ ID NO: 347301 - DNA, 803 bp, Cannabis indica
taaaagttattacattaaactacatgcgactcaatatatagttagaccaatagcgatattaatacataggaaggtgctagacatcacttgtgtcttctagcatttctctaatttttcacctcaggtgtaaggatgcacatttttcccatggaagtgggccccgtggggacccgcctctaatggggcggagattccccgtctaaatagagaatggagtgagaaaggggatcaaattttctcccccaatgttaaatagggtggggacggggatgacactccatgccccaatggggacccatttaatttattaatgtttaaattttataatatgtgtttgtactttttaatataattgtgtcatttttataatattttaagttgtgtttttctataataattagtattttgaataataaataatttgtaatatttagtttttaagtaatttaataattttatacatttaaatttttaaaataaacttaattgttatagtagaggattccccgtccccgtccccgcccccattaggggattccccatcccgtcctcgctccattaggagattctctgcccccgtccccaatggaaaataagcaaggatggagtggaggtgagaattaaaattcttaacggggatgggaacgggggagcactcctcacaaatttctcaccctgtgtgcatccctactcgtgtgtctattcgtttggaacgtcgtattaggccgtattgtattgtattgtattatatttaattagattatatatcatatttttatataatactatgttaaactttaatt

SEQ ID NO: 347302 - DNA, 1183 bp, Cannabis indica
attatattgaaatgagttttatttagggcataaaacccaacataatgtctctccagttactggttttgccaaaattaaaggtgtcgaaaaattcctttttatgctcttaaaggcctccttgcactcttctttccattcaaatttcctgttgcctcgcaatacattgaaaaatggtaggcacttatcagttgactttgaaatgaatctgttaagtgccaccattcttcctgttaaggcctgaacttccttcagttttgttggtgatggaatatatcgaagcgttgatcttctcaaggtttgcttctatgcccctcgcgttgactatgaatcctagaaactttcctaaggagactccaaaggaacacttttttgggttaagcttcatattgtactttcttaatatctcgaagcactctgtgaggtctgtagcatgatctccactctttatcgacttcaccaacatatcatcgacgtagacttccatgttttttccaatttttctaggaaacatttcattcacaagacgctgatatgttgccccagcgtttttcaacccaaatggcatagatttatagcaataaagtcccatgttggttacgaagcttgtatattcctgatcagtgacatgcatttttatctggttatatccagagtatacatccatgaatgagataagctcgtgtccagcagttgcatccaccaactaatcaatccttggcagtggaaagcaatccttggacatgccttattcaaattagaaaagtcaatacatgttctccaagttccatttggttttgggatgagaacacgattggatatccacgagggataaaatgcctcgcctataaagtcgttaaccaacaacttatccacttccttcttgagtgccccttgtctttcagaatccaagggtcagctcttctgtctcttggctgggtaattcagaccgacatttaagtggtggcagataatcttagggtcgatcccttccatatctccatggctccaggcgaactgatcctggttcgccctcaaaaagcttattagctgctatttcaattgttcatctaggttattcccaatgtatacacactttgtgggatttcttagctctagacagcctcttccaactcctcaattggttttattaaatttctttcatcttgaatccaaggatcaagat

SEQ ID NO: 347303 - DNA, 608 bp, Cannabis indica
ccaaatagagtcatagtatcctactgttttgggcaatcccaccaaaaaatccatgatgatctcttcccatttcaattccggaatctttaaaggctgaagcaaacctaccagcctctaatgttctgctttaattagttgacaggttaagcatcttgacacatattccacaataaccctcttcatacccggccaccagtataaagctttcacatcatgatacattttggttgtccccagatgtaaggagtacggtgtagtatgagattcgtaaagaatctcttgtctgatatctttgtcaactaatatacaaattttgttcttgtattgcaacaacccattagataaaaatgaaaagtcttttgccaatccggcctctaacttctccttatgcccctgtaactcaagatcactttgttgagctactctaattctttccaacagatcaaactgcagggtaatgttggcaagatttccaatcacaaatttaattcccactctagtcatatcctcagccaatttcgttgaaatcttcattagttcacagacctgccctggtccttttcgaattaaagcatctgctaccacatttgctttaccagggtggtaga

SEQ ID NO: 347304 - DNA, 685 bp, Cannabis indica
gacatccaagcagagtatgcatagacatccgaccagcgtccatcaaacatgtggctcacatgaatcaaccaggggatgcgatttagcaatttcagagatatatcatatatatcttcatacttgtagaacacaacattatccctgaattcgtgggatagattcatatcattagagaagaaaggcagcatgcctagtttcatctacttattgtaattatagaaaataaaccagttttctattttatttcttactaattttggaaaatcaatttgatgtaattaatccttctaaatagtggactcatctcactatgcagagggatgaattttatttagaaaaaatactccagagagaaatctagatttaagagttaattactcagagatcactgtaagagctttagagagagatcaaggcttctttgcttttcttgtcacaagataatacaactaaatgggagtaggctattaccactatcacggggccaaacctctataattttggtgttttctttactttacattatttatattcagatatttaattatttgtaatggcttaaatttgactcactatagttggctaaaagcgaggtcaacattttagtactttcattgagaacaaaaaacacaagtctttgttttaagtctttttcaagacataagatggttgtacaaacacggag

SEQ ID NO: 347305 - DNA, 1012 bp, Cannabis indica
aacagtcgggttggctcgagacccaataagggaggtgctgatctcgctatgggaaggcttcctgtaacttctccagttaacttcagacaccttctaagtgagacttacaatcctgacgagtcagaagctaacagtcaaatgagcctcgagaaactctattaacaagaattacaattgtcccaaataaagtgataagctattaaacaaagaagcaacaaggcgtacattgtcgaccttgaaaggataaggaaaaaggctccagctcgctatcacactcactagaaccaagctccttttgagacatcctcaaacaaaaaaattatagatgtattcaaatacacgatcattttgacccaaaaaattttggaggatcacagctatatgattctcaaataataaccgcattaacactacgtgttatgtaaccgcatttccacgctgctagggaaagacgacccgaagcagcctcgctaaccaatataaagcagtagcctggagagacacttaaggcatacataagtcattttagcacgggtgcagctagggttaggaatttggatgatagtacacaacttacagtccttcaggcggggatctctactgatccatcaaccgcatggggcgagctgtgggacgacttacaaggtaatctagtaagaaacatcactgagttcaacgaaagggctcaggtattcgttcagaaagaagaagcccaaaaggaaatgaatttgttgaaaacaagctcaggaagcaaacccagcaacgtttcaacaagtattgtttccatgagaattgataactcagggacttctggtttgaagagaacggacggttctaaggaaccctcaaaggattcaaagaaacaaaagccaatgtatactatttataccgagcttaatgaaaatcgagagaatatttaccttgcacatgagcaaaaggttgccttcggcgagcccgagaccatgaggaatgcgaggagtaaaagtgagcctaataggtattgtaaattcca

SEQ ID NO: 347306 - DNA, 624 bp, Cannabis indica
caacattggagcgcggtgtttggctattacatcctagtatttaagtatagcggggcagtttagttagacattgggaatgtcttgatatgtcgggattttagaatttcctaaaatacccttagtgacctttagtggttaatagtatggaagggcaaaatggtcattttttcaatctttagttttctttttgtgactttagttaggttaattaatctgactttaagttggtttaattgatcaaatatggtgtgtttatcattttgccaatctttagtttatctttttgtgactttagttaggttaattaatctgactttaatttggtttaattgatcaaatatggtgtgttttatctcattttcaaagaaaaaataaagtaagggaaatatcgcatttcactctcaattttctctctctctttcgaaatccctagaaccagctagggtttgattttgttcttcaaatcttccaagtttccagcagctccaagtttaatccaagccaaggtaaacctctttgcaatttcctctttagttctttgagttttaagattgaaattttgcatgaattagtgtttttgctgctgtggttggtgtagttatttagtattgttttcaaaggttt

SEQ ID NO: 347307 - DNA, 804 bp, Cannabis indica
aaattaaatataaatgaagttatatagtatgcactcaatcaactatacaacacaaagaaaataatgcacattagcccaattagatatatgaaataacataacagttgaacttagcatttcttcaatctaaattacctttaccgaaatgaataccatataaaaatttaacaaaagaaataactagttgatgtaaaataaggttcttgagcaagaagtgtcatcctaatctccttaagcactgaagttatcatcataataaatttaaatatcgacatagctttcaccattggtagcctgcttaaatttaaaccacccaaaacttaaatgcacaaaatgaaaggatgaaaaaaaaaataacggctttagtctagctaggaatcacatttctccaccaaaacacctaataaactacaaataaagctttacatccacacaaatactaataaaaaaggttttttattagtctgaaaattgtaaatccatgagcaactaagttaaatcttgaagtgcctatcccaaaaataataataaaaaatatatcaaaaatagaaataataatcaaaatcattaaagcttaaaatttcagtagataaatcttagttcccaagaagagttttgccaacttatctttggttgaagagagaaggagccttgatgtcataccagtcattcttggcaaacggatcggctgcattatactattgatataaaaacttgttaacacaactaaactttcattctccaaaatctaagtaagagtaccaattttgtttctcaaacattaagtatttgaatttttttaag

SEQ ID NO: 347308 - DNA, 661 bp, Cannabis indica
aaagagttttatttagggcataaaacccaacacaaacggcattactttgtagcaatatagacccatgtctgttcaaaaacatgtatgttcttggtctggtggatgcattttgatttgattgtagcccgagtaagcatccatgaagcttaatatttcatgccctgctgttgcatctacgagctgatcgatccttggaagtggaaaacagtccttggggcatgctttattgaggtctgtgaaatcaatacagactcgccatttcttgttcggcttgggcaccaatacgggatttgtgaccccagctgggtagaaagctttaattataaaattgttgttgtgtagcttttctacttcttccttcagggctaatgctcgttctttatctagtagccttcgcatttattggacttgccggaagttgggatcaatattcaaacgtgtgaaatgatagaaggatcaattccaaccatatccgcatttgaccaggcaaaaacgtctaggtttgctctcagaaattttatcaattctgattttacttcgagcaaaaaaccattttcgatatttagctttctggttgggatatctggatcgatctcgatctcttctaactcttccacaggtccaacattactgcttgggtccccaagtcgaggatccacat

SEQ ID NO: 347309 - DNA, 1051 bp, Cannabis indica
tctctctctctctttcgaaaccctcaaaaccagctagggttgctgtgtttttctccattttcaagctggttctagcagatattaagggaccttaaactctaggtaagtctcttgtagttcactctttagtttcttgtttttgaagaaaatgaattatgcatgttttgtgagatttgttgctgtagttattgttagtgtttgttgttgtttttcagtgattatattatgctaggttatgttgaattaggcttgaattgtgggttgttataaggtttgagcaagctttgagtttcggaactcaagcttggctctttaatggcaagtttttctatgagtgcatgtagttgtgttttatttccttgaatatgttctttgggatatatggagcaggtctggaaattttggtatgatttggggttgttttaagcgagataagaatttttaaatccttcctgcactgaaccggaattccggttcaagggacctataggaaccggaattccagttggtccccaagaaaccccgcagaaccggaattccagttggggaaattttgggaaccctagtttttcccatttttgtgttgtttaaggtatttccatgatattcatctataggaaaacttttagtttcaagtttaagtccccagaaagtgatttagcgtgtcacttacctatgttatgattgatgtgatttaggagcctataattcgccgagcagttgttctctcaggttggccggcacacctgtattcggaatcaaggtaagattagtataatgttatgcatttgttattacatgtttagcatacatgttgtttatgcctgttagattacattgatagtagtaatagtatacgtagagttgtactgattactgataaatgtatgttggctgaaatactgatcgatgttgtcacatcaatatggctagagtatgactagcatattgtgtataggctgacattatggtcaatagtattgtcgtataaatgttctagactcagtaccgtgtaggacacgggggttagggttatgatcgggtgtatggg

SEQ ID NO: 347310 - DNA, 562 bp, Cannabis indica
aaaaaatcacccacaatatgataagttatcttaacttgtacacttgagctcaatttttttaactgtacaccttaaattatcttaaatcttcataataattatgatatatatttttgttaaacatttgaaaacaatgttatataattggttaaatttggttttacaatgcaagaggcgtgccaaaaacactatatgttcatgtggacaatttattctatggaacatgtcctctattttttcatgtagtcaatatccctcagtttcttttgaatcaatgtacaatacatttgcaaggaataaacgatttgtcattttttttaacttgtacaccttaaattttcttagatcttctattaattgttagggtttatgcctttaaaagcctataaaaatatttttgattatcaataaagagtggaacattttgatatatccatgaatgttaaattattaatatttattattaaataatttatatataaatatcggaaaattttttattcatatatgaggttgtgacttgtagttgtacaaaaaactaatatcacttagccatgaataa

SEQ ID NO: 347311 - DNA, 950 bp, Cannabis indica
gaaatattgagacaaagaacgaacatcccaagaaccgtccacgcccatcaactcactaaccatcacactggcattaggagcaggcgagatagggcgaaacgtcctaggccggggaagccaaggatcccgaaacgcatcaacactttgccctcccccacaactttcctcatcccgaactgcaataattccaatccccacaccaaactggaccacaaatgagacgaacctggccgatcctttgcgtccaaaattgaggtggtgggaaagtatttatactttaacacacggccagccaaagaactcggagattgaagtaaacgccaaacttgtttagcaatcatagcttgattaaaaagcctaagatccttgaagcctaatccccccttcgacttaggctggcacacattctcccatttcacccaagcaatcttccgcttatcattcttcgtaccccaccaaaactgtaaaataattgaccgaagttgatcacatgttgccacggtaagctggaatatactcatcaaatagttaggaaccgcctgtagaacagccttaattagaatctctcgaccccccgcagagaagaagctccgtttccaccctcgaacccgtttctgaaccttatcacaaatgcttgcaaacgtgcgcttcttattcctcccaataactgttggcaaacccaaatacttatcatgagtggccactgaacccaagcctaatacatccaatacactcgtgcgatctgcaggtaacacatttggactgaatgtgatagcagatttatcaaagttgacttgttgaccagaagcatgctcataacactgaagaatccgacggatagactccgcctctcttccattggctctcccaaaaattaaactatcatccgcaaagaaaagatgagacacacgaggcccataccgggagcatcgaaaacccatcaactcacc

SEQ ID NO: 347312 - DNA, 888 bp, Cannabis indica
ttaaatattaatatttattattaaataatttatatataaatatcggaaaattttttattcatatatgaggttgtacttgtagttgtacaaaaaactaatatcacttagccatgaataaaaaagtcattaacatattaaagtttgggaatctttaatcaatagttgctagtacggttcactgatgcttgttcttcaatgcaaataatcttagtttggattacggatgtagtatgacatcaaatgaaggtgttgtatataatagagattatatataataaggaccaatatgaatgaagctatctttatctaacatgttgtttactataaagacctaattcatatcatcatgatgatcaatagtagatcgacctaaatcctgagtaatcataaactcatgctcatgttattagtttctttgattcaatcgttaaagttttttaaagaagatgattcttacaacttctgttttgggaatctattaatgtggatgactgagaacatgatttacaattatggaatcctgactttcctaacggatcgaatgctagttttctttaagtcttaattctagaactagaatgttgtgcacaaatttagatggaatctaaattatactttcgctagtaaattaatggtactaaaggataaagaaataattagaagggtaaaacgtaattacgaaccaacacatggagggctaatcactgaaattgattatattaatggacactgtagtaaaactctgtaaatataattctataattgctaagagtttaattacatatatgtagtggagtaatcgtagaattaataaacaagattatttggttgatgagactcaataaataatttagtttattcgagtttagaattataggtttatggtcc

SEQ ID NO: 347313 - DNA, 594 bp, Cannabis indica
ccatcagaccacgaaaagtttgttggttactgtgatgcatccagaaagggtctgggatgtgttctaatgcaagctgatagagttatagcctatgtctttcgtcaactgaaggattatgaacaacgctatccaacgcatgatttagagcttcctggagtagtatttgctctaaaaatatggcgacactacctttatggtaaaaaatgcgagacttatacagatcataagagtctcaagtacttcttcacccaaaaagatttaaatatgaggcagagacggtggctggaattggtcaaagattatgactgcgagattttctatcaccccaggaaagccaatgttgtggcagatgctttaagtagaagaggtctcgggcaggttttcaccattgtgatgatagctcctcaacttggctcagaaatggttaatgctaaaattaagtttgtagttagaaagttacacaatctgacacttcaatcaaatttattagaaagaatcgaaatggcacagttggaagatcctgagctagtcaaaattcaagatgaggtatggtcggtctgcctagctaagaacttttcaatctcgaataataga

SEQ ID NO: 347314 - DNA, 408 bp, Cannabis indica
actcaaatcaaccccaaactcaaccaaaccttcaagacctgtttaatatatcccaaagaacaaaaacaaggcaacaaaaaacctcaacatgctcaaaatcaagattcaccattaaagagtcaagcttgagttcttaaactcaaagcttgctcaaaccttacaacaaccaccaaaacttgctcaaatcaacataaataaccataatctaatttaaaaaaacatcgacaaacaacaacatcaactacagtacctaaactcacaattcatgcataaaaccataactttaagcttaagaaatcaaagaataagaggtctaagagctttaccttggattggatcactaacacttggtctaacacactgatttgcagcaagaaaatactcaaattgttgctagtccttagggtt

SEQ ID NO: 347315 - DNA, 566 bp, Cannabis indica
cttccatggttgaatttgtaataagagttttcttaatacttctccagaccacagctccaccaccaagagtgaatactaacctagatgttgactttcaactatctttgtctgattgaaaatcataattactttatccagtaggatttaactctccaccgaaatatgcaagcgatagatctttcattaagatacttgagaatgtgctttacaattatccagtgttccaaacttggattagattggtaacgactaaaaatccctacaacataacatatgtcagaccttgtacataacattgcgtacattaagctcccaactactgatgcataatagtactttctgatatcttccatttattgaggagtctttagatattgatccttgcataaagtaattctatgtttggatggtaactgtcctttcttggaattctccattgagaatctttctagcaccttattgataaaagttgcctgagaaagtgctaatgtaatgccatattttcttaggcacgctatagtgattttttacttactgtgcaagcctttactaatcaaagggtttct

SEQ ID NO: 347316 - DNA, 538 bp, Cannabis indica
tagagtcattttacatctcaaccctaaattatgagtctaattatgattttttttctctaaactttgattaatctgttttgaaaaaactgttttcaaatcttatctagaaaactaagctaaaaaatgaaaacaaagaatctacattttcattagatttgaatacaggttttttttagtacgaatactattgacttttctttttctttttaaatctttttctccttcaattttttcacaatgaagttttgttttttcctatttttttttctttagttccttttttatgggttattttttttgggatttttcaataatatacttaaaattaattttatttacaaaaatattttaagaaaattatttacacaaataccattgtgccacgtcggcatacataccgaaatttaaaataattactgaaaatggaaaaaaaactgaaaaaatctcgttttcaaaaatttttgtttttttgggagttttaaaaaaaagtaacaattttagttacttttgttgtgaataagatatatatatttttttt

SEQ ID NO: 347317 - DNA, 911 bp, Cannabis indica
actaaaataactttaaataggtcattagcgtgtcaatttcgtattagccgtatcaacccgaacacgacccgtttattaaacgggttagacgagtcaacccgaacacgactcgaacccatttaaagcaaacccaaacccgctaactctcgtgcgggtttcgagttgtgtcatcgtgtctgacccgttttgccggccctactttcttctaaactacaaatttatttacaattgataaaaatataatttaatattattaaaaattatttttatcaaatgcatataaatttatactataaaaaaataattaaaaatttatagaaaataaaaaattttatacaacatattttttatatatatatatatttgtgattttaatgaagtaaattaaaatattattattattattattattattattattattattattattattattattattattataatagaatcttaacaattcgagcactttgaaatttataatttaccaaatactcatctcaacttttttttacagttctattacagctgtttttctctacagcacaactacaactacttttcagtagggctgaacattttgagcgggtttgacccgaacccgagcaacccgcctgaacccgaactggtgaacccgcaaaaaaattttttaaaaaaagtttcgggcgggttaggttcaacccggtacccttcgggtgggttggcgggttgagattttaggggtaccgagtttcgggttgaacccgcgaacccgcccaccaacccggtttataaactatgttatatatatatatttattactgtttttatatatataatatggactttagatttttatggactatggatattggatatgaatgtattttgaaatattttagtttttcacttttatcatgattcat

SEQ ID NO: 347318 - DNA, 736 bp, Cannabis indica
ctaatgtatttttatacatcaactaaattatatctgttttaatagtttgcaactttaattttgccattttatggaattcaagactaaactcttcattatcaaatcaattcaattaaaatgtatttcagagttaatttagtcaaatagaaaccaaattcacagttaatcatctcaatagcaatcattatttaaaattctttcttttttccttgttgcatgtcctcttgttttgtcctttttttcctcatttggtgcatttgatttgtgtctttgtctcccaactaggtcttgttcttttcttctttggtctttccgctttcaccctttcaagtggtggcaatatttcaatatccttgatttcttgtagaatgtcccaactgctttgatttcctaaaggatatacaattgcttcataggtttccagccagttctttgtgctatagtaatctgaacagtaattttgtgggtcaagatacatctctttcatcactgctaaggcatgcacacatggcattttatctatttgaaacagtaatctgaacaataattgtaatatcccaataagtctaatggtaaataattagggtttatatttatattatgagttaatcaggtaataagtgggattatgatcctactaatttatttcagtataaaatttaaattttgctataagttagtaaataatcgtaatttattaattacggagatttatatagcatgtgtgaatgtaata

SEQ ID NO: 347319 - DNA, 793 bp, Cannabis indica
aagtagtggcacatgttggtgtacatgttggtagcatgttgatgcttagtttgtatggcagtagtattttcgtaaatatcttcaatattgtccaaaacgggacgagacttagtattcgccatttatttgggtctacaaatacaatggtgcaatcggattggagaaactatgtgatgtctacagagccaaaatcatgtatgttcctggtagaaggctaaaagctcagaatactctttaagggagggaccctggtgtcaactctccactacccccttgcaccttagtgttaagcgagctactactagttagtgaggctagtagagcgggcatatgaggaccgcgaggggactcatatgtctccatgagttggaatactcatggacattatcggactgacctggtagtgtgtctaagaagctgccagaggttaatgggtacgtttccattggcttgccggtatgccgcttgcatgggacgtggcccaaaccttaaagagacattgtggtgcgccttgcccacgagtctcaacacgagatgacacaggtagttagtcatggtctagtttgcatgtgcgcatgggatggatgcaccatgttggaaagggatagatcgtctaatgtatactgctagtttggtagcttgtctcaagggcctgcaaacatgcgtggaggtatggcgccttgaggattggtccatagacgtatgggaatccttggggaatgagggtgacttttcggacagtattgaatggggcatgatagaagtgttggcacgtcggcttggtgttggcatc

SEQ ID NO: 347320 - DNA, 1534 bp, Cannabis indica
aattattttcatcttagtaataaataacataagattaaaatgtgatatattatatatatattattatgaatataatatataatataattgagaattatatacatgtaataatcacaatataatgtgattgggagttacatatatgtaatagttgtaacataagaggtagagttacttatattttgtaacttccacttgatcactaattaagtgtgtaaagagtggttacacaacttagttttttgaaattcaaaaactataatttaaatataattgttggggattgaattttatcatttataatgtgtataagtgatacaaaataaagtgggaatgcttcctcacatctgcgctcgtcaagccaaccttactttttgggaggtgaaacagcggttgaagcagacatttcgaaaagaaagcatcgatgatatatatatatataaatggtcacggttatccgagagtgcattccggaaaaagtggtttggaataggttggagtgttatttgcaaaagctgaaaaattttataactagtaactagttactatttttttcagcattaatagtaaaacgttttttcctattggaatggcttttaacaactcccataacctccaaatcacccatttgcaccccattaagaaatggtaacaaccattgggtgtgggatgtttgaatttcaaagtttgtgatcctaaacactataaatagaggtattggttcaccctttgagacatactcttttcttctatctttcaaacacaaagctagagagttccaaggcttgataattcctagaagtatttccacaaagccctaagtgtttcatagaggggaaaataatcttcttggataaaggtgtagaaactttattcaagcttttggtgatcttcatctccactttgggtgtttgttcttctttcttattttattctattctcaagttttatattgttctcttgttctcctctatacactctctatatacactactctttatatctctactatatatcatctattatatgtatatattctatattatatatatacactattatatatatcactactacaaaaaccccctttagaggcggtttttaagccctttcagcatcggtttttacaaaatttgctaccgacgctgatcaggacgacgctaaagggtatatatgaaccgacgtcatatgtacccttatggcgtcggttattaactaggaaccgacgccataggggtagcgtagcaaccgacgccaaaagcaagcgaatttcagtttttttttaattttttttaatttaattatataattttaagtacattttaattatatatttattaatttatatattattttatttaatttaaattacatatttattttttaaaatgtaaattaatattatttaaatttgggtaaaatacataatttaatttcataaaagtaattaaatattacacaaacactaatgtaaaattagttaaaaatattaataaagttaataaatctaactacaagttaatctataaaaatt

SEQ ID NO: 347321 - DNA, 1225 bp, Cannabis indica
ctattgatttggatggagttatacatgacgcatttacacataatattggtgatgatcttcatagtgaaagcgatgaaccaaatacacaagctaaagaattttacaatttgattcaagatggagagacagaactttatccaggttgtacgagtttttcaaagttgtcgtttgttatccaattatttcatattaagtgtataagtggatggagtgacaaatcgttcgaaaaggtacttgagttatttaaaagagcattaccgaaaggtgaaacattacctaattctttttacgagacaaaaaagttaatcaacgggttaggacttaattatgaaaaaatcgatgcatgtcgtaatgattgcatgttgtatagaaaggaacatgcaaatgacacagaatgtgaagtttgctctacaccaaggtatgtttttaaatataatatattttttcttttatatttattttaattcacaaatacttggtagattagaataacaccattttatttatcaaaataggactgaagctaaagtcttgcgccattttcctttaataccaagattacaaagattatttatgtcatcaaaaacatctgattttatgacttggcatcataataaagatcgtagaaatgacggctgtatgagacacccaagcgattctcctgcatggatgacttttgatcacaaccacaaggattttgctgcagatcctcgaaatgttagacttgggctagcttctgatggaatgaatcctttcaagacattaagtgtaagtcacagtacatggccagttattttaataccatataatcttcctccatggatgtgcatgaaacaaccaaattttattatgtccttgctcatacctggtccagaagcacctggaaataatattgatgtatatttggagccattgattgaagagttaaaggatctgtgggaaattggagttgaaacttttgatgcatctacaaagaaaaactttaatttgcgagcatcactattatggactattagtgattttccagcatatgctaacttatcaggatggagtacaaaaggaaaatatgcatgcccatgttgtcatgaagatacttgttctttgtggttgaagcacagtaaaaagcattgttatatgggtcatcgtcgttggttagaaaataaccactcatttagaaacgatgaaaagtcttttgatggcacaaaagagaaaagaatggctccaa

SEQ ID NO: 347322 - DNA, 539 bp, Cannabis indica
ctatgttcaaaaatttgcaaagaagtggaattaattttacagggtcatcattttatggtagatttgtatatgcttccattttcaggtttggatgtgatacttggaatgcagtggctgcagaccttgggcccttgcatccatgaacataaggaattgacaatggagttctcttggcaggggagtatagtcaaatgagcagcctctaaggatgaaacacatcaattatcttatagtaagtttgcgacgctgctgtgggagggtgaggttcgttgtttgtttcgtttaatgactgtcatggatagttacgagtcaccgtcggctccatcacctcaaatgaaagctaatttgccccctcaatgtaaaggcatgttaattgaatattttgatgtgtttcctaaaccaaaagggtggccaccatacaaagaatttgatcaacgcatccatttacaaccgagttcagcacctattaatgtgcgcctttacaggtgcccctattttcagaaggacattattgagcaaatggtcaaagagatgggaga

SEQ ID NO: 347323 - DNA, 257 bp, Cannabis indica
agagattctagggtttatttgttaattaagagactttattaagtctaattaataaatgtgtttacaattcataaatgtaattaataatgaaatatcttaaagagaaaattttattaataatctcaaaattgtcataatgaattgtctgcataaatatgaagtagggaacagaatcccaaaccaataattgaaactaaattgttcattaactaaaataattaattcaaaaattaaagaagattcgagcttcatcttca

SEQ ID NO: 347324 - DNA, 900 bp, Cannabis indica
cataaatattgaatttaaattctgagtgtttatgtgatatatctctttgcagagaatattataccatagattttgcatcaataataaaacacaaacacatacaatcatgataaatatataaataaaattggtattggcatacaagttaaagaaatatgaagctcaatttcataaaagcaattcaccaacgaaaatttcttaaagaaattttttttattaataatctcaaaaatgtcataataaattgtctgtaataatatgaaatagggattagaatcccaaactaattaattgaaactaaatttttcataaactaaaacaatttattcaaaaattaaagaagatttcgagcttcatctttacttggacaatctccatcctcctgtccaaccatccgactcaactcgctgggatagcaatccaagtttaagcggctgaagctgaagtaaaaagaaaataaaaatggttagtagatccagaattaataaccaaagagaataataattctctaaaacacatgagtttataacaaagatagaaataccttgtttctttgccaaaaacttaggacactggggtttcgagtggcccttttcgttgcaatagaagtacttttctttttgctttgcattgggattagaaacttttttctcattagatgtattaacaactttaagaggcttctttctattcctccacttcttctttttgttgggttttgaagttgaggcaatgtttgcctcagccttggccgtaccattagcagtgccagaactaggagctttgtttcctcctttctgtggtcctccaatcaaattctaaaatgtctgaaggttgttgattaactcgtggaagtcaaaattcaacttgttcatgacataatttaaggtgaagggcaga

SEQ ID NO: 347325 - DNA, 666 bp, Cannabis indica
tagatctaagatcctggtaaagtaaattccaacaggtacatcatagtagaaagggtcatgtacagaagaggattctcgatgccattactcagatgtgtcacacaagatgaagctgcacgacttctatctgaagttcacgacggattctgtggaaatcacgcagccggacagagcttatcaaagaaaattctaaggcaaggctacttctggccaacgatgattgaagattcgagagcctatgttaagaagtgcgacaagtgccagagattttcaaagataccaagagctccgcccaacgagctgacacagatgcaaagtccgtggccctttgccatttggggaattgacctaatcgggcagttacctaaaggtaaaggcggagtgcagtatgcagtggtagcagtcgactactttactaagtggactgaagccgaaccacttgcaaccattacatcaaagaaagtcaagactttatagtgaagaacatcatatgccggttcggactaccgtataaaatagtctcacacaatggcaaacagttcgacagccaatctttcactgatttctgtgcgaaccatggtatcatcaaaagtttctccgcagtggcacatcctcaagcaaacagtcaagttgaagcagtcaacaaaaccttgaaggatacactaa

SEQ ID NO: 347326 - DNA, 1058 bp, Cannabis indica
ggctatggtctcattatccaaaatatacctcttaagctaaaaatctagttttctctgtaggttcatgagacctcttccttcttcttcttctcataatttcgaaatactatagcctctcttcacaaacaatttcaggccttagtgattgagtgcatgcccacacatttcaagtaagtcctcaatcatagtgtgtaagattgtgaagaatccaaacaacaagaaggagtttcgggctcagatcttggtgatactctactacagaaaggatacaagagttagagatctgagcggaatgagtcatttaattccgctgcaaccaatgtaaagtttctcataccttttatgtgtttattttatatcgttttaaaagttcatggttaggatgttaagaacatacttgttagtaaagctaggtcctggtaaaatatattccaacataatgtccactgatgtcagtgtggattatgtctaataaagattgactacagttagcagtcatctttcttgttttagtcaattttccacaagtgcaatcagcacaagtatcccaaccagaatcatcaagaagaggaagaatttcagctctaattaatcgttcaaactttgcttcgaaaattggacccaatcttttgtgccataataataaggatgtttccttaaaataagaggggaagttaagggagccaatgacaatttgaaaagaccatcagagtaaaaacaatttctaattattcgaaatcaaacataatgttaaaattatgattggaaaaacgaaaagaaaatcattattgaactaaaaggggaaccaaaactaaattacttttaaaagtaggattcaagaaagtactattcaaaaaaatcttaaccctactctgtaattctagaataaatgtgccaacatagataatgtcgacttcaacatgagtgccactttatgttttggctcctctcacttggcttcctaagatcccttagccctcggctatacttgcttcttttataatttttcctatcctttgttgagcttaagttgagagacatagtaagaagatgcattc

SEQ ID NO: 347327 - DNA, 847 bp, Cannabis indica
tgaacttcttagccaagtatgcagctagtattgactccatgagaagatggtaacttttcgaaccggtaggtgagtaaaccagttttgattttgtgggaagagttcaaggttctcgaattccaatcatatcagtattgagagctagagacttattagaagatgggtgtataggttatctgggagtagtgattgataccagtagactcgaaatagttgggcctaaatatgtaagagtggttaaagagtttttagatgtgtttcctgagaaattacttagtttaccaccccaacgtgaaatagattttgttattgatttgatacccggagtagagcccgttttgaaagcgccacataggatggctccatttgaacttaaagaattgaaagttcaacttcagggaatgttagacattgggtttacccgacctagtgtatccctctgggaagctccggtactgtttgtcaagaagaaggatggatcccttcggatgtgtatcgattaccgagagttgaacaagcttacagttaagaacaagtatccattgccaagaatcgatgacttgtttgatcaacttcaagggaagacagtcttctctaagatcgatcttcgctctgggtatcatcagttgagaattcgagaggaagatattccgaagactgcatttcatacgaggtatggacattatgagtttctagtgatgttgtttggattgactaatgctctagcaacctttatggatcttaagaatagagtatttaaggatttccttgataactttgtcatagtgtttatcgatgacatccttgtatactctcagtcggaagcagaacatgagcaacatcttcg

SEQ ID NO: 347328 - DNA, 734 bp, Cannabis indica
ttcgctttatttttacttgagcgattcaaaaaaatttcgctagtgaacaactcgcaaatcgacttccaactctccgtattcaagtggtcaggaggcaatccaagaactttctcccaatcttctgtttagtttaatgttgtttaaaccacttgtatctgattgtctttcgctcactatacctctcagccatctccgaatataaagtcctcataagtaggtctcggtggggattcccatcaatatcaaaatagtacttagaataatttaaaaattagattaatttacaaataaggatataaaataattacaaccatgaataattaaaaatcactcactcttattcgattgagcacttgatccttatattgttggggtacatcagaaaaattgcaatgatgacctgggcacaacatggttactttctggcccataaatcgaacataagcgctcgcttcagtcccaactattttgccagttttaagatccacctcaacctttaagggcttactagcatctctccttttttgttcaagtttagtgtttgctgcaaggccacgaccctttcttgccggaggggttatactttatttattcgagagaaaagtttttattagtacattgaacattaaccattattttattattttattagtacacttagctacctaaaaatgatacttcagtaaagtaatataattactgaaacgaggcctcaataatttatctctattcag

SEQ ID NO: 347329 - DNA, 555 bp, Cannabis indica
cccaacccttgcatcaaaactaataaaaacaaacaaagaaatcaaagggaaagaaagctagggtgaaataccttgagttgaagcttcacaaatcaactagaattacacaaaattgctttggaaagaattggattctcagctggttccttggggttcgaaagagagggagaggaagacttagaaatttctaggttgctttttgtctaatttttctttttcttgattttatcttatcctttatattaaataaaattaaacataatattttactaaaaagatatatattcagcccccaaaagccactaaaatccaaataataaaaaaaacaaggaaagacctatttacccctaactaaattaaaaataaatattaactaccaagggtaaactagtcatttccaaatcccgaaaattctaataccgctaaaacctaacaatgatacttcgataacatactatacaatataaactacgactctctaaaggcccaacgtcgctttccacagcttccgaacacaatcacagaaattgggtaattagacataaaatagcataa

SEQ ID NO: 347330 - DNA, 1053 bp, Cannabis indica
tttatagaaaattaaatttgagttgaaaattaattatttaattttaaacaaatttaaattaagtaattttcataatatttattgaaaaaataatactatggatggaaaataaagtttatttttgagatcttccaagggtataattttataaatactaaatcaaaatttatattttgagttatctaaattagtaattttaattaaataaatacatgttaaaataaatagattaaaataagtatcaaatcaaaatacattctttaaaataatgaggtttagttataaggatatttgatatccattgtttgttctatacagttcttgttttagtgagattcatctctaatagatggacgttcattagtaatttaacgccgtagaatctcgaaagataagtattattgtaagtgttcatattcttagtaacgtccatccgaataatgacttctaagagtaggacttgcaaggtatgaaataatggtggaagctcatgaaataggaatgaccttgactctcgactcaaaacgaagcaatgtcagattctctttttggtagaataaaaggttgctagaatggtatacattttagatgagttgactactctattcaatgaataatatctttgactctcgacttaaaacgaagcactatatcaatttttcagaaatcttggaaattatttaagatgtggttgttttgtgtttcacatgtctttgttacttgctatgtgtatgataatttttgaatatgtatgaatttatattgaaccatgttactgtttgttattaatgtagtagtagtaaatttgagtcttcattgttggtctaacttagcctgttgtttttaatgggacaaatcctaaaggattgtcatccattagacaaacataatagtgttagatctggacaaataagtatttgtaaatgcaacatctagttttacatccaaagatgacaacttagattagtgtttaaaatatgaaacaatgaagagattcataaaataagaattattttgactctcgcctaaatggaacatcgttggattcttatt

SEQ ID NO: 347331 - DNA, 701 bp, Cannabis indica
aaaaatttatatttttatgtaattatccctacaaaattgaggtatgaagttaatttttcgatgcttttggccttaattgtttttaataagaaatttttgaaaataatatttccattatgttttgaaaaaaaaagtagaaatcaaaagactaaaaaaaatgaattatcccacaaatacacaaaaacaataaaaaaattacaaaaatatgatttcacggaattttaaatatttttacgattttttattttatttacagaaaatacggtcttttaatgttgtactcttgttaatttattgttgatgttttattatctgtatgttatttttgttgttattcagatgttattttcatgttaattttatgtagttttcttgtggttttcgtgttgtttctatggaaaaccgtaaaaatgtaaaaaaaattatgtaagcatgaagatgtaattttttacaaaaaaaataataccttatgtaattatccctaaaaaaatggaataattacataagacaacatttttctgtaaataattacatttttacgttcaaagaacattttttttttacattgttacggttttccaaaaaataacacgaaaacaatataaaatcaacaacaagaaaactacataaaagtaatatgaaaataacaacaaaaaataacatgcagataacaaaaaatcaacagtaaattaacaagatta

SEQ ID NO: 347332 - DNA, 443 bp, Cannabis indica
gggggttatgtcctacatagctcctcttactgggcgttagctcacaggtactctgtgtgcaggcaaagacacaataactaaacaatgaggatggcgagctcaaggcgtggattacatgttagggaattgtcacgatgtattggtttaaaaatatttcgttaaagattatgattcaaataatcccgtgatccgtaagcggaaacaccgggtaagatgtgcatgttgggttttatgccctaaataaaacttcatttcaatgtaatctctattattcaatatcaataaagaaacataagtatttttcattcatttgtgtattttttagttcgtattgtcaataacttgtctatttgatttataaattcatccaagcccttttcacatttatgttcttgtttattgtgtcgtcagcacagtggaaagtaatcaatactatgtgatta

SEQ ID NO: 347333 - DNA, 1091 bp, Cannabis indica
attaatattattgtaattatacaataaactatacttaatatagaattatatggtaaatcaaaggtgatacaatttagtcaatggacttggaaaagtgaagagcaaaactcataccctatgttcactaatggtttcggctatggtaaaattcaaaaggtgatacaatttaagtcaatggacttggaaaattgaagagcaaaactcatgccctatgttcaataatggtttcagctatgtggctcctttttgctcaagttatttcacttttattataattgactaattagtgagaaaaataaggttttaacatacatggttgcctatatataaaaggtgatatgagatattaatttgtatattttcagttagtttaacaaaagaaaattgaagctctcttacccctttacttttttcttcttctataattttcacaccaaagacattgagaaaatagcccactctatgttatttgcataccttgataattgtggaagattgtaaaaaaaattgttcaattcaaatttctaaaaaaatcgaggttcactacttgattatattctactatagaaagaaattaagggctggagtactaatcggggttcatacccttagttcctacacacatctccatgcatcaatgcgtggaggcgcatgtggcatcaatttcaatgatgattctctccagtggacagttttggtctgaccgttcacttttggttttgggttgtttggtgctcatattttttttgcagctttagttctccaaattttgggctttgattctatgattagcgtcttcatctttttgttctcttattggattttggttgtgagattttgattgctgactctgtatcttatttttttcccgagtatctcattttgttcccaacttgttgtctcaacttgtttgttgtttgttgtttgagttggtttggtgggacgaacataatatttgtaatggtttttggaagacggttcttgtttctgtaaatgaatatttcaaattctaacaatatcaaagagtctctttaagtattcatcttcttctatcactactattgttgattcaagtaaatcaaattcgtgtc

SEQ ID NO: 347334 - DNA, 1111 bp, Cannabis indica
tagataacaagcagtatatagagcttctccacaaaaatgtttctttaatccagattctagcaataaacatctaactttattgagcggtgttctattcattcgttcagctataccatttgttgtggtgttttaattacagttttatgtctttggatcccaaactttaaacacaattcagtgaactcatcattaacaaattctaagccattatcagtcctcaacactttgattttagagttagtttggttttcaacaagtgttttccagtttttaaattcttcaaaacaatcattcttatgtcttagcaaaaatacccaaactttcctactgaaatcatctacaatagataggaaatattgtttacctccttgagttgttaccctgctggctccccacagatcagcatgaatgtattctaggactgattttgctctgtaattgctatttgagaatttgatcatatgttgctttccctgtacacatatctcacaaaaggtaggttagcatgagtgtaattctgtaataaaccttgtttagataattcaactaaaccttgttcaccaatgtgccccaatttagcatgccataacttggattctgagttacatttgtcaacagcagctgcatgtgctggtgtgacactctttccatcaagatattagagaccatgtctcttaattcctttaagcattagcaaccctttagtgatcttgattactcctttgcttgtcttgtaatcatatccttcatcatctaaagttcccaaataaacaagatttcttttcaaatctggaatatgcctgactttgtgtaaagttttgaaagtcccatcagaacttttaatgacaatagacccaattccaattacactgcatctgtgatcattctccactacatcactgccactatctatggttttgtaatccatgaaccagtccctatttggactcatgtgataagtgcacccactgtccataatccaatcttgatccttgagggaggaactggtgcaagcatcaccatctattgagctttcaagcttagtttcataattggaaatggtgagaacatctccatcagaatcttcaattactgcattagaatcattgtt

SEQ ID NO: 347335 - DNA, 797 bp, Cannabis indica
tgatatggacgagataattacgcactacaggatgacctcctgtgactttgtataactatgaccagaaaagatttatgaaggatattcaactgaagataagtcgaagggaaagaagtcgaagaagaagaagaagtttgattcttgttaaatatttatagttgttttctcgacagattaaatgtttgtagttttgtttggtgtttttattgttttgaacaatacattatgatatgttaatattttctatgttaggttgacaatatatggaatctagtttttatattgtttctgtattcttttggttttttctgtatttttttttttttgtaatacatacttttatggtttttatattttccttgtgaagtgttgttgttacattgtgttttgtttttatagttttttgtttgattttaaccggttttttcatgtttacttttgggcaatccaatgtgatttgtatatttaaccggtttctttcccagtttttaaggtttttatttgatgttgatttgtttttaaccggttatttttttagttatcttacatatttttttttgtttattaagttgtttgtgttgtatatattaggtttttctgatttttctttttgtaatacatatttttatggtttttacattttccttgtaaagtgttgttgttacgttgtgttttgtttttatggttttaaccggttttttcatgtttacttagatttcccaatgtttttcgtatatttaaccagtttcttttccagtttttgaggtcattatttattgttgatttgtttttaaccg

SEQ ID NO: 347336 - DNA, 758 bp, Cannabis indica
tgtgacaagcgctaaggccaatttttccagctgagtgtatcttgtttcagcatctagcaatgtcttcgaaacgtagtaaatcggttgttgctttccttcatcttctcgaactagtgcagcgctgaccgctgcttctgaaactgccagatacatgtacagtgtttctccatccttaggctttgctaggagtggaggggagctgagatagctcttgagttgtcttagcgcttcttcgcattcctccgtccacacaaagtctttggtctttctaagagttgaaaagaataagtggcagcggtcggatgactttgaaatgaaacggctgagcgctgctatccttccgttgagacgttgaatatctttgattgactttggagattgtatattttggattgatcttatctggtctggatttgcttcgatccctctttttgtgacgaggtaacctaagaattttcctgaagagacaccaaaagagcatttagtaggattaagtttcatattgtatttttctaatacctggaatgcttgcttgaggtgatcgaggtgattctctgctgctaaagatttgacaagcatgtcgtcaatgtaaacttccatcgtctttccaagcatgtcggcaaacattcgattgaccagcctttggtacgtggcccctgcattctttagtccgaacggcatgactttgtagcaaaaagtccctcgctcagttatgaatgatgttttttcttgatcattgggatgcattaagatttggt

SEQ ID NO: 347337 - DNA, 598 bp, Cannabis indica
actacaaaaaatagctacaattagtgataattttttaatcataatgtaaattttttgtgactaaatgtgacttttagtcacaagtcacaataaaaagttacttgtgactaaaacataatatttagatataagttgtcactaatttagttttaatcacaataagtactgtgactaaaaatacatttaatcacaacaaattgtaatttttgtgattaatacttttagttaatatggattttttaatcacaacatagaaataataatttataattagtcataatttttttacttttagtcacaaattttgttgtgactaaatgtaaatttttttgtaatgccaaataatgtaaaattacatagcttacttgatatttttccttacaaattataaggttactgactgtcacaaaaaataactattaataatataaccaattcaagaatgattattctaatttttttaggatgcattgtacaatgttaatatcttgacacatgattgttaaacatgatagataataattgctttaatattggatggtagaaactcctttctcttatttttgtatgatgaattatttgatctaacctaaaaaaa

SEQ ID NO: 347338 - DNA, 789 bp, Cannabis indica
aaaaatttaagagaaaaaactttctaaagcaactaagataaaaattcacacacaaaaatcagttaaataaaatagctcaaacaaaaatattcattcaacatgctccaacccaccaaataattatacatataccatatctatctaaaaaatacttatttgttatgttatataactagttctatgttagttatagccggtttgagttatttcgtgttatttatttttattcattataacattgttatagaactggttctaatataattataattagtttgagttattttgttttatttgtttttatttattatgtatagaaccggttatatttcaattataaccagtttgggttattttggattatttattttctcttattatattatagaatcgtttttatttttgtttatatttgagacatctaatacttcttgtaacttttccagtgactttttccagtgccggtgaatttttctggcgaattttttggcgtcagtaacttttctgacaacttttcctgcaaaacatattattatttacaaatatgggatttccatctttttttacagaaataagacataaaaaaaaacccatataaatatatacataaaaataaaccataaccctttaacattatttatttataccatgaaaaaataaagttacataatttttccatatataatggaaattctacttcaattaatgagttcaaaaggcaatgcataagggtttttttttttttttttataaatatggtttttttgtaagtggtttagaaatatatgg

SEQ ID NO: 347339 - DNA, 708 bp, Cannabis indica
actttttgttgatgggctatcaacttcaactttgttgttgttcgcttctcttcgatttcatcaagcgattcggctaggagtacgtggtttccttcttggttgtacgtgaatcttctgtgggatggcgactcaagttctgcgtgtagcatagcttcatatccatatgccatggcaaatagagtttgtccggttgctgttcttcagttgtttgatacgaccatagaacttcagggagctcctccggccagtttcctttagcatcctcgagtctttttgttaatgtatcattcacggtcttgttgactgctttaacttgaccctttgcttgaggatgtcagtgaaggactggctgtcaaaatgtttgccattgtccgaaactattttgtacgacaatccgaaccggcagattatgttcttcacaataaagtcttgaactttcttggatgtaatggttgcgagtggttcgacttctgtccagttagtgaagtaatcgactgctaccactggatactgcactcctcctttgcctttgggtaattgtccgatcaggttgattccccaaatggcaaaaggccacggactttgcatctgagttaacttgttcggcggatctcgaggtatcttcgaaaatctctggcatttgtcacatttcttaacataggcctttgaatcttcaatcattgtcgggcagaaataaccttgccttag

SEQ ID NO: 347340 - DNA, 596 bp, Cannabis indica
tcatgatttagaattggccgcagtagtatttgctttgaaaatctggcggcattacctttatggagaaaggtgtgaaatttataccgaccataaaagtctcaaatatttctttactcagaaagatttgaatatgagacaaaggcgttggttggagttagtaaaggactatgattgtgagatcctttatcatcctgggaaggccaatgtagtggctgatgccctgagtaggaagggtcccgggcagatagctagcatgattcagatcttacctcagttagcagaggacatggtctgatctagcattgagttcgtggtaggaaaactccgcaacttgacgctgcaatatgatttgtcaggaagaattaagtgtaatatcccagaaaataaataatatttaaatagacatattttattaaatatgtaattattttggaaacgaagtaagattatgatcttacttaggttaattattgagaaattatttaatgaaatacgatattttcgggctcggcaattgtgagaatttagcgatgtggttagtaatgtcatgacattaatgaaagaattattttgagaatatcctggattaagttaga

SEQ ID NO: 347341 - DNA, 773 bp, Cannabis indica
ttattattttactttattaaaaaaaaatgtaaataaatagtcatatttctaactttagtgatagttaatggttttttttttaaaataataaagaaaatgtcctttcttacttttcaatacctaaaatattctctattatataaaaggtattataaaaatatcttaaaataatatgaatataacatacaaatactatactttagtattatgagtattatgtccttttttacttttactgataggtattcatttaattttatttttatttctttccttcatgatatataatataacatacaaatattataccttagagtaatatgaatataccacaacaattctatagtcaaataaatatatataaaaaaaaacttaaataaacttccacaagtttttttttctctttcatgatataccattgcaaataaaaataatataccactctttttatttattaatatatcatagcacatcataataaagatatatcgtacaaaataaaaaaaaaatactaaaaacttaaattaatatttaatagtttttttttttctatccttcacgatataccatatcacatacaaacgatataccttagaccaatataaatataccacaaaattaaactaatatactattaaatgatttttttttccacgatatacaatagcatataaaaattatattctacattataagcataaatactatagtgaaaaattaatataccaccacgtatagtgaaaaaaatatatatatatatataccaaaactta

SEQ ID NO: 347342 - DNA, 574 bp, Cannabis indica
aaaaataaaaccctaatttttatcaagctaaacttactgcattttcaaaattttagacataaaacacattttcaatgacttggtgttgcagtgatcgagatttgtagcgccgatgttggagagaaaaatcagaacttggtcaacgacttcgagagaaaggtccttggagatcaccgttgtgggagagagtaacgccttaatcgactcggaggaggagggcttcgccatttccgtcgatgatggtaactttaaccctccagtcgtccaagcttgaaatgaagcctagaaaactcaaaatctaaactccgaccttccacccttgagccccttggttgtccgtcgttctccttctctccttcttggttgtgcacgatgtgcgagctccagtcactgcaggccaaaatggaggccatggatgatctccctaggtcctgagatcttgtggtggtactcaagggctctcatggctgggtgaaagaaatgaaagaagatgaacaaagaaaaaaaaacagaaaagaaaagaaaaataatataaataaaattaatttttaaatatatttttgagttttttttt

SEQ ID NO: 347343 - DNA, 672 bp, Cannabis indica
tcacttgcgtgagtatactacttgattgcgtgcacttgcgtattgttttataattttcgcacaagttttggcagcacaaataattagggtttctaggttttattttcttacacctcttttgttctacccaaaaatacaaacccagaaaaacttaaggttctacccgaaactaaacccagaaaaacactccctttaatctcggcaaaacacactacacatcaaatccgaaaatcaccaagaacaccaaacacacacaaatacaaatataaaaaatatagggattaagatgagagatacaaacagtaatggtaaagacggagacaccaaatttgatctcggagttcgcccaaaacaaccggctacttctcagtcaagccctcagcttgattccattaatcatcaaataacaggttacactctctatttacaactgtatgtatttctctctgttttctctctttggatactaacaaaactctcgtttctttttacatgaacacacaagtgattctctaggaggagctcacaaggagatgacaactctcagccaaaaggctctctttttctctgtgttatttctgttgttgttctctactggttctgtctatttactccttgttgtatctcttgttctgtatctaagaaaaaatacttccttttatactgatctgt

SEQ ID NO: 347344 - DNA, 584 bp, Cannabis indica
tttctctctgttttctctctttcgatactaacaaaactctcttttctttttacatgaacacacaagtgattctttaggaggagctcacaaggagatgacaactctcagccaaaaggctctatttttctctgtgttatttctgttgatgttctctactggttttgtctatttactccttgttgtatctcttgttctgtatctaagaaaaaaatacttccctttatactgatctgtgattctgatctagggcagagccctagtgtaatattttgtaactgatttttgtaactgtttcagttgtaactgattttatgttctttagtcttgatctttgttgtatttgatgtaaagggtatatttgtcaaaccctgtgagtagtgttatacaacttaaggatatgtaagtgaatctgtaacaacaattagattattagattttgatccaatgatgaataataaaagagaaatttgaatttctatgcttaatttagaaacttaattaaaaaaatatataaaaaaatatcactttttacactatattaaaagatgtttatatacaaaatacttaagtcaaactcaattttt

SEQ ID NO: 347345 - DNA, 640 bp, Cannabis indica
tttcggacaacgagatccaagagcaagttactcctccaatttttcttgacgccaatgttcctcatcccgaggtgacccccgctgcttcttcatccagttaggccatcgagactctttcggtcgcagctagggaagttaaatcttaatttgcccaggcatatagggtcgactgttggcgcaaacttcaaactctccttcccccagattaggattttctcaatcagaggagcctaaaggagatgctttcaaggaccttgggaactcactttatggtatgtttgctttgttaatataattatattatcttgttatacctcttttatactcatctgtttgcaattctccaggcctcttttgcatcttttgcttctaatcgactactctttgagcggctcgagtatttggagggcaagactcacaaattaatatcccaatgcaaggatgtgtgtgagcaacaagagaatgcctaactggagattatctgcctcaagcaagaagccgagaaagcgaaggaagaagtagggaaagtaaagcaggaagccgagaaggcaaaagaggaggccaagaaggccctcaaagtccaagacgatgagtttgaggagaagcttgctgaaaaacttgctgagaaagaaatcgagac

SEQ ID NO: 347346 - DNA, 554 bp, Cannabis indica
gacccatcggacccgatgcccccacctttttttttaatggctgggtcaaagtcgcctgtgggtgtggggttccgggttgggtcggaggggttggggtcggactggggttgctccaatgggggtttcgggtaatggtgggatgtgggtgtggtgctttcgtggtcggcagagaggaagagagatgcttgagtttagggttttcaaatgtgaagggtatttttgggaaattaacaatgtggtcatatatgaccaattttaataactatgcatttagggaaataattttagggtattgtaagtatgaaaatttaaattttcgtataataaatcatattaattcacatatattgaactatataataatataattcctcaattatttataaacatctaattagggttttgctaatttatttcttaattctcggatattacattagtattcatattgtggttattatatacattttataatattaaaataataaagattaaaatactgtaaaaatatttaaaatactgttatatatattaataattatgtggatgtccaa

SEQ ID NO: 347347 - DNA, 839 bp, Cannabis indica
tttaatttatagattaggtataatatataaatttcctagtaacaaaatttatgtattattaacaattaaatacaaacttcttttattgatacaatacaagtttataatctatatatatgtgtattttttacacaagcatagttattcgagcaaaaacaattattctacttcaataacattttttgaacactctacttcaataatattgatttagaataataatattaaattgtttttgtatttgtttctttttactgaagaaaaaaagtaaataatcttttaaataaaaataataaaaaaaaactataccatcatttacaaacttatttttattaaacttaaaaaattgttatcttttttaattattttattataaaaacacataaaatttatctgttcattctactatttttaatatttgtcataaaatgaccattctttaatatattttaaaaataataaattatttatatttctaacttcaaaattgttactttgtttgtaatatacaattctaaatattttatatccaattatatcacttaatcagcataaaaaaaaatcaaaatataaaaaattataaaaattggacaacaccgcgcaaagcgcggcttaattatctagctagttaaagagactctctaatacccttctcaagataataactatttttactcattaatcttgaacggctccatctttagttcatcactattttcgtatttaatttgaatatattagaatataaaagtaaaataaaatgaagtataccataaaatttaagaagttgaatctagaagggaaatttgaatttgtatgcttgcatttaattaaaattt

SEQ ID NO: 347348 - DNA, 765 bp, Cannabis indica
tgtcaaatttttaattatcaaaatttaattaaccacacttttggaataattatataatatctatataagaattttattaaattgcacacacgtggcgtccctattggacagggcgttacacttatgcagagtgtaagtacacttcatcgttgattatcacatcagtgtaaatccaatgaactgatgaaactgggactatgtctttcgaagcatataatcccaatcacattccactgtgttgacatcactgtaattataaatgactgtatgttctggacttaacatattttgtatatatattaaaccataaacatgaaaacaacatgtaaacataaatgacttctaatcttttattgataacaaatcagattagattgtaatgggttttatttagggcataaaatcccaacactccataggcttgagcgtaagcttcttctaagtctatgaatccattagctctcatcaagaaatctgttaaagtatatgtttcttttgcattggagatatccccagagcaaggaccctgtggttaatcctaatgtaaaagccaccatcttcatatcatcagtaaccttaagtttagcagaaacatccatcatgcattggatgtatttcttcagactttccccttgtaacgccctatcccatagtgatgccacttgtgtgattttataaactagtttaatactaatatattaattaattattaaaactgtgaggataataaaaacttgattaaaataaaacactaaaaatggacat

SEQ ID NO: 347349 - DNA, 573 bp, Cannabis indica
aaggagaatcgtacatttttttagtgacgtctctaaacaaatcaatttggcattgtctttctcctcttaacattttgctaaaacatgttcacatgattgcaataaaatggcagcacacattacaatatgcagttgggttagtatcttgtattggttggctgatgaacccttccctataaggttatgattttgaaaggaattgtttaccattaaaaaaagagtactatatttttaaacagacaaaagtttcaaaagattaacaaaactccttaccaaaaaaaaaaaaaactaaatatcaattaatatcatgctctattcaggggagaatacaatttgtccaagggtccgtttggtacgcaggactggactgaattagacaggctaatttgtccagtgcagtgtttgggtatgttggaagtctggataactaatccagctaatctcatctgtctttatcccatacagcaaggtgagataaataatctcatgcaggtgagatattttttttaatgtttttttaattttgattttattaatatattttaaatttaataagaattttaacgaaaaaaa

SEQ ID NO: 347350 - DNA, 524 bp, Cannabis indica
acaaaacaaaaaaccagttataaccaaattaataataaaaaaaaaacacccataaccagtgaaaaaattactttcacaaatttctaataaagtaataaacaacattataaaactagttttacttgaaaaataaattagctacaataatagatttttaaaaatacaaaaaattaacgcaacactacttataaaaactagtttttggatataacatcaatttccattcataaccataacatagtgtatttaacataacacatccaagataacaaaagagaaacaaaaatatttaaatcgtaaagtatcattgtcattactaaaaccagttatctaaatgaaataaaaaaaattaacaaaaagactgctccagaacatcaacatcctcttctcaaacttcttttcctttgcctttagcatttttcttctcctttagttcttttgttgggttttgtgccctaaataaaactcatttcaatataataagatttacttattaataaagatcagaaataacattttatgtt

SEQ ID NO: 347351 - DNA, 670 bp, Cannabis indica
aatcaaaagataatgatcataccaaaaatactatactcatatatgccaaataaacggattagtttattttggcatattgaaacaaatttttattctttgtttacatttttcttatagcttaccatcgtatatgctaataaatttattggtttattttggcatattgaaacaatttttttttcgtatattggaacgacaatttatttcatttcatataacctactattataaatgtcaataaacctactagtttctgtttgttggaacaacatttttcaatacagagtaaactataatcaaacataatgatatgcgccaataaacttattagtctatttttcgtatattagaactacaattcagtttttatttcaaacacgtacaatgtgtgttataaaaataacaaactaattagtctattgtttcaagtctagacatcaaatttggctgtatacaaagtatatgactgtaacatgtcttacatagtaaacttggataacaatatatgcacttgtcaaattggatatgatgaaataccttgttcacatgaaatgtctcgctcataagtttattaataatatggctatactacgcctatactcataaattagtttattttagcatattaaaacaaatttcattctttgtttacataatagcattttcgtat

SEQ ID NO: 347352 - DNA, 742 bp, Cannabis indica
ttttttgattgaatatgctcttgaatgcatgtttgtggaagtttgatgaattatgtgttttatgcatggttgtgttggtaaaagaatggatattgctcttggtatgctttggatgagattttaaagacttgattttgtgtttgaatctgtttataggttctgattttagttgtgtagagcaagcttgagttcatggaactcaagcttggagctttaatggcactttttgattcttagtgaaattattgtgtttgagctgtggaatatgtttattatgtcatataatgatgctctggaaagtttggtggtgtttggggaagatttgagtaggttatgggggcttaaagattgagatttttcgtgttgttgctgcccagacaaccggaattccggttggttcagggctgttccaaccggaattccggttggctgtatcggggaaaatgctgaattttgttttggccataacttttgactcgggactccgttttgggagttctttatatcgttggaaagctcgttttgagctctatgtgattatctgtatttgaaatgccatgattatattttatgaatgtggaattgggggttaaccctttttgtgtaaatcccaatattgtgactaggattaccggcacctggggatttggaatctctgcctttgcgggacaacaggtaagacagtagttgcacgtagagatatgcacggtggtgcttatattgaatattatattggtgataa

SEQ ID NO: 347353 - DNA, 615 bp, Cannabis indica
gaagaggaaggatcagtatttgattttgttgaccatgaagctaatattgaaacccctgaaagtcatgtattgtatgcccgtgttttaacaaccaagaaagtttggctttcaactttacgaaatcagatggccgaacactgggatggacgattcccagttaaaatttctgagtcctctgacctgtttttactcacctttgtttgtgaaggggacaaagtgcgggtcttgtctcgtgaaccttttcacttccaaaatcatcacattgttttgtcttcaccaacgcctgggcagaataccacctctgaatcactcatttactcgcctttttgggttcagatatacagactcccatttcttagtaaaactaaaggattagcaaaagcattgggcaacatcataggtgaatacattgatgtatttgaggactctttaaatgaaggttgggggccttttctgcggattcgagtcaacattaatatctccaaacctttgctgcgtggaaggttgatcactttaaaccaaattcgagatgaattttgggtcgaatttcggtatgagcgcttgccagaatactgtatgaagtgtggtaaattgggtcatccatacaacaaatgt

SEQ ID NO: 347354 - DNA, 659 bp, Cannabis indica
atttaacagtaaaatggacagtattattaaggttgaaagttaaaggaatagccaaaataaccttaacttcttcttccacaagaaaaagtacaaagctttctcaagtcccaatagcctagaggatggataaaataaaaaacaaatccagaaggacggacaaggccatttttgtaagataggcatctaattgtgatgacccaatgaccattggtagtgtcaatagaagtcccattgccaaccttccacaacagccccttattcaataaatcccttccccacagaatactttgacaagtaaaagaaggggagtgacctttcttaacacgaagaaacccacttcggttaaaatatttggataattacataagacactattttttttgtaaaaaaaattatatttttatgtttatagaatttttttatattttacggttttctataaaaacaatacgaaaacaacaagaaaactacataaaagtaatataaaaataacatcaaaacaacagtaaaaaataacatacagataacaaaagatcgacaacaaattaacaagagtacaatataaaaagatcgtattttctgtaaacatattaaatcaaaaaaatagtaaaaatgtttaaaattccgtgaaaccgtatttttgtaatttttgtgtattt

SEQ ID NO: 347355 - DNA, 759 bp, Cannabis indica
tgtgatttagcgtgtcacttttccatgttatgaccaatgggatttaggggcatataattcgccgagcagttgttccactcaggttggccggcacacctgaattcggaaacaaggtaagactagtataatgctatgcatatgtaattacatgtttagcatacatgttgtttatgcatcttagagtacattgttagcaatatcagtatacatagagttgtactggatactaatagatgtatgttggttgaaatactgatcgatgctatcacatcaatatggctagagtatgactagcatattgagtttaggctgatattatggtcgatagtattattgtatgaacgttctagactcagtaccgtgtgagacacggggatagggttacggttgggtgtatgggtgcctgattataactcgggataatcttatgtgttatgttatgctttttttactaagtctgttgactcacagttgctatttccatgtgtaggtaagggcaaggctaaggttgagcagccgtgagagcgagcatatggagattgtacatgtcagggcggttaggcctagagcatacgatctttgggacatcagggcttattttgtatagtcgctaggcgacagacttttgtatatgtatagtgaaacttttgtaaatgcttttataaacgggacttgaaactatatatgtatgttattttatgttttaattaaataagtaaaattttaaataattacgatttttgataacttcgttgatta

SEQ ID NO: 347356 - DNA, 826 bp, Cannabis indica
tctatgctataaactcatgtgttttagagaattattatccacttggattattaattctagatccactaactatgtttgttttttttcttatttcagctccagctgcttaaacttggattgctatcctagcgagttgagtcggatggttggacagaagggtgcagattgtccaagtgcagatgaagctcgaaatctacttttattttgatttaattattttagtttatgaacaatttagtttcaattattggtttgggattttattccctatttcatatttatctagacaattcatcatgacaattttgagattattaataaaattttcgctttaagatattttgttatgaattgcttctaagaaattgagcttcatttttctttaacttatatgccaatacaaattatatttatatgtttatcatgtttgtatgtgtttttgttttattattgatacaaaatctatagtatattcatctctgcaaagaattaataccacataaacacttcgaattcaaattcaatttttgtgaataattgttaattcttaaacaattattaagattttgttttaataaaaaaatcttttgatctggtaggggtggaagaagttaagaaataatatatgcagttcaacgatcttttatatctattgaactctagattatattcataactccacaagatctctataacaattaggggtggaaaaagctattgacatatgtagtttattttgaagtctagaatatactcaatacaccacagtatctctataactcacatattttgattagacatggatgtaagataataaacaaattag

SEQ ID NO: 347357 - DNA, 634 bp, Cannabis indica
ttcacatcataatatatttaccacattttaatctacacttattatattataaaataatataacaatagcaatgtgaaaggttattaattaaagaaagtgtggatttgaaccgtcaacaaaactatataattttaaaagaattagtgggggctattgaacaaataccttatcgttcagatttgttgtcggaggaattttgacagcaccaattttatgcgagtattcaagggctgcttggataccaaaaaatagatatgtgagtactcacttagaatagcgagtactcaaagaatatagtgtataatatatgcgagtactgtaaatagtataaaatggacacagaaaaatatagtggttcagcaggagcttcgggctcggcctgcctaatccactgttgaaaagagtactctggctctgtttctttattcagatcagccccctttgaatggagggggaagccactacttataggtagtatgcatcggttacaaataatggccataatgagaccgttacaaaatgataataataataataataataggcttattaatcaaattaattacaacagttatgaaatatgtgtaacgtttgtcatgaatgctccttgaatgcttgactgttgacttccgtt

SEQ ID NO: 347358 - DNA, 818 bp, Cannabis indica
gacggtttattagacattgggaatgtcgggaatggccgggaatttagaaatttccaaaataccccatttagtgttatttatgttattttagtgtggaggggcaaaatggtcattttaccctaatgatattttgtcctttagtggacttagtaattgagtttgatatgttaattttttattattttggctgaagtaaaaaggattgtgtggcatttactttcatttttttcccaacttagaaaaaaaatagaaaattttcaaaagaaaagcaactctttttctctcaaacctctctctctttttcggcccctttgagcagcaagaaaccagccaatttccttggtgattcaagctctccttagtaagatttagtgttcataagttgttggtatgttttctgcatctttcctttatgttttcttgatttttgaagaaaagtttgatagttgcatgcttgttaatttgatgttgttgctgttgtgtttatgtgatattttcagaggattagtcttgttattttaagtaggttagagctactttaacgcatgatatttgctttgattctagattggaagtttttagctcaaagtgaggggaaatttcgaaatctgttgctgtgattattgcatgagttagaatttgttttctgcagtgtttttatgcatgattatgtagttctaatctaggtttgatgcttgtaggtgagctttaaccaagtttgagtttgaaactcaaagcttggagctcacatggcactttttgattctgtgaattctggactgttttggtgctttggttttgtgctatagggtatttag

SEQ ID NO: 347359 - DNA, 614 bp, Cannabis indica
tttagagaaaacctgagccatctcactatacctagccgccactctccttccttcttcttccttaattttttcgaaggtttctcatactttatatgtctttatttataattgttttagaagttcatatttaggatgttagtcaacatacttgtgagtatatctaagatcctggtaaaataatttccaacattgtacacatgcaaacagaggaagcaacagcttcaagtactgtttgtggcactagatgcttcagtaaaaggatggaagaagtgaaaacccataatatttgttgatagaacttttcttaaatccacatatggagggacattgctctctgcttgtacacaagatgcaaatggacacatttttcccctagctttttctgttgtggattcagaaaacaataactcatggcaatgatttttcacaaaactaagggaaacatatgggatcagagaagaatagtgcttgatctcagatagacatgagagcataattaaggcagatgctcatgtatttccagaaatagcgcatggctattgtgtatatggcctgttaagcaaccttcaagaaaaatgcaagcaagcttgttaaaccattcttcgcagtagcaa

SEQ ID NO: 347360 - DNA, 575 bp, Cannabis indica
gatttatgttgggtccgagtccaaagttccaatcccgatctgagtttggctttagttttgggtataagtccttggttctgatcctggtctgggttcgagtttgggtccgggtccgtttctagctttgggtcttattctaggtgtgggtttgagttcgggtccgagtctgtgtccgggtttgtgtctaggtccggacctcgatctcggtctagattcgggtcaaggtccaagtttgggtcccgagtgcgggtccaagtttgggtttgggtcaagattacgttccagatctaggtccagcatatcaatcccattctgggtccttgtccgagtcaaagttcgcatctggatccctatctaggtccaagtctgtgtttcggacctggtcccaaatttaggtccaggtctgggtcttagtttcgttctgggtacacttccttgtccgggcccgagtgctagtctcagtttggatctggggctaggtctgtgtttggttctaggtcttggtcctagtcctggtcacggtcctagtcttattctagggtcctggttctgcaattcttgttcaggttctaatt

SEQ ID NO: 347361 - DNA, 526 bp, Cannabis indica
gacccgatccatttacactcttaaatccaaagaatgagaatgatgtaattagacttacaccagtgtcttccaaatcattccaccacacacaaagaatagtgtaggctattaggataacgtgtacagagttgttcttgttgagttctcaacacatgagcaagaacaattgagagacaaaattgttttctttctctttatatttcaaaaatatatgtcaaaaagggtatttggatttctcaaatcaggctttacttatagtggttaaaacccttttaattaaatcagatttaataaatttaataagtaaatatttataactgaatttggttacttatatttatgagggaatctctcaactacttgagagaatatctcaactttaaaatatctttaaccacttttgaattcaaatatttatttaattgaattaattaaataaataattaacctgaaagataaacgtgcatagggataggtgcctacccttgtcttatttaggacaaggatagtgtattttatcttgaca

SEQ ID NO: 347362 - DNA, 1732 bp, Cannabis indica
tatcctggtgatatataccaggtctaatcaagttatgtcttatacacataactcttaacatacatgtgtgtgttcaatatttactaaaacatatataatcttagggtaataaccctaacttgaacactatgtaatcactcatataatacatttctatatactcagataacatttactaagagtgttaaccctaactcatcctttcactgtattcacaatattctagggtaataaccctagaccggattaatattaaactcaaggtactagcttaccgagtctagtttaattatgacttaagcgcataattcataatcccaatatatacatatatttgacatggcatagtatttcacaacgaatatctctagggtaataaccctaggctattaaaccgctcatgttagggtaataaccttaatcccggttgcaattactcacatatatcatattcaacataagcgccaccacgcataatctacgtgtaaactactatcttacttgttgtcgcgcaataacacagattccaaacccctgggtgctcctaatcaggtgtcggtactcctagttagataagccgagatttcacaaatagggttaatccctaattcacctttcataaaacataatcatggcattcaaaatacagataatcatgtacacctcggaacgagctttccaatgatataaagaacgtccaaaacatagtcccgagtgaaaagttacggccacaacaagatcacaataaagatggctctctgctaggttttatggccgcggcgaccataaatctggccacggccactgggttcgaaaaacccagaaaaccaaattttaaggtctaaacatgaccactttaccatatattcaaaccttaattaagccatacccaaaattaacttcttacagataaaaatcatcacaacagagagcaaacaacatcaacaacaactctcaaaattcaaattacataatcaacttaaaaatcatgctcaacatacaactttcaagctctataacttgagctttaactcctttaatcttaaatatatatcaagcagcaacataccaactttaacatgaaatcaaacccagaaaataccctagaatctcattccatgctcaacaaacacaaaaccgaaaagattcaagtaccacatgctcaaattaacaagaactcacaatcatgcacatatcatcttcttcaacatattcatgctttttcaactaaaattcagcaagcaaaagagaatcaaagttataaaaactacctcgattccttgcacaaggtaactccaagccttaacacaaatttttccccaacaatcaaactagtttcccatcaatttctcaccaaatcaaggtgaaaaacaagagagtaagagagggaaagagagggtcgggtttgagagagaataaccagaatttctattttcttttttgtcaaaaatgccatttcacacacttatctcataaagccaaattactaaaatgcccttagggccatataacttccactttaaacatacaagggcaaaaatggcattaacacacaatttcaaacccaattaaatttcagattatcaaatatcaattaaaatgccaattaattcaattaaatttcatttcgggcccgaacccggttcggcccgaaatacccggttgtgactataccgcgccaacctgtcagaacacacctgaaaagacaacacaggcatactatataataata

SEQ ID NO: 347363 - DNA, 973 bp, Cannabis indica
gattgttgccaggggttcaactttcgtccatttggtgaagtagtctactgcaacgacagcaaattgtacccctccttttccctttgggagttgaccaattagatctatcccccacactgagaagggccatggagactgcatcatcgtgagctcaggcacttgtcacacattatgacaaagtccatcaagtcttcaatcattgttggctaaaagtacccttgttagagtatcttattggatgggcttttccccctgacatggttgccaaaaaaacattcatgcacttctatcattagccattcagtttcaactttggtgacacacctcaagagaggcatgggtaagctccgcttgtacattatcccgtctaggatcaagtacctagcaacttttcttctcagtttgtttgcttcattttaatcttctggcaaggctcccttttggaggtaagctacgataggtgtcatccatgttggagtgtcattcaacatgttgacttcttctaggataataatgttgggttcctctaggaattgtatgggcaccaagtttgctttgtcatcaatggagctgcttgccggatgatcaagtgcatcttctgtagcattctactctctggggatctgcctgatttggtagcctttgagctgacatggcaagtcttttattttcctcaagtaggcaacccttttctcacctcgagttgtgtattcacctaggacttgattcacaactagctgggaatcgctgaatatgtctaagttgttagcccatacttcatgtgccagcttgagaccagctattaaggcttcgtactcagtctcattgttcaaggctttgaagttgaattggattgctccgtccagttgcttctccccaggtgttgtaacggcaatgcctacacaaaacaattggatattccagcttccatcaacatggagtttccatgttagttctttgggattttgttgtt

SEQ ID NO: 347364 - DNA, 521 bp, Cannabis indica
attagctagaactaatcttgttacttggagaaatgctcaacaacaaaaatcagagcctttacttaatgtcaattatagtaaggacctggagcattggaggaaaccaattgtgcacaaatacaagatcaatgttgatggagccatctttgaagctgaaaactgttttggtgtgggaattgttgttagagatcaggccggttatctagttgaagctgtgtcaactagtaaaattggtgtggtgactccggaagttgctgaagctattggggtcaaagaggcgctaagctggatcaagaatcatcatctttctgatgttgaaattgaaactgattcgttagtagtggtgcaagctattaatggagaggttcaaatgccctcccaattcggaatgatagtacaagattgtcgtctgatgatctctactttaaacaatgtattaatttcttttgttaagcgatctgcaaacaaggccgcgcactgtgttgcgagaaagtcttgttttttgtcaggttgtatcttta

SEQ ID NO: 347365 - DNA, 648 bp, Cannabis indica
taatgtttttatttgtttaggtagtcttatttgtcactagtgacgaaaaagtcgcttgtcactagtgacgaaaaagtcgctggagtttgccgtcggcgctagaaaagtcatcggagtagctactggtaccggaaaagtcaccatttgttctgctggcgccgcaaaagtcgtcagaattggcattatcgccagaaaaattaccaaaaaactagtttcatgattaaaaaaaaaaaaaaaaccagacttcttgatgaagaaaccactttcttggtgattttcccagtaattttgccagcaaaaatgccaattccgatgatttttatggtgccagcaacaactttgatgacttttctgacaccggtagctactccggcgactttttcgacaccaacagccaactctgaaaaagtcatcaaaattggcattgtcgccggaaaaattatctgaaactgatttcttgatgaagaaaccactttcttggtgattttgttggcgacaatgccaattccgacaacttttccggcaccgaaaacaactccagcgacttttctgacaccggaagctactccggtgacttttccgacaccgacagaaaattctgaaatttttttcaaaattggcattatcgccggaaaaatcaccgaaaaa

SEQ ID NO: 347366 - DNA, 798 bp, Cannabis indica
attctattttttatcagccattttgtttcctgcatgattgtttgcggttgtgtagtctcctgggaccataacatttggttccgtgcttgccaaattttgtaaaccaaggcagcaatgcatgctgtataacagcttgccttgaatttgcttagttttgcttgatcaatccatctcaaaatagtcggcagagattcagctttgatcctccattgcagccataattttaattcttgtaagcagcttctagtgtacataattttctcttctttttttattataattactttaagttattgtgtattacttattttatttattatattatagaagtcgttttatattaatttatatctaaaatatttaattctggtgacttttccaacaataagacaactccaatgactttccgatgacttttccgaggacggtgatttttccagcattgatggattttttggtgacttttctagtgtcggtgtcttctccgacgatttttccagtgacatttgttattagaagttttacaaatttatttatattcttttgtttggtttcttatattttaaactttgattattttttaatctcatatttttttgcattatctatttatgacatatagaagtaactttaaattatttttccatatttatgaaaaaatctcataaataattaaggaaaaagtacataaactgctatttttggtaaaatatttacatatttacgttcaaagtttttttctatatttttacggtattatataaaaatacaaaaaaaacaataagacaaccacataaa

SEQ ID NO: 347367 - DNA, 76 bp, Cannabis indica
taatcctaagtttatcaatgatcctctatatgaatgatctacactgtaaaggggttagattaccgtaacaccctac

SEQ ID NO: 347368 - DNA, 591 bp, Cannabis indica
aaatataatagatgaatgttacgtgtcaaaagccatgtacgataagttttttttgaaaagaaatgttaaatgtaattttaaaataaataatttatgaatgataattgtaaaaaaacataatagtaatttgataaaaaaaataatatattgtgcaaaattttaataaataaaaattaaactgaaaatgttagtaaaatataacaaaagcaataatattaaatctatgaaattaaaagctagataatatgtaaattgttgatatttttgtgaaagaaacaaatctatatcatattgttaaagacaataaattatggagattttcaaaattaaaaagaaacatatacaattgaaaacactattgaaaaagcccctctaaaaacttcctctggatatagtcctttgaccgaacttgttaaagaatgaatgctttagcaatagttttgcagaagggagccttaaatagtcttttatcaagtaagaagcaaccatttgcctaaagctctaaagaaagacaccaaagagaaagaagctcattcacatgtataatcataatgaatgaaaagtataaataagatattaagaggtaaagat

SEQ ID NO: 347369 - DNA, 661 bp, Cannabis indica
agactgtgaagaatccaatcaagtgaaggagaatcaggctcatattttggtgatactctgctacagaaagaatacaagggttagagatctgagcggaaggagtcatttaattctactgcaaccaatgaaaggtttcttgaactttatatgtgtttaaattccattgttttagaaattcatatttaggatgttaaataacatacatggtagtaaatctagatcctggtaaaataatccccaacattaagaacgttctcaacggaagtacaaccgctgtaccacatgcaccaaagtaccgacttcgtactcgtgttggtagggccattgttgtacttcctagagttactatgtgatataccacatgcactccgtaccccctagtactcgttttggtaacattgtagctaccctcaaataccctacactatactaacaccctcattactacaactaatccattgttactagtgtaaacaaataataacttgcaatcattcattcaatatatatatatactttatgctaatcttacctcattttcgtgctcaggtgtgccggtcagcttgagtggaatagcagctcgacattttgcagggccctatatcataacattcgtaaaattgatgagtgacatgctagctaaaacacttatcggggactt

SEQ ID NO: 347370 - DNA, 575 bp, Cannabis indica
attgaagattccaaggcctatgttaaaaaatacgataaatgccagagattttcgaagatacctcgagcaccgcccaacgagttaactcagatgcaaagtccttggcctttcgccatttggggtattgacctgatcggacaattacccaagggcaaaggtggcatgcagtatgcagtggttgcggttgattatttcaccaagtggacagaagctgaaccattaggaaccattacgtccaaaaaagtacaagacttcgttgtgaagaagataatctgccggttcagattaccgtacaaaatatttttcggacaatggcaaacagtttgacagccagtcgtttagtgatttctgtgcgaaccatggtattatcaaaagtttctccgcagtggcacattccaagcaaatggtcaagttgaagcagtcaacaagacattgaagaatacactgaagaaaagacttgaggatgctaaaggaaactggccagaggaacttcctgaaattctatggtcgtaccagactagtgagaaaacgacaaccagacagactccattaaccatggcatatggatatgaagc

SEQ ID NO: 347371 - DNA, 552 bp, Cannabis indica
acagcacttatccaaggtgcaagtaaactacattgtagattaccctatcagttaaaccctgtttattgataaaccataggaatacattttatcacataatcttgattactttctgttgtgttaacatcacaataaacgagaatattaatgtgataaggatttggatgaatttataaatcaaacaaatgatcatgtaataaatatgtgaatcaaataacacattaaataagtaatgatataaatctgtttctttcttgataaatgaatgtagaagattacattgaaatagaattttatttaaggcacacaacccaacaaactcccacttgcactaacataaaataatcagtacatttcaattaatcctagattcgttcagtgcttttcaaatgtagtgactgtcaaaatattggtgaatggatcagctaagttgtcttcaatatcaactttttccaccagtacatcccctcttgccacgtattctctgataatgtgatacttcctttcaatgtgtttgcttctcttgtggcttcgaggttctttactgttggc

SEQ ID NO: 347372 - DNA, 1078 bp, Cannabis indica
gttcccaaaatgtacgtataacaagttcatactcaaattcagaaaataacaagtataacaaatatgtttttaaaaataccaaaaaatgaaacatatttttattttgctaggttttcaacaaactgatacagtgtcctgtttaggtgagagccaaagcatcatccattgaatagagtagtcaactcatctaaaatgacaaacattctagcgaccttttattcgatcgaaaagagaatccgacgttgtcccatttaggcgagaggtaaggtcattcctatttcatgagcctctaccattgtttcatacttttgtaagtcttactaatagtcgcctccattagggtgatccatactagaaataaaaaacttacaaataatacttatctttcgaaattctacgtcgttaaatttctaatgaacgttcctccattaggtaggtttactcactaaaacaagaactatgtagaaccaacaatggagatcgaatgtttcttgattaaagctcattatttttaaaaaatgtatttttatttaatcatttattttaattatattttaattatgaaaattgttaatttaaagtttgtccaaaattaattaaaaattaatttttaacctttaatttaattttcaatatttaattttcgaaaattatatataaatatataaaattcgaaaaataaataaataaattaaaatataataaaataaatatttaaaaattatctaatttaagttgttctaaaataactaaatttccaacttaaattattttcaaacaaaaatttaattaaataacaaattaagttactaaccacttaatttgaaaatattccattttaagttgatccaaaattaacaaactttcaacttaaaataatattcaaagaatctttcaataactaattcctagaattcctcaacttaattatgaatttcaaaaatattcaaattcaagttgattcaaaaattagttataaataactaatttacaacttaaaaaaaatatttaatgaaatattaaataattaagcatcagaatctaattagttatagttctttatttaattaaatacaag

SEQ ID NO: 347373 - DNA, 576 bp, Cannabis indica
aaataagaaatcacccaaccaagtcactccagtggacatgaattgagaaaacaaattgttcggggaatttgccaaaaccggtgaaccggttttacaagtcctggcaaatcggttaaccggtttccaccaggtctccctgaacaattctaaacttgctcaaaacttgtccaaatgccaccaaaatttccagaacacctataataacctttcacaatatattccaagcaatagaaactagaaaaacactctgaatcaaaatatgccattgatgattgaaactcaaacttggtcatccaccacaacaatcatctaatacagcatcaagaatttaaaatcaactcaatttaagcttagaatttgaattaaaacacaacctaaccctaacaacccttatatctcaaaatcacataatcaaaccaaactcaaaacttcaaaaaaaacacaagattataggttctaggattaccttatcttgaatcctacttcactcccttgctgaactgacgataataagcagctggaccgaaaaagcgtctaacctctgtagctaattttggtgttggccaatcctaaaca

SEQ ID NO: 347374 - DNA, 1231 bp, Cannabis indica
taccgagctactttttgttgatgagctaccaactttaagtttgcagttgctcgtttttcttcaatttcatcaagtgattctgcaaggagtatgtgattggtaccttgatcgtacgtcaatcttctgtgggatggtggctcgagttcgacgggcagcataacttcataaccgtacgccattgcaaatggtgtctgaccggttgctgttttttccgttgtacggtatgaccatagaacttcggggagttcttctggccaatttcctttggcatctttgagtttcttttttagtgtatccttcaaggttttgttgactgcttcaacttgaccgtttgcttgaggatgtgccactgcggagaaacttttgatgataccatggttcgcacagaaatcagtgaaagattggctgtcaaactgcttgccgttgtccgagactattttgtacggtagtccaaaccggcatatgatgttcttcactataaagtcttgaacctcctttgatgtgatagttgcgagtggttcagcttcagtccacttagtaaagtagtcgactactaccactgcgtactgcactccgcctttacctttaggtaactgtccaattaggtcaattccccaaatggcaaagggccacggactttgcatttgtgtcagctcgttgggcggagctcttggtatctttgaaaatctctggcatttttcgcacttcttgacataggctctctaatcttcaatcatcgttggccagaagtagccttgccttagaattttctttgataagctctgtccggctgcatgatttccacagaatccatcatgaatttcgtatagaagccgtgcagcttcatttggtgtgacacatttgagtaatggcattgagaatcctcttctgtacgtgatcccttctactatgatgtactgtgctgccttttttctcattttctgagcttcatttcggttatctgagagttccccagaattgaggtaggctgctattggcgtcatccagtttggagatgtgtcgatcatttcgatttattccgtgccagtgatgctaggctcttcgaggaactggatagggaccaggtttgccttgtcacttatattgctgctcgccaatcgggctaacgcatctgccattgtattttcttctcttggaattcgtctgaggttgtagcttgtgaattgtgcgagcagatcatgtattttgctcagatatgctatcatttttt

SEQ ID NO: 347375 - DNA, 532 bp, Cannabis indica
gttaatcaaacatacttggtagtacatatagatcctggtaaaatatttccaccagtaatatcactctaataatcagcatactaattccactaaagtccactaaaggacaaaaagctaaagaggcaaaatgactattttgcccttcccacaactaactagtcataattcacttaggagtatttttgtcaattctacaaccccgactattcccgacattcccaatatctaactatattgccccgttgtactaaaaatatactaagatgtgattctaatagccaaacaccgcgttccaatgttgccgagcacaaaacatgcaaaattctaaaattccatatatgacatataaaatgcattctgaatttaaataaatctccgtaaattgataattcataactaatatacaagtttcataattaaaccctaaatacctgtaaatttccaaattaaagttaagcggtgtttacaattatccccccttaaaaggatttcatccccgaaatctaacctgaacaactctggacattgagct

SEQ ID NO: 347376 - DNA, 785 bp, Cannabis indica
atatgatatgttatatgcatttcttactgagtctgttgactcacagtttctgcttccatgtgaggtaaaggaaaggcgaaggctgaacaggagtgaacctgagctcgggtgagattgtacatgtcaagcagcgcgacctggagtgttcggtctcgggacatctgggagttgtattttgaaagtcgctgtgcgacctgtaaatctgtatattttggaatgtatgcttgaaaagtaaagtttgtaaagtttaaaaatcgggatcccggcacttgtaaatattttttaaattacaaagtttagtatttaatgcaaaagttttaatttgacacgtttttcgagaaatttctttgattagcaaagattgcacaattattgaaaaagcactgtagcgtgccttagcattagggcgttacacccgctctccgaccctcctctctatgtgcaccctacgaccatcttcatctctacgagaaaaataacgggtctctttctctctctctctctctctctctcattcctcatttattttgaaaatgttggtttgatttctttttttttgcaggtttggggtggtggcgtcattgttgcagcacgcactaggacatggcagagtcgtcgcacacatatggtattttcgatcgctctctctctttctctctctctctctctcaacgcactagatctggtaattttttttaggttcgaggtggtggcgcgctgctagattctgggatgatgagttcggggtggtggatcgaactgtctcagatctgaaaccatcttcg

SEQ ID NO: 347377 - DNA, 1136 bp, Cannabis indica
ttttttggttttttgagtttggtctgatatgggtccgatagaggctgatattggtccgatgcgctcttatgtccgattagtttttttatttttttattggttttttgagtttggtccaatatgggtccgataggggccgatattggtctgatggtttatttatttatttttttgttttttaacttgtattttctcttgtgttatttttccagaatacaagactgtcacgtcttataattccagtgtcagagcattatacaggccgtgtcacttggcgtggtggaagttattactatctgaagatcaaggcaaagtttgacgaattctaattatgggacagagtgaaggaatctccttttaaacaattcttcgagaggactccgataaatttttctggggtattgatccatcagttattcatgcacaagatcaaatctgagaaggtaaacgaggtacacttttttttgggaaagaagagatacagatttagccgggtcgagtttgcattggtgatggggttgaacttgttacccgggcctacgaaagaagagattgaagagaaaggaaatttggaaaggttgattgtcgagtacttcaacggtgattcatccatcagctttggccaacttcgtaaagtttttgagagttgcacagaagcggatgatgtgtacaagttggggatggcgttgtttgttatgggcgtcctcactggtgaggaggagaagactgatgttcctccatttgtgataaggatggttgataacctggatttcttctatgagtatccgtgggaaaagatctccttcaacaagttgatggaaacttgctacaaagattttttagaggtgaagactcgaatgcacaagaagattgagaagggagtttctcagaaggaggcaaaatactcatcatacgactatactgcagcgttgcagtattgggcctatgaggccatcttggagttgggcaatgaatatgcagtgaggaaatcgcatcgctttccaagaatggttaattgggagagtaaggagaagaccgcactcgggaaagatgaagttatatgattattttcgaaaaatgtaagttttttttacgctttgcagtcatatatactttattttaaattctatctaata

SEQ ID NO: 347378 - DNA, 692 bp, Cannabis indica
tgatgatcagaagcttgttaatgttgctaagaaagtcaagaagaatccggtttccaaatcgcatggcaagaagaagagcgaggctccttctgttgacggtcctttggtaatttttatttttttaagaaactagtttttcaatttatatttttgcatgtttcaggttttctatttacagttttatttgaatctgttttttataatatatatgtttttattttcagtttttagtttttctctttgtggtgggtaaccagtttttgttttttctttttttttctttgcgtatttttaatttcgattgtttatattgttttttctctcacaggaatattattttaaaattgatgtgaagaagaggtttgctgggaaacctcaactctacaatccttataatgtcattgatgatatcaatgagaacctgtcagatgatcagaaggagttgtttcgcaagtctccatttgggcattttcttgatgtgagcaacttcaactatcagatacagctgattcatctcgttcttttgcggcaaattcacaccgaaagagatgatgtcgagctttggttcaaactgggagacaaggctgttcgtttcggaattgaagagttttccataataaccggtttggattgtactaaatcctatgatgttgatctcttcaaatcaaagaagttgcttgcttacaaggagg

SEQ ID NO: 347379 - DNA, 1002 bp, Cannabis indica
acaaagtataatgctctcacttgtgctaagaaaattaaacattctatgattataatatgcccaaaaaaattgaagccgaaatacaatatgcgccaaaaaaatttcaagtttttgatataatcattaaagcactcacaatacaaaggtttaatgactcacctcgagagaaggtgttgaagagcccttccacaaagagacttaaactaacctcatcagatgcatgaataattgtgtgaagatttgggatagagtctgcacttttaatttttacaatcacatatgaattctgcattgcagcctacaaaaagagttttcaaaaatttagttcgaaacaagtaattaatgtcaaataaccattaagatgcctccaaaacaagagaaataatattttacttttaagataattaagctgaatattgataaatagccaaaagtgtgtaaccatttgaaaagaaagtaagtagtagcataaaaaaaatacttgtttccattttaagcattatagattgaggtaaatctccacttcgaacctcaaggccctgcaagaagttggttgtcttagactatcttgtattcatctttctccagttttaggcccatcctcttagcttcaatttcagaaatgaagttgtgtgttgcgccggtgtcaatcaatacgctcttggcctgcttaccgtttaaagtggcctccacaaacatcaatcccttcccaagggctttcttccctccgacgccatgcttcttaagagcagccattaatcgaacggcgctcatgtgcaccatcttccccacatccttgctcctcttgagcaatggatgcctttatggcactcaacttggactggtgggggcaagcagccgccctatttgggccttggcaaagccaacacttaaggggcttcttccccgttgcagcatcacttttagaggaggagctaaattcaggagtccacttgtctcctcccccacttttactcggccactgctttcctgacttcttac

SEQ ID NO: 347380 - DNA, 895 bp, Cannabis indica
aagagacttaccagaccctctcaaaagggttgggtggtggcggctggtcatatgggtagaaccgaggaggttgcgccaaataattcgggtcatcaatcccgatgttcattctgttgatgagagagttaagttgctgaacttgtccctcatcatggatactcctctgcaccatgtagttttgcatgtggttgttctgctgaattatataactcagctgtgcatgagtgtattgcatcgtgggatcgataggcccaggcaattgtaggggctgctcctcttcttcttcaacactaggctctcgttgccgcctacgtccttgcggtgcatcaggtggaggctggccatagggatgtggctctttcagcctgttgacaaatgcgatgtccatcttgcgaagtggcaacaccgtgttgtcatactccaattggggaacttcatatgccccgcagagttctgttataactcccgccaaaccaaaaccacctcccgtggctccttgtacaatctgatcaatgctatgccggatgacttgtccaatgtttatgttgtaccccttcataatggcgtacacatatttcaggcgatccatttggacatcggagaagtgcttatttggcaccaaccgagcacttacaaagtacagccatgttttcgccaccgggtttaattcacaccggtataggatgtttggcgacccctctgtgccatcgttgtcgtggaacctcaaccctggaaatcccaccgtctcagccacatccaccatatcaaactgctcttcctcctcaataattcggaggcgttgctcttccctagagtaatcttggacagagaacatcacattaaaagcatcagcagtagcgggaaccttctttccacgcacctttacttccccatt

SEQ ID NO: 347381 - DNA, 863 bp, Cannabis indica
gcgagctaccacttgttgcttcttggtttgccaagatacgagatttcccaaaacgtaggagcagtacccagaagtggatcttcaatcagtgagagaaccagcccaatctgtatatgtgtatattttaagatctttgttgagtattttcctgaacattaaccctttccctggtgttcccttgaggtacctaagaatacggtagatggcatccttgtgttcctcaaagggttcattgagaaattggctaacaacactcacaacgaagcttatgtcagaccgagtgtgagttaggtatattagctttcccacaagacgttgataccttcctcgatcaacttttgttccttctgtctgtacttcaagtttagtattagggtccatcggagtttcacttggcttgcatccgatcatccctatttattgtaagagatcaatgacatatttttgctgagtgactgagataccttggctggatcttgcaacttccatccctaggaaatatcttaattggcctagatctttaatctcaaattcactggagagaagctgcttgagatgagaaatttcttccacgaaattacctgtaatcacaatatcatcgacataaacaatcaatgttgttaaaattccaccaattgggtgtttaataaacaaagtatgatctgattggcactgggtgtaaccatctccttttaacacttttgtaaacctgtcaaactaggctcgaggggattgcttgaggctgtagagagatttatatagtttgcacacttttccttttgagaatcgatcctcaaatcctggaggaatctccatgtatacttcttccacaaggtcgccgttaagaaatgcattctttacgt

SEQ ID NO: 347382 - DNA, 568 bp, Cannabis indica
aaagacctatgagcagagtttttcaagctcaaatgtttttcaatagataaaagagacttggaaaaatattacaaaagaatgactaaatgattctaccaaataggtggcattgatgatccaaatctgaagcaagccttcatttcctctattccagagccatttggcgaagaaacttttaggctactctctggatcgggaaaaagcctaacagatgctacaattggaaaaaattttccaactagtcgtcttaaaggcccttgaaaaaatgtgctcccaaaaaaaatttctttaggaatttatgaagcaatctaaaaaactaggtaaagtttgtagcagacgagatttactcatcaaatgcccttctaaatcttcgtgttcttgcaaaaatccaaagcattaaaacaagttcaaaacgttcaagttctcaaagcacaaatgatgtaaaataaaatttttgcgaaggaagcgcgagtttcataaaaaaaaactgatcgatgctatgtgtgtggcaaaaaggggcattatgcaaaacaataccctaaaggaaaaacagtcaagcttatctcac

SEQ ID NO: 347383 - DNA, 617 bp, Cannabis indica
gatgttaatgaaacatacttgttagtaaatctaggtcttggtaatatatttccaacaacgagctcacctaattaggtgatgctattttcatggcgacgtacttggcgtaagtatgggcgtcagtgatatatgatgagtatcgagcatcggtacgagctcacctgatatgtgatgcgatttttctggcgacgtactgggcagaagtacgagcgtcagtgatatatgatgagtaccgagcgtaggtacgagctcacctgaataggtgttgccactttcctagcgacgtatcgagcataggtacgggcgccagtgacaaatgataagtaccgggcctaggtacgagcttgtctgattagacgatgcgatattggtgccagattatggcacgggctcacctgattaggggatgcaattatatgatacatgggtgcaggtctttggcacaggctcacctgattaggtgatgccgttatgcgacatatgggtgccaggctatggcacgggctcgcctgattaggcaatccaatacaagagtatcagattaaagcctcgacttgcctgattcggcagagtgatgttatgaagatgattgctttatgaggtaacatatatattat

SEQ ID NO: 347384 - DNA, 2596 bp, Cannabis indica
gtaagttgcaagtaatcttaggaaaaaataggattagtggaattgcttgaatgatgcatgaatatcaccttggaaaagtgtgatttgtaaatggcataggaatatgggatttatcatgtatgacttgaaagaattgtgcttaaattggtattcttaaaattaattggtcataggaatatgttaattaattagagaatcaaaccataaatactttggaaaaaggattatgacatcttaaattcctagttgacattatcaatttacaataatactcattagcacaattatatcaactttgcacttttaggccaatttaataattctagcttgttttcttcttatagtttgtgtttgttaatttttaaatattttatattttatttttgtttaaaccaatttgtgagtaattagttttataaattgatttccaattttcaatccctgtggagacgatactcgatttatcactttattacttattacgattgcgtacacttgcgtatacaattttcacaacaagccccgagcacccagcacccagattgacagatcgcccaagttgacaatctatcaatttgggcgccttctaagtatttgattggagattcgaattttgtatctacttcgtcttcatcaaaaatgaggagacaaatcctttcggagaagaaacaacaatttctaagtgacaaaaacagggaccagcgcccaagttaacacctggggctagccttgtgaccaagttgacatttcgtcaacctaggccattttaattgtagcttttcgagaacaattccaagcatcttcttcgttttcagaaaatattaagattcaactatttccagggaccaaacaaaattttcgaagggccaaaagggggaccaagtgcccaggttgacatattgtcaacctaggctaagttcagcaaaaaaacttctgggcatttttctgtcatcaaaataatgaagattcaaacaaactcgaaaagaaaaccacaatcctgaggcgctggaaacagggcccaacgcccaggttaacctgatgttgggccttatgactagattgacaattgacctgggtcgctgccttcaattgctcaaatgtcaaatctaatgcgaccattgaatcccaaaggtcaaacagggtaggagacctcatcctcaagtttagaatccttggaagtataaaaaatgaaatcccgagagctcgggagtaagtacctagcgcccaggttgacaaatggtctggtgcgttatattctgcttatctaaatctgatgtcgttttgaccgtctatcaagtttttcacaatgacaaagatatatgaagttagagaagttaaattcacaactttgcgtttttcatttccaactcacttgaaaatgaagagtttcgagtctctcatttccgtagatagcaaaatcttcgagaattggtgaccaacttccctagaacgcagaaacatgctaagtggtatcaaaatatcacttaggcatcttaaagtatatcctttggacgtttttacacttacccaacgtccaggctgacgttatatgtcaacctggtccctgtgatgtcaacctggtcgttgggtcataaactgccttcagtaaaacagccataattcactcaattttgatctacttaacgcgattaaacttgcattccaaagctaattcaatgctctatcaagtcatgtctcacactatagatgtaattctgaagctatcgttgtcaaaattcactcctaagggaattacgaaaataagctccgagttacctgcagcgaaacttgtcgagctccaaaaaaggcctcactaccaagagctaattttctccgttagatcatcatcaacggtcaaaaacatcttatttgtatttttgccctatttttgtgaacttcctgcgcctataaaaggagagttcacttaactcatttttcacattcaaaaaattactcacaaggtcagagcttctctttctaaattttctctctctagaaactagaacttaaacaccttgtcttttttctgtaattctcatgagaaataaaatctcgaaatagacatagctccattaccatcgcgacatggggagtaaactactacaaatttaatgtctttctaaattatttacttaacttattaatcatctcaccaatctagcaagctgatgttagccacttttcgacatcaataagatgttatgtgcattgcacgtataattaatttttttttttaattagcttcaataagatgatgttaagtgcaatacatgtatgtttaatttttttaattaggtaacatatctaataatacatatattgtaatttacttattcttaaccaaaactcagataacgaaatttgagcgtgtctttatataggttggattcgtaaatttgatataaaggttttttatttctaaactttacaaaaaatatggtgtgtgaattcaatttaaaatataaaataaataataataaagttaaaaatatttataatattttaaatttaaatttctttatataaaatatttacataatttgtcattttattttaatttaaagttaaaccaaaaaatttaaaaataagattaaaa

SEQ ID NO: 347385 - DNA, 1095 bp, Cannabis indica
acacagcagatacagccagtccaaaacaactcctggcaactcggcacgcaggccggcgaggtcaatatgtacattgctggagaagactgccacctcatggttgatctagcttttctttgcctttacctgcaccacatagcacccgtgagtcacaaggactcagcaagaaaagtaataataacaatcatatagtttattattcgaatattgtcatttatacacaataagaatcaaaccatcacactttgttcataagatgaaatccaaatcactactggcatctgccacgaataaacattagtatacagatatttggtaatacaaaaccattataccaataatggaattcatattcatttaatcatataaataatatatatgttacctcataaagcaaccatcttcatgacatcatgttgcctaatcaggcaagtcgatgctttaatctgatgatcttgtattgtatcgcctaatcaggcaagcccgtgccatagcctggcacccatatgtcgcataactgcatcacctaatcaggtgagcctatgccaaaaacctgcacccatatatcatataattgcatcacctaatcaggtgagcccgtgccacaatctggcaccaatatatcgcatcgtctaattagacgagctcgtacctacgcccggtacttatcatgtcactgacgcctgtacttacgcccagtacgtcgccaggaaaatcgcatcacctaatcaggtgagcccgtacctacactcggtactcatcatatatcactaacgcccgtacttacgcccagtacgtcgtaagaaaaattggatcacctaatcaggtgagcacgtacctacactcggtactcatcatatatcactgacacccttacttatgcccagtacgtcaccaggaaaatcgcatcatctaatcaggtgagtcgtacctacactcgatactcatcatatatcactgacacccgtacttacgccagtacgtcgccaggaaaattgcatcacctaatcaggtgagctcatacatcacatgcataatattatcacattatcattactcaaccaattagtcttttcattatataaaaatattaac

SEQ ID NO: 347386 - DNA, 516 bp, Cannabis indica
gattgtgcaagagattgaggtagatttatagtttttaatttgtgattccttgctgaaatattgtggaaaagcatgaattaagtgatatagccttgtttatgcatgtatgataaagttagagttaattttgttaaatttgagtatgtttgtccttgaattattgttgtggtgtttgattaagctatagatggaattttagggtttgtttcttaccttaattctattgtttggggataattgttgctggaaaatattggggtaagttggatttaagttcaagtttgagagcttgaagtttgtgtatttaagcatgattttgatatgttttcacaatctgaattttcacggtaaagtgtgagttttaatgcttgttgtatgtatcttaatgtcctatatttgagcttgatgaatgataatcttgttgtgaggatttggttgagttttgggatgatttggttgagttgggttgttgaatttttgagttttgcatgctgttttctgggtttggaacccagg

SEQ ID NO: 347387 - DNA, 612 bp, Cannabis indica
ttgttgaattaacaaaagaaacagagggaaaaggaccttttaagcgacaagaagacatatgcaactctgtcaaggatggtaacttgtttagtattataccaaacaaatctaaacccatcattgaaaggttgattccatttatcacaagatgctttagagagactagaccaagacttgtgatccattcaagattatcaacatcacctgtatttgaatctaagtcaaggtactgcaatctagagagatttccagtatttacaggaaaggaaccaccaaaccctccattagagagatttagatacctcaaattctctaaggatccaaaaaatccaggaattgggatgttgttgaatgcgatgaaactcaaatccaagtatctcaaggacttgagttttatcaatgaaggccttatttccccaccaaagtcccacctgtttcgaaaatcaactgcaataacttctcctgccttgttacagcctattccataccattgacaacaattgttgctgccattgttccatgatgtgagccggtttagtggatcctcaagaccagttttgaagtcaagaagagcatttctttcatactcagaacaagtcacattcaattgat

SEQ ID NO: 347388 - DNA, 393 bp, Cannabis indica
agtcaagaacagactcttaattgtaaagaaggagaagtgtttgagattgcggatccccctcccaggcaagggggaccctttatctaggggagggggtcggtgcttctcgcttcatgatacgcgaccgacgcgaagctatctcaaccgtctccttgattttcggaggtagttggagtctaatttttatcataatatcccactatttttgtgaattgacaactgtctttgagcctttcatgggatttgaacatttcaaggagctactcatgatgagggtcccttatgggtgtggcatggtcgttaaccacctctggggatgaagcccatacttaggggcaacaaccccaggacccttgttgacaagggtgacaaccatcctcgttgggtgacccc

SEQ ID NO: 347389 - DNA, 779 bp, Cannabis indica
acttctgtttctttattgatgttgaattaaatggattacattgaaatggagttttatttagggcataaaacccaacatatggaacatggctaaaccaagccaccattttatactcagaacccagtaatggaatggccaaaggttgggaaatctaacagttgggaatgaggtagaaggtgaaagcgaagttcattaatgttaataatgaccctcgaaaccgtggagccgttaaaattgagggcatgcgtggtcttgaaaaatggattgtgacgaatacactctggtagacatttaaaaagtactttttattaaaaagaaccttttaagaggcaattgttatacccaaaatttggctaccatttcaatagaggacacgtgtcaagttaaggaaaatatgggtcgatgcgtgcaacggtagttacatttaatagaataactcattaaatgcagaagtgaccgagtatatttgcaacttgctgactataaggtcctatgcgagataaagatatacaaactattgccttatgtattaacaagaaaccatacgacattggatgcacaaggcgagagacatcaacttcgttacgcctgggaagacgtacgcgatgcataatgactatgaaaacacttagcgtataatatacaaactaagtataacagtcgggcgaacccaaacaactaatagtgaggcgcttatctcgctataggaaggcatgttcctgatactttcaccaatcaacttcaaaccatctttcagtgaggttattagtctttggcaa

SEQ ID NO: 347390 - DNA, 638 bp, Cannabis indica
tttaaatattgtaccaattttgcccctgtcacttcaagatactttccatgtgactctcttatgtcagggtattttcggtacaataaagaggtatgtttcaaataaatataaaattagaggtaaatttgattaattgataaacaaaagaggcatttttcaacttaccccttttctaaacatgatgttgaaaaattataccacaaataagactaagattggagatgcaaatttatgatttattactaaaatataattcactttaaaaaattgcttaattgggttgttaaaagtttatttaaatttatcacataataaaagttgatctaaatttgaattacaatatatcatgatacaaagtttatattataagaaatacacttatttttatacttaattttatcatttttaatattttattactaaatttagttattgcattaagttataaatttttacatttattttttattattttatataataagttattatttttatatttttaataaagtattaaattttgtatcaatttttataattatatattcaacacaacacaaaatattgatgaaaatatatgtcaaaaaaattgatgtaaatatatattatgttagactatatatatagtgtatgtaata

SEQ ID NO: 347391 - DNA, 1578 bp, Cannabis indica
atgaattcttgcatgtgcatgttttgctgaattagataattcagctgatcgtgagtgtactgcatggctgggtcgagaggcccggcaagacgtggtggttcaatgtcttcatgatcctcttgttctcttgcaggagggtctctctgagctggcggttgaccataagggtgaggaggtttgagtcggagaacagtggccaaggtaatactgcgttgtggcgctaccttggtgtcataagagtactgtggtactccatgtttctcacaaagatcggtgataattccaacaagcccaagtccaccaccacacgacccctcaaccattatatcaaatgtcactcgaattatgtcccccacattcaaattgtaacctttcataattccataaacccacttaatcctgtccatctgagcatcagaaaaatgtttgttcgggagcatccttgcactaacaaagtatagccatgccttggctacctggttgagttcacaccgatacaattgatatggttctccatcatatgtatgaaacctaagtccaggataccctagagtttcggctatatccacataatccaaactttttgcccgaatttgctgcttcaaaggttgctgttctacagtgaaggttggtagctcataaagagcatgaattgcagctgtggaagcaggcactttaacccccctaaccctcaccttgtcatcctctctttctggccagttggctaagaattctaaagctaaggtttggttgctacgctcagtgacatccacgaacttagtccactgcctatttaagatttgatctctaatggacgcaaatacagcaggaatgtttgcagtttggctcaggttaacaatatcaatccctctatcttcaatgaatgccctatctttcaatttcaaaaaccgctcttgagcatccatattggtaaaccttactctatctagattagagcgacccctaggtgggttggatgatgaagctcccccttgttcactcactcttgatcttttaggacccatctcacccaaattttctaactctcaagatttttaaaaattttgacagcacttccccttaaaaatccacttcccgggaattaaccctctcacaaacaaacccaattttactcacaacaacaatattgaacaatgtatggagcaaaaatctcaaaaatccaacaaaaattccaaaattctctaacaatccacaaataatccaataaaaattgtatagagagtcttaaaattgttacctcaatgagaatccatctttattcaacctccattgaagaaaaccttgaagtttttgagaaggaagaagatgaatagtgatttttgaaatttgggtgaggttttagggatttggggttgattttgagagggaaagggtgtttgatgagagaaataatggtttaggatgatttgggatgaagatttatggttagatttgaaggaaaagggttttgaatgggattagatgaagaaaatatggtggaggagaagtattttcggtgtgggggttagggttgagaatgagagaattggttttgaaataattgttgggttttatgcc

SEQ ID NO: 347392 - DNA, 684 bp, Cannabis indica
ggaggagcttcctgaagttctatggtcgtaccgaacaactgagaaaatggcaaccggaaagactccatttgccatgcacgtggatatgaagcaatgctgcctgtagaactcgagccaccatcccacagaagattgacgtatagccaagaagcaaatcacgtactccttgccgaatcacttgatgaaatgtaagagaagcgaaccacatcaaacttaaagctgatggcccattagcaaaaagtagcttgatatttcaacaaacaactgaaggctcggaaattctttgtgggagacatggtccaaagaatagtatttctaaatagcaaagatagtacaacaggtgtgctcagacccaactaggaaggaccatatcaggtggtcgaagttctcgagtcaagagcatacaaattgggtaagtatgatgaaaaaatgcaactcattctggtaccaaggtattggaatggggaacatttaagaaaatactaccaatagaagtaccaggtcggatgaccatatcaagtactaaacaaaagaacatttactcttaagtgaatggccttctgggcagacaatgcccaaaggttcgaataaaattacaaagtactcaggtcggatgaccaccatctaaaatacaatttttaatttctgtaatttgttttatttcatgttaagctaaagatcaga

SEQ ID NO: 347393 - DNA, 901 bp, Cannabis indica
catacatggataatacccattaagagcatacccaatcacaaatatataattacttatgctatataataattttgtcagttactaaccagtgttggactttggttagtataggttgttttgatttattataattttaatttggtgttggaggggtttagttttgattgttagtctcttattgcttttctctagtttgtaaatagtatgttctccagcttgtaataatgttgttatgtttgttgttgtttggttctcttcaggtagtattattgtttcaagctgaaatttttgccctgctgactagactaaattgggctcattcgtgtgggattcccctaaaagcggttaaatctgattctctctccatagtaatgacttttaataacaggaaggtgtttgcaaatgagatgtgtgtgctgttagaggatgtcatagctttattgtctaaattttcgagggcacttttgtctcatgtatcctgcaaagataacactgcggcccatggtttggctaaacatgcccttaggctagacaataaattatgctggtttgaagagcaaccgacactgttgaccaaggttttcggcaaccaataaaataatgagaattaaaagagctgtaagaaattaagagaaggatttttacgtggttggggcgttaatgagccttagtccacgagtctgtatatttatgagtatatttaacacagagaatgttcttggtgagtatttactcttcttgcacttatgcaacccaagttttttcgacccccattaatgagctttgatggggtatttatagtgttttgtggggtgattcccagaattatagtacatgtatttctgtaactatcaataaagttgggtattcccaatgaatataccatgggtaatgcatggtc

SEQ ID NO: 347394 - DNA, 732 bp, Cannabis indica
ttaggggattaggatttcatatgtatctggggtagcgtgcctaattatttagggcattacaaaaatcctagggttcacacaattgggtaaattttccagtcttatcataataatattgattcatgggctaacgctttttaacgccctaaccacgtaaaaactctaatattatttctttagctttctcatatattttattggtttccaaaactgtcagtaaatattttgttattttcattaagaaaattgtaaaaagaataatcaaaccaatgaaggaagtagaagaagtgagcatcaacaaagaagatcatggtaaggtcatcaaagtaggaaaaaatctacctttggccattaaagagaacatggtatccacagtgaagaagaatcatgatgtgttggtattgaacctttctaacatgattgggatcagtcctcatgtaatttgccacactcagaacattgatgaaaaagaagatctaattcataaaaaaaaacgggtttcgacagagttaaatgtcattaaatattacgaattaaggttgggaaaattaggcatttagatgagataagatactactttattttacacaatacattttctttaaataaaattaataatattattatatagaaatataccttcagtaattcatgttgaagttataaaaaaattaaatttggttttttaaaagaagattaaaaaaaaaaaactagttcttttatatataaaaa

SEQ ID NO: 347395 - DNA, 590 bp, Cannabis indica
aggagtaactctgcaactttagtcaccctctcaggtctggggggtaatgggcttcgaatagaaatcttatccatgtgaaacccaaggatcagtccagatattagtatcattcccattagcaataactttacaaactacctttctttaggatatctttagaactaagtgattacttgaacattgtttttaaatatatactgaggatacccattaattaccgtctcaataatgatatttaccttaagattttttatttccgtataactttttagaatatacataataataataatattatattaattgaaaaatttatagtaattcttaagaagttggtcctcttaattattttgatatttataagaaatttttagttttttttttgtatataatatatattgtaattatttaaaattaattataaaaaaatcacttataaaatttataaaaaatgtctaatagttttatggtatcaaaaataaaatttaaaccattatatactatacgtatgaaaaccatcacttcatctattttaaatggttaattagtaatttttttccccaaactttgatatgtactaaatcgtgctc

SEQ ID NO: 347396 - DNA, 987 bp, Cannabis indica
catttggtaaaaataaaacaatcacgattgtacgataacaaaagcacgtaatactgggattaaaagctgcccggtcagcctgttgtctgaaaaatgaaaaataattccaagtttaaagaccgcttggccggtcatgatgtcttagaaaaggccctgaggctgaataaaaaatatcaaataaaaagataaaaagagaagtgtttaagcagctggagtcccaggtttttggtttggttcttctgggccaacgggactaggtagatctattgtttgaataggaggtgcatcagtgtcctgaccggaggttgaaacagccacctcagtttcgccataagccacttgggacgcgcagaacttaaggtacatgtccttagcattgcccaagtagtcgaaatcggcccgaagattagccttccaaaaatcaaagaagagctcgagaccggctgtctccaaggcattgaccttctccttcaacctgtccacctcagccgaaagctccccctccttggcttccttttcctccttcatccgatgaagaactgctcaaagggaagtcctctcgtcctgaagactgttcacctcagcaaataaggtctcgatagtctcctcaaaatggtcagcagcctcaagatccttagtcagcacagtgattttcttctgagcggcaaacagcttcttgttggcttcacccaattccaaccgaacagctcgacttctgccttggcttcttcagcatccttcctggccaagtctgcctccgccttcagggtgtcggacagagccgtgttcttggaagcagcagacttagcccgggagtaagtgtaagcgaacttcagaccggcctgcacaaggaaaaaactttagcatctgagctaagtatggaagattaaagagaagtattaaaaagaaagacttaccctggtgaactccttcaagactctgcccaccagcaattccaaagaataatcattgtcagcaccagccagt

SEQ ID NO: 347397 - DNA, 639 bp, Cannabis indica
gtctgttactagttctgtaggagttgatttgtggacagatgcttgtcctaggtttcttagtactcctgtaacagctgatttgatttaatgaattacatctttctttcaaaaaaaaaaaatatcaactaaagcactgcaagtaatataaaatacacaaatcaagcataaaagtgagacactaaattttttacgtaacaacccaatgcgggaaaaactgggagaccgtagtccgttcaaatcattcactatcaccaaaattcaatagtgagattacaaagttcttctctagtaaaactaggggctcacaaccagggccgacccaagcatatgacaacttgggtcattgcacaaagccccctatattaaaaggcctcattttattattatcatcccttatatataatataataaatattattttataatgtataatatacataataaaagttcataacagtaaatatgcattttttttttaaaaaaaactattagaatattgtggtcccaatacatatgattctaatttttttttatgtattttagaatttatgaagtattttttttatactgaatttatgttgtattaattaatatttttttaaataaaaggtccaaatttaattttttgtccaaggcccc

SEQ ID NO: 347398 - DNA, 563 bp, Cannabis indica
actatcataattttgtcaaaaactatttctactctaactacaacactacaaattatactaaaaaaattatttcttattattatattaattttttaaaggtacttctacaatgcacccttccaaataaaagagtcacgagtgtaagagataattttaaccttgttttcgacatgttaaatatttttaaaattttacaagatgtcttaaataactataacatacaggactataaaaaaattagactaatatgttactataattctttttattttaaccacaacactaaaattcacacccaaaatacattttttattattataatattttttgaataaaatataatatattttaatattaaataatatatatacaaagaagttataaaataataatatcattaataatctctaactatataaaagagagaatgtagttttgggcttcctacattaaattacaaaattatccttatttactttgtttattaccattaaatccaaataaatattgtagtgaattattagtaaaaaaaaagaattattaataatctataaatatataaa

SEQ ID NO: 347399 - DNA, 768 bp, Cannabis indica
tttttttttctaaataaaagatatttattgaatgaaaaaactagatctgtaaagtgaatacagaaatgaatttctctatgaaattgcagaagggacaaaccaaagcaagaattagaaatacaaatatattggaaataagacaatcttttgcgtagtatcacttcttatatgtatatgacattagaagtatcacctcttaaactttaatgaagctcaaatctaacacaaagacacaacaccaaccatggatctttgttgattaacaaatgattcaaaaattattttcctgaaataataaacaaaattaaatctttgattttttttctttcattgtcataagcgtctgatctctgacaacaaaaatcatgagtcttcatcattaaaaccggtagcggccgcatcgcccggaacaactacaaagccaaagccacctgaaaacaacggtggagcaagtcacgaagattattagcatagtcccttctctaatcatcattatcatcaaattcagtgacggacccaaaatttttactttgtgggggcttatttatcattaaaaaatatttatacatatattataatcatttttactagttttatttaattttatggggagtttttctattattttggtctataattatcaaattaaaaaaattacatttaatttttttaaaagcaatatttttgttagtggggactatagccctcacattgttacttgtgggtccgtccctgatcaaattccattatgttttgggcaatgtgtca

SEQ ID NO: 347400 - DNA, 776 bp, Cannabis indica
attcctattattggtataatagttttgtaatactagatatctatatactgatgcttattcatggcagatgccagtagtgatttagatttcatcttatgaacaatgcataatagtttgattctgattgtgtataaatgataatattcgaataataaactatatgatcattattattatttttcttgttgagtctttatgattcacgggtgctatgtggtgcaagtaaggacaagaaaaagttagagctgccatgaggtgactgtcttctccagcaatgtacatattgaccccaccgttctgtgtgctgagttgtcaaaagttgttttggactggctgtatctgttgtattttgaattgcttttgtctatagtcttttgggtaaaacgttttataacagggatccttagaatatgcttatgctgttataatgtccgctttcagttttttattttagtaagtttttaatattatcacaatttttaataactaattaatctgttggtattaaaatagtttataaaatcacatagatagtgtgtctataaaataagagcgttacatacagcaacattcactactacaaaacaaggatttagcttcctttttttgaacccattttataaaaagggaagctaaagggtctgaaaatacccgcctattaaaaatttacctttagaggcggtttttttataaaaaccgtaggtataaaattggggtatcccatttagaggcggtttggaaataaacgacatagggtttgattatataaccctatg

SEQ ID NO: 347401 - DNA, 460 bp, Cannabis indica
aagtgaaacgattggtttccttagatattggcttaatgcgataaaatgataaagtgctcattttagtaattatattaatttactaaaatatcattttgaaatagctaagtgttttaaggataaaataccttgaagggtaaaacggtaaatttatccttactcaatgtaaatcgtctatagaggattattgattttatagattgtaacaatgggtaattcataacgtatctatatttgatatatagagcgttttatgtaatcaagagtgcaattccgaatctatagtggagttaagaggaattaataagctagtatatttacttggtaaattttagatctacttattagaagcttgcttacataggcccatgggccccacactaactcagatagtattattttgtagtctcaattaatttatttatataatcaattgttggaatttattttaccaggatct

SEQ ID NO: 347402 - DNA, 658 bp, Cannabis indica
ctaaaaaagggaaacaatttaatatcgaaatggaaaccagtagcacttaaccttacgtgtgaaatgaaaacaaatatcataaaaaataaaaacaactcacattgaaaatgaaaacaacaaaatagaaacaatttagactcgaaaaatttaaattattatatctacaatggaaaccactagtcatttaaaaattatattgcaattttaaattaatttatttgtggtgagttccaagatttatttggattacttgtgttgaattgaaaaattaaattgtaaattttaattgatttacttgtgttgagttgcagtattgttgcaataacaggttgcaaaatcaaatttcaaatatctatatattaaattacttattttgcattgcaaaatgaaattataaaattatattagttttcttattttgatttatttgtgtagagttggaaaagtagattgcaaatttttgttacaaaactgtattgataatactcaataaaattacaatctcaagaatatatgttaacaagtcacactgctgcaacatccaaggattgttgtcatcaccaacatgtgatgtggtttggtttagaccattcctcctcatttgaaatcaattcaaattttgtaaaattcttctgtaataataaaaaaataacaagca

SEQ ID NO: 347403 - DNA, 539 bp, Cannabis indica
gactggcattgctaatagcaatcatcgcgtagcaatttgtcagcccagttaagtttattttggcagatagtccagctggcattaatgaagagaaaaatgagttgaggtggcgaaatgtggttaatgactcaacaaataggtggaaaatgaaggaaaagtgggcgatgacttggatttacaattagggtaaactttggtaccctaattggggagcaaaaagaaagagaaggacatagaatagaaagggtggctgcacattgaagggctagtacgaaaacttacaacagaaaaaaataagtacagagaaagaaagaaaaaagaagagagtacgaagaagagaagaagaagattgagaagaaggagaagaaggcaacctacaaagagaggatttcagctaaaaagtcatttctcttgctctcctcttcattttgtatcattttctacgctctagttttctctttagctccatgaacatttcattttctgggttgatgcttttaatttcagctatgaactaaaatatttgagatttgggtggt

SEQ ID NO: 347404 - DNA, 532 bp, Cannabis indica
  modified_base (489)..(489): a, c, t, g, unknown or other
aactaacctagctttaaatctgatttctttcacctggcaatccctccttttccctaaaaatccacttgcagactatcaatttctgtcctggtggtcttgttacagttttccaagtcttgttcttatgtagggaactcatttcttcataattgcagcaagccatttccttttatttcttgagttgatagcttcctcatatgtactagggactgtagtgtcaatctcttctgctgatgcaagagcaaaggcagtgcaatcagaaaagccaaatctctctggtggtttgatttgtcttctgtctctgtctctaaccagtaggtattcttgtgaatcatctggtaagctctcttcctcaggtgcatgctcatcaatttctgaatgtgaatgttcttgagtatccacctgatctgtattatctgcattttccctgctactttgaatttctaaacctgctgtttctctgttgtctggttgtgatttgcagcaccngttttcatgccatttcatgttctttgaatactacatctctgct

SEQ ID NO: 347405 - DNA, 1190 bp, Cannabis indica
aacaacataagaacgtggactattaagaatgggtagtagtccaaatttagtacaactcctaaataggaaatggtttaaactgtattaaaataagtattgtacgaataaatatgtccgaaattatagtttacatttgacaaaaaaatcttattatctcattaaattcaaatattgagtaaacataattgcaccgtactgtatttacgatgtgaagtactctgcacatatattgatgtacgttattttcaaacttgaacttattgagatatgggagatccagcttctgacgtacattgaaatacgttccaaacatattttcatataatttatttctgtgactgttgaaaattgattttagggttggaaagacatacgtagaaatacgttattagaataaagaaatcttttatatttgctaattaatttgtaggaaccacattacaatttttcacatcttgattacaataaagtattcaacattacaattttccaataataaaagtgaacaaccaactaccattaccatgaagatgttatgaatccgtgttggtcaaattaatattaaatatttacatttaaaacctgatttgactagactgtacaacctatcaatgaagatgactttgtgaatgcattggaaaaaggcatttggaaaaacccaaccaaatggtgatgtgagttcaaatttcaaatgaaatatttaaaaataataattaataatttcgaaggtattactaattacttgatagttatatgtcattattttactaatattttaccatcaatccgtataaggtcacatcagtagggtgtacgatctactttgaaaaccctagctcatccacttattttattatggaattattttttaaaatctgacattgcaagtgttgttcataacttattggaaatagtgaaactcaatggcacatattcggtcaacatagttccattccaaataaaatttaagtttacagttacaaagacatacacaatagaacacaatttgtacataacatagttgtatcccaaaataaatttaattaggatgttttattttacactgaaaatatagattgtattgagattactataatatcggtactgttatcacatgatgctttatctgactcaagactttagttttccaccccgcgtgtcgattttgctccagtgtttggcgcaccgac

SEQ ID NO: 347406 - DNA, 870 bp, Cannabis indica
ttccgaagatcgtcacgacatgtacaatcattatcagcgatcaactcatctcacggttcagtaagcctttattgctttagcagtttattttaatagtacgttttaagaaaagcctaataggaagcatgttagtagcctgatagctgaataggtgcatgtttttaatttccaaataagcagtaattagtaagttattcttgatcgcgatctgactagcctagctcttggttacgaggctgttctaatggtacggacgccagacaaaataccaggagtcagggtaactcggtcagatccagtgccggttagggagtacagattcccccaaatgtttgtggccaaggcagaggccctagcggtagggcatgcggtcggggtgatgttaacccaccgcaggttgcccaagaatgggaaaacatgtttgtagtaatgcaagctagaattaacgagcaagaggaagagatcaaacgcttgaggcagcagggtgctccagaaatgcaattagctcctacccctgttgttcaggcaggaccggttgctgtaatgaactaaatggaaccactgcatgaaaggttttcgcaagcaggaacctctagtatttcaaggaggtcccgatgtaaggaaagtcgagtagtggctgacgattattataagaattccaaatttcatgggcgtcaccggcaatgacagagtggcctgtgccacatttcagtttcaagaagatgccctagtttggagggatatggtgtccctgacttgttatgttaccactatgacatgggaaaagttccaggagttgttcaatgcgaattactataatgaagtagtcagaagtgcaaaaagaaaggaatttactcagctgacccagaa

SEQ ID NO: 347407 - DNA, 638 bp, Cannabis indica
cttgccaatcggctgaaggttgttttggataaaatagtttcccctaaccaaagtgcttttatttctgggcgtatcatttttgataacattctccttgcgaatgaagttgttcatgccattaataataggaagaatgggaaagtaggttgggcggcccttaaacttgatatgtcaaaagcttttgatagggttgaatgggactttcttcaaagtctgatgtatcactttaactttcctgtaaagtttgtttctaatatcatgaaatgcctaactactgctaccatttctttctctgttaatggggaggtttgtggtaaagtctttcctaccagagggctaaggcaaggagatcctctttctccttacctttttatcctctgttctgaaggactctctgcactccttcatcactctcagtgtcaaggggttcttaaaggtgttgctatatctcgcactgccccttctctcactcatctgctgtttgcggatgatagtcttcttttttgtatggctacaccgtcttcttgtgaagctttgaacttagcacttcatacttattctcaggcttcgggtcaattaattaattttgataaatcatccattttgttttcccccaacactcaagctaatgttcgaga

SEQ ID NO: 347408 - DNA, 198 bp, Cannabis indica
catgcgatttccccctgcgcctagatttcacgcccaaacacctcatgcgcgcgcggacgagtatgcacagcatactgtccgtacagctcgcatttttttcgtttttcaaaatagttagtatgtatctttttgcttaataatctatcttattttaaaattttattatatcttatcttattttaaatgtaaggtcagatt

SEQ ID NO: 347409 - DNA, 1073 bp, Cannabis indica
tgttaggaagcatgttagtagcctgatagtagaataggcgcatgtttttaatttccaaataagcgacattagtaagtttctctttgatcacaatctgaccagactagctcttgtttacgcaggctgttcagattagtatggacgccaagcaaaataccaggacctagggaaattcggtcggatctaatgctggtcagggagcttagattcccctaaatatctgtggctgaggtagaggtatcaagggtagggcacgtggccggggtgatgttaattcaccacaggttgcccaagctactcaagatgcccaaaattgggaaaataagtttgcagcaatgcaaaccaggatcaatgaacaagataataaaatttgtgctcctgcagtgcctgctccggaaattccagtggcacctgcccttgctatccaggccgaaccagtggtggcagtgaatcggatggaacctctgtttgaaaggttccgcaagcaagcacctccagtttttctgggaggcttggatgtcatgaaagccgagcaatggctaacagtgattactaaaatcctaaactttatgggcgtcaccggtaacgatagggtggtctgtgcgacatttcaatttcaagaggatgcactggtctggtgggacatggtgtcgatgattcacgatgttacggtaatgacctacgaaaagttctaggaacttttcaatgcaaagtattacaatgaagcagttaggagtgctaagagaaaagaattcactcacctgactcagaaagaaaatatgagtgttactgagtatgcaaatcaatttgaccgtttggtgacgttggccttgggaattgtgccaactgacttcagtaagaaagaaaaatagctggatgggttaaatgcaaagatcaggcacgatctaatgattactactgacgacaaaaccacttatgctaaaatggtggataagcactacgagctgagggtgcagtgggatgtatgattgagtctggtgggactccagttgttggtggggctcctaccctcctgcatcaagttttagcacgggaggtagtggttcggccat

SEQ ID NO: 347410 - DNA, 444 bp, Cannabis indica
tgtgtgtgggcactcactctattacttaaggtatgaaattatgaagagaagaagaagagatggtttcggctatgctataggaaaggaggcttaaaattttactgaaaggaattagatgcatcatcttttcccttaagccatcactacctatttataggaaaccagctaggtttaggttagatttaattaacattaaaataatagaaaaataaatggaaaatacatctcctagtggccggccataggtatatgggccccacttggaattttgccatttttaacaacttttccttactttctcaaaattgtcatttttccaaatctaaccatttaaatgccaaaactgattatttaataattaattatcaaataaaattatcatttaatatatttaataattagacttaataaagtctttcaataaataagacctagaatctcttt

SEQ ID NO: 347411 - DNA, 744 bp, Cannabis indica
accccaaataacataaaaacgagtaaaactagggttcctgaaaatcccccaacgggtagaccggttctgcaacaagaattccagttctgggaattcctgaaccctcatctggaattccggttgcacaaccgaaattctggttcctcggagaaaactatcaaaaattcataacttgctcaaatcaaatccaattcaaacaaaaccttccacaccttttccaaatacccctctaaacatttctaaagcatcaacacaacccataaagcacagaatcaaaaatcaccatgtgagctccaagctttgagttcaaaactcaaacttggctagacctcacctacaagtctcaaaactagatttaaactacataatcatgcataataaaactgcagaaaccattctcaaactcatgcaacaaacacagcaaccgatttcgaaatttctctttgaaactaaagcttttgaaccaaaaactcttaactagattaaagccaaccaaacatgcaccaaaacaaattcaatccactcaatccaacatgcttaaacctctgaatacaacatataaacacagcagcaacaagcaactcaaaactagcatgcaacactcatcttttcatccaaaaattccaagaaacttaaaagagagctatagaaatcataccaattaacttgtgaacactaaatcttgttaaaaagagcttgaatcatcaagaaaatatccacttccttgctgctcaaggagggccg

SEQ ID NO: 347412 - DNA, 1508 bp, Cannabis indica
tttcaagaaaattctttgattagcaaagattgcactgcaattgaaaaagcactatagcgtgccttagcattagggcgttacaacatacgtttgtttttcttatacacatggtaagtaactgtttgaaccttagtttcagtactgtaaactattcataatttttaaaaatttacaaataatcataaataactacaatctatgcaattacaacaaacaatggactattttttttttgaaaaaattgctatacactttaaacttttcttatcaaattttagaccagtatatccactatctttatatataattcttttgttaatgtttaacgcagaatttcgttaactatattaaagcctatttcgtgatggatttgcacagaaataataatagtcaaagaaaaagaaataacacaaagctttcttacgtagttttaaaattctgcatagtctatgagtctatcttattaggtttttctggtacaaaactagggttctttctctaaaggatttttcgtccatttttcagtgtatcctgccccaatttatagttacataggaggcaagttaattacaatcagattgatatcccacaaccataattccctgaaattatgggattatattacgttccacgtaaaataaatacggttattatttgaaactcatacagctgtgatttatctgcttttaccgagttaatgctgacatgaatttatatacactgtagagtgtatcttgctgggtcacctcgctgggacagtaacattaaccctgacagcaagctgaagcttttccatgtcttttcgaggttgataatgtacatatcatcgtttatgctattgaagacataacactccatctaacaatcgcagttcttggtgacaaggtgaactttagcagtcaacatcatttgaatgtcagcttctatctaagagagctgacttaacggaggagtggatctcattataagatgtttgaagctgattagtgaaggtaccatgagtatgtcttcctatagcgagatggacgcctcactattcgttgtttagattcattcaaatgttatgcttagtttgtataatgtatattacaggctaagtgtcctaacagttaagatatctcgtctacatctcttcatacgtagcgaggtgggtgactcactttacactactgatgtcatccttatgcttgtgtcttcgtatacaaaatagtttctcgtcattatgaaaattaatagtttgtacacctgtgtctcgcttaagactttacagtcaacaagttataagatactctatcagcttcgcatttaatgagttattccatttcaatatcttctaatataattgtcattatattcgttgattcgtattctcccaggttgacatatgtcctcctctgaagtaccagccgaattttggatataacaattgccccttaaaaagttcttttaaatgaaaattgttttttaaatgattacagagggtatttttatcataatcccttttgaaa

SEQ ID NO: 347413 - DNA, 897 bp, Cannabis indica
cttgacatataattttgcatatccactgaaagtgtttttactggtagaaaatgtgtagatttcgtgaatcgatccatcacaacccaaatttaatcgtacaaacccgtggttctaggtaatccaactacaaagtccatggtgatatcctctcacttccactcaggaagtgtcaaaggctgcaacaaacctgccggtctctaatttcagccttgatctattgacacattaagcttcgggatacaaattctaccacattcttcttcatcgcgctccacgagaagtagggtttaagatcttggtacattttggtggtgccacgatgcaaggagtatggagtggtatgagcctcttcaagaatctcgtttctaagttccgcactacttggaacacaaaccctcgtcttaaacaacagcatcccactatctgacagtttaaaatctctggcttgaccagctcaaacctcttccctgatcgtcactaattctggatcagttaacgggattttcgggcaatttcgtaatttcacaaattttaaagagaaggcttggtttaattagatgggagttcgtgaaaagtgattattattcagaaattgagccctagaaacaaatgaggagactttaagaacggcttgtggcgattcagatcgatctctccaaccaattctttcttctctctttaatttttctatgctattttctgtgtcaattttaattatggatttgattatggatgttataaactaaactcctatttggggagatgatgaatgttgattgacattatctttagttaactataattgctatttctcctttcctgattgtaaaatttatccatatttgtgtttaactgcatgtttaagattgatcaccttttacatgcttgatgatccca

SEQ ID NO: 347414 - DNA, 693 bp, Cannabis indica
tatttggaatctaaaatttaaagtcaaaaacttaaatttataccaaatgtacaatgagtttattctagcttggaccaccactactaatctaactctaatgcctatagtaagcatatacaagtagaagatttctaagatcgaggatttatatcatttcgggatagaatgtcgggaatatagtcatctgtgccattcaatttcataaaagaacacagaatgacatcataagcaaatgatatataaactattcatctaatgatatattacttaagctaattcgaaacgaataagctaagaggaaaaaataaagcataatttcgaattcaaaataagaatccaacgatgtcttgattggcgagagtcaaagttattcttattttattaacttcttcattgtttcatattgtaaatacttgtctgaggtgtcatctaatgatgaacatctagatgttgcatttacaaatatttatctatcgagatctaacactattatgtttgtctaatggatgacaattcattaggatttgtcccattaaaaacaacaagccaagttagaccaacaatgaagattcgaaattaaactacaattaataaaaaaaaataacatggttcaatataaattcacacacaattcagaaattactaagcctttggcaaataggaatgacaagcgaaaatactaaaacatacaat

SEQ ID NO: 347415 - DNA, 625 bp, Cannabis indica
aaaagaatagaagaagcatttgactccttcatgcatgctccacttagctcggggggatatagctcatttggtagagcttcgctcttgcaattgggtcgttgcgattacaggttgggtgtctaattatccaggcggtaatgatagtatcttgtacctgaaccggtagttcactttttctaagtaatggggaagaggaccgaaacatgccactgaaaaactctactaagacaaagatgggctgtcaagaacgtagaggaggtaggatgggcagttgctcagatctagtatggatcgtacatggacgctagttggagtcggtggctctcttagggttccctcatctgggatccctggggaagaggatcaagttggcccttgcgaacagcaggatgcactatctcccttcaaccctttgagcgaaatgcggcaaaaggaaggaaaatccatggaccgaccccatcatctccaccccgtaggaactacgagatcaccccaaggacgccttcggcatccaggggtcgcggaccgaccatagaaccctgttcaataagtggaacgctttagctgtccgctttcaggttgggcagtaagggtcggagaagggcaatcactcattcttaaaacc

SEQ ID NO: 347416 - DNA, 1518 bp, Cannabis indica
cgtagactgcaagtccgcctgatgcaactcctctaaggacttcaacttcggtagccatctcgtccatagcctccttggcctcccgaagctcgaatctggccctggctgcggcctcgccctccaccttcaatgcctcctgatgcctcgcctccgcctcagcctcactttgcttggcctcctctcggaacttcacctctgtaagggcctccctttgttgagcctcctcttggaatgcccgcctttcggtagacaaatcccgcaggatcttcacggcctcgtctatgcccccgaattcggacatgacgaaggcatggtcgatcaaggtcttggaaaggtgactggtctcggcagtaatctaataaaagaaacaggaatgaggttagatgccttagacaaaatatcaaaggaaggaataaattacaagtactcaccgcggccatggcagagctaatgtcttggacctggtaaactaagttcaaagaggcacaagccgcatatcttttggctaggaactgagtcaggtgggagacaaactggctggtcatctctgaggcgaaaggagctaaggtgggcccaacaaagcggttgaaccaatccgtcagagggtccatgttcaggtcccacagatttcagaaggcgtcctcgtgaagagtgttctgctgctcctcctgcagaatcttctttaaggcctccacctcagcgtgcccccgactgtactcgtccagagcgtagttgtgcttggcgactcagagattttgcctctcctcatccgcgggaaccagggtcagcatgatgccgtgcggcaccgtgtactcctccgcctcggaaagaatcccagagtcgttgctcaccgccggagtgtcccccctccgggtccgcttggaaggttcaacctcaaccatcttgccctttcgcttgggctcaagggcggccgcatcctccaccttgccttccttgacttccccctcctcgtatatcaagacgattgtgtctaaaggggcactggaggaggacctcccgggggtcaccgattgagagggagtcggaggcaaagaggcattaggactgtaggcctcagcaagagtagccaggagatcttccataggcctgactgttgcatcaaagaaataagctaagtgttaggatattcatgagaaaggcatgggcccaacaaaaaagcaataaaactagtcctaccctgactctctaattcagccttagcaaagtctcgaatcataatgctggcttcatcgtccccgagaaagctgtccgaggggagaaaccagctggaagataaatgggctgaatggtcaggggaataggcgccggaggtccagagcccatccaggatcgacttaaaaaatggcctaagtgggaaaataatattctttggcgtgattcccccaccgggtagaaggcattctaaacctacgaaggcgctcatcgaaccctgtaggtctaaggtgggtatactctcggacgggaggaacataacgtattattaaaggagacttacca

SEQ ID NO: 347417 - DNA, 984 bp, Cannabis indica
cgtagaaatgtagaatttcaggtaggtgatcatgtattcctacgagtgtctccgatgaaggggatgagatctttcaagaaatagggaaagttatgccctaggtttatagggccattcaagattctcaaaaaggttggactggtggcatatcatctagccttaccactagcactttcagcagtccaaaatgtttttcatgtctctatgttactgaaatacatttcagatcccactcatgtactgagttatgagaaccttgacctttagccaaatttattgtacgaagaacagctagttcagatcttagacagaaaagataaagtccttcgaaataagactatagctttggtcaaggtgctctagagaaacagtaaggtggaggaagccacctgggagttagagtctgacttcagggctcaatatccagagttgttcagtttagattttgatgatgaaatccttttaacagggggatatttgtaaagaccgcttaatgtttattatggaattagcagataattaggttttaattatgattttaagactattatttatgacttatgaatttatggtgatttatttggatttaggatgtattatttatgctatttatgaaatttcatgtttttcatgttttgtgcctagcaatattggaacgcaacgtttggccaatagaattacattttagtattttggttttatcggggcaatatagttagacgttgggggtgtcagggatattagaggtgttggaaaggaccaaattacccctagatggtttagaagctttttggtataagtgggggtaaaatggtcattttgtgcctttagactttttgtcctttagtggaatatgttagaattagttagtgctgatctaattatctaagtttatgtagataatactaagttttgtctcatttatcaaattagaaaaaaataaatcaagaaagaaaactatttctcttcaagctctctctctct

SEQ ID NO: 347418 - DNA, 621 bp, Cannabis indica
caataaagtagatgaaaatgcaaaaagactactatacaaagaatttccacaacattacgtatgggacaatcaacacaaacaatggactccacggaaaaagaaaaaagtaataggacgaattgttacagcaaatccccttgaaggtgaaagatattatctccgattactactaagccatgtaagaggacctacatccttcgaagatctaagatatattgatggaatagtagctccaacatttcgtgatgcagcaacaatgcgtggtcttctccaaacagataataccttagaagattgtttgcaagaagcatcgatattccaaatgccaaacagtttgagacggttatttgcaacaatattggtcttctgtaatcctaataatccaagatatctgtgggaacgattcgaaaaagacatgtcaatagattacaaaacatcagaagattccacttcaaacgtaagactcgaagcactgaagtcaattgctttagcgattgagtcaatggggaaagatattaacacattcaatctcatagacaaccacatctcatttgatgatgaagaaattcagacaagagaaatcaacgatgaactaggtgtcgaagtcccagaagaagataa

SEQ ID NO: 347419 - DNA, 619 bp, Cannabis indica
taaccgaccgtttagaaattataaccatataaaaccgatcgtacgatttttggtagttttttgatttggcggttttggacgatttttggcggttttaggcacttttgggcagtttattggggtttttggcgattttggcgatttttggtttaaccattttttttatttcaaaaaccaaaaccgactgccatgtcaaaaaaattaaaaatgaaaccgaccgccaaattcagtgatgatgtggaaccgaaaattcggttacggtctggtcggtttgatggtcggttattgtttatcggtttttatgaacacccctaacaaaaaaattatgttgtcactaaaagtaatagttttttgtagtgacaccttgtattttaaaatacaatataattagagaaattgacatggtatactaacttttccatttttttacaaaaatattgctaggcagtattttttacttttttactgtgttttttataagtttcatactgcagtatactgtgttaagttttcactggtgttctactggtgttttttagttgttctactgttattttgagttgttctgctttgtgttttactggtattttataaaaacacagtatttttgaaaagattt

SEQ ID NO: 347420 - DNA, 938 bp, Cannabis indica
ggctcttgacaagtgagcaattaagttaggacatatgtggaaatgcaatttaggatggatgtgatatgtatgattgggttgcacaacaaaacgaggctaacggctcaaacttgggtgactagggaaaaattgattgatagggagggttagaaaggctcaaacgtccaaggatggcctaaatcatgtcgaagggacaagtcgaactaggatttcgcttcaaggagatgcactaaccaattctagatgctaaaattacatgtgaaataatcgtatgagaaatgcaaagcatggtggaataaatacaagtataaactagtgaggagagactaaagagaaacatccataatatccaacaattcagcatgataaggcaacaaataaaattaggcagcaacaataatggaatgggcggaaagtatcatcatcgagcagaacactaggccacagaaaaactcaaaaaactctcaatgccaaactaacaaccacataaacaacatagaataaaagttccaagcacaaaagacaacacacaactagcacaatacaaactaaaaaaaacaacacaaaacagaaaaatataaaatagtttaggtagtagaaaactccctctactcggagtcctcgtggggctcctccgtgttcgaagctgatggcccaccccacgggtctaaaacatgctgagggaagtctgggaacttgggatcaaaacggggcgtagtcctcttgaatgcacgctccatgatggcgtcgcgcttctgctcataatcccacattgcgtgcaatcggccacacatttgttgttgcacttgctcaatgcgagcaaagcgatctaccggaggctccgtggctgaggacgtcgctggggtaggcgttgattttggagcgcgaggtggaccaaaactgataggcccccgaggatgttggaagttattttacca

SEQ ID NO: 347421 - DNA, 843 bp, Cannabis indica
actcgaaactaaaagtttccctatcgataaataacatggaaataccctaaataacacaagaatgggaagaactagggttcccaaattttccccaaccggtagaccggttcctcatctagaattctggttcagggaaaattcctggaagccaaccggtagaccggttcctaaaggcctccctgaaccggaattccgtttcagtgcaggaatgggtcaaaatttcatatctcaaccaaaacaaccccaaaccacatgagactctccagacctgttctaaatatcccaaagaacaattacaaagcaacaaaacaaacctacacacacagaatcaaaatccaccatgtgagctccaagtttgagcttcaaagctcaaagcttggctaacaccacaaccacccactacaaccagcttaattcaacctaaaacaacatgaataacatccagaaaccaaactcaaacacaaacaaaagtcacagcagcaaaaacaccattttaccattaaaattcaaagttttgagtttaaagctttacacatggttaattcccactaactaacaacaaaaccagcttgaatccactcaattaaacatatctaagcttctgaaaacaacaacaagaactaacagcaaccacaacaccaaaatcaccaagcatgcaaccattttcatccttaaaattcaagaacacaacaagaaaagtttaaagaactataccttggcttgagatcactaccaactagctgaaactacaagaattagagagagaaattcccagccctagcagcccaagcaaaaacgagagagagagagagagagagatagaactttgagagaaagagcttc

SEQ ID NO: 347422 - DNA, 586 bp, Cannabis indica
tggctcacgggtgctctattgtacaagaaatggtaaatctgttactgatcaaccatgagttcaagggattggcggtgtattgtacatgttcgggctatactagaccacgagggttgggtctaccataagaaatattttgtattccagcttttgccacctacgtcggcgtgtaaaataacttgtaatattttgtaaaagtttttacgggatcccagaacaaatgtaatcttttggaatgtttgtaaaggtaattaattacaagttatagttttactctctatttgtttgaaagtttaaatttttcgctcttatggcatgtttactaataagtaatgggaatcaatggtgaggtaatcatacccttatatttgtttacttacataattaaaattaggaaaatgagaacctgattaaataagagagagaaaagaaaaggagaacttcccccaccaattttataaggaatgccattaagggtaatggatttttattatttttattttattttttaatattaaatatataatgacaattttattctttaaaatatatcttacaaaataactaccatatattatagtttaac

SEQ ID NO: 347423 - DNA, 571 bp, Cannabis indica
tgaaggatttgccaagcatccttagcagattcacaagaagatataagcttaatatagccttcacctactccattaaatatagcatgtaaagctttgctattatgagtagacaatttatcattttcagtagaccattcaagttcaaattttaatttagaattaccttcggaatctaccacaacaggaggagaccatcctgaaagaaccatcctccatgctttctcatcttaaaacttgataaaggctctcattctaaccttccaataaggatctttagaattattgaggagtggtgggcgaacaattggacttccttctgcaaagggaaacatattgcaaaaacacaagaaaatgttaaaaggatcacacttagagtttagtgcctcgctttgatactaattgaaaaaactaagtttttgttgattccaataattattacagaaaaacaataaaaatttaactgtaacagtctgtagcagcagaatataattctgtcactgcagaacacaattttgtgaaaataaactagaaataaatagtgcagaatttaaaaactttacacaagaaaatt

SEQ ID NO: 347424 - DNA, 979 bp, Cannabis indica
acattgtccttgtgaataaactaaagggaagggaacttacctgatcaccatgtcagtacggcggtggtggtggtagcggtgggtagaatccacctcttgcatccatgagggcccttgtaccaaacgaagaaaactgtcctccaacattgcaatttttaaaattatccttgggttgagagtcaccttcataattctcacacaacagtcttttcatacgtcgtcgaaaagttcgaaagcgttctttagacttccctttcttcttgttagtagtgacttctcgatcatcctttacaacttccactcgacaacaagtaggaatttcagttgcggcaaataccttgaaagtctcttcttctttttgaacacgcaactttaactcccccttctgtacatcaattaatgctcttcccgttgctaggaatggtcttccaaagatgataggaatattctcatcttcctccatgtcaagtattaagaaatcagcagggaagatgaacttaccaacctttaccaaaacatcttcaattataccccgaggatgagtcaaagaacgatctgccatctgtaaagtcactgttgtgggcttggcttcccctaattttaatcttttaaacatagataggggcattaagttgatactggctcccaggtcacataaagcttttgtttgtatcgaaccccctattgagcatggaatgttgaaactacccggatcttttagcttgggtggtagtttcttttgcaggaccgcactgcactcttcagtaagtgccaccatctaaaattcttccaacttccttttcttagtataggatatctttcatgaactttagataagttggcatctgttccaaagcctctatgaatgggatattgatgtgcagtttcttaaatatttcaaggaattttgaaaactgcttatccatctattctgtgaatttttgaggataaggattttgatgtgatgatcaatgctgat

SEQ ID NO: 347425 - DNA, 923 bp, Cannabis indica
ttaattaaaatattctaattatgataagatttaattaccaaattaaaaagttacccgatttaatttttaaaattaattatcaaaatattctgacattaattgttgaagagatcttgaaggaaggtctcacctatataaatataggatttcggtccccgagctcactgctcattctgtgaaacacaataaatccatctaaaaagagtagagagagcttggaagctcgattacccacataaatcagtttcctttgcagatcaaagcttgtgtgggattgaaactcaaagaattaatggttgcaggtatttcgatcttataatttattgtgtatatgttcatttaatttcgcatttgatatacacatttatatatttatatatacacacataaaatgtctaacaattggtactagagcaaattttatatctttgtcttgatttattttgaattttatttattcatatatatatatacgtacgggattattcatttataatataaattatatatattttatatatatactttcatattatataattccgattgtatatacattcatactcaatttatttttatatatacatatatattgacctcgcttttagccaacgacagtgaatctgatttagtaagcgataagtagtttatgacgactaatatatgataaagtaatataaaagacacaagaattttatagaggttcagccccgagcagttcagtaatagcctaatcctcgttatttgtattaactcaagaacaaggagaaagattccttttcttatagctcttacaacaatatctctgaatatgaattcttagataatatctctttaagtaagatctctcgaccagaattttttcaaccctttgcccagtaaacatgcatcactatttatagggctatgagcttagagaggaa

SEQ ID NO: 347426 - DNA, 878 bp, Cannabis indica
ctaacggctgccgtacatcacggaatacagtccatgaaattacactaacgggacaaaatcgtctccctacataaatatatatatactcagacagaccaaatacatattcatatatatatatatatatatcttaatatctttatatatatactcaaacacacaatatatacataaatatatatacacacaagcatatattcatatatatacataaatatatatactcaaacacacaatatatacatattgatatacatatatatactcaaacaccagggccggtcctaaggtatatggggcttaaggtaaaatcaaatttcggggcccctataatatagtctaattattatcaaaatgatagttctaatattttagtgtaatggtaaaatctttaaaaaactcttaagagctttaacgttcaatcctccatagctacacaataaatattttttttaaaaaaaataaaaaagtagagattagggattgatcccttgaccttttagcttaaagtaaaacctttttaccaaacaccaaataatacttgttatattttcttcttatttaatactaggtaacgataccgcgctttacgcggttgtttacaaactttttatgtatgttgtaaaaataaaatttatatttaatatattaaaaaaattgttagttaattaatatattaatgcactataaaaaaaatactaaaaattataatcttaatatgttaaaatattaaatcacattatttaattgaattattattgttattatcgtaaatttgttatataaattacacgtataattatttgttaaaatatgtaaaagattaatatttttttaaaaaaaaaacttcaaactaaatcaaccacaaaataaataat

SEQ ID NO: 347427 - DNA, 709 bp, Cannabis indica
ttgaagcggggacgttacaccgaggggtgatggttggccatcattggccgctgttgtgtagcgctctaccaagctacgagacatgtcacaatctgcaaagaaaaggaaaaaaatatcagtcacaatagataaaaataaactacagcactgtgaaatgagcataaagtcaacagtaaaattaagcaagcagtaaatgaaaaacacctctggggtcattgtcacccatcatcatagtatttctgaagtcagtctctgtgtcaatcaccacctccttactccttcctctgggagaaggaggtaaaagtgggtcggcaggtaagtcacaagtaccattgtctataagcaaaggatattccatcctaataagagctaagagtttgacattagttggctctgttgggatttattttactaggatctagatttactaacaagtatgttgattaacatcctaaatatgaatatctctaatacgatgaaattaaacacataagagtttagaaaaccttatattgattggagcggaataatacgacgccttccgctcatatctctaacccttattcctttctgttgcagagtaataacaagatctgagcctggatctctttctctcctttgggttggttaccaccgtcttccgcactatgattgagtcttgacttgctatgtgtgggcatgacactctagaaactttagaacctccttc

SEQ ID NO: 347428 - DNA, 525 bp, Cannabis indica
ttttccaatttcagaatggtaacttgttactagtttgtgaaacaaaaatattgttatatatttataactagtaacataatagtaactacttaatataatgagtaataacaatgtaaattatataatttagtaaccatcatttactagttaattttttgctaaagacaatttataactagttaattagcaatatggttatcactctgaaattgcaacaaatggtaacttggattttcgaattttagagaaataaactagctgcaaatttttttatttatttttcaaaaaaacataattattatatttctgtaatgaggttcagttatatttctgttgttaataggaatgtcaatggggcgggtcggatatgatccaactatgatccgacttgatccagatcatgtacggatctgtcccgccccgcctcgttggatcagatactcggatcggatcagatccaacccgccttatacggatcggatcagatccgacccgactatttttttttaaagaattttaatatta

SEQ ID NO: 347429 - DNA, 523 bp, Cannabis indica
tactggccaactataaataaagacacccacgaatttgtcaagaaatgtgataaatgttagagattctcacatataccttgtgtaccaccaacgaaactaacaatgatgacctcgccttacccgttcgcaatatgggggatcaacttgattggggcactccccacaggatgaggaggagcaaagtacgcagtggtggctgtggacttctttacaaaatggacagaggctgaatctctggtttccataatctgcaaaaaagatctcgactttgtcgtgaagaatataatttgtaggtttggaatacccattaagatattatctaataacagaactcagttcgatggggaattattcattgagttctacaaaaggaacaagattatcaaaagcttcttgtcagtatcctgtcctcaggaaaatgggcaagtagaagaagttattaaagcattgaaggatactatcaaaaagaatttggatgctgctaaaggtagatggtgttggaattattttacaaggatctaga

SEQ ID NO: 347430 - DNA, 574 bp, Cannabis indica
attttgttataaatatgtgtggattggattggatcggttacttttccatgtcaatcaacatccaatccgcacaagtggggattttgaattttccaatccaatccaatccgcacaagtgcggacatgtcaatcaacatccaatccgcacaagtggggattttgaattttccaatccaatccaatccgcacaagtgcggatatccgcactttgcggattggattggatcggctattttatgaacacccctactagcactcaactacaaaactataataggctaatagcattgctattaggcaccagtggtgtctagcaccttctcgacatgtcacgttgcgattggctagcgatactccctaaaatttattatattaaattatgtgggacccgatacttagttggaccaatagcgatactgacatataggagggtgctaggcaccactggtgccacttagcttttctcaataggctaattaggattttttttttcccccgaactttgacatgtaccaaatcatgctccctgaacttttttggccgttaaaaattccccctgaactattgagattat

SEQ ID NO: 347431 - DNA, 770 bp, Cannabis indica
ccaaacaacatccgatgcagtacaatgttttccattccatagcaggtcattgcgcgctttccaaatagcctaactaaccatcactgcttcttcaagtacaccaaaattaccacatgctgccaactccataaaccagtcaacatatgttgttgcagcagagacaccaacaccgagtgatgaacggttccagcaagagtgagcaaaggaatattcaacttagacatggaatattgattcctctacaccattacataatactcagttaagctccacagtgacgatgcttgaggtggagttgagatcgagttggcaagcatcctgaaagtaatttccacgcaaaatgtagcaccttaggatggactttaatcttccacaacactttcctaaaatcaacctccgtattagaactctaattaccattgacagtttgtaagtaatggtaggagctttttgacggtgtaaaaattagatgcctctttgttcaaaaaccagttgtcgtccatcacagtagacctaaaagggacatgcaatataagatcaacatcacgggattcaaacaggtcagaaacaacttccatatcccactgtttacagtcggttcgcatcagttgggatactttacaatcagccaatgcgggatgtgttgaaataacacaaggattagcataatctaacaaccatgtagtgttaaagagatcatctaatatattttatttttattttcacaattttattttaaatcatgtgtattttttattagtgtaatttta

SEQ ID NO: 347432 - DNA, 452 bp, Cannabis indica
tgattctggattcttcacagccttacacactatgattgagatattacttgatgtgtgtgggcactcactttatcactcaaggtatgaaaatatgatgaagaaaagagaggggctggttcgaattctatagaaggaatagatggctcaatttttcctgagggcaagaaatttcctcatctttaagtgtgagccatcactatctatttataggcaacaactaggtttaggttaggatttatcaggcattaaaatatggaaatattaaatggaaaacaccacttaaatggccggccatagggatgggccccacttggaatttttccacttttgacaatctttcctttattttctcaaaaatgccatttttccaattctaaccatttaaataccaaaaataattatttaataattaaaaattaattatcaaataaaaattgccatttaatatattt

SEQ ID NO: 347433 - DNA, 1237 bp, Cannabis indica
agaggtatattttgttaatacgggaataatttttttttattattaattacaatttagaggttatttttattttgtagctccaacttattataccacaggtgattcaccacaagaaatagtccctttagctccatctcaccctatggttactagagctaaggaagggattttcaacccaacgtctatgtaggtcaatctcaatggaactgtgtgataattaatgaagagcctacaagtgtagaagaagtcttcaaatacagtggctagaacaggaccgtgtctacgaaaatgatagctctcaagaggaatggaactaggattttggttctaaatattgaaggaatgaaaatcattcgaaataagtgggtatacaaggttaagttgaatgttgaaagtacctttcaaagatacaaagctaggttggtcgtaaaggggtttaatcaaagacgaggaattgattttggtgagacttatagccctattatgaaggcctccacaatttgaatcacacttattacagttgttgctaaggccgaggagataaggcaactagacataaataatgtatttctaaatggggagctgcaagaagatctttacagggagtgttgtaattaagacacatgtgaattggtagtttgccacatcatcacaaactatcctatccaactaattcggttggcatcgaaatcagttgcagccgtacacctaaatatagatttcttgctcactgatttagcgggaacttagttttatgatttgttattcgagagagagaacctagaaaaacaaaaaacagagattgtaagagtgtttatggagggatgttaaagggagtgtccattcatgaaatggcttccctcatgtgaggatttactgtaattgtctctgtattgtaattgattcatcttgctggttttatctctctctctctctctctctctctctctctcattaattgtaatcaaagctaattcagcaataaatattcttcttcatgttcataatccagtcttatggtttcttggtgaattcgatttcgcattcattctttacagtacattattcttgatctctgttaatcctttatattgctttgttattgtttgttaattgttgttttcagcattgttccagcacaacaaatggtatcagagccaaggttggcttaatcaatccaagaactgctcgatttcaacacagagaaaccaagaatgtcaatggctaaattcgagat

SEQ ID NO: 347434 - DNA, 597 bp, Cannabis indica
agtatattacttcatttgaaaaacccaaaagcttcactatgaaatacacaccaagtataacatcaaaatacttgattttttcaactagattccctccaaactctacaattttgagactagaaaagtaaaacaattattatgtaggcaaaccacattgagaacatttgacttacatgcaatttcctctgaacgttccttggtcgcttcttgggtcggggaggaggtttgtgacctaatagagagatgaaatcttcttcgatctctttctttgtgagcttctccagtggcgataccctctgagatgtaataaaggaggtttaaaaccctaaaaagaactaattataagaacacgaaaatgaaaataaaagcactaaaataccttggtaatgatcttcaaacaatgaaagagaactaaagtttgagatttttggagcttcttttttattttattttttttagtttgtgaaagtgaagttctttagagctgaaaaagtttccttcactttaagacaatctaaaggctataaacgtgtgcggcactagtcactcaaaaaacccatgcgtgacaacagccatcccctatatatatatatatat

SEQ ID NO: 347435 - DNA, 742 bp, Cannabis indica
tcaatattaatcaattcataaaaatactaattgtattacgtacaacgtactatgcagtataatatatttttcttacctcaagttccagtttagatatgttggccaacctacttggagtacgatcgatgattccgggccctaagtcataacaataataaactaataagtgtttatcccaaaacacgagttaacagttgcaaaggctaacctagggtttcctattaaatctcgtagttcaaatatactaaaattatattttggctctaaaatatacaccatatggtagatctcattgtaagcttcaaatgttatatagaacgtccaaaacagacactcgagtaaaaagttatggcaaaaatacgattcacgatttcgcaaggctgcctgaaacggtaaaccggttggccagaaccggttgaccgatttaaaaactggttgaccggtttatccggggcaaaaaatgtgattttctaagtttacggactcgccgaaacgctaccagaacctgtccaaaccaccccaaacttcatagggcacatatataccatacttacgtaaaagaatctaaaattgagcccgtaattggcaaacgccactagtgttcggacttaagttataaaaagtttcaaactcaatttctaatccaaaattaccttaattttagcaagaaaatatcgaaattagtcccatgactacccgagaataatcctataaggccagaaccttcataactattctaatt

SEQ ID NO: 347436 - DNA, 2432 bp, Cannabis indica
cgaaccccaactgggatcgatagctcggacccatacttgcgttaggacctacgaccgagaacccagaacccaggacccatgacttgagaccttgaccagaaccgagacccatacaagaacccagatccagacctagatccagaccaagacccggaccctaaaccggactgaaaccgggacccagaccgagacccagatccaaacccagactcgtacacgaactcggactggaatctgagacttggaccaggaccgagatcaggactgggacccagaccaagacaacgactatgacctaaacatggactgggacccaggaccgagactaggataagggacccaatattcagacctgagacctgagaaccgaattgtgagccagacccaaacaatgccaagactcgagacaaggacaagtaccgaacaaggacttggacctgcactcggactaagatgataaccaagactgggacctaggaccctgaccttaattggggaccttgacccatcactcaggacccaagacccaaacctggacctgaaacccgaaccaggactcagactaaggaccaagaccttgacttggaccaggatctagatttggacccgggacctaggacccaagacacgaggcttggacccgacccatggtcagtgtctaaatctaggaatcggacctcgacctggacccagacccagactagaacctgaacccgaatcaaaactcgaactagactcgacatgaggttggtgtttggatttgggaccgagactcggttctgaacccaaacatgaacctagagccagaccaggactcttacccagacccacacccgaaccataaatcgtaccctgtgaccaaaaattggagccggaactggaattggacccttaaactctaaaccctaaaccttaaaccctaaatcctaaactctttacagttacccctaaaccctaagccctaaaccctaaaccctaaatccctaaatactaaatccaaaaccctaaaccctaaaccctaacctggacacaggcccagacccatactgttatcccaattttgcactctgacgtggcatcacacgatggtgacacgtggaatatactctatgtacctgctcacaagagatacgccgaatagggcacctcatatattcgctcggacgaagccctctcagccgggcagtgagcaatccgcgcagcacgccaacacttagcaaattcaactttcgcatcgtgagtcatcaaagaaatccctataactttgggatcaaatcacagagatatggcaagctgtctgaatcccacgattagtgtattctgtatttactatgcaatctttccacttatatcaattgtaaccagaagggaaatacttccctcccaagcttatagccctataaatagtgattcatattcactgggcaaagggtcaaaacatttgtctaagaattcatattcagagatactattgtaagagctctaagaaaaggaaccattctccttgttcttaagtcaatacaaactacaagaattaggctattaccgaactgctcggggctgaacctctataaaattcttgtgtctttatttgctttattatattacactcgtatcaaactacttgttgcttacaaattagactcattgttgttggctaaaagcaaggtcaacattttggtgctttcattgagagctgaactcaaggatcgctttttatctcaaatctaatcacaagtacgatggtggtacagactcgtaggggcgtggttgatccggtgaatccacaggcagtggatcatgcactgtagaacctagggaacacaagggttctgccaaccgtaaatcccggacagccattaactgcgggtcacagtatgacgactcctgtgagtgaaatcacgcctggcgtgcaagagactgggaataccagttcagcagccaaccagggcattcataacacagccattccgcccgctaccaatgttcaaacaaccattggagatgacactgaaatccagaacctccgtgctgctcttggagtcatgcagggtcataccaacaccctgcatcatgatcaggaggaactccgtgctgcggtgaatcttgcatttgaagagcagaggcgcatgttcgctgaatggagagataaggagatagaaacattaagctaagcaagcagtcattgacgaccgtagtcggtaggccactgtgttgatacgaaaagcctatcagactaccaggaaacagcctgtaatcgtcatccccatagaggaaacagacgaagatctaacgatgaatacctctcagactataaatggtcagccgccaaaatccccggtcacaggttccacctgtgggccaacttgtaggcgggcagactgttgggttttatgccctaaacaaactctgtttcaatgtaatccagatta

SEQ ID NO: 347437 - DNA, 718 bp, Cannabis indica
cattagacaaggatattactggcaaacgatctataaggacacccatgagtttgtcaaaaaatgtgataagtgttagaggttctcacatatacctcgcgtgccgccaacggatgtaaggatgatgacctcgccttacccatttgctatatgggggattgatctaatcagggcattacccaccgggcgaggaggagcaaagtacccattggtagtagttgacttcttcactaaatggactgagggcgagcctcttgtttccataacatgtaagaaagtccttaactacattctcaagaacattgtctataggtttagaattcccaataagatagtatccgataacagaactcaatttgatggcgacttgttcactgagttctgcaagaggaacaaaataattaagagcttctcgtcagtatccaggcctcaggcgaacggacaagtggaagctgttaataaaaccttaaaggatactatcaagagaaagctagatggcaggtgggtcgacaagctaccgcaaccgaaaagatggcaacgagacacactcccttcttgctagcatttagctcggaggcaatgttacatgtagaagtgaacatctcgactcatagacaagagttttatgatcaagaagaaaaccaagaactcctaaaattgtccttggatctacttgatgaaaaacgaactgagtcacaaatcactaatgcagcgtatcaac

SEQ ID NO: 347438 - DNA, 813 bp, Cannabis indica
aaaggtgctagaggggttaccttgaatggattcattaagaaccaactaaaatccacagaatgaagctaaagaaacaccaattgctatggttctccaaggaattcgagagagagagggagtgaagagagagaaggctattttctttccaatttctaattttaggataaaaggtataaactaatatatatctcattaattagagagtgtatttagataataaaacttaagtaaagcccactaaaacacaagggattaaacggccaaaaagaccattttacccctcactaaatccaaaaagcttctaagtcatttagaggtatttttgttatttttaaaacctcgactaatcccgacattcccaatgtctaactatattgccccgctactactaaatattaaaatgtgattctattggccaaatattgcgttccaatattgttgggcacaaaacatgcaaaaacataaaatttcatatatggcataaataatacaccctgaattcaaataaagctccaaaaaacgataaatcataaataatattctagtttcataattaaaccataattatctgttaatttccaaaacaaagttaacttctataactaatttttgtctcgtccaattcttgacggattcaatcatccttggatacagtttgatttcatctttactgataatgtgcccaagaaaagacacttgaaatagcccaaactcgcacttcttaactttatcatatagtttatgttctcatacccgttgtagaaccatccaaagatgttgctcgtgctcctcttttgattgagagtacacaag

SEQ ID NO: 347439 - DNA, 768 bp, Cannabis indica
cccgtcaaccaagcgaatcaaccttaaggcagccatgcgcttttgtgtttgagaggttagggacaacccatgacctaaggaatgatctaaaccgaaggaggggagtaaacgatcaaaatgttacgacaatcgtgcagcccgaagcccatactcaaatccccactcacaaagatgctgacgtaatccaaattgaccagaatgtcgagtaggtcagcccagccgtacaggctcagctagacgaacttaaaaataggtttcacggcatggctggacaaagaaaaaatgatattgaactagaccaagcacgcgaaactcctttctcgccggagatcaatctcctgccactgccccacaagttcaaaattccgacgtggacaatgcacacgaggagagaagatcccctttcccatctcaagtactgcgaaatgcaaatggatttgcaaggggtacgaggagatgtatgctgcaaaattttccctgccactctgtcagaagccgctcagcaatggtatttcaagttggctcctcaaaagtttagttcatggaaaaccttctcttcaaaattccatgcacaattctcctcctcgcgccaactcccattgcatttgggagacttggtcaaagtcaagcaacgatcaggcgagcaactcctcgcatacttcagcagattcatgacggaggcgagggccgatatccgttaatagaaaaactcgcctactgcctcattctagaaaaaaggaagttcaggccttatttccaagctcatcc

SEQ ID NO: 347440 - DNA, 638 bp, Cannabis indica
agacaaaatcgtgctagaaggaacaactcaacactttaaaaaaattgatccaaaaattgctctgttctgctgtatgattttttttttcttgtgtttcaaaagtaattttttgtttacttataatattgataataaactaattagttacttttatgtaaaacaaatattatggttattactattccatcttttctaacaataaactataaataatatcaatcaactaacatttgcaatataatcagcttcttcatcacgatttttttttaattttcttgtattttcaaaagtaacaatttggttacttatagtgccgataaaaaattatttgttacttttacttaaaaaaaattattttcatatcatataattttagatacaatttgattacctttaaaatttatttataaacatcttataatcaaagagttattttttaagttatattactgtatataatttaaagaaatttgcggcataatttccttaagtgtctaggtttttgcaactaacctccaattctaaaattttggcggcaaaaccccctaaacccaagttctgttagcacttagccttttccatccatttaggtgttaactgccaggttggaatgtctacgtgtacacagtgtacacgtg

SEQ ID NO: 347441 - DNA, 704 bp, Cannabis indica
atcaatcattttgatatcttccgtcctagtgagctaggctgttcgaggaactggataggaacaaagttcgccttatcacttatattattgcttgctaatcgagctaagacgtctaggaccgtagcttttgaattgtgcgagcaagtcatgtatttttctcagatacgctatcattttttgtccccgagcttcgtattctccggatacatgatttaccaccagctttgaatcgctacagatttcaatgtggtcggctctcatctcccgggctaattttaggccagcgattaaagcttcatactcggcttcgttattagatgccttgaatccaaatttgactacagcgtgcaggcattgccccccaagcttgacaagggcaattcctgcaacagatagttgatctgtggccgacccgtccatgtgtagcttccaagtcagcttgttttcactgttacttggctgaggtgtttgtaccggctcggggttactttctagcatgctttcttctttgcctgtgcattctaccacaaagtctgctaggccctggcctttgattgttgttcggggttggaaggtaatttcgtactgacccagctccaccgcccacttgagtagccgtccagaggcgtccaacttttgcaatattttgcataatagttggttagtgtacacgcgaatagcatgagcttgaaaatagggactta

SEQ ID NO: 347442 - DNA, 926 bp, Cannabis indica
gcaccaactccacctttgcccgtgcttttagaagccaaaaagggcaaggagatgctggcccactatatgaactggctggttcccgaggtcagtgagcaactggctggtgctgatagtgactcatctctggatgtgttggtgggcggagtcctgaaggagttcaccagggtaagtcttttttgatacttccctttaactttccatacttagctccatatgctaaagtttttcctttgtgcaggtcggtctgaaattggtttacacttactcctgggctaagtctgttgcttcaaagaccacagctctgtccaacaccttgaaggcggaggtagacttggccaagaaggaagctgaggaggccaaggaggaagctggagctattttgttggagttaggcgaggccaacaagaagctgttcgctgccgagaagaagatctccgtgctgacaaaggatctcgaggctgctgatcgctttcaggagaccatcgagatcttatctgctgaagtaaatagtcttcaggatgagaggacttctctgcgagtagttcttcttcagatgaaggaggagaaggacgccaaggtgggggagcttacagccgaggtggacaggttgaaggagaaggtcaatgccttggagacagccggtctcgagctcttctttgatttttggaaggctaatccccagaccaactttgactacttgggcgaggctaaggacatgtaccttgagtactgcgcgtcccaagttgcttatggtgggaacgaggcggctgcttcaaactccggccaagttgctgatgcttctcctgttcaaacaacagatcctcctactccagttggcccagaagaaccgaaccaagagcctgggactccagctgtttaaacatttactttatctcttttttttttattatatatatatacct

SEQ ID NO: 347443 - DNA, 787 bp, Cannabis indica
gtaaaatttttgtttttgaaaaacaaaaacatgttctgtaatcattttatttttcaattttaaaaataaaaaacaaaaatatgttctgtaaaatttattttcattttttgattttatttaagtcgattctaggtccggggtcggatttgggttcgggtcagaggccggattctgcgccagggccgtggggggatttggatccgagtttggtcggagtccagaatgttgattaagaaaaaaaaaattgtttaaaaaatattgaaaacagctttttttgtttttaaaattttgattctcaattaaaaagttaaaaagtaaaaagagttttatagaatatgttgtttaaaaatgtattcatttttccaattttaaaaataaaaaactaattaaaaaagtgttacctaatgccactttaatgaatgatttatgatggttaaaacatactatttatttatttaatttatttttaaaataatagttttatttaaaattagtcaaactatcacattgcgatttgtcactatttaagtcatcttattctttgtaagataaatgtgtctttttaagtcatctatagcatttatttattttatttttaaactaatagttttatttaaaattagtcaaactatcacattgcaatttatcactatttaactcatcttcttctttgcaagttatgtgtgtcttttttgagtgttgcctaatttgtaagaatcccattcaggttgacttactaagtaaaggttcattttccttaaaaaagaaatatggattattttttttt

SEQ ID NO: 347444 - DNA, 955 bp, Cannabis indica
ctctctctctctctctcttacatgcccaagcctaggttgcacaacaccctatgctatccaacacttgagtctccctgataccgattcatacattgtaatcctaaagggcactatagcagatcccaactatagcgatctggatagtgattcactcggtataatacaacaaaaaggggagtaggtcattacctgatatcacaagggggcaaacctctataacaatcctgttgtctattatttcttattcttatttgtacacacacatggcaaatatcaaatctatcgaccccgttgtcggttgatcactttttagggtcaacaatttggtgctttcattgagagctaatcatgatctgatcaaacgccatggtgaacacaagaagaactcctatgacaccatttgcgtcttcgggtctccctcaagacccacagattgtagacctagacactcatgttccaatcacaactaggatacccatgaatactgcagatgtggtgaatcccttcaccacaacagggcgcaacaagtctggccaccagagctggccagccttacgtgagcatcccggtggatccaagtggtaggcctatgcctttaacagtagatccaccattgacgcctcccactgaaggaaggacctaggggcgatagcctcctggaacaacaacttgacctcaaatccaattttacactagagaaataggcctgggagtgggcgagccagcaataggcgagcctcatctggacctaggagaagacattgagttggcttgactcagggaagttgtaggccgcgcatgtctgactgaagaactatgcgctgatgattgcgatgtatttgctcagtagagacgcaaattcctaagatggatggatgaccaggggtacatcctgttggaaattattttaccaggatcttagatctactcacaggtatgttgattaacaccctaa

SEQ ID NO: 347445 - DNA, 899 bp, Cannabis indica
agcaccacccttgtagactaacacataatgcattgtactcttcaagtactttagaatatgcttaactacagtccaattataatgcccgtacttttataaaaatattaaattttatttacaagcgttaaacgtggaaaattataatgtcgcatttttatttaatacttgaaaatattcacaactggccagtttttgtacaaaagacataataaataataactaaaataattgcgacataaacttaatagcgtaaataaataaatagagcgccctagaccgcccacagttatatggccctcaacgagttcacacacacaagcatccaaagttccactctccactggctttctaaactttcagttaccttggtctgcacatggtaatttgataagggtgagctactaaattttgtaaggaaatgtgtgtcaggtagccacataaataaaaataaaacacaattaaagcgtacatgcaaatatttagacaactagcaaagcataaacttaatcatattactagtagctaataactagtaactaagctaaatcacatcaaatgattacgcctgagttcgactttggaaaataaacccgagctactggactaagtggcgtagggctaggttcagtaaaatcgtacccactactaaatggccccctatctaccatatagacccaacagtcaagtatttaaccattatcttctcgatcaaaccatgtcacataaattataatctacctaatttaaataatatcaaactgctatacattatttaaataacataacaatcataactaaataatgtgaatcttataaacacactatttacatacatacttaaataacatgattcttataaacacattatttaaatatatacctttagcaatggccatgct

SEQ ID NO: 347446 - DNA, 676 bp, Cannabis indica
tttcctcatcactatcactccaagttgctgcaagggcctttttcttttttagtgtgttggcacactcagcctgaatgtgaccatatccatcacattctctgcacttaatccctcgccccttttgatcagttgaggcttgtcctggtttgaaatttactcctttgtttctcttgagaagattttctttgtcagctggtgaatttttcctgtagttctttttcaagaactttgcatagtttcttgttaacagggcaacagtttcatctgtaatgccatttaagtcttccagaacaggtttcttgttttcttggtgaataagtgcaatgccaacctctgatttttctttcaccacctccttttgtttcttggttttcttccacctagacagtgatagctcatagttttgtaatgacccgatgagttcgtcaagatcgagttcctcaatgtttctcatttcttcgatagaggtaactttggacatgaatcttctggggaggacaccaagcacctttcgaaccagtttcgagttagagtaagttttccccagagcatatgattcattagagatgtcacaaagttttgcatggaattcagccacagactcatcctcctccatggtgagattttcgaaagcctttgccaaggcacgcagccttgatttcttgacagcatcagt

SEQ ID NO: 347447 - DNA, 445 bp, Cannabis indica
agaacaaaaatagtatggttagaaaacagccatcagaaacacaaggcatgaaagtcaagaagctcaaaagtaaagtaaaaggcaaggtcacaacccgcacagagactcagaagtccatcatcacctgacattgatcttatcttcgacatgacagccttccctattccagcaaaggggggagatggccgaacaggtgaaatgggctcctttatgcgaatggcatgttcaacatgcctgggcgtggctgggagtttcttcttcctcttcaatggggtcacctgcttgtcctcgacctcatcttcaggattcaaaggctcctgagcatactgcttggccctggcacctcccttcaacttagcctcgcgcttaagttgaatgagctcatcctccttattagctcattcaggccgaccagcaccagacttcctcttcttccccgccactg

SEQ ID NO: 347448 - DNA, 522 bp, Cannabis indica
atatttttttgatcagatcggatccatccaatattttaagtccagtatgtattggattcgattggatccatccagtccaacaaaaaaaagagtaaaattttaatattaatttttatatatacatatattttttacgtataacaatataaaatttaattactcatcaaaactaaatgaaaatattaatttgttctattggatattggatgtattgaattttcgaacaccccatctaacatcgatccgatccaattggatattcaaaaacaacatgcaatttgatccgatcacaattggatatctaatgtttggcggtcagttgtaattggatcggtcggttgtcattggattggatgatttatgcacaccccattataaactcatcaacatgtttttgtattaattacaatttcttttactttcaacttttttccattttccttttccttttcgagttagtagctgttaaaatgataatttattttttaaaagttaaataaataagtacattaataataaaaa

SEQ ID NO: 347449 - DNA, 544 bp, Cannabis indica
gtcaggtcgtcgttttactgaggatgttcccatcactacaaaaaaactcattttcaacgactaattttttagtccttaaaactcaataattagtcaccaacaattttttacgactaattatttttagtcgccatttggtcgctgaaagtcgatcgtagaagaaatttaacgactattatatttagttacaaaaaatattattttgtataactaaaatttagttacgaaatatattaaatttagtcacaatataattgatatattggtcacataaataccaatgtgcactttcaacaaccaaaaaattaatcttcaacaactaaaatttagtcatgaaagggctaatattttgtgactaaatattttaattggtaataataaataaaaattatattaattaattatttagtgaccaatatttagccttcaaaactaatttattttcatttaaattatataacaaaaacaaattattcaaagttatatttaaataatattaaacacatttattcattacataaaaattacaatgtcaatcataaaa

SEQ ID NO: 347450 - DNA, 564 bp, Cannabis indica
tggtttgattttttaagatacctcttgataaataaaaaaagtttgaaaatatttttttaagtttaatattttttaattaatttaattttttatctgattttaaaaaaaaattattattattttcctgaattaatagaatattataattgcttaaaaaaagaatattataatttttaaaattaatttttttaataaaagggggcaaaattttgttttggtcaaagttcaggaggtaaaaatgttaatttttaacagtaaaagaaacgaaacctaacaggatggacataattatgtaactgttatattttaggggaaatttttaacaagccgtatattttaggggcgaaatcaggtagtgctaaaagttgaatgatcaaaaatgtgaattattcaaaagttaaaatagagtcatttatattgtttttgctccaaatatgctttctactatagttagtatttagggaaattaccccatatactattttttaacttttttttttccaatttacggtttggatttctaaagtagttgcagcgctagttgcaataggagtttctatacga

SEQ ID NO: 347451 - DNA, 617 bp, Cannabis indica
taaaataattttaaaaatatttttatttttctaattttaaaaacaaaaaactaattaaaaaagtgttgtcaaacacgctatatattcttaatttgttatgccttaggattatatattgatcacatttagaaaaatagaacaattacaacattaccaagaaatacagtaactattgttaaataattttgacttgagtcaagtaagtcaaagaacgtgtagtttggtattaaaaagtttattgacttttgtcttcttaaattaaattttactgtttaagtttatcattatataataataagttgagatttgttgatggttcattgctaaaataaaatattgtgttttgtaacaatgtctccattaatggtcatgttacaagttattgtctttttctttgtattaggagagtgtattcacaatcaattgaatgtgacttgttctgagtatgagagaaatgctcttcttgacttcaaaactggtcttgaagatccactaaacaagcttggatcatggaacaatggcagcagcaattgttgtcaatggtggggaatagggtgtaacaaggcaggaacagttattacagttgatcttcgaaacaggtatgatcacttctgggg

SEQ ID NO: 347452 - DNA, 770 bp, Cannabis indica
caattttataccaaaagaaaactgagagtaaccgaaatgagagacttattaatttaaatactttgaagaatattcttaacaagccgaaacaaaatttagtatggaaaaaagtttgggtataaatatataagtttattttttgtggcaataatacataagttatatttttgtaattttataggtattgaccgttaaatgttaagttattatccacgtgtcatttttttattagtatatttaaattaattttttaaaaaaatagtaaaaattcatgacttggaccaatcagagattgacacgtgacaatttacttaatatttaacaactaagtacctacagagatttaaaaatataacttaagtattattctcaccaaaaattaaatttaaatatttatttacaaccaaaaattaaacttaaatatttaaactacaagttactttttaataattaaaccaataaaaaatgacacgattcgataaaaaatactaggtttgaaatattgaataaatttaaattaaacgaataaatatatacgaaataaaaccaattcaatctaacaactaatagatattagattgattggatgactgaaattaattaaatcggatcaaatggtaaaatctaacatctaatatataattaaatgggatctccataaatctataaatattaaatgtgatccaataaattaagttgaactattagcttggggcgtgtcagccacatttcaaacgagcgcgtgggaattgacctctttagttaaccag

SEQ ID NO: 347453 - DNA, 616 bp, Cannabis indica
attccaaaacaataataaagaagaaaaatactaaaatgtgacccaaaacttaggctaaaaatagcctaacacttactaaaccaacacaaaatcacttaagggtattttgggaaattctaaaatcccgactatttccgacatttccaatgtctaaatttatcgtcccgttactaaaaacactaggatgtgattctaatagccaaacactgcgttccaatgttgccgaacacaaaacatgcaaaattatgaaatttctatctatgacatattaaatgcattctgaattcaaataaatcaacacattgaaataattcaaaattaataaataattttcataattaaatcctaattatctgctaattctaaattaaagctaagcggtctttacacctcgtcttgcactactaatatcgtatggtttctcgttaacgcacgaggcaacaatgtatatatctttatctcgcttaagaccttacagccagcaagttgtgaatgtactctgtcatttctgcatttaatgagttattccatttttaaatataattatcattatatttgttgattcgtattctcccagtttgacacctgtcctcttctaaagtgttagccgaatttt

SEQ ID NO: 347454 - DNA, 667 bp, Cannabis indica
tagttcaaaaaaaattttgattggatttttaaatcatatttcattatctaagacaacaaaattggaatttctggaattggataatggagtagagagttatgcgcattttagtgtcgaaaaatgcatactcaattctcggcctaccctttttcaataggtagtccatttttcacagaataggtagtccatttttccaagaatttattttaaaatgcgtgctaacagctataaacggctactttttaccccaacactaactaaacttgatttttactcaaaaatacaagttggctgagcacttatgtcatacacctaacatatctaagtgagattaatgagcttccaagtttaaaatccaacaaacacttttcacacactttgagcctaaatttatttctattcatcttgagtgtgcttgcttatcactctaggtttccattgtattatcatatttctagagtaattttgcttgtcatttgaaacatattttcatattgtgattaaggtgaggtttgcacggtattataaacaacccggttatagtgagattggcacttcaacaatccgagaaagaggttaatagtcctcggtgatgcaaaactattgtaagaggtttggaaacaccttggtgaaaaaatcctgattgtaagggttagtcaagcccgtt

SEQ ID NO: 347455 - DNA, 607 bp, Cannabis indica
ggctggccaacatatgcatggatgaaaacacgtgattttttaagagctcaaacatgttcttcgtgactcaaagagccaaggatcacaacgaaagtcaaattcagttctttttcatctataaatcacatattgttcatcttaagtctatcacgcaaatgaaaatactgaatggattacaatctaatgtaggaatcaacgcatgttcaaaataagaatttatgttcatccattcatggaaaaatcattcaaattaagtgaaagagagtgaatagaaagcttacccgcaactagattctgatgaagacaaagatggggagcttagatctttcaaataatgcaaaaatccccagtagattgaagcctaaaggttctgtaataccctaggattaagagaatggattagcaaaacccaaactagttaattacttattattgtggaattatattattatataatttaatatgtgagaatttatatgatttataacatgttaagacccccttggtgagtcagggcattttagtagttttgacccgagaagggtaaaattatgaaattaacatatttatgtgcttatgggactatattattatatagtatgcatgt

SEQ ID NO: 347456 - DNA, 745 bp, Cannabis indica
tactgccacacggcagaaattttcttttatattgttcaggcccattttttttcttttatactaccatttttttttcttttgtactgtgaacaataacaatggacaaatgacaaatggcgcctccttcctcgttgggaacggacagagcaacaacacaacacctgttgcaatcccaaatatcacatccacaacaacaccatattaagaaaatgtggcaatgcttgaaaacaacacaacaacaatagaaacatacacactcgaacaccaatcagaagaaggaggaaagtcagaaataagagaatttgagagcgtcaaatttgacatagttgactatatgaatctggttgctgaagaaatggtagaaaagcttgaaaataatagtaaaaaaattagatccagaaatcgacatcaacaacgcgaaactaataacagacaaacaccacccagaagttgaaaaaggtcaggcatacaaagaaagaggaaacactgaaaaatgtcctcagctactacgcaatcaaatttaacttccgatacaattcttgaaaacatatttaattgggtttcagtaagaattttttttaatatcttcaataacagagtaataaccagaggttataactctagaatggtagtattctgatcgggtgtacttggattcccaatcctataaaaaaatataagaaaacactactaaaacaaaactaaaacaacaaaaaaaaaataaacataaaaacaagcataaaaa

SEQ ID NO: 347457 - DNA, 523 bp, Cannabis indica
accttatccattccaacgctaaagcctgagacaatctccaaattggggaatgtgctgattgtattagcatcggcaccggtaccggagaatgagttttcgatgatggctcggattgactcagcgttttcctttatgaatcgggtcttgttgggtaaggtccatagcttgaagagattgaagcacttcttgagctcagtctcgagataagagttcatggggatgggcatcagaacacctatggactccatagttagggttttgaggaccaagtctgactcgtgaatcgtaactcagttatgtctcaacgatgaagagagaatgaaaaaggaatgaaaatttctactagtttactttaatagggtgaacccttatttatacaagaataagactaaatgaatgagaaactaaatcaatataataaagtaaaatacaatcaagcatttatggagataattaatttgataatttagatatctattaataatattctataacactcccccttagatgtccataataattg

SEQ ID NO: 347458 - DNA, 1048 bp, Cannabis indica
gggcaacctgtgcagccttctcctctgtcattggccatgaggagaagttcaagcccataatgagcgcaaactcaaccactcgaaatctgagctccttctgaccaatgtaaaaccgcatgtgcaaatcctcctcaacatcaaccttcatcttgtgcaacatgacttggtgaaataacaccgaggagaatctcagggtacgacattccaaaagttgccaaaactactttcttttgccgtgttattcaaattgtactcctcaaaccaagactttaatttttgcaaaagcactggtgcctatatatgtcacacgacaagtaaaatgctcggatgctgaaattatgagtcgtggagccatttgaaaaatatataacaaaaaatattacagatgccctcataaaaaatgttacaaaaatgtcgacatgtcgacatgatgtcgatattttatcaatatatcacacttaaaaatgaacagaatacaataaaaatcaaaattgttgacaaaattcgacaaccagtcaacaacatgtcgacaaacctgttgacatcatatcgataaactaagtatattctagcacagtatatcttcacctaaattattgataaactatagacatcctgtcgacatcctatcgataaacagttttaaaaaatatcttactcaaatatgtcaacaaatcatagataatatgttaataacctatcgatatacagtaagaaaaaaaaattatgttcaaacaatcaaataccccattttgattttcagccgatatcctatcgatatcctgtcgacatcctatcgataaacagtttaaaaatatatcctactcaaatatgtcgataacctatcgatatacagcaagaaaaaaaaaattatgttcaaacaatcaaatgccctattttgattttcagtcgatatcctatcgataacactataaaaaaaaacaggcaccatgaaaacatatccaacatttacaacctatcaccagaaagagcacaaaatctacaaaaattccactaatctcaacaacatgcaaaaattggcatccaa

SEQ ID NO: 347459 - DNA, 728 bp, Cannabis indica
gatttttgtgattttgaactgttttggaggtgttttacaggtattgttggttctggttcgagctgggaagaaagcccacaatttttctggtctgccagaaccagtcgaccggttacttttggtgtaccggaaccggtccaccggttggttctggtgcaccggaaccgatcgaccgattgctctgtaggggaacattctcgggttttcttcgagttttgttttggctcgggatggaatctggtacatgtttcatgtcatttgggtattatgtaacctattttggagtttttgggggttaggttcttattcagttttgaattagagttttattctggaattttaatttaaagcatttattgagttttggttgtcgtgacataggaccgggatcgcctagcttgttttccactcaggtcggcccgcacgcttgagaattgaattgaggtaagaaaagtggtaagcatcgtatgtggctaaatgttaacggttgaatggttatgcccttgattattatcaagactctaattaaatgttgttgagcctcggttattacctagggtcagaaacggttattaccgttaagggtaattactcttgaaatcatggataggttttttacttattgtttgcttcatcgggcaacgatagtgacatattcaactcgtggttaacgagttgttaaaaagggtactttataaagtaccagaattgtgtttatgatattgtgt

SEQ ID NO: 347460 - DNA, 1070 bp, Cannabis indica
gagcagtattaagtttatgatcgttgtctaacctgcctggcttataggttcacaggctaagtcctataatatggacgcccagtgaaacacaagaagtcaaggtaatatggttgagactggaggcggtcaaggaaaccaaattccccagaatccccgtggtcgaggctgtggcagagctcagggtggtcgtcctgtaaatctaccacaagctccttcggattgggagcagaggtttgaagaaatgcaagattgaatccaccaataagatgaagaaatttagagattaaggcagcatgatcttcctgccgtgcctccacaacaagccgcttaggccattgctgttccagcggtgctagcagaacaacttgttgctggcaaccatatggagccattatatgaaaggttccgtaagcaaacaccttaatgtttctgggaggtcctgatgtgatgaaggctgagtagtggctcacagtaattgaacgaattctaaattttatggggttggttggaaatgatcgggtgacctgcgccacattttagttccaagaggacgctcttgtgtggtgggacttggtgtccctcactcgggacgtcgctgttatgacctgggaagagtttcgagaattattcaacgtcaaatattatagtgaagttgttcgcagtgctaagcggaaagagttcactgaactagtacaaactgaggggatctcagttactgaatataccacaaagtttgaccgtctggccaagctcaccgtgggaatcgtgccaatagattttagtaagaaataaaagtacttggccggtttgaatgtgaagattagacatgacctggtgatcactactaatgaagcaacaacttatccggaaatggttgaaaaagctctatgagccgagggtgcagttaaatttcttcaagaaacccaagtgactctgaatgttggtggaacccctaattttcctactcctgcctatggtagggatggtggtgattccaccactgatcagaagaggaaagttactcctgcatcttgtggctcggggcagagtaagcggtttcgtgggaacca

SEQ ID NO: 347461 - DNA, 549 bp, Cannabis indica
tccccgcgaggatatgaagttgtccaaaataaaaagcaaacttgtctaagtacagagtgcgagtacctctataccgcataaaaaaaaactaaaaagaaatatagttcaacataagcaaatataaaaggaaaaagtcaagcattgggagcgacaggaacagattcatccgcgactttgctgactgcctcgttctcgacttcctcaacctccacgacctcggtctcctcgagaaggttccctccaccaccttgtgttggtgtgggtgacatagcgcgaaaagcctcggccatttctgcggcttctgctccaaggatcgagaagtcgaagtctggaaccttagaaagagtggtgtagatgtagtccgagaccgcctggtcatactgctttttcccgttctccttctcggtttccaagtcgcgagacatctcttcgaccttcgcctgtgcgttcttggcctctagctcagcttgctccttggccttgcggagttcctcgcagctccttgtccttagaagacgcatcttgtttcagcttcttattgtcttcttg

SEQ ID NO: 347462 - DNA, 650 bp, Cannabis indica
gtgcatgagactaagaatataaatgtaaaaaccatgtaaaattttcaccatgctacacgccataaattttgccatttttttccgacaaaccaagtagacaaagaatacaattctcaagtgtttgtactaattgtataaattaatatgactagccagaatgaaaatgccaagatgctgttaacaatgaccaaattacacaatcatatccctccctaatatgaagtgaattaaagtagaatgaactcaagaaaagtgacacacaaagaaataaagaaaggatattctttgtaatgatagagtcagacattgcctggaatcttgtttgctgtaagcacaaacaatgtcagcttcttataccatatatcttcattcaccacagcagtataagtaattataataacaaaacctcactcatacaaacaactcaccatctgctgaagaagattttgtacctgaagagaacaaagaaaaaaaaagaatcaggcaaaagttgtgctttaaccactttcaatataaactatgttgtatcacaaagaaaggtagagaaactatatacatctatgaacaagaaaactgcagtttgcagcctctacttagtatttagtcaatacaataacaacacaaaaacaatgtaaatctgtgaaatgcag

SEQ ID NO: 347463 - DNA, 651 bp, Cannabis indica
gttgttaatccaacatacttgttagtaaatctagatcctggtaactcttggtcatgtctatgccctcatggggctcgccaatggttggcttgccaactcttggtcatgtctatccagcatagtttcaaagacgagatccgattgttgttcttgggggctgttccccaagggacctttcttcagtgggaagcgccagtggaggatcctccctcggaggcaagggcctactattcagatccactagaattttcgtgtcactctggccaactgtagtggccagactcaaggtgcctatcgtggtggtaggattgaccacacttgcagtgttcatgggaattccagtcgtggctggaacatggacatcaggatctgcattgaaaggatcttgaggaagactcgatgatgcagctggtgcaattggagttctccttgcgttaaccatggcgtttgatcaaatatgatatcaactctctcttaatgaaagcaccaaattgttgacctcaaaaaatggccaaccaacagcggagtcgtattaacactgttgcttgccatgtgttacacaactagaactataaagtaaataagataaggattttatagaggtttgcccccttagttagcgggtaataactgttgggttttattccctaa

SEQ ID NO: 347464 - DNA, 538 bp, Cannabis indica
aatttcatactgataatcacacaatctcgttacttcataaattacccttaccactcgttaaccacgagctacgtatgtcactatcgttgcccgatacagcgaacgataagtaagaaacctaaacacggttttaggaataattactcgtaacggtaatgaccgtttccaaccctcggtcataaatggggcataacaaatacataaccagaatctcgatcataatccagactataacaaacacaatcaataatcacttaatcttaagtgatgcgtaacacttttcttacctcagtctagatatcaggtgtgcgggccaacctgagtggaattatgctcgacgatctcgggtgctatgtcacaacaacaaaatacgataaacaacttatgcaaactcaggaatcaaaccctaatctctacaacaagacatccaactcccactgtatcagaacaattcaaatatcactaaattaccctaatctaagttctaaaaaataccctgagcaaaaactggtttcgaggctaaaaccaaaattttccc

SEQ ID NO: 347465 - DNA, 679 bp, Cannabis indica
ttttgacttatttttgaatatttttattcttttaatctgttgagtactcctggtcggcatgtttgcctgtttattgttcgatatcccgaccaaacactcatctcgtatgttgtcttttgtagttgaaccctggtgagttttgggaaagcgaacaccgaatcgaccaagatctgcttcaacttatgtacgaggatccccctcgtcttcgtgctagtccgtcctcttcaattgacgaactttccaattcaagccttgaagactgggaggtgagtagtgaacattcttctactccagaacccgaaatgcaacaccactattactctgagcagatcgctggagagggattcgaccgcttcatttgagagttgaagaaaggttggaggcactatctgccgtccaactggacatacgttttccgaccaggtgttgctgacactttgcctgctggccatccaagttcagggaactttggtattcccattgctattcctgccgtcacggttgctcggcattcaccccagtatccgtccagccataggatgatgggtcgaacaaagtaaacgacgcgtaaggtcaacgcatctaatcctcacgtggcccagctcgccacattacccagcgccgaacaggatctgcccgttcaggaggagggggatcatgagggggacgctgaagtcca

SEQ ID NO: 347466 - DNA, 682 bp, Cannabis indica
gaagggatgttctttcatcttgaaggttgttcacttcggcagataaggtctcgatggtctcttcaagtcggtcagaagcctcgagatccttagtcaacttagttattttcttctgggcgctaaaaagcttcttggtgacttcacccagttccatccgaacagctccaagttccaccctggcgtcatcagcgtccttcctggccaagtccacctccgccctcatggtgttgaacagagccgcgttcttggaagcagcagacttagcccaggagtatgtgttggccaacttcagacagacctgcacagagaaaaacctttagaatttgagccaagtaaagaggattaaaggaaattgtcaagaaagacttacccttgtgaattccttcaagactctacccatcagcagccccagagaagagtcgttgttagcgctggccagttgctcactaacctcaggaattaactggttcatatagtgggcgagcatctccttgcctttcttggcccctggaagcactagcaaaggtggagtaggggcccgcatctgctcgggtccactcttgatcagctaaggcccaccttttggttattcaggcctgtccaaacttcctcctcgagactccttagacttagcaacttttagagtagaggggtttgcaactgttagctcctcagaaagatc

SEQ ID NO: 347467 - DNA, 967 bp, Cannabis indica
ctcgcctaaggttaatgcgagctcgattatgccaagactggcaatgctgtccccagtgaattcgtaaaggtttaccatacaaggtcttaatttggctttttcaagccccattttccgtagagtctctttataaaggatatttatcgagctcccattttctattaataccctcttgatccttttattggcgagttgtatggtaattaccaatggatcgacgtgaggatgcctcacgtatttctcgtcttcctccgtgaatacaataagaggttcctcatttttcagcttcttggaaggtggtggggcaaaggccaactgctcgttcttcatctctttcacatatcttttctgggcgttattgcttttccctgcgatatgcggccctcccgaaataaccaggatgtcctctccttcaacaggaagaggttgtaacccctgtttgtttgggttattaggtagactgggctggttgtatccatggccctgtcatttcacatattgtttaaaatggcctcgagcgatgagactttctatctcatctttcaattggtgacattcgtcggtcatatgcccaatatccttatggaatttacaatacttgttaggatctcttttgctcctcaaattcctcatggctcgggcttgccgaaggcaaccttttgctcatgtgcgaggtaaatattcacccgagtttcattaagctcagtataaatattatacactggcacgtacttatcatgcttcttttgtttctttttatccttcaacggttctttaattccgtcctttctcttcaaactagaagcccccaagttatcaattctcgtggaaacagtacctgttgaaacattcctgggtttgcttcctgagcatgttttcaacagattcatttcctttcgggcttcttccttccaaacgaacacctgagtcctttcgttgtgttgaatattattttaccaggatctta

SEQ ID NO: 347468 - DNA, 1078 bp, Cannabis indica
tgtcccgagaccgaacactccaggttgtgccgccatgacatgtacaacctcatcccagcttagactcactcatgttcagcttttgcctttcctttacctacacatagaagcagaactgtgagtcgacagactcagtaagaaaagcatataacatattatataatactgagttgtatctaggcgcccatacacctatttacaaggcttaacagatgagtaagaatgtacaatactagggcacaaccactataccacatacactatgtacctcactgtacgactattggtagggtttgtttcgtatcctgagtaccactgagtaatataccacacacaccctgtactttcccatacttgtgttggtatcacagtaatatactccttaacaatatacactatgctaatgcactctataccataactgtacaagtgttggtagtgtaactaacatataagtatgcatatacacataacatatatatagattcgcatattcatattacacattatacacagttcttaccttctttccaaattcaagtgagttggctgacctgaacggaaagtctcgtgctggatggatgcccgaatcacatattgaaactgagtaaatcacatgtccaaaaccctaatccgggaaactcaaatccagaactcaaggctctgatataatcactagggactacactatcttaggaaacagggaaacacccaactaaggcactgaaatggacgagaattgagaaaatgggatattcggggaacctgcgaaaaccggttaaccagttttacaggtactggcaaaccggttaaccggtttgtacccgttttcccaaaaaatcccaaacttgctcaaaactcaattaattgccaccaaactttccagagtacctaaacaatgtataaacaacatattccaactaataaatcacagaaaaactcactgaatcacaatatgccattaaagaccaagtttgagttttaaagctcaaacttgcttagttccatcaccatacaccaaaactaacatccagagcttaaaatcaacttaaacaaagctcaaaattcgaaccaaaca

SEQ ID NO: 347469 - DNA, 882 bp, Cannabis indica
ttctggacgtctggtctctcccccattggcacaaccacgttttgcaaacttcgtaagtgattgttctcttcttacttatttacagcagtcttccattttcaagtacttgattaagttgtgtttgttctgatagctcttttgatgagacctactcctcgcccgagatggttagtaggcacaggcgcctgatgactctcccttatggtctccaatcgtgcaaattatttttgaatgaagttaacttgcgatcggcatgccttctcgctaataaaaaatacacttgcgattacaagattcccaagtattcttcttggtagcaaataatagttccacccgaagaccaggccttggatcgcttggcccaagcacaataccttcaaagcactgcccctcgggaatctagtgaaggagcatcccgaggtaatcaatgtggctggtcacctactgtacttagggctgagcgtaatacattacttaccttccaagactcccgtcttaatttttatacttggaattctattcttgtggagtgcattgctcataagtttgacagttggtatcctagattccacatccagattaactgtcacaagtcattttatggtatagccgagcaatacgatactatggaagatatggcaggtcacatagatgcaagttgggatttagaaccaatcgagccttttgatatattcaaaattacaggctgtagggattttagtgaatattatggtccttctaccctttcatatagtgatagctcgccttctagtcattttgttaaatcccttacgtggaaaattatactccccccttttttattggcttttataatgattgtaacgcctcgtcttgttttgcaaacatgggttatgaagacat

SEQ ID NO: 347470 - DNA, 560 bp, Cannabis indica
cgcgcaaccacgcagcaactcaatgcaaccaaaatgaaaattcaaccataaagagaatcactattaattccgacaacttaacctaacgaccaaaatcaattaaaacagggaatgtttcaaattcatgaaaaaaaaagtgaagaaacactactacgaaacaaaaattcaaccgaaaatccagtttaatttgcataaaactaatgttagactttaatctttaaatctatgaaatgcaaatctcaaaaagttgaactggggttcccaaacaatcaaactcaagtataatctaaaaaaaatacatcaatactatagtaaaatatttatcctaggggctgtttggaatgggttaatgtgaggagaggaaaggtaatctcaatgattaccctgtttgttgtgaggttttaaattttttgagtcatgtaatgcttttaccctagtattccaactaccctaaaaatggggtaatgttgatccttcaaaaaaagtgggattcaaacattatatcagttatttgaacatataattaaaaaatttattaataaaaagtcaaataataattt

SEQ ID NO: 347471 - DNA, 850 bp, Cannabis indica
aattataatctccttccaaattttagaaaaaatggtattaagagtaggctaattaggattttcgccttctaacatgtaccaaatcatgtctctaaatttttctgcccgttaaaaattttccgtgaattattgaaattgatagatttaaggatttttgtctaatttcatttaattttactatttcaacgattttttatgtactaaattatgctttcatatctaccaaatcatgtccctggcactttgacattactaattcatgccctttgaatttttatccatgttagaatttttttattaaaattagacaaaattctttaaatccaacaatcataatagtttatggagtatttttaacggccttaaaagttcagatggcataatttggtacatgtcaaagttcaagggacaaaaatcctaattagccttaaaaatattttggtttaagaaatactcatgtatgttaaaatattgtacatatagtcggaaaatgtattgatataaattcacctaattttgttaactattgttaaaagcattattactaaggctttgaacttgattgttataaaggacttttatatataactcaatgattatataaaaggttaattagttaaattttgacatgtatctaaatatgttccttaaattattttggctgttaaaaatttccaatgaagtattaaaattgttaaatttaatgatttttgtccaattacattcaattttactaattcactgatgatttatgtactaaatcatactcctaaacttagatatctacctaattacgtctttcgaactttgtacatgtaccaaattcatgtgtctttaactctcatccata

SEQ ID NO: 347472 - DNA, 592 bp, Cannabis indica
tgggacctgtaggaactagaatttcagttggtcctcaggaaaccccactgaactggaatttcggttggggaaccggtctaccagttggagcagttttgggaaccctcgttttttccgcttttgtgatatttagggtattgccatgttatttatcgatcgggaaacatttagtttcaagtttaagttcccagaaagtgatttagcatgtgactcatcagttttacgaataatgtaatttaggggcctgtaattcgtcgagcagctgttccattcaggttggccgacacacctgaattcggtaacgaggtaagattagtataattgtatgcataagtatatacatgtttactgtgcatgttagtaagcctattatattacattagaaatgtatgttggcttattattattcgacaatatcacatcggtacgcctagagaatgactagcgtaccgagtataggctgatattatggttgatagtactgtaccacttgacagtatcacatcggtatggctagagtacgactagcgtaccgagtataggcatgtattatggtcaatagtactgtcgtacgaacgttctagactcaaca

SEQ ID NO: 347473 - DNA, 400 bp, Cannabis indica
gtagttcaatcattggaaggtttagttatctaatgcattgtttaatttctgttttagttttagctttactcgagggcgagtaaagattcagtttgggggaatttgttaggctatttctagcttatattttggatcacttttatgttcgctattcgatgttttaggatagaattacgcttgttttctatgttttcaagtttctcggagttatggaggtcctgggatacaaaagtgcaataaaagacaagtggagccaagaaaaacgccaaatttaggctcggtgcacttttggtcgcggggagatcaccatggtccgggcataaagtcgaagacagaggtcgtttttgggggctccagtcgccgcggcggaggatgccaagtattatacatgttctttgat

SEQ ID NO: 347474 - DNA, 699 bp, Cannabis indica
tgcacaataaatttatcatcttgcacaatcctcattaagtcttcctttgaagatgaagaagacccaaagtccacaacatatggcgacagaacaatagagcttggttttggctgcctcttctgaatctccggagacaaatatgatttatcgtacaaaaccaaactcaacttatcactatcatcatgaaatgaaacatcatctgtcttcaaagcactcttaacagtgctatcaaccacacccttaagaaaatcaggatcgataaacacatttttaaaattcaaagtgtccttttcctcctacaaaattgaagaaaaaatatttagaacaaacaataaaattcaaacaagcaaaatataaatgtaaaaagcttgtaccttaacttgaacagaatgaacggacaactgtaactcaccaccatcatccgatatatcctgatagtatgcctgaacaataaattaattgaaaaccagatttcaaacataaatacagaaactggtttcctatagaaaaaaacacagcaacagagacctaaacacagaccagaaaccagtttcaagaaattgaaaaaacgtatctcaacccaacccaatacagaaacctgtttcaactaactagaaaaatcatacaataacacatccaatacagaaactagtttcaacaagatgataaaaaaactataataaaacaaaaaataacaaa

SEQ ID NO: 347475 - DNA, 1100 bp, Cannabis indica
ttaaatatgccaaaaatggaattaacaatggacgagagactcttgatcttattctcaaattccttgctcttaaagactcgtacaaagaagtaaaaaagttcaatccttactcttactaatactagtgcaatcatttcctccctcacatgcatttgcatcagattctaactaagatcgataatctctagccattcttggcatcttcgtatctagggaatagtcgcttcaaagtgaattttccctagataaggttagtcagttctattcttgatatattttgagtatatggctgatgtcaaagattcaaaactcattaaaatttatgcaaaatgcttttttatttctcatcgagtttgggtagagattaaaggtcttgagcgaccgattcggcataataactcaaaagataaagaagtatcattaatttcgtcatgctcatttcaagttctaagtaccatttgtacaaataagaatatcctttgttacatgatttcttcttcatatagacagatataggatctagggagcaattacttagaagtacattttgtacaacagctcttcctatttgatagaaaaggatctcatgatcctgaaccgatcttacctaggatcgcaaatctcaagtttgtctatgaagagcagatctaattatattagtgtctataattgatttcttctgtgtaatactaattgatagggcctcattggtaagtgctacaagatctcgtacattggaaccccatggttactggacccgaatccattagtatggaacattttcttttccaagtggaatcccctagtatatgaaagagtgaaaaagtgctttcgttgttgtggaataagaagccttcgtatcttaatgcatgtattaatttattcggagctattagagcgggatccactttttggggaatatgagtcgaagcataacaagaatatttctagtggaacatctttcacaatccctggtagagatagtttcaataatagaccgagggataagtaattcgacgtctattcacatccagatcaatgaatgtttggaaatccgactattatgcaaggagacattgcttttgctaattcgaattgaa

SEQ ID NO: 347476 - DNA, 651 bp, Cannabis indica
ataaatagcaactctaacacagtttagaaaaaaaaaaatcaaacactagcacaaagagtaaattatacatacaaacatgttccaattacaccaattatcttgattaattttttaatttaaagttatctcttatgcgaagcaaataagaaactcataaatatatttttcattttaaaattaactctcatacgaagcaaataagaaactcattagtaactttcaatttaaaaaaatagcatttaaataagaaactaaatagtaacttttcatttgaaatttaactcacataccatttaatccattagataagaaaaataataaaagtactaaagtagagtactgatgaaatgacatcactattttagtataccaaattcaaaacttcatgtcttattaaatctgaatgtatatcaaatctaatgagaaacttacaaaaatactggaatttgggttaacttttacaaaaataccgtcacacgaaaatcttttcaaaaatactctatttttataaaacaccagtaaaacacaaagcagaacaactcaaaacaacagtagaacaccagtagaacaccaatgaaaacttaacacagtatactgcagtatgaaacttataaaaaaacacaataaaaaagtaaaaaataccgcctgaca

SEQ ID NO: 347477 - DNA, 1075 bp, Cannabis indica
gcctatcctagagaggatgtaggcgggaggacgacttgagatggtccgaatgttggaataagacgtcgttgagccagttagtcttttaaagaggatcagtagactgagatggagttgagactgggtggcttttcttcatgggaatactgggcatcctagagaagagatgatgatggttgattcgagttaagtttagagatgctagaaagacaactaccatgtacaattgcagagaggcataacaaaatgtttgaaactcgctggcatagtacaaggttgattggatagtccatactgtatgtttggtacactaggccaagtttgcctgagtgacatcgtaagttgctggaggggcttttgttgaaaaggaagcttgttggcaagagtgtggaagtagtggaggggccgtcatattcttgttattcacgatagaggtcgagagttgatgagcgagatggttcagattgggatagacatggaatgcttcagttgctacgtgtgtgtgtcaagagggatgcacatggagaccaaggggttaaaggccgcaatcgtcaaaggatggttgtacttggaggtattcgcatgtgacttttatttgatccatatggaagcgccaaggcagttgagtggaatgtgttggcttgttaaagcaccagtgggtgtaagtcacacaaaggcatcgatagagatgcggagttgtggaatgaatgcatcagagaagccagcagggctaaggagaccgagcgcaagcgttgagatggtgctagagtttgagtggaagccagaggcctgtgccagtgagacgtagtagtcacatgagcctaagaaggttgagaagtgtgctagagtttgcatgatggccagagggttgaatcattggaacttagtacatcgtgggagctagaagagtcagaatgaccgaggcattacttcaacttcttcatcaaagtgacatgtagaatggagggaccgtatatgagtatgcgggtagcttgtgagctatatctttaggtatattcctctaagagagaattttttcccatgttgaagtggcaagcaacttacttttgtaaga

SEQ ID NO: 347478 - DNA, 492 bp, Cannabis indica
acgtgcttcgcacgtagttttttgctagtatatagataagtttaaaaacaatctcaagacaaacatataatacaactataaataaattttaaaacaataaaaaaaatatattctataatttttactgaagagatatttttataaataaaaaatttaaaaagtaaaaatgaaaattttttcctattaactatttttgtaatttttttcaatttttttttatctattatttaaatttttcttatatttttttggtgcaaagtgcaagtgtagttgaaaaaattgcccgaatatattcatgcagtgcactccaaatccaataatttaatgaagaaccccaccgttcatatcctacctaattatgtttaatgggttcgcttattatatgtagagcattgctattaggtactagtggtgtctagcaccttctcgacatgtcacgttgcgattggctaacgatactctctaaaaactattatattaaattatgtgaga

SEQ ID NO: 347479 - DNA, 582 bp, Cannabis indica
acaaacctataatcaaataacacgaaacaaagaaactagttacctctcttataggggatgacaaaaattcagaattcttagaactgccatcattctccttcttcttcttcaatccattgataatttctgctaatttagcaaactcactcaaaaactcaatcctcaaactagaaataccatccttaatttgttgttcacactcttttatagaattcagttcaacacaaatttggtccaactttccacgagaaacctgaatattatacataaaaaacatgaaagtaagtaatgataaacatataattaccaaaatacacaaaagaaatacacatagaaatcggtttttaataccttgacctcatcattaacttcatcagaggacacaacaccaccaatcctcttcaatacatatttaggatcaaacttaaatttagaaaaaagactttgagacttttcactactcaaagcaacaaaatcctttataacaatctggaaagataaaaacacaaaacaatttaaaaaaaccaaagaaaaattaaacaaacaataaccaaaaaaatgaaatttgaataaaaaaattac

SEQ ID NO: 347480 - DNA, 826 bp, Cannabis indica
aggagctaatgacttcagtctttggagaatcaagatgagggccttgctggtgcaccaaggcattgctgaagccatcaatgtagatgcattgaagacaattgaagatgcaaagaagaaacaagaaatcgagacaaaagcacattctgtcatcttgctcagtcttggagatgaagtgctaagagaagttgctgatgaggagaaagctcttggattatgggagaagcttgctacaatatacatgaagaagtcccttgcaaacaagttgtacttgaagaagaaactgtacaccttaaggatggaagatggcaaggaacttagaagacacctagatgattttaacaagattgttcttaatctgaacaacattggtgtaaaggtagatgaggaggatcaagctataatcctactgagttctctgccaaaattttatgaacactttgttgatacaattctttatggcaaagacactctcactatgtcggaagtgaaggctgcattgaactccaaggaaattcaaagcaaatctgatgtaaaaccagagcacaatggtgagggtctgtttgtcaaaggaaggcatgacaagaagggtaacaagaactccaaatatggtggtgatcgaggaaaccggaaggctaaggcaggttcaagaaacacaactgacaagaagtgtttctattgcaagaaagaagggcactttagggatgaatgactgataactctatggtatagagttaatttttatgcttttaaactaaagtattgtgaggagagtaatgaaaatgtgtttattttgcttatttttaattagttttagtgttattttcta

SEQ ID NO: 347481 - DNA, 595 bp, Cannabis indica
  modified_base (576)..(576): a, c, t, g, unknown or other
atcctcccctcacccttactcttagggatagggctcaaaagcttgcccggttgccaacgaaaaatagggatatcatccagttgacctccgatgaaaatctggtgcagtacgggctttacccagaggacttttcttctaagtctgtgacggggaagaaggggaaatctactgctgcccggcctgaatgagctcatgaggaggatgagctcattcaacttaagcgtgaagctaagttgaagggaggtcctcgggcaaagcagtatgctcgggagtccatgaatcctgaagatgaagccgaggttgaggctgaggctgaggctgagcaggtgactcctttgaggaggaagaagaaactcccggccacacccaggcccgttgaacatgccattcgcataagggagcccatttcacttgttcggccatctcatccctatgttggaaaagggaaggctgttatggctgagatatcaggtgatgatggacttctgctttctgggcgggcagtcactctgcgctttcttctttttcagcttcttgcttccatgcttttgtattttttgctggtttttgctaccntgctgttttgttcggtgca

SEQ ID NO: 347482 - DNA, 837 bp, Cannabis indica
cctccgaaaatgaaaaatttggtgtggcgtgcggctaaaggttgccttcctacaatgtctcaactgttgtcaaaaaaagtgaacgttacttcggcctgtcctatttgcagtatggatgccgaaaccactcttcatgcccttgtttcttgtctagttgctgctgctgtatggaaccgtgtggggataggaactttattgcatcagcaaatgtccttccttgactggtgtatggagcggtttacaatgttgaatacagactagtcttgcgtgcttgtggtggtctgttgggcactttggaatgctaggaatgacaaggtctggcaaaacaagtctgtaggagtcgagagcattgttgtttcggctacaaactaccttaatcaatgcagtattgctcaaaaatcaagcaatgaattgctttttctctaggtacatcccgggggacggggctgagcaatggaatgccccaatggacaatagtattaaggttaatgtcgacacaacggtgtttagtgattcctcatcttatggggttggctttgtggcaagagattgtggtggcttcctggtggaaggtggtataaagcttttccatggttcaactacgccggaagtggctgaagctattggtgttcgagaggccttaagttggatcaaataccatccgtggaccaatgtcaccttggaaaccgactgtctctcggttgtccaagctatgtgaagctctatgtccatagtttcaatgtttggcaaagcgattagcaaatgtaaaattttatttcatgatttgcgtaatgtttctttttattttgtaaagcgatcagcaaatatagttgctca

SEQ ID NO: 347483 - DNA, 956 bp, Cannabis indica
agtagccctgaaagatgaagttgaaaagctgcgcaacaacaacaacttcataattgaagctttttacccggcttgggttgcgaaccccgtactcgtgcctaagccgaataagaaatggcgagtctgtatttatttcatagacctcaacaaagcatgccctaaagactgttttctgcttccaaagatcgatcagctcgtagatgcaacagccgggcacgaaatattcagcttcatggatgcttattcgggctacaatcagatcaaaatgcatccgctagaccaagaacatacaagtttccgaacagacatgggtctctactactacaaagtcatgccgtttggtcgaaaaaaatgccggagctacataccaaagatttgtcaacaagatgtttaaagaccagatcggcaggaatatggaagtgtacgtggatgacatgctcctcaaatccaaaaaggctgggggggcacatagacgacctggaagaatgtttcaaagtcctcaagaaatacaacatgaaactaaatcccttaaaatgctcatttggagtcagcttgggaaagtttctaggcttcatcgtcaatgcccaaggaattgaagccaatccagaaaaaatccaagccctccaggatatgaactcgccaacaaaaacaaaagaggtgaaatcctaactggttgaatcgccgcactttgcaaattcgtgacaaaatcaacggacaaatgtgttccattcttcacatctcgcgaggaacaaaaggttcgagtggacagaagaatgtgaaagagctttgcaagatctaaaggcacagctcggaaaacctcccgtactttctaaacctctggacggtgaggagcttttcaagatctaaaggcacagctcgcacaacacccagtcttttacatcacgtatccggtgaatacgaggctcgaggagaaaaaatgatagcatatctgagca

SEQ ID NO: 347484 - DNA, 460 bp, Cannabis indica
ctctctctctctatgtatatataaattttaggttaattagaatttttgcccctgaactttaacatgtaccaaattatgtcccctgaacttttaaggtcgttaaaaatatcccattaactattgagattgttagattttaaatttttttgtttaatttcattcaattttactatttcactgattgttatgtactaaaccatgctcctcgactttgatatctaccaaatcatgcccctcgaactttgatatgtactaaatcatgtcccttgaattttcacccatgttatacttttttactaaaattggaaaaaagtccttgaatccaataatctcaatagtttagggagcatttttaacgaccttaaaagttcaggggcatgatttgatacatgtcaaagtttaggaggcaaaaatcctaattagcctgaattttatagtgtatttcctaaaaataggtgta

SEQ ID NO: 347485 - DNA, 577 bp, Cannabis indica
agtgcagtttgcgaaatgcgctgttaaagttacttttactagtgcagtagcgaactgtgctggtaaaagtgacatttcttgtagtgaatttcaagttgaacacatccaatcttcacctttttgaatgttaccaccatagcactatgatgattctgagctacacaacctatgtcaaaagacaagattcgaaccagaaaaaactaaaaggaaaagactaaaaaatcatgtcaaaagacaagactaaagaaccatgtcaaaagacaagactaatggaaaaactaaattagtttcaacacataaatacgatcacaacattaaaattaattaaggaatgaacaccttataattctaatcccataaaaatattaattggaattaaactaataatagtaaattaataaatgaaaacaaaaatcgaaaaacggaggacgtcgttgagctgaaccgaaccactttcagacaactgctcttgaacccttcacagaagaagacgttcctataatattgtttattaaaagaaataaacatgtgacgtttctttgtttttttacttgtggtaggttatataatcttgttg

SEQ ID NO: 347486 - DNA, 522 bp, Cannabis indica
aacaaacaaaaagagtgttttggaatcatcactgaaatcataatcaattttaaagtcatgccctctcttgtaaataaaaggcaaaaatgccagaaaagaaaagatagtgagaaaatccaatcgaagaaactaaatataatccgatcaaagtgattagctctaactaatcaaagatataccgagctaaaaacagaccatgatagttgtaatcaataattaaaaaaactaattaaaacataataagtttctctgcgtaagtggactaaactgtaaatacaacaaattgcaaactcgagaaggatcaagccagatgcaactagaacataatctgttctattttctaagggataactaagcacgagtcacatatatttctgttttagataggtgtggattcttacatataaaaatattgttaaactttggaaaaagaaacagaatttcggcaatagtgaactggtgtgcttttgaggttgttcttctttgattgccttcgacaatgagtgttaggctaaaattagt

SEQ ID NO: 347487 - DNA, 570 bp, Cannabis indica
ttaacataaatatatataacttagttaatcaaaagatttgttacataatgaggaattaaattattacctttctaacattggattaatttgtgggagaactttgtggccacgtatagggtctaaatagataatttttcttggtgcaacgatctctagcatccaatgcgaactaaaaaaattatattgggatgtatgtaagatagtgtaaaaataattttaagttataatatagaaaacaattttaaattacctcttaaatagtgtttactcaatattcctggacataaagaacatttagtgttggatattcatcgatgataactaataatccttgtgatgcattctcaaaagactcttccttctctaaatcgttgataccgttcactacgagaaattatgggtcataaaacttgaaaattcatctcaaatcatttaagctcttccagatgtgtctgcattaaatagttaaatattagtgttttataataatttcattagaatttaatatataaggttaattagattaaagaagagtatacatcattccaaaaatcatttcctggttgccaa

SEQ ID NO: 347488 - DNA, 599 bp, Cannabis indica
tcgagcggtgcggtggaggaggtggatcggcgtgggttttgtgcggtggaggaggtggctcggcatggaggtgcggtggaggaggtggctcggcatggaggtgcgtgggttttgggtttgatttgagagagaaaggaggaagagagagagaggttgaaaaatatgggaggggtattttagggtttagggaaaagtatacccattttttcaatagctataactattagtttggggaacaaatttaggtataaaaaatgcatagaaaatcaaatttcccattttaaattacttttgttaaaagaaattatttttgtaaaaataaataaataagatggtgtagaaaaaaattacggtgtttcccataatacattattttcatatctcgatcattttaaactattattactattatatctcacttgttgtctcattgtatctcacttatttttatcatcatatctcactcgttgtcatcactgtatcacatccctttatcattactgtagttcacttgtactcgtcactattgtaattcccaaatctatatcttaatattagatttcatctcgaattttaaatattttattagagaaaattca

SEQ ID NO: 347489 - DNA, 1083 bp, Cannabis indica
tttggtggagtcgaggtcacacacggatatctcctcgacgtcctccattggttctacgattttttcggaccccacgcggggatccaactcgtcttctttagccatttctggctcaatagtttctcggaccatcagcacgggtaggtgggtggccacgttgtagtatttcctcgcctccccttgatttcttctcaccgtcccaatcccagcttcctgggttgggaacttcaggcacaagtgccgtattgatgtgactgcgccaaagtctaccaaggccggtcagccgaggattgcgttgtatgcttttgggaagtccaccaccacgaaagtacagtacttgaaagtgctctggggtgtgtccgggcacaaggtgaccggaagcctcactttcccagttgggataagtgttgttcaattaaaccccgtgagttgagaaccactcgatgagaggtctcggtccgtcaggcctattgcagtaaaggcctctttgaaaatcaaattcacggaactcccgttgtcgaccaggactcacgccaccactttattggtaatgggggtctctatgaccaacaggtcatggtggggaaaacacaccgtcttagcgtcttcttccgtgaatgtgatgcgttgatccatcagtcggggccttttaagttgggggttgagtaacttcccaaacctcattgtgtttcatggcccctgcataccgcttcagttccttgcaggtagttccttcgatatggtgtcctcccgagatcatggccactgtcccattaggtttgggcggcaggtcagggatatgctgggcatctctggggggaacaactggagccaatactcctatcgcaccccctggtgttccctgtggcaaagctccagccgcctgacccgggttgagatgaggcaaccgattcttgatccactcgtagaggtgtcccaaccggataaagttttcgatctcgtctttgagatttttgcattcattggtgttgtgcccaatgtcgctatggtactcgcatctcttgttggggtccctccgggaactgtctctgtacaaaggaggtggtctccggtagtgtgtat

SEQ ID NO: 347490 - DNA, 603 bp, Cannabis indica
aaatgttctacgttccaagttttattagcgagtcgttgagtcgagccaatttatagactctgactccaactattgcttcaatgacatattgaccctcccaattcggattgaacactccatctgatggatctctcgtatttacaaagactcgtcttagcaccaggtctccaacattgaatagtcttttcttgacttttttgttgaagtctcttgtaactcggtgttggtatgctgcgttagttatttgcgactcagtttatttttcctcaagtagatccaaggacaattttaaaagttcctggttttcttcttgattataaaactcttctgtgagtcgatatgttcacttcaacaggcggtattgcttccgagccaaatgctcgcgagaaaggagtgtgtcccgtagctgttttcttggtagttctatgggcccagagcacctgaggtagctcgtcaacccatctgcctttggcaacgtctaacttcttcttgatagtatcctttagggttttattaacggcttccacttgtccatttgcctgagacctggatactgacgagaagcttttgataatttattctctcgcagaattcagtgaacaa

SEQ ID NO: 347491 - DNA, 680 bp, Cannabis indica
ctcttcctctaccaccaccagatttgcctcaatttccaccattaaaaccccctctgcctctgttgttttgttgactggaactgtattgaccaccaggaccattcttgttagcaaaattagcagaggagttatttgaagacttactgcttctagacagagtactcagcctgtcgagtttgctatcaaagctaaggagaatttcttgaagtgtttgccaggttgttttgtctcttgcttcaaccttcagacaatacattagataccagtaatgcttcaggataaggatcaccaaccaatgctaaaacatcagcccattgtctcttttgtctgagataatcgggcatagtcatagctcctttcctcactgtctgaatttttgttctgtactcatccatttttgctttggaatgagcaccaaaaagagattcaagagcagtccatacttcagctgaagaggagcagcccattacttctgttgcaatgctttcagtcatcgatccgtagagccaccccattagaagttgatcatgaacaacccattgttcaaattctgggttgatttcgaacctgaatcctcgctgtccatcaagtcctggagctggtatgagttcttgtggcttaactctcaaaccagtcaggtacccgtcgagtctatgacccttgacaatagcagtaaccat

SEQ ID NO: 347492 - DNA, 877 bp, Cannabis indica
aaaaccgatgagagactcgctaaaacacttatcgggaatataaaatgcaaactaagcttagccctatcgatgaaaaggatgccaataccctaaaataccctaaaaacgggaaaaactggggttcgggaaaatgccccaaccggaagtccggttcctgggaccaaccggtcgaccggttgacacaggctcccaggaaccggaattccggttctggtctgggaaccaaaattccaacccccacaacacaaatcaaacccaaatcttctaaaaacttccagaacacctgcatatactattccaaatcaaacccaatcaacagaattcaacaaaacaatcaatttccaaaaacaccattgatgacctaacttaggtttctaaactctagcttgaatacttcaataccctagggcttaaatctagtctaaaacaatagaaataatcattattcaacttcagtaattgaattcaaattgaacaaacatacacagcccttcaattcaacctaattcacctagcttaacccaaaaactcaactaaaactttaatagaaagctaggagggttaccttgaatcaaagtgatcaataacttgctgagattagaagacttaagcagagaaacaatcttctccttgctgggttgattcgaaagaaagagagagagaattgagaatttcctcttaatttttctaactttcccttcaccataaatcttgctcaagccaccctttctaattttagataatatatggctgcatcaagagcctactacatgccaaaataaagagaaaaagacttaaatgccccttgaccctaataaaaaagttataaaccttcaagggcaaaatggtccaattttaatccccgaaaattctaacg

SEQ ID NO: 347493 - DNA, 621 bp, Cannabis indica
tcgaaatttactcaaacaattcgagatacagctcccgccattgcgacttcaactcccacatcgcctttcactattattgttctttcacaacactataactagtgatataatcttgattccacaacactttctcttttctgttcaaattctgtacggattgttcctcttatgacaagtctgtttgaaattcaatattctcgcaactctgtatatggattgcttctacctcatacttctgaaacatcgaagtatatattataatcatcagataaaacagagagtatggctagctaataagctacccgacttaccctttctagaaactcacacgaaccgcttaacttgggacttacttcccttttgtcccaacttccaaattttcttttcattggaaccacctgaagaaagataaaattcccaacttagaatttaatatgtctacactttgaattagcatagctcttctctatctcttatataagcatcatacaaacttgaatcattaacctacatcaataccatattaatagtactctaataactattatcatacaaaaactcattcagcagcagcttatgctcatttcaggaactttcaaaatctatcacacatgcttatca

SEQ ID NO: 347494 - DNA, 1023 bp, Cannabis indica
tcctttgctacagtggactaagcagattataatctgactaaaccactataattctctgtcttactgttgttttccagttttgttgattgttttcccattcccagtcgagtactcgccattctaggttgaatactcgcacttgtcattacccataaaattctctatcgtattaataaaataatataatttagtgttgcgaaattcactcgacaacatcttgaattagtattagtagatttagttgtttcattctcctttatcaaaaattgtgatattactaattacatgtgttatacccaaaatttggctatcatttcaaacgaggacacgtgtcaaattgggaagaatacgaatctatgaatgtaacagtaattatatttaaaaatggaataactcattaatgcagaattgacagagtatatttacaacttgttgactggaaggtgttatgcaagataaagatatgccaactgtcacctcgtacattaacgaaaaaccatacaaattcaggtgtacaaggcaaggcataaacctcgctacgcattaggagacgagacatggtgactagtaagacacttagtgtataatacaccttatacagactaagtataacagttgagtaaatccaaacagctaatagcgaggcacccatctcgctataggaaggcacgctcatagtaccttcattaatcagctctagacacctttcaatggagttcacagctccgttgagtcagctttctcagatagaagctgacatacaaatgatgttgactgctgaagtccaccttgtcaccaagaactacgatttttagatagagcattgtgtcttcaagtgcgggaacgacgaggcttacatcattaaccccgaaaagacatggaaaaagttcaagcttgctaccaaggttattgttaccgtgttcccagcgagatatcccgagtaacgtacgtagttacaacatattaatgtacgtttactcgtaccggttaagtcggactatcacagctgtgtgtattttacaa

SEQ ID NO: 347495 - DNA, 626 bp, Cannabis indica
aaataattcctcaacatggcataagtattgatcccggtgttcgtgaggaagcagtgcaagtacttcaccgaattgtaagatatcttcctcactgtcgatttgcagttatgagagggatgacaaactttattctgcgactacgacactcaagaatatgtataccctggtttaaaaattattgttattatttagatatactatggtacggtaagtgtagtttatatatagaggtttttttcaaaaaaataaaataaattatactagattttttataaaaatttattaaaataatagtaaaatattaatttataaatttaagctctaataaaatattcaaaaaatgagagaatgacggagagaaatgattgatgcatttagagtgatataatagtgtcatgtcaccgcctcatacttctcctttatatatatagatagatgtgactatacaattattgggtgattttttttttaacattttctattcaaaaaagtaacagtttttttttttggcttggtttaacgttttgatttttttttttttggttaaacttaacaatactttttaggctaattagtaatttttctccctgaactttgacatgtagtaaatcgtgccccctgaactt

SEQ ID NO: 347496 - DNA, 827 bp, Cannabis indica
atatgtgctgtggtgggatggatgaataaacaattgttatatctgtgttatttatcattatacaggcatgtttaaaatttgttggggcattcaattacagtcattatgctgcaaaaatttcggtagaattaggatcaaatttgatatattatggtgtgtattgtatagggtccactcactcaaccgccttcaagacgtgatgtgtcgaaggggaaagctcccatgctttctccacaaggcagtcatgatgaagaagatgaattattctcgcaaaaaatcatggatttgatccctaaatcgctaaaatggatggttgttgaatttctaaacctcaaagataaacgtgatataatcacaattcctgtgcctaagggatcatagcaccgcgtacccagatcacgatatctggagagaatttgcagcaggttgcattatgtgacttcatcggcaaccagggaatgctatttggaatgatgcatattcttccttaatctaattaaccttatatatcaaattctagtgaaattattataagacactaatacttaacaatttaatgcaggcacatctgggagaccataaacgatttgagaaaatttttcaagttttacgacctagtgcttctcgcaatgaatggttaaaaacgattaagagaagagtcagtcttttgacaatacggcaagacgattggctgcttggttatcatcgatgaataacaaccaccaaatgttattattaccttggaaatacggaaaacactatttaattttttagtggtaatggttcatttctatatatatattataacttgaaattatttttatact

SEQ ID NO: 347497 - DNA, 910 bp, Cannabis indica
gtgaaagtgtaagcagggaacattgcccaatatgtcaaaaagactttttcggataaattgtaaccataggagacgctgtcacactatctcaatggtagcccttttaatggtagcgtatcttctacataactcccaattatatagttccaacttactcagtgatggctttcacacattgagataggtagctctattcatcaaatggagcttgaacacactatttttaaacatcattgttcgaaaattgtagcttacataacactgtttgatgaacctgaacattccttggaggagtaaacaattttcctgaacaaacctgtatcacaccataacattacgaacattagcaataaaataatgactgtaattcttataaggttgagattttcttctaggacaaagacaagacattatgaactctaagacaactcaaatatcaaggattaagaagaacaaaaacattaaacagtacaaacccctaaggatttccttagagaaataaaacggaccgagtcaagagctttagtaaaaatatctgcaatttgtttgctagtttcaacatattctaagacaagaattttattttccacaagctctctaataaagtgatgacgaatgtctatgtgctttgtgcgagagtgttgaacaggattcttagaaatgtttatagcactagtgttatcacataaaatagttaaagttttcaaatcaaacccataatctgccaacatttgtttcatccaaaacaagttggtacaataactacccattgcaatgtactcagcctctgcggtgaacaaagagattgagttttgcctcttgttgttccatgaaacaagattgtttccaagatagaaacatccaccactagtgctttttctatcatttgcattacctgtccaatcaacat

SEQ ID NO: 347498 - DNA, 736 bp, Cannabis indica
aaaacccaacaacaacaacaacaacaaacaaggcaatgggaaaaaggaaaagttcgctggcaaagccgaacagagccctagagaaatccttcaaaattcacttctttctctttcttgactgacgatttggagaccatctacatggctactcagttagtagctccgtacaagaagcctgctcccacaaaaaagaacataagtaagagggacatgtccaagttttgcctccttcatggagactatggtaatgacaccaatgaatgctacaatttgaagtgagaaattgaatttttgataagaaaataacccacacgtgcaaaaatatttcaaggccggtcaaaattagagggccgcccatgcaggaaataaccaatatttactccaccgctagttgatgggcatttgcaaatcatcattgggggcccacacatagctggagattcaggcaatgcccaggaaaggtatgcccgaaccttatagcatgaggaaaaagaagtggtcctcgccgtcgaagaaaggaaatcgaaaatgccacgggtaggggaacccaccataatatttgatgcagatgatgctgtcaaggttaacttcttgcacaacgatccgtttgtcatggaagtacagatagccagcaaaacagtgggccaaactatgatagataatggagcctcagcaaatatcttgtttaaaacaccatatgaaaaaatggggctccaactcaaagatttaaccccct

SEQ ID NO: 347499 - DNA, 742 bp, Cannabis indica
aaagtaatcaagattatgtgattaaatgtattcctagatttatcagtacacagggtttaactgagatgaaattctacaacatagtttacttgcaccttggataagtgctaggtcctttccagagcattggttaaagtaaagcatgggttggatgcatggagtatgcattggaagggactgatattaaacttggattagatatgataaatttaccgtaatatctattcaattcaatgtcacctagttgatcctagatcaaatgatattaatcctgacatggttaggttcgatctcaagagtgttatttgtgttctttgatttgttagttaagaatacctttaggtctgggtgacacgtacattttgggaacatggcagtacaattgagtggctaatcgtagatatggaatatatagcttctatctggacatagaagtgaaacaatgatttccttcgagcttggctgaatagatataaatgatttagatctcatttaagtaattatattagttcattgaaatatcttttataggtggctaagtattttaaggataaaatactttgaagggtgtaacggtaaattaatccctatgcaacgtagatcatctatagaggatcgttgattatagtgattataacaatggataattagtctagtttataattttttcactaacatatggcgtgattgtgaaaatatagtattttgtggtttatttgttaattaagagactttatggagt

SEQ ID NO: 347500 - DNA, 655 bp, Cannabis indica
aaagttgtagaaaaccttacattggcggcagcgaaatataatagctcattccgttcagatctctaactcttgttcctttttgacacggagtattaccaagatttgaacctatatctccttagatgatagaattcttcacaattttccacactatatttaagtattaacttaaaatgtgtgggcaaacactcactcactaaagggatctcgaaattaagaagaagagaagaggagaggatttcgaaattttgagaggctctctttattttctaattatctgacaaagtagtctaatgaaggttatgaaaataagagtcatctctttctttacataggatttcaattagggttagaatttaaattatatggaattaaaaaaagaaaaaaagataatataatgtgtgccctgatcgaaccactatgtgtgccctacaaactctataaatgtcaaatttatttatttaatatttataattaattatcaaataaaattaccatttaatctactagaaaagttaaaattagcaacactttttttaactaatcaaaattaaaagacaacacttataaaagtgttgcctcctagagtgttgccaaaaatattagtattagacaacacttaaaaaagtgtgaccatatcttattactttaaaaa

SEQ ID NO: 347501 - DNA, 985 bp, Cannabis indica
ccactcgcattgtttgtgtcatcattatcatccgcttggggatgattttctctatttttcttgtacttgtcgaattttccccgtctgatcaattcctcgatctcatcctctaggaaccaacattccagggtggttgaccgatgtctttatgatacttgcagaacttcttcagatctcttttgtcgcgatttcctctaatcgggggaggctttctgaagactccattcttctcctcaatcgcgtaaatatgatcgcaagggactgctagttcagtatagttgacaaattgtggtcctccttttctctttggagatgtttccttctttgagggggacttggctagcttcgaacttcactgcctctgagggctgcgtcttctcgagcttcttcctcttgaattctttcgtctaggactttgagatcgtgaccgtggtacggatgactcgcgtttatccttccctctttctaggtcagctagagaattttcgattctcttatgcggctcaaccatggcgaagaattctactaatgattctggttttcgagcttgtaactctttctagaaatcggttcttggaaagatacctgtaatcaacatacaaactaacgaagactcaagagtcttctcgaccttagttacgtcagcattaaaacgtttaaagtaatcctacaatgactcatcgacttcttgcttgatgttagcccgggttgtgtaaggcggtttatacgtcatcgtggcttggaagcgtgtcaagaataaatccacaaaggtttcccaagtcgatatagatgcctcaggcaactggctaaaccagtcatgagcgttatcctccaaggttgccgcgaggatgcgacatttcgctaactgaggtacctggtctacttttgtaacaccctaacttttgggttttgtgccctaaataaaacacatttcgatataatcagatttacttattaataaagatcagaaataacattttatgtt

SEQ ID NO: 347502 - DNA, 741 bp, Cannabis indica
gtcaccggagttgttgtcggcaccgagaaagtcagcgaagttgctgccggcgctgaaaaagtcattagaattggcattattggcagaaaaattcttggtgatttttctagtgacaatgccaatttcgaaaaatttctcggagtttgctttcggtatcgaaaaagtcacaggagtagctaccggtgtcggaaaagtcgtcggagttgctgccattatcgtcagaaaaatcactgagaaaatcatcaagtaactggtttcttcatcaagaaaccagtttcttagtaatttttccaacaactatgtgaaatccgatgacttttttgaagtttgctgtcagtgccagaaaagttaccagagtacctgccagtgtcagaaaagtcgtcagaattgtcattgtcaccgaaaaaatcactaagaaagtggtttcttcatcaagaaatcgtttcttcatcaggaaacttgtttttttgaagaaccggtttctttcttcttcaagaaaccagtttcttggtgattttctcagtgatttttccggcgacaataccaattttgacaaattttctggcgtcgacagcaactccgacgactttttcggcatcgacagctacttcggtgatttttctagcacggacaacaaactccaacgactttttcggcatcaatgacaaataaaactacctaaacaaataaaaacattaaatatgggatttaaaaacataatttacatatatatggcatatc

SEQ ID NO: 347503 - DNA, 896 bp, Cannabis indica
tttaatatcatgaaaaatagataagttaacattaatcttattaatatgaatatatttttattcactttaattataattttaaatttttatttaattatacatcacttcgtaaattttttcagttttttttattttgttttatttatattatgtatagctaattattataagtatttatatatatgggtgcacttttaatgagtattactcatgaatgggtaaaattagaaaatattgagtttttatgcttaatttttctatctatttagaaaaatctctcacttttatatcatatgggctgagattattccatcggttgaaaaaaatataaaaaaaaaatttctaaaaaaaaaaaaataagtaaaagttgagtttcacttaaatatttttatatgaacatatttttgatatagtataaaaagagataatttttgatattttttttaattaagttgttaaactaagtattgcaattcaaatttctcttttattattcgttattagatcaaaatttgatgatttaatatttttaaaattaatgtttatagttaaatttgtttagtatccattaatgggtaatactcattaaaaaatgatccttatatatataaatagcgggttcccatattatttattaaataaaatttgtgagatttgatattgaaatacaccaataacagcacctcttttgatgtttgacacctcctttagcatttttgttattaagttcaatttaattagaattttaactcttttgattaattacacataatgttgtaagtttatatttttttgagttcttttgtatttttgtcttatttatattgtctataattaattatatttattagtattttttttataaatttattagtttttttttttgttttactaaa

SEQ ID NO: 347504 - DNA, 1457 bp, Cannabis indica
gccaacttccgtttgactcaagagactccatttcatcattatatctttattcaactaatcaacatctagtgaagtcaaagcttcttggaggttaatgaaaaaatattaatgaaactgtagtttttctaaatagtgaaaagagtaatatttactttgagtattcttctattaggatcttgaaacatcatcttaagttcttgttatttcgttgatgagttcttactgccaaaagtattttatccttaaaacacttaactacttgtatataatatttcgagaaactaatataattacaaaaatgaacgttcaatcatttaacgcctctagctaagctcaaagagaaccattgtttcacttttaataacacatgaaagctataaatgtgcatatctatgattaacactcccacttaattgcactattgagtttccaagttgtaagtataggctagtcctacgggcacgctggtaacgaacaagtcaaagaactcgtgtaatagaattaagttggagcttaaccatctaacgattgagataaaatgatctatgaccgattaagtgacattgacttagaaaatatataataaaaaatttatgatatcttttccactgtcaataccggtctagtctgatgtatagccaatacatccgatcctggattactttactaatacactggaaaaggcattctgcttatctaagtgtaagcaaacgtcatcactgattatcacatcagtgtaaatcgagtacactgataaatcgtgggactaaataatttgaaacatatgattacaattacttttcactgtaatgacatcactgcaattgtgaataactatatgttcaagatgtaataaaacttatatattaaactgataatcacgtaataaacatgtgaacaaagcatatgacaatgtcaagatatgatttatgatctttattgaaagtaaataagattacaataaaattgaattttacttagggcatgaatcccaacagaaggaacgtcttaaaattattgtaaagactgctactgaaaataaaacaggaacaatgttacagttatgaaaattctagtatgcaagtacacgtagtcaaaacaagtaatatactgaaaaagtaaagtatcattttcacgaagattgtagttaattaccaaacaaataaattcctaaattctattttgcgacaacaattataacaaagaaggtttaaattctaatgaaaagaaaacaaataattaaaatgcaatcaataatgatcagagcttagggtgattaatttcagccgaatctactttctatggtttaatataatttaattctaatttcaaattttcatgtgatagcggatttactaaagaaacttatatttgggttaggacatataaatctcaacctatatgaaaactttctacatttatgtgataaatttaaacatatagaaggcattaaacat

SEQ ID NO: 347505 - DNA, 502 bp, Cannabis indica
attaatactcatatatataatttctatagtataaatatatttatatattccatcaaaaataatatatatatgtcatagtcatataaacctgagccagagatttctgtttacaatataatccaagctagaagtggaattcccttgaacaaaaatagttgacgtgaaaaatagaaagaataatattaatataaggaataaaaaaaaattgaaaaagtgtggctgcatgcttaatttataattaacatattgtatgatgtaattattaagaattatatatatgttatagtaatatatatatatatatgtaaatttgaaacaatatattatatttaatatatatttctcaagaagaaaatgattaaaaatatataatataaatttaaatatattattttatttgcctggacttaatattattatattattcaatatttaacgtttgattgaaaatgattaaaatactagagaacaattagtcatgtaagtttttttttttttcttt

SEQ ID NO: 347506 - DNA, 321 bp, Cannabis indica
caagttgttcgtggaagctaactaatggttatggcggatttacatcttcggaacatggtagttcaattgactaggagcgctaaacatagatatgaaatctataacttctataagtaattagaagtaaaacgatgatttccttcgagcttggctgaatagagataaatgattgggataaaatacattgaaaggtagaacggtaaatttgtccctatttagtgtagatcatctatagaggatctttgactattgggattgtaacaatagataatcataatgtatctatagcgtggtacatgtagagagttctatataattgag

SEQ ID NO: 347507 - DNA, 714 bp, Cannabis indica
tcccccatgaagctcaccgttctttgttgttatggcccccgaggtgcaggtcgttgctaggcatatgattgtattacgggagtaagagatcttgataagtagctattgtctctgggtgagtgaggttgtgcacgttgtggtctagtctcccttggtgctggtctcggacaaacatagttatcacgggagacagtgcatggtctttcccatccatgtcccctaggttgaggtacctgtcgagcatggttgtctcagtagtcctctcgtccattttgagggggtcgaggaaagtcttgacttggaaggcgactgggaggttcttccttctgtcatgacctctctcttggggctggttgatgtggtgctggtacattagtaagctcaggatgccttattggtgatggggcgaacctaattggtgaaggagggttccaaacatggtctcttcccctctcgtcaacactaatatccctaggcgttggaggtggttgagatggtgggatcccatttttgtgtgttgtgcccctctccccgcagaagcctcctcatgggggatctgtagcattgccttgtggggtagtagatccttgtgcatccctcctagtttgttgttgtgtaggagggggtacattattcctcctattctcaagaccagaggttgtaactcgttgtccttgttgtgatggaggacgctctgttggaaattattttacc

SEQ ID NO: 347508 - DNA, 524 bp, Cannabis indica
ttactcccttgccccaagttgtgaccgtccgatgtttggcgtcctccccctcaggattggttgaagctgaactgcgacatcagagtaggaatggatagcatgtgtgcagctgtggttgcaagggatcatgttggcaaggtgatcggggttactacttctaaactggagtttgctgatgctctctgcggggaagcggcggcgtgctgcttagctttagaggcggctaggactctaggtttccaatatattattgttgagagtgattcgagggtagtgatcaacgccctcaatgggaaagattccccttgggagcttgagaactacgtctctttttgtaatagaatctctccctcttttatcggttgtagttatgaacatgttagtagactttgtaattttgcggcccataatgtggccaagtgggctttttcccatcaaaggtttggtactttgcctccgacctccttgcccgacaatattttctataatgaccgacaggtctaactgatttatgctaatatatt

SEQ ID NO: 347509 - DNA, 768 bp, Cannabis indica
gctaaagacccaaaatggcaaaaggccatggacacaaaaactgacgctcttgaagccaatgatacatggattgttgtcacccttcctgatggacatcatgccattggttgcaaatgggtatacagaatcaaatacaatgttgatggcactgttgaaagactcaaagctcgcttagtagccaaaggctacaaccaacaagaaggtattgattactttcacacctttgcccccattgcaaagtttaatacattaaaattactgcttgctattgcagccattaaaaattggtctttgtaccaacttgatatcaataacgcctttcttcatggcgatttacatgaaactgtctacatgacacttcccaaggaatataaacctaaaggagacatctctccaaatgttgtttgtaaactaaacaaaagtctttatggcttgaaacaagcctttagacaatagtttacaaaacttagcaattatcttttatccactggatttactcaatccctttccgatcccacattgttcattaaaaatcacaacgacacttttcttgctcttttaatatatgtggatgacatagtggttacctcaaatgatgacaatgttgttctttcctttaaacagcaacttaattctgtgtttcaacttaaggatcttggccctttacgattttttttaggcttggaaattggtcgatctccctctgggatttctgtatcccaaagaccattcaccctacaacttttaactgacacaggttatttagga

SEQ ID NO: 347510 - DNA, 547 bp, Cannabis indica
aattaaagtttaacatagtattatataaaaatatgatctataattcaattcaatataatacaatacaatacaatacgacctataatacgacgtttcaaacgagccctaagtgaatataagtaaactaaatgatgagctcaatagtaaacctaacactaagaaaaaaatgctacatttattgacagctttttagtcacaacataatttttttgtgactaaataagactttagtcaaatcaaaaaattacttgtcactaatttacttttagtcacacctagtattgttactaaacatacatttagttacaataattatgatatcagagcactactacaaaaaccccctttagaggcagtttttaagccttttcagcgttggttttcgcaaaattcgctaccgatgctgatcagggcgaagctaaaaggtttaaatgaaccgacgccatatgtacccctatggcgtcggttattagctaggaaccgacgccatatgtagcgtagcaaccgacgccataagtacgcgaatttcagttttttcaattttttt

SEQ ID NO: 347511 - DNA, 1174 bp, Cannabis indica
tgtagactaacacgtattgccttatacttttcaagtacttcaaaatatgcttaattgcattccaatgttcctctcctggatttgtctgatacaagctcacaattcctactgcataacaaatgtcaggtctagtgcataacattccatacattagactcccaattgctgaagcataaggaagccttctcatgatgagaacactaaggctaaagatacaagtaaagttctagttggttcggtgatgagggcgcgagcgaagagattcaaagaagaactcaacaaattagtcaacagagttttaaaataagaggagaccgcagtcaacactgaaggagaacaaagatttatgcttctcatcaaagtagactcaatttagacctaaattgagcttatcacgtttttcaaagcatttggcagctttcccttttaattttgtttcctttattttgtctttgttttatttagaaaattgtctttcttttagtgtccttttttctaggttgtaagttggctatataaagccttgtaaacactttgaaaaattagaatattttgaaataaaattttgagaggttttcttcttgagttcttgagagaactattcaaacttatcaaggagtattccttgtggcgatcaacctgacttatcaaacgaatttccatcactatttgtggcatcttccgtcatactaaggttgatggttaactaagcattgggtcgcggttccacatccgaatttcaagaattcttagaggctaccataattggtatcaagtttcatcacaactattggtgtggttcatatcatttggtattagagcttaggatcatcgggtttggcctatctatcttttatgtttttttttcaattcatgttctataatcttgtttaacttgtgttctattttcctatcaattcgtgtttcatctcttctatttttctttgtgaaatccaaaaattgttagaaccacattctgagaattttcttgtgtcaaacattgtgtctttgcttaaaaagaaaactccaattggttattgctggattctagtttccctatttgtgtcacaaatctgtttccttatttttgtttctcattggtttcccaaaattgtttcataaagcttgtctacttggtttcctttttttttttctgtgtcattagcaagtaaaa

SEQ ID NO: 347512 - DNA, 461 bp, Cannabis indica
cttttttgtcgataacctcagactaataaattgaatattgattaatacgtaatctgttacaccctaactagcataggcgtgttagcgtgattttaaatgtactgtgcagctcgttgctaatcaatgaggttattgaaaaatcgagaataattaaaatttacttatttaattagaaacttaaaatattacatatataaaattctgggatcccgtttacaaaatactttttaaaagtttgctatacacataaacaaaaatttttcgcccaccgactatacaacaaaagcctagatgtcccaaagatcgtacgctccaggcctaaccgccccgacatgtacaatcttcacctgctcgctctcacagctcctcagctttagccttgcccttacctacatatgaagatagcactctgagtcaacagactcagcaagaaaagcataacatataacatacaaataacc

SEQ ID NO: 347513 - DNA, 505 bp, Cannabis indica
ataagctagtgaatttacctggtaaattcttgatcaacttattggaagctcggatatataggcccatggtccccatactagttgagacaatacggcttgtaagactcagttaattggttatgattagtcaattataattctaaaattagactatgtctagtttatgaattttcactaagcaagggcaaaattgttaagaaaaagtttctaggatacatttgttaattaagagactttgattagcctaattaataaatatattaaatgatattattatttaataattaatttttagttattaaataatgggttttgtaatttaaatggttaaatttgaaaattagcgtttttgagaaaatcagatgtagaaatgataaaacagcaaaattgcaaaagtggggcccattatccacatttatggccagccactactctagggttttatcatttattttttcattatttaatgccaaataattctaaccctaccctaatggtttgctat

SEQ ID NO: 347514 - DNA, 635 bp, Cannabis indica
atctagacttttttgattaaggaaatgtaatggtcgaggagagagtataatacatactacacttgatttgaatatcaaggtgttgagattatttgaaatgcactttttgtttttatattagtgcaagtgggagtttgttgggttttgtgccctaaataaaacccatttcaatataatcagatttaattagtaaagatcagaaatcacattttatgttgcatggttcacatgatttatttcatgattataaattctattaagcatgataacatacgtatttgttcatgattatagtgttgtcagcacagtggaatataatcattattatatgttcgaaagtttaattccctactttttcagttcactggatttacactagcatgataactagcgataagaatgtggcatacttcttcggcctctgcccggcccagttcactcctaagggcatccagtatctgtctgccctcttcgtcctctatacctcccaaaaatggggtatgccctcttcccacaaggttgcttggtactttgatttgatgtccaccaccaagcaaggcaggtcggggtacttctacttctctcaacccggcttcaagtagttgacgggcacgaacgatacgaccatcagcaag

SEQ ID NO: 347515 - DNA, 577 bp, Cannabis indica
attattttaatatgtaagataataataaaaataatataaatattttataatttaatatgtaagataataaaaattaatataaatattttataatttaatatgatagttaaatatactaataaaataatataaaggacataaatataaatagaaaaaaacagtgcatttattgcggtgtaagttttacatcataacaaatgttgtgtcaaatttggaacaaaatttgctatgtgctaaatttacattttggcacaccattggagcacactttttgttaaatgagctatattttagcttttcactacttatttacacttgttgcccctgatttcgcccaatgtacgtggaccaaccagacaaggacaagtggacacaaagggtttaacacttaaattaatagctaagtctttgtgaagaaaggcataatcctggatatgcctcccggagaaggcatgcaaggtttttatatgctcccggagatcaagcagcatcaagcacctccgggcggtgtcaggcttcctcgggagcagccatctcacatttaatgtcgcatgggaggaggcgtgttggaactgcc

SEQ ID NO: 347516 - DNA, 1341 bp, Cannabis indica
tttctttaatttttatttttattctaatcttcaaaacccctctttttcctaattcttactaatttgtgaataattgaataaacatagtccttgtgggatcgacccttacttacgattatactaaaataattggaagtattggaattaaaaaaatagtaaatttgttgtggcttacgacatgcatcagtcaaaaataaagccttagaaggttttccttgacaagagtcgggtgcaagaatcccacagatggtgacattacaaataagcaaagaaaaaaaaagggcaagaatcgagaagacgaagtctactctaaacccttgaatgtcattacgtgaagaaaagatgggtcctcgacaaaaaatacgaagaaaagaagtaactcgaacaccacgaaggaggaatataacgcgttacacaaaaactcaaaatagaaattcccagaaactcaaacatcaaacccagaaaaagcagatgaacagtaaagtatgcgatgtacacaaacaataaactaaagtacaagatgcgaagaacttacatatagcttgagaaatgggcgttggtgttgattgacagtaaagagttgattggcagcgacgaaggaaaagaagtaagaaatctatggtggttaaaggttatcgtttctctctggaaaacttgagaaaatttggtgaaattctgaaagtaaccaaatgaggtgagaagggtggcttttataggccaaaacacatgtgaaatagctgtgatcagctaccatcgaacagctgggaaggcacacgattcgaattcccaagatccaacggttggattggatcgtcatcaagacggtggaaatgcttgagtgtccgtctgacacccattaataccccgtatcaattaatggacaagaaacgaatcgacgcctgtgaaaagtgaatcactgtagtaatgatgatcattaaatgcaccatcatgcgcccaaagcacgtgccaagaaaccgaggagccaaccggagtcatctaagaaagccttgttcacttcacaattaaacaaggcttgggggtaaatgttgcccctgattttgcccaatatacgtggaccagccggacaatgacacgtggatggaaagggtttatcatttaaattaaatagctaagtctttataaagcaaaggattattttggatatgcctcccggagaaggcgtgcaaagtttcatatgctcccggagagcaagatggcatcaaagcatctccgggtggtgtcaggcttcctctgaacagtcatctcgcatttaatgccgcatgggaggaggcgtattggaactgccacatgcaataaatctgatgacacaacccccgatct

SEQ ID NO: 347517 - DNA, 713 bp, Cannabis indica
tgacattgctaaccacatagctaaaatttcacaattaccgggcccaaaataacgcatttcattaaataattcccaacaatttacctaagtaagatcataatcctacttcatttcccaagtaattacatatttaataaaatatgtccatttaaatattatttatcttctgggatattacatttcccttctcgttacaatggatataagcaaaaatattgcatgataaatgcaaaatacactgatcgtgggatttggacaacttgccatatctctgcaatctgatcctcaagttatagggatttcttcgatggctcccaatgcgaaagctgaattcgttaagtgttggttgctctgcgcggattgctgattgctttgcttcgggcagcctgcgaggcatcctattcggactgtactctccgagcagatactcaaagttgattccacgtgtcaccatatgtgatgccacgttagagtgcaaaaattgggataacattgtccccccaagtctgtacgggacttctgaagttgcatgtagacttcatccgagctacttctttctttggatggggacatgtgtcgagcgcatctattcgagactcgatgtgaggttgactgggcatcccttcgattttcggataataattctctgacaattaatgtttcaaaatccgattttctctcaccacggttggcggctgcacttgattattttt

SEQ ID NO: 347518 - DNA, 996 bp, Cannabis indica
tgaagtaggttctgcgattaattgtaatgcgatcagatgggtaaaatatgcatgttagatgagtgtgaatattttaaatattcatccttagtgaagtaagttctgcaaatacatgtactgcggtcagatgagtggataattttgtatcgttaatgttatcttgttattattatgttgttttatgtgtttataatttattttttatgttttaaatttttgggagtgtctgattacagtcgttatgctgcaaaattttttgctagaattaggataaatttaactaaaatgcaaaatatcactaaaaatatataagtgtgtggtaattaatttaactaagtgtctacaacaaatattcaaaaaaaaaataataattgaataaatttatgtttttctagaagtttcaaaatggatagaaatttgatgagtgcgaatagattatcagcggagtatagtgaaggtgttgaccatttcttggacttttgtcagaagtatgtcagaaatcctaaattagttctttgtccttttcttaaatgttgtaacatggatattactatgataaatgagcatttatttaggaacgacatagacaagagttataaggtttgtgttcaccacggggaaaagaatatagtatcgggcaagagggaatgtctaagtctaacaatgttaagggtgttaagttggactatgagtatgatcacattccagaaatgataggagatgcacaatttgaattaaatgttgatactttgaaatttcaaaattttgtagagaatgccgagaagcctatttagcctaattgttataggtttactaaattatcgacacttattagattatacaatgtaaaagccaaacacggatggagtgataagagttttacagacttactagctttcttaatagagttattaccagaaggtaatgcgttgcctttaactttctatgaggcgaagaagacactctcttcctcaggcgtgcaatatgaaaaaacac

SEQ ID NO: 347519 - DNA, 513 bp, Cannabis indica
gtgatttcatgcggcccactaaagatatgattttgaaaatgacaagaattatgaaattctatcctaaaactaattagtgacaggtagagagaatatataattcatatttttataactatctccttacttttacatttaatttacgtgagataaggttgtccaatacacattgtattttaaattaaaaacaaatattaaagggcatcagtggtgcgtagcagcctcttacatgtcaatatcgttattggttcaactaagtatcgggtttatatagcttaatgtaataactttgagagagtatcactaatcaatcgtaagacaacacgtctagaaaatgctaagtaccattggtgcctaatagcactattctaagttaaataatgttagattagatactaaattagtattgtacatacatgtaactggtgcatgtacttttaaaaaaaatgtaaaaaagttagaaaatgaagaggagaaagttcctttttatttttttatttgtaaatatccaaa

SEQ ID NO: 347520 - DNA, 634 bp, Cannabis indica
attgtaaaagtaccttttaatttattgtgtgtaaacttaaatgtgaatatcatcattattttattttattaaaaattaatataataataaagaattagttttttagtgtaatttggtgtgtggttggagtgaaggaataaaaataatttttgacactaaatttagtgatagtgtgacaccaaatttggtgagctcgttgaagatgctttaagaatccatataattttttttcttttttatttgtagtaagttatctctatttaagcgaattatgtgaacctatatatgcaaatgagcttatgtatgttattcttttctttttcagtaaaatatgattatcattcaaaggcaaaagttataacacatacaaaatatcaatatataatatgccatattgtatttttcattatattattttaaacagttaattttgtcattgatttctgttttattattatttttcattttaaataaaaatctattaagatggaagaatataaaatggaaagttttatacacattctcaatcaaagtttaaagttacttgagcaagtgattgagctaaggcatactcttttcttacaacatgaataatgagacacaatgactaaaaatgaataaatattaaataata

SEQ ID NO: 347521 - DNA, 1117 bp, Cannabis indica
tatgacacacatattttgattagacatggatatattataataaacaaattagcaaccattagaacttattcttgatcctgaaattgttccaattaacatgttactgtagtaatagaaattgatatcaataaagttcttggacatagaatcacaataccttatcttagtgggaggattttaaaattcaaggcccattattatttggatgaaactgatgatagcttactatgttatgttcacgataggaactttaaataaaactgagaaagtaaatctaaccgtacatatggatagaagcaacttatcagaaatataaggataagataagaatttttgtaatgtctattcaaatgacttaggcaaaatccctagtccttatgaagtgttttgtggtatctaatgtgattacttaatcctaagcaagtattttgcattaatgtttataaattctatgttgatgacttagtctagaaggaacttatagttttagactaagataataagtcacaacaaaaggtccctaaaaaccaatagtaagaggtgaaatgtactcctatgtacgaatttaaccagactcctactattgagtgggagtcatctaagatgtaatcaaacaaggaacattgggaaataatcaagaaagaataatgaaagtgacctatatgttagatgataggggtgtatattagaatcatgttatctacaccaactcagcttattggagatggtagttactctgggggtggaggaattattctagaaggatgtaagaacccatctataataatttagttccaccagtgaagctaaataacttagttgttttcgaaagcactagaaaagttattcaaactgaagaatgttcttaactatttttatctctattccatttatggatagaattagagatatgtcttatgtatatttagatgcacttaataagcagtaaagaattcagtatccctagataagtaatgcatatagaaaatgatgttgcataatattttatgaacactaaggaagtagtggtggagaaagcaatttcttaccacagacttacagttcctataatttgggtttagtcaaatacactaccttgatctggagatcaagacaa

SEQ ID NO: 347522 - DNA, 779 bp, Cannabis indica
aaaaccctcccttctttcgaagaaaaacaacctcctacatggctgaaaatatagaaaatgttaagacccaacatgaggaagctaaccatcattctggaaaagagcccatgggctccagaagatctaccaatctgcagtccaaaaggaccacccgttctaggagggcccaacctgagggtggccccagtgcgcagaccacacgttctcggagaactcaacccgatgttagtcctagtacgcagacaacacgcttgaggagaactcagcgtgggaatgatcagaaccccgggacgagggatgaagagctccatcgtggaggtgcccaatctgtgggagaaagaacttatgaaacggaaagtcgtcgcttgagacgccgtcggcaatacaggggacgaacgctcaaaatcaacctaaacttggagtgggaagcccacgaggcagacctcgtggctcatgaaccattagataggaaaaggtccgagaagaataacccagggaaaatgagaatcaggatgaacaaccagatgggagacaaccggaaactgatgaacgagaaatccctcataaaatgaggaggatcttgggactcaaccgggagaacgcagatcacctgctagaaatcaccaacgttcttctcaaacccatagagcaaggactcgtacgtaccctgatgggggaaatacgacaaaccgctctcgggaggaaagaacagagcgtgaagaagaaagtgtgacttcgaggcgatctagaacccatagtcgatcaactcaaagaggaga

SEQ ID NO: 347523 - DNA, 720 bp, Cannabis indica
acctttctttctcccattttttaatttaaatttctctgtccatgacacatttacatgtatgttagaaactttaccaaaaagataaagaaaaagttgaacaggattacaagacatcacaaagaagaaatatgatctgaatagtgaaagaagccattttagaattgtgtacatacgatacgactatgtaacttaatttggaagcaaatggcttccatctaagtacaacaaataagctctttaacaattatgataccgtcaaataattactatgattttagatcataacaaagcaatattatagcttaatatctttatgacatgtttacaaaatcagctacgcttatccaagttctttccctaagtaataattctagctatacataaaatttaatcttggattggtatgatatggggaccaatcaattagagagagttgaggcatggacttgttactgtatggccaaacaaaacgccaccaaggctaaactcagtacaaaccattaagctaaatcattctactttgttagtaaacttttcattttggcttaaagagagacagaaaacttttgttattcattttctactcactatagcctcaaaacactagacagaaagcttttgtcttaaagacagacatggcagttagacctctctacgctgttcatctgaccaatacaatagtccacactcttttgactcccttgtaactcaaaacactac

SEQ ID NO: 347524 - DNA, 688 bp, Cannabis indica
tttactcgtacactggagctcatgccattgctagaaggcatatgaataaacaaggtcattttgtgtcatctatatgcaaagcgagataccattatcccatgtcaatatcaaccgctttgaagataagattgataagtggttatgcgattttttagtattatctacacgtgtataaatgaaacgtgatcaaagcccacgtttcatgaaacggttatgtaattcaaatttaaatgtaaataaatgccaacctatattcctatagatagggcagattctacaaaaaaagggacggaaaatctttgagagaaaaagattactaattgtaatattgtattaaatatctaaaactatcttgaataagatagactcgtggagtatgcagagttaactacaaaaccatgttaattacttggtgtcattattattataatatatatctgtttttaatgtattacgaaaaaggctcattattcgttaacgaaaatatgcattaacagctaccaccgtcttccacactatgattgagtacttgacttgctatgagtgggcatgacactctatcactatgggcggaataggtgaagaacaattaaggaggattcgaatcactatagaatgtgtctctcacctactaattgtcagagaatcaaaactaggtttgatttggttgaagtcaatagttggatga

SEQ ID NO: 347525 - DNA, 758 bp, Cannabis indica
ataaatatttaattgcacaattagaacaattagcacaattattatatgcctaaataaatcatgtaataaattactaaaatattttctattttttaatttataccaaataacatataaatttcaaatatttgtattaaataaaaaatagaaaaactgaataaatgtaatatattaacaaaattaacacacacacaaaaaaaaataaattaagattcaaaataaataaattttttttaaaaaatggtgagtttttctctctttttttgaaaaatttgctcgcataaacgatatgttattttttgttctaggaaaaacgataagtagtttttaaaagggaatggctagttaaaattgggatatatgacatgctgtttgggtcttcttctaccttcagctaggtcactttgacctttctacacacgggtcacggtgaacccaattcgaactctgaattctgacaactaaatcagctcaaattaattttaaatcaatctaaaagaaaaaattaaagcattcatatagattttatacatcgaaaacatgtcaaaatgaaacattaatttcacaaaaaaatttgggttcgaatgtatattaccagaaaaattcttcaagttttatagttttcaaattgatttcatgcataaaataaatctatagtattatatgaatgtattgttgggttttatgccctaaataaaactcatttcaatataactagatttacttattaatatagatcagaaataacatttaatgtt

SEQ ID NO: 347526 - DNA, 986 bp, Cannabis indica
tggcgaggaataccatgattacaagtgctatatcaaaaacatataaaacatttgaaacaaaaccaatccaacgagacataaacaattcaggtactattaagccacattacacaacaatctccaatctctattcaaatctaagaacgaaaactgctcgtaacttttagttttataaatccaaacagctgcccaaaatctgactttttcccataaatcttcaactgaggcttcaatcccttcaaaaattctgttatttctttcgagccaaataacccaaatgattgctagaacagctgtcctccataggtataatctacccttactaccccccaccttgctcaccatcattaatgggactgatccgggaagtacccattggatctcaaaggcgttcagcagctttatccaaagtctttgagcaagacaacaccccaagaacaaatgtgccacttcttcactacttttcttacaacaaacacaccaccctggggacaagcaaataaacggtcgccttttttgcatcataggatgcacattaatttttcctaatgccaccaaccatccaaagactttaactttaataggacacctgcttttccattaagtcttcgtttaaaacaaatcaccaaaattctggtctgaagtaaaccaattgaatgctgacttacaagagaaaatcccactaggatctggtttccataatctgatatcctctgagatgttgagtagcctaatatgttccagtagttgcaataaaacaataagattaggcatttccctctccatcaagttccttctaaacttaaaattccagcttgcaacacaatttcctacctctccttcaatggcaacaagatcttttatactcgaatttttcacctttgataccactgccaggtccggaaaacgactctttaatgttgtatctccaatccatatatcttcccaaaaccgaactagttgtaccattgcccactttaatttta

SEQ ID NO: 347527 - DNA, 879 bp, Cannabis indica
taaattattacaggttttattttaatcctgtttattataaaagtttaaattatgcggtattttgattagtaatcccatttaggggattagggttttcataaatattttgggtagcatgcccaattatttagggcgttaaaatgttggtacaactccttgatagctcgcttcactcatttcggttgctgcttgatggttttaccatatcttgtatggagaccctatcttactactggcaaagttgtattccatatgtactctgtcttggctcatgtggacatgccacgtcatgtggacaaaatttagaagggtaaataccattttagaccctatgttttgcaaaagttaccaattggaccctctgttttgttaaatgacaaaatggaccctatattttccaaaattttaaaaataggaccctgagctcaatttttaataattttattatttaaatataaccaaattttagacaatttctaacacaaacagatacagaaaatataaccagttttgtcataacatctctaaatcagattattattattattaagttttattttgacaaaaaacagttcagggtcctatttgtataattttagaaaatacaaggtctatttatcatttaacaaaacagaggatccatttggtaacttttgcaaaatacaaggtccaatatggtatttacccaatttggaataacattcatcatgttacattttgcttaatcactactacaaatatgggttttcctgacatttttaaacagtcgtttaaagtattcccgtcggtttctataaccgtcgcctatacgaccatcgtaaaacgggcataataggcgacggttcaaaaccgtcgctaatgtgggtttcccgacggttt

SEQ ID NO: 347528 - DNA, 663 bp, Cannabis indica
aatttcaaatttattaattatttaatttaacatataagataattttaatataatatttcaaattaaaaggattaaggtatcttttaatttaaaatatagctaatattaaaatatctgatcttataattaaataatatataaatattaaaaaaatttaaaaataattaaaatctgaccacaatttaaaaaataaaataattaatttttaaatttaaacctcaaaatatcaaagaattaataataatctattaaaaattaaatattattaatttaaaattggtatttgagtttaaatatattaaaaataatattttattttgatatttagggtttaaaattgagaaatatgaaattgggtgaaaaatcccaaaaaaatcggattttcgggtgaacaacacgtttggagtgcacataggctgttggcagcctcgtccgcgcctgcaggaaactgcaatgcagccttcgtgtgcgagaaacgtgggcaggcgtgtgtctgaacgagggacattgggggcttcagacatgtgtgtgtcccgtgtccgcgtgtgcatcacctccttgttcgaggcctggtgcgtgcgattgagcactgtgcacccgatttttaaaacttaatatctttttcaatttttatcagaatcgagttccgtaaaaatgaaaatt

SEQ ID NO: 347529 - DNA, 551 bp, Cannabis indica
gttctgtgtccctagtctggttccatgtttaggtctgagttcaggttcaggttcgggtcccgagtcaaggtttgggttgggattcgggtctggatctaaattcgggtctaagtctaattttgagttcgggtcctggtccggttctgttctggatcttggtccaatttcagttatgattccaagtctaagtccttgatctagtgccggtcaacttccagttttggttcaaattttgggtcacagggtacgggttcgaatacacttttgggtttgggattgggtttaggtctgggtgtgggttcggttccttgtcaggattcgtgtccaaggctgggtcccaaatgccgacaccgactacgggtttggtccaagcccttggtccagatttggttcccaatcttgccccacactggttcaaattttggtgccgtgtcacgagttgggtcctaggttcaaattcgggtcttggtctggtactaggtccccgccctagttctgtttcccaggtgcctatcttcattctgggtccaggtcccggttattgtgtgggt

SEQ ID NO: 347530 - DNA, 715 bp, Cannabis indica
agaagtgatctttggtctgctctatcaatgataaatgtaacaaaggcttggattgttcttggtgattttaatgcggtctttcatcatgatgatggacagggggaatgctattagttcttcggagctagtggatactactaactgggtagctcagtcttctgttgggcctatgaaacgtatacagggtcgaatttcacttggaccaataaacaggacagtaggatttttttcccgaattgatcatgttttccacaatgaggattggattgatgattttccgaacacgtctgcccacttctcttgggagacttgcttggatcattgtttttatgtggttcaatcgattgctattgaaaatattggaagcaaacctttttggttttacaatttctggtctgaacaaccggattacaagagaacggtgttggatagttggggcaagcctttgagatgttgtggtatgaaggggatttttctaaaaactttgagactcaagcacaaattgaaggcctttaatagacaggcgattggaaacattggagaggcttatgagaaagccaaagacacgtacattaaagctcaattccaatgccaagctaatcctaataacaatatcctccttgatttggagcttgtggctgctaatcagtttcaaatccatgaaaaaatgtatctgagctttctgttgggttttatgacctaaataaaactcatt

SEQ ID NO: 347531 - DNA, 693 bp, Cannabis indica
gagtttaactctcattctcttttacaaagaactctcagctcacaccactcaatcccttttccaaagaattataaaatagcctttatatataggctgaaaaaacgagtacaaatgactaactaacttaactgaatataactaacagttataacagaaaattatccaacaacaacacttgcaccagaatataaaccccacaattccacctggtttatagtcttgtgcaagttaaaactctaagtaaaaaggctaggcaaaaccgttccatcactaagtgttcccttcatgaaagaagggttaacattctccaatgttaagtagcttcaggcagagcctgaatttctcaccagtgactgctttggtgaacatatcagcaggattttcatgagtatttatcttcttcactttgactaatttgctggcaatgatgtctctaatgaagtgtagtttgatgtcaatatgttttgacctctcatgatacatgggatttttcatgagatgaatagcactttgattgtcacaatgtatgaacaagttatcagattttatccccaattcagatgtcaaaccttttaactagatggcttctttcacagcttttgttgcagccatgtactcgacttcagtggaggacaaagcaacaaccttttgtaggtttgctttccaactgacacagcctccaaacacagtgaa

SEQ ID NO: 347532 - DNA, 538 bp, Cannabis indica
atatctttcatttcgtgtatataatggtcataccgtctctactctcctctccattgccaaaaaaaacttcgaaatgggtcataaatcagttgctaacaaggctaaagggaaacacccagtcatcgacgatgatgactctaattttgctcccctcgtggctaaaggtggtcgtcgtccagtgaagaagaaatcgaaggtgtctttgcctaaaaaaattcaacttcaatagccagaaaggaaagaagaagtcaactttaagacaattgtgatgaaactgtaaacaattatatctgttgcgagtcatctaacataaaactacaaaagaactaataatttcacatatttaatacaaacgaatattacagtcagatcgcgtatttgacaattctaagccttgtttttataacactatgatattatagtagcaaaaccattattcaactaatgtgcaacttaatttcaactaaaaatgttaaatgtaaatgtgtatctataagaaactagttgtcagtatttttttgttactgatcgataatta

SEQ ID NO: 347533 - DNA, 1123 bp, Cannabis indica
ggttatagttactagcggacctcattctactcatagactgcgtcctgcttaaggacctcgtcttgctcagggacctcgtcctactcatggatctcgtccttgagtgacttagtgtcttactggttcccgtgctttctcgatcattattgcgacaagtactttctcctccccgagttgatcgactgtgggtccttgagcgccccgaggtcacacttacttcttcgtgccctattctcccctttgggtgtggtttgttgtgtttcccccactggggtttgtacaagccctctccctatgggttcaagaagaacgttggtgattcctcgctggtgacttatgttccccaggttgtgtcccaagaccttcctcgtttccacgaggaatctcatgttccctggtttctggtcgtctcctattctcatttctatgagatggttctggctaatcatttggatttttagggggaacttcattttccccgggatgttcgttttcaggaggtccctcagtttccccaggttcttcccgagtattttgagggttctcctaagcagtttcctgtctcctggttcgtgagccatgaggcctgcctcgtggccttctcactccaaggtaaggttgattttgagtattgttttccggtgctgccctggccgcgactgcctcacgctctaattcagcgttctgccggtttgtttcttccaggcgacgcctaagatggcggttttccatttctacgataggtatgtatcttgtagggtcataagcacccttatccatgggctgagcaccccgacgattgggttcttcatctcgcactctagaattttggccattcccatgctgagtcctccttgaatgtgtcgttcgtgtgctgggaccgccctcgggttgggtcctctcggaatgagtggttcgagtgctggggccacccttaggttgggtcctcttggaacgagtggtccgagtgcttgggccaccctcaggttgggacctcttggagcgagtggtccgtttagattgtgatttagaaggcctcctggagcccattggctcttttccaggatggtgaggagtttcttcatatggtgtgtcaacgttctctgtgttgtcagccatgaag

SEQ ID NO: 347534 - DNA, 582 bp, Cannabis indica
atcaaaattgttgttatttcccagtaccagacctgtcttaagggtgcctttgagatacctcagtatccattcaatcctttccagtgttcttcaccaggatcactaataaacctgctcacaacactcatgatatgagccaaattaggtctagtacacaccatagcatacattaggcagtcaacatcaattgcatagggtatactttccatatgctttctctcattatctgtctgaggtgattggtcttgtgacagtttaaaatattgagcaagaggagtggttacaggtttgccatctttcatgccaagcttgtcaattaccttctcgagatagacttatagtatggggcctatttctcttaatttcaatgccaataattttcttagctggccccaagtctttcatttcaaattcaacaccaagttgggatttcaaactttcaatttgtcttctttcttttcctactattagtatatcatcaacatgttggaaatattttaccaggatctagatttactaccaagtatgttttattaacaccctaatatgaattctaaaacaatgaaataaacacataagagt

SEQ ID NO: 347535 - DNA, 542 bp, Cannabis indica
tatttataagatctattgacaattagactatcattaaaacaatattagaagatggtatgattaaaaaaatattagaagatagtgtgacgagtcaagataatagaaagcgaggtgtttatctcgatagaagattgtatgcatgcgaggaagatcatctcgacactaggaaagatagttattagagttaaaacaacattagtatcgagaagccaaatgactagcaacggttcgctatcaaagttaacttggctccattctcggcaaggcgtccctatgagataaggcttaccctatatctttaattacgcgttcatctcggcccaataaaagcgagatatttatagctatgtaaaaacctcatttatttagcttgatttgtaatcaaatcccctaatttgagggaataatcgctataacgattattcccaacttttgtaaattactgtgcactttgtaattataaatagtagcagacaagatcaagaagggggacgaaaaaaaatcttatgaaagaggccatgaaaaaatactcagaaatctga

SEQ ID NO: 347536 - DNA, 696 bp, Cannabis indica
tttataagtaaaaagaaaactacgcccacacttactcatgaatccgctattgtttatgcaaccaatattctaaaaatttacttatcgggttataaattttggaaagaaagtaagagcatcttcaatggagatgtaaataagtggtggaaagctaaaatatagttcatttaacaaaaagtgtgctctaatagtgtgccagtgatgtaaatttgacacataaacaaattttgtgccaaatttggcacaacatttgctatgatgtaaaatttataccacaataaatgcactactttttcatttatatttatgtcatttatattattttattaatatatttaattatgacattaaattatgaaacatttatattattatttttattgtcttacatataaaataataaaaaaattaattataaagttattagtttttattttttttaataaaacattaattagatattaaattttacattaaaattttacaattgtgcaatggagcacaaagttaaaatttgatgtaaatctacctcaaaactactttttgtgccaaatatagcacaatttttaatctcccattggagatggtctaaatatggataattacaccacatactgaaatttctaacttttttacttttatactgtggggcgaaattttttttcaaaaatactgtatattgtgttaaattttcac

SEQ ID NO: 347537 - DNA, 620 bp, Cannabis indica
atagtatcgatattttgtcgacagatacaccatttcatccatttcatctatacagttacacatttaatggccattaaatttttctacattcccaacatgtatactgctctataaaagcaaatccctttctattcccttaatgctcttgtcttctacttctctcttacacataaaaattaaaagcaaatttctcttattcttaagttctaaatatggcgcctagaaagaacaagggcaaattcccaatcttaactcctgaagagctcaagcaggagcctgatgttggcataattactcctcaaatgcagaaagttttggacgccgatagagctttcgaaaagaacgaaatcgaaacgagttaaggttgatacaacttgaagcacaatttagcaaaactggtgtatggccggctccaccacaagggttccccgaaggatgccgtcatcgcaaattaggcatctttaacggtaaaccggtgaagcctggaactttatgcaagtattgcaagtctcacccacaagccaaacaattttaataatttgttattttatggcttgtggtgagctttatttaatgtttgtttgttttttttatgaacttttattttatgttattttaat

SEQ ID NO: 347538 - DNA, 628 bp, Cannabis indica
taggcacatgtttagaacgaagtctggatttcgtaggtagacagttagtagcagcacgccataacaagtctttcactttcggaggaacacttagcttccaaagagtattccaaaagacggaatcatcatcctgtgcacccaactctctgctcaattctatgaacttataaattgattttactgagaaatggcttgagctctcccaactccaataccaaacatcacataaacgacttgaagacaaggaaatactaagaattaagttagcatccctttcattaaacatatcatgcaccaagtcaacatcccaagctaatgtatgagtttccataagtgctttaacattttgatcaataagagcaggattattcgaagttactcttggattatcttcattcgacagccacagatccaacactatattaattcgataactatctattgggtttgtgcccttaataaacttatttcaatataatacgatttactaattaataaagattagaaatcattttatgttgcatggttcacatgatttatttcatgattataaattctataaggtccagaacatatgtatttgtacatgattatagtgttgtctagcacagtggaatataatcatgat

SEQ ID NO: 347539 - DNA, 659 bp, Cannabis indica
cgctcagcatcctcctggtacgtatgcctttcagcagtcaaatcctgaaggatcttcatgactttttccatgccccaaaagtcggacaggacgaagccatggttaataaggttcttggaaaggcggccagcctcggcagcgagcttgaaaaatgatacaagtatgagtggaagtccttaagagaaaagaatgaggaaaaaagtaaactacgaaatacttaccacagtgagggaatggctaagatcctggacttgaaagatggagttcaaggatgcacaagcagcgaaccgcttgggtgcacactgggtaagctgagacgcaaactcgccggtcatctccgcggcaaagggagccagggtgggcccgaggaaacgattgaaccaatccgccagggggtccaagtttagatcccacgaattctggtagttcgaatcgttgagggtattttgcatttcaactcacaaaacccttctcaaagcctccacgtcggcatgcccccgggagtacttgtccatggcatagttgtgtttagctatccggagttcctgcctcgcgtcatctccaggaaacggagtcagcactatgttgggaggcgtcgtgtgttcctccgcctcgggagagatcccggaatcagggccaagggccggagtatcagctct

SEQ ID NO: 347540 - DNA, 1187 bp, Cannabis indica
atgatatttcagtgaactaaaataatcactaaatgagggtctatcatttatctctatttagccaagctcgaaggaaatcatcttttcacttccgaatagaagctataatttcatatttatgattagcgctcccactcaattgaactaccatgttcttaacctttacgtcacgggaagaaccatttggttgactttaactaataggtttaagaacacaaatagtgcaactgaactagaaggtaaccatctcaggattgagatcatttgatctaggatcaactaggtgatattgaattgaatagatattacagtaagtttatcatatctaattcaagttcaatatcggtccctttcgatgcatactccatacatccaacccaagcttactttaaccaatgccctggaaaggacataacacttatccaaggtgtaagtaaactacgttgtagattatcatatcagttaaaccctgtgtaatgataaatctaagattacatttaatcacaaatcttgattactttcaactatgttgacagcgcaataaacaagaatatcagtgtgatgaggatttggattaattttgttaaatcaaataagtaaataaatgatctcatgaaccaaataacacattaaacaagtaatgaaattaaatctgtttctttattgataattgaatagaaatgattacattgaaatagagtttaatttagggcacaaagcccaacaaactcccacttgcactaacataaaacaatcagtacatttcaattaatcctaaattcaaactgtacttttaaaatgtagttgcagtcaaaactttggtgaatggatcagctaagttgtctttggtgtccactttctccaccagtacgtcccctcttgccgcatattctctgatgatgtggtatttcctctctatatatatgttaacttctcttgtggcttcgaggctctttactattggctatagcacccgtgttgtcacaaagtaaaaccagtggtttttacattccaggaacaacaccaagtcccgagaagaactttctcagctaagcaagttccttagcagcctcagcatcagttatgtattaggcctacatggtagagtctgatattgcagttttcttgacacttctccaaacaactgctccactcccaagagtaaacaccatcccagatgtagattt

SEQ ID NO: 347541 - DNA, 674 bp, Cannabis indica
atatctcaaaagcagcgaaagcaaagggaaagtgaaagacgcagaacgtgggaacgaaaattgtcccataccctgagtaaacttttgacagaggggtcgattgcaaaatagaagaaagagaagaagcaaaacataaataagagagggtatatacaccatacgacagtctttgccaaagcctatttcccagaaatcaagcacttaaccaaaagttctaccctagcatgcaaatgaacaacaaaaacataaagtacccagaaaacttacttgaaggttgaaaactgggggttggtgttgatcgacggtagaatgcggattgacaacgatggagaaatagctgtaaaaaatctatggtttctggaattttctcttgaaagtgttcttgaggtgaaatagcgaagtggttaaagtaacccagtgaaggaaaaggctggcttttatagaccagaacgggtgcaaggcagctgtgatcaggcgccatcgtatggtgggaatcgtaatcgattcgcattctgtagatccaacagttgggatagatgctcatcagggcggttaaaaacgcttgagtacttttctgacacactgattaaatgcgccaaattattaatggatgggaagcgaatcgttccctacaaaaagaaataaatgttaatgatgactatcataaatgcagc

SEQ ID NO: 347542 - DNA, 609 bp, Cannabis indica
atattttaattaaaaattaatttattttaaagatataattaatttaagcctaaaaataaaaaatttaccaattaataacatgttatagcacatcataaaaaaatataactatcatagtcacaattttattgtaaccattaaatactaattaacatgtaggtagaaaaaatgtgtgcactacaaaaatatttgcatttagcattttagagaagtagaaggaaatcctgttagtaagataaggaatattatttgaagcaaatctttaatcaaaagagccatagtttacaaaactcataactacatcttatatcactatgattaagctaaggtcagaattgccaattcccattttgttactcaggaataactaaataaattaataacagtaacatttataaactatgtaattaacttgagataaatcaaatgtgcataataaacctatatataaatatagtgtgaagtcgatcgatcgaatgtcattctttatatgatttcttacatctatagataaaatattgaaaaagccatgaaagttccaaattcaatagcaaactaggttttttttttttttttaagtgtagcgtaatggtattttacaatcatata

SEQ ID NO: 347543 - DNA, 694 bp, Cannabis indica
acgaatttattttattttataatggcttgaaagctaagccactgtgccgttaccttcctttcttcacttcctacccaccgaaagtttttagttatttattttttaatgtaacccagctgcacagagactatgctgtgtatctttatcttgcctatctaccgcaattgttggtttaacaattttttttagaatgcgtttggaaagccacaatataattagattatgtgtaattaaagataattacacaatttgtcacgtttgtctgaccatgtaattacactgtaactgtaactgtgtaattgaaaataattgagaggtttcaattacactctccaattctcatggccgcccatgagaattgaatgtaattactaaaaacttgtgtaattactaaaaactttccctattaacattagctactaaaaatattattttccaatgtaattactaattattttgcctaaacaagatattaagtaattctatatgtaattaccacctcactatccaaacactactttactactttaaaattatagtgttaattacttacactgtgtaattacctaccctacgtaattacccttaaccctacgtaacttacacagttaccttctaaaacgtcacccttaactgattctgtttttaaactttatcttttatttctaaagtaacgaattgtatatctgtgtcg

SEQ ID NO: 347544 - DNA, 1051 bp, Cannabis indica
ccccaagtccctgtttgaacatctacttcgatagggacttcctagctcatgtcttgtctgtagtagtctatgttttacacccttgtctcgccagatgttggctttttgcatggcatgcttttggatctttgatcttctctctttatatttgtctcatcttctcttcttgggtatatcttctttgtacctgccattaataagtttcaagcttttggaaactatgtgattctcatgttagtttgtaatctccttgttatattgatccttcatgacagttttagaatgtgtaatatgttgctttttgatagattaaatttgattttggccttttctatgattcttgactctttgagtcataaagaatacgaggctcatatttgagttttgaaagaaaaacacacattaggattcaaaacttaccttggctggcctaggaggtcttacttgagacctggtcagtcctaaggcttaatcatggcagttggccagctttagggttttatcctataaagctagcctaatcatgcctgggtttggtgaccctggccagttcttggctgagtcatgggacccctatcaacaatttcaaggcttgagaaccttggccggcatgggcattggttccaagtgggtagctagttttttgtcctcttgtgacttcggcaagaatttggctctgtaggcatatacaaccttagccttataggtggtttccttagaaactttgtgaaaagcttaatggtgagtctattattgtagaatgttcaacttaagactcaaaatttcttggatcctatatggaactcttccttagccgtagctcggtacatagcccctataggagctctgtccggttctataacaccctactagattaggcgtgttacagtgtttttctaaatattatgcacgcctttgctaatcaaagggttcaataaaaacgtgaataattaaaactttattaaataaattcactttaatatataacacataataatttatacaatatgggatcccgttaaaagttacaaaatatttaaacttcaaaagt

SEQ ID NO: 347545 - DNA, 394 bp, Cannabis indica
tgtgtatattataggtttatatacacattagttttataaaacatatcgtttataacataatttacaattagtcactaaattcttaaacaaaaacccctagaacttaaaataaaactaatatttacgtggcgcgccacgtaactctcttctagtatatgtatatgtatgtatttatgtattaatttaactacttgaccacttgtgatgtgttgttcttgttactaaacaataatagtaataatttcaataatatctaacaaagaataaaaatagttaggaaaaaatagtttttgaaaaattttttcataattataattttaccttaattacaaaaatatactattaaattttataattacaaaaataacacagtttactcaataaaaagtaaaaa

SEQ ID NO: 347546 - DNA, 686 bp, Cannabis indica
gtaaattttacaatcttctttcatctgtgtatgacctagcaacatgataggatccatccaaatgtgtgcctgtgtgagcctatatgtttaattttgttatagatgcatataggttgttgttgctaaataaaatatcatagtttttattcaagatacttaattatttatttccatttcaaaaatttaattagatagtaaaatatatttaagttaaaaattaattttagaccaacttaaattaaaatattttcttaagtattacattagaattaataattaagttgattttattcaagataattaattattttttctattttaataaatttaattaaatagaacatatatttgggaaattttttcaatttcagatcaacttatattagaataattttcagaatgtattttattttattttaataatcattttccacataaaattcgaaatacatttattttaaatgtagatattttaaaaattttcaattttaaaaattagattaaagttaaaaattcaacttaattaaatcatgtaattttcattgatgatttatttaaaataaatagactaaaatgtattatattttaattaaaatgagtcatattattccgctgcaatcaatgcaatattttttaaactcttatgtgtttaatttcatcatattatagatattcatatttaggat

SEQ ID NO: 347547 - DNA, 485 bp, Cannabis indica
atgatacataatccaattcaatacaatacaatacaatacgacctaatacgacgttccaaacgagccctaaaggtgttaaaaaataagattgagtgtaaaattacctctgattagaggtcattcatactattttttattaattaaggttatgtgtgtaatctttaaattataaggagttttgttgtaattatttaaattatttaagttaaaaaaataattgctaaaagatctttacttattaacaaattgcataaaattaattaataattattagtaatttaattttaaatataattaattttaattaagtttttataaggaaataaagtattaagttacaagttatttattattttattttttaaatttctaaattaatcacaaccattcaatagtgatctaatgcttaaaaataaatgtaataaccatgatagttacatatttgatgtaactattaaaatctcctccataattttatttatttt

SEQ ID NO: 347548 - DNA, 865 bp, Cannabis indica
atagtatatagtatatagcatagaacatgagttagtgccccctttcacaagggaagaaagttagctagggttcccatcatcatggcccatccatgccctctttaattggatccatattctatgcttttttgtactgtccattacttaggctcacaaccccacctcaactgaaaaatatggaatataaataaaaaaaaatgttttattattattattattatcaccaaaatggacaagtaattatgtgtcacacatttccatttgccctagctagctacttgtactaacttgatcacatatcatcatcaagccctctctctctcataattccttgatttattttatctttctcttttggtaaggattataaagaagaaaaaaaaaaaaaagactatagaaaagcatgggggacctagtgacctttatgtcctcacaaagaaaatagcattggatcaagtgtcactttcacttcactttctttggcgatttggttttaatttattagttattattatttatagcttagctagctagcctagtacgtgacgatgagattgagctttgagcacgctctctctttgatctataatattaattaatattattataattatcattattcaatttaattaatttatataaaataagagcaaacattaatgatttccaatgaatatgaatcactagagcctagaggggttaaacaaagtagaacaaggaaataagatatgtggggttggagatatatgtataataatgacccacatgaaatgatgtgtgattttatagagggtggggacctatatatatataaatcactatatgaaatgaaagttgggttatatataagattattattattatt

SEQ ID NO: 347549 - DNA, 675 bp, Cannabis indica
aattttaaatatagtcgtattatatgtcattggactcggttttgaatgtagaatgcgataatgataattatttaacaatttggttgtataggtgagagtaatatgtaagattgtactaaacatttggagctcgggacttaagagcttaagatcgtcttttggaaaagtttaacgactctctggccgatagtcgttatgcacataacttttaagtaccttcatatttctttcaaatggatacatccatctcgcccataccggcccacacaaccttgcttctctcactagatgaaccattaaatgtatcatgatgtcgaaaaaagatggcgaaaaaacttttctaggttgcacaatgttttgactacatgttcatgtaatgcatctaacttatccaattctaattccttcccgcacaacttattaaagaaaatgcaaacatgtgtgaaacactctcgaacattttttggcaagactgatctaatggcaattggaagcagatgttgcattaacgcatgacaatcatgtgatttcagacccattagtttcaattcagtctcatttaccaagtttttgatgttagacgagtaaccatcaggtactttcatatttgcaagtgatttgcaaactatttgtttttcttttttggacaaagtgaaacaagcaggaggcaaatat

SEQ ID NO: 347550 - DNA, 991 bp, Cannabis indica
aggtgaagaaccgttttttttgtcggatcggttcaaggatctcggatcctgataattttagtattaacagctaaagaattgttacgtgatggatggctagggtttctggtcgtgtattggatatcactccgtctgactctgtttggccagaagacatcaaggtggttcaggaatttctagatgtttttcctgatgaacttccaggtttaccagctcggagagaaattgattttgtcattgatttggcacctggagcaaaatcggtttctaaagtcccttatagaatggctccagcagaacttatggcccgtttactaaactgtaattggaatcaaaataatgaacgggagaaatgtattggtttaaaatagaaaataaccggaaacaatattttattatgatgtttactaaactgtccggaaagaaaaccagaatcatattattttgtttacataactaggaaaggtaatcggaatgctttaatttgacaaaattgtcattattagaacatgtaattattttctgtttatagatttttaaggggtatatttgtctttttcatttttaattaataaaattaaaattaaaataaattaagtaaggaaagggaaaggcattccctataaaaatggggggagaacctttccctttgttttctccctaatttgtgtgggtcccactagtttctccctttccaaaatttagtaaacaattgtatgggaatcaataccataccattcattcccattccctttaagtaaacatgtcattaaagaattcaaaattcaactccaggggttgcttgacatagggttttctcggcctagtgtgtcaccctggggagcttcggtactgtttctcaagaagaaagatgggtctatacgaatgtgcattgactactaggaattgaataagctaacaatcaagaataaaaatcctttacctaggattgatgatctttttgatcaacttcaggggaagacagtctttt

SEQ ID NO: 347551 - DNA, 561 bp, Cannabis indica
tatattatcaataactacaatacataaagcaaaaaaaaattaataaaataatatatataatggtcagtttcgatttcggttttttcggtcagtttattaccaagaaaaaaaactgaccgttcaatgacaattttaattgttagcggtttttttgatttttggtttcgccggttctggtttcaactatgttcggtaggttgatctaaatgattttttcgattttctgaatttcatgctcaaccctagtacattatagttatttaaaatattctaaaaaaaaattgacaaatctagaaaaatttaacacgctgaaaataaagtttaaaatttttaaatgtgatacaacaattcaataatgtggaaattatttcttgatctaccgaaataatcataaaatggactataattttgtgagacattattgagttttactgactttacaaaattattatcttttaacaattgtggtgattttattaaattatataatattaattttttaatattattaaaaattaatataataatatagaatatgttttaatataatttttggtgttg

SEQ ID NO: 347552 - DNA, 508 bp, Cannabis indica
cccattattgttttgtccttttttggacttagtatgtggtaaataagtgttcattatgttaagtgttggctgaatatagttttggtattgcatttatcctttattttcaaaaaatagaaaagttaaagaaaaaccaaaattctctcaaactctctctctttctctcttgttcggccctctttgagcagcaagaggctgacaattttcacttggatttgaagctcttttagcaagattttgtgagctctttttgttgggcaaccggtctgccggttgggtgattttcagaaaccttagattttctcgttttatgttatttggggtattgccatgctttttatcgatagggaaacttttagtttctagtttaagtccccgggaagtgattatgcgtatcacttattagtgttgtgattattattgtttaggagcctgtaaactgtcgtgcagttcgttccagtcaggttgaccggcacacctgaattcaaaattgaggtaagattagtat

SEQ ID NO: 347553 - DNA, 580 bp, Cannabis indica
agtggaacaactgctcggtgaattacaggctcctaaatcacatcaatcataacataggtaagtgacacgctaaatcactttccggggtcttaaacttgaaactaaaagtttccctatcgataaataacatggcaataccctagacaacaaaaaaatgggaaaactagggttcccgaaatttccccaaccggtagaccggttccccaaccggaattccggttctgtggggtttcctgggagccaaccgaaatttcggttcctacaggcccctctgaactggaattccggttcagtgcaggaaagatcaaaaattccataactcacttaaaacaactgcaaatcataccaaactctccaaacctgctttatacaatctagagaacacaaacaagacaataaaacatccctacacacacagaatcaaaatcaaccattaaagctcaaagtttgagtttcaaaactcaaagcttggttaactcaacaatcagccaatactacatgcttagatcaacctcaaacaacatatttaacatccagaaaacaacatcaaaccctaacagcagctgcataactcaaaaca

SEQ ID NO: 347554 - DNA, 554 bp, Cannabis indica
cccaattgagtactaaatttgtttctttcacacctctttaacactttctccaagttagccaaacacgtgccaaaagattccctaaaaactgaaaaatcatccatgaagatctcaagaatactctccgccatatctgaaaaaattgccatcatacaccgttggaaggtagcgggggcgttgcatagcccaaatgggatcctcctaaaggcaaaggtgccatatggacaagtgaaggttgttttctcttggtcctccagcgctataaaaatttgattgtagcccgaatagccgccaagaaagcaatagaactctttacccgccaaacgatccaacatttgatcaataaatgacagcgggaaatgatccttcctagtggcattattcagcttccggtaatccatacacaccctccaaccagtcacggttctagtaggaatcaattcattgttcttgttagccaccaccgtgattcctcctttctttggcacacattaaataggactaacccatgaactatctgaaattgggtatacaataccataatctagccactt

SEQ ID NO: 347555 - DNA, 624 bp, Cannabis indica
taaactatatgtgaaggagatagctcttctccatggagctcctaaatccattgtttcagatagagatccaaagtttacatcgaaattctggataattcttcaaagacttatggggacaaagttgaagtttagtatagattttcaccctcagactgatgggcaatcagaaagaataatttagatattaaaagatttgctacgagcctgtgtcatggactttgggggttcatagtgtaagtacttgcctttgattaaattctcctacaacaacatctactaaagtacaatagggatggctccatatgagatgatgtatggtaggaaatgtcgctcctcaatccactaggacgaactggagaaagaaagtacttgggtcaaaaattagttcaaaagaccaatgaacctatagacaagatcaaggcgcggatgctcgcttcgcaaagcaggtagaaatgttatgctaatccaaagcacacagatattacatctcaggtaggggaacacgttttcctgtgggtttttgtaggaatatattttaccaggatcgagatttactaccatgtatgttatttaacatcctaaatatgaatttctaaaacaatataaataaacacatttaaagtt

SEQ ID NO: 347556 - DNA, 776 bp, Cannabis indica
cgtttttgttgtttagtaaacttttgagtttgttcattgcatgttgtagtagtaaaagttaataatagtgtttagtaaaagtaattaataaaatgccaacacacttgataattaagtatattttttttttggataatattttgagtaatgtgtcatctcattgttaagacatatcacacatttagatttaggattttaggggaattttattttattttttctttaattttataaaaaataattttattttgaggttctactgttttttatctcaatctttggttagtgagacaatatcattttctttttagaaaattattcataatttattttcaattaataagttgttttagcgattctttttattataaaaattaaacaaattatatataattatttctgtttgcttcaatttatttatttttattcaaatttagggaaagagatcaataaatttacagaaaacctgacttgaaagttgaaagattatcactaattttttaaaattaagactaatttgtatcaattttaaatttagggtaaattgcaacataaatacctaatgtttctgattttatacatttatatatttaatgtttatttttagtggcaaaaatacctaatgttacaattttcttaccaatacttccgttaactcataaatatggatacgtgaagggttcagatgcattacatttatttttattttattttaaaacttaatattcttaacatcaaaaactaaatgctacttgtttaaaaaaaaacgtattctc

SEQ ID NO: 347557 - DNA, 791 bp, Cannabis indica
caacttcgctacactccctccgaagaccaagttgctgattgtctcacaaaacccctcactgcctctcctttttaggaactctgcaccaaactcatggtgcttcccaacaccgtgagtttgaggggggatgttaaaccataaaattatctctctttatttccttgtattattttcttgctgagtttagtggtgaagacgtctcgttaaacggacaccggaggtaaccggaaaatccgttcaaagtttgaaaccctaaactttgacttgcgatcccgagctaacggtggcgaaaggagcggagccgcttgggggtgaggtcaccggcacttgcgctttcaatttgtccggcacgtggggctgggcggtggtcggaggtgggtcgccagagtgtggtggtgatggtggtttgtgggtttcttttgtgtttgaagagagagacaaagaaagatatatagggagaggggggacgacagggggtgggtctattttgtatataattaattttttttttgtatatacatatatattatattatatttatttatttattatacatatacttggtttgactcggtcaaaccgagtcttcacattcttcccccttaaagaaatttcgtcccgaaattttaaagtacaacctaaagttgaaaattaaacaagtgaggatacttcatatacatctcagactctaactcccaagtagcctcgtcttccctgtggttttaccataagaccttaactactggaatgtctctgttcctttttagttctctcgccaagatttttacagg

SEQ ID NO: 347558 - DNA, 570 bp, Cannabis indica
aaaaaaaaagataaaatcaagttgtactaaaattaaagtaaaaaaaaaaaaaattcgtaataacaaaaacatgttgaggagttgattattgttttacatattataacgagctcaatgtcttgttattctttttgttaatttgtagttggttttttgttgttttataattgttttcatgttattattaatatattctagagttaattttttttttgttttacagaaaaataatatttttataattttgaaactttaagacagtatttttgaaattttaattagtatagtaaaaatgtaaaaacagaagtacaacagaaaaattataaaattagaaaaaaaaaaaaaaaaaaaaaagtattttttgtaagaaatgtaaaagcatttaaatcttctaggcttcaatcaaacccacttcttctaatacatataggtcctatttggcttagtttctagaagttattttttagcttttagaattaaaaatccttctatataaaaaaataaaaagccctaagctaagatttataacttctcctaaaatgattttttattttaatttttataatattt

SEQ ID NO: 347559 - DNA, 1648 bp, Cannabis indica
cataattttgtgttaaaagttttaatttaccgaaattagtttaaatttccaattcacccccctcttggaaacatatcttgggctaacatttatagccttaagctttagctaactcaccttaaactatatcccttaatctatgccacgatccccatctaactatggttaagctttataaagctattaaattaaacaattaaataactaagccccagactattcggtcaaagcttcaatgatttccctaaatgaatcaaatttaagctgacaaatagttttgatcttgttaattgttgagagctttatcctctctagcccacacgtatacaagcttactagagtaggttatatacgatcctccttaaacttctaacaatctttagtaacttcactcatttatcccacgtgtatcatatcttcaaaaaaattattcctaagcaattgtacaactactaatattactactcaataataataagaataattataaaaatcttttcctaacttaataatatgaccacatcgtatatgactaagcacataataattttaaataataaaagttataagaaggacttaatgctaaagcaagacttattcatagattgccactagtaagattttaattttatgcttaattaattactaaccaaccccattacttatattacacacatatacagtatggaagtagcttacaagtaactaaccccaattcatcaaataaacccaacaatttcttaattaataattcattttagtttactataacatgctacacgtgcatgcttttcatgcatagcataaaatcactataactttattatcataaatttaaagaagatcactcttttactaatttattaatccattcactacttccacatcgagatatctagactattctaataataatcaaatattttggttattacatgaacatgtgatttacccggtttcaatatgtaattagggcatacattcagcgcgggactttccgttcaggtcgaccaattcatttgaatctagaaaggaggtaagaactgtatataatgtgtgatatggatatgcgaatgtatgtatatatttagtgtatatgcatgcttatatgttgtgattcatatagtactaacacttgtacggttgcagtacagagtgcattggtaaagtgtatgatgtctgaaagtagatcgtggtgttaccagcacttgtacgagaaggtacaaggtgtctgtggtacaacacttaacagtactcaaggtgtggtccataccctacctacactagtacgaaggtatactgagtgcatgtggtacatggtatatggtacatggtcgtatcctagttagaacgttcttactcatctgttaagccttgtaaataggtgtatgggcgcctagataaaagtcgatattatatgatatgttatatgcttttcttactgagtctcttgactcacagttctgcttccatgtgtaggtaaaggaaaggagaaagttgaataggagtgagtctaagctgggatgaggttgtacatgtcatggtggctcgacctgcagtgtttggtctcgggacatctggggttaatattttttagtcgttgttcgacctggtgatgtattttgagtattttgtataaaagtttaaa

SEQ ID NO: 347560 - DNA, 789 bp, Cannabis indica
gaccgagatggttcaaattgggatagagatggaatgcttaagttgctacgtgtgtgtgccaagagggacgcacatggagaccaagggggcaaaggccgtaatcatcagaggatggttgtacttggaggtgctcacatgtgacttttatttgatccatatggaagcgtcgagacggttgagtgggattggcttgttaaagcgctagtgggcgtaagtcacacaaagacatcgatagagatgcacagttgtggaatgattgcatcaaagaagccagcagggctaagaatatcgagcgcaagcattgagatggcgctagagtttgagtggaggccagagggctgtgctagtgagacttagtagttatatgagcctgcgaaggtcaaggagggtgctagagtttccatgaaggccagagggttgaatcattggaacttagtacatcatgcaagccggtagagcgtgatgttagtgtggatcagttggatggttgagttgataatgcacgcatatggaaatcggcaggggagctaatgagatagttgactcgagagtcacatcctgcgggatgcacttttagatggcatggtgtgcatgaagagttgggcagtcaggcattcgcgtgtgggcacattgtcgaggacgccaacagatgaagtgggggagagatcctcacgattcactcatcagactagggattcattacaagcatcgagatgagtatcatggagattgatagttgttcaggatgcaaagtcaagaagactcaggacacaggcagtgccggttatc

SEQ ID NO: 347561 - DNA, 571 bp, Cannabis indica
aacacgtaaaccaaactcaactttccttaaaaaaatagtccaaagatgagtacacaatctaaaatattaaaatttactactctcccattttatttatctcaagggccaaaaaactgaaagcgtcaaccaacctttggtgatgaacctatagcttttgtcttggccataaagatttgaaaaatcaaagaacacaacacaagcagtacaaaaagtaaatagggcatcaaaagaagaaaggattaaacttggtgaaaaattattcaatggatagcttaaaaggaaaagtgagaaataaaatgagaaaccatagggcgggtacgggagttaattttcggagacgggggtgggtatgggtttaaagatttatacccgagttagaaacagggcggggaatagatacccgccccgatatgatatatgtatatatttaagttttaaaatcataactactacaattaaaataacttcatatattaggctttttattgattatactcttttttttttaactatacatactatttcacttaagtttattggtttactaagtttttatgatttttttttttaa

SEQ ID NO: 347562 - DNA, 638 bp, Cannabis indica
tcttatttttaaatttaaggttcgatatttaatttaattttttttattaattaattgaccttatttgaaatttaaaataagattatattatgctaacttttaaattttgttaattttttatttaaattaaattaaaaaatctgaaaaatgatattaaattatcattttattttattgaatatttaatttttaaaataacataaaatttgaaaagtagttagcatttttatgaaaaagatacttaggttatttgaaaccttagttttcaaaatgataagtttaattgtaatttatttttattttatttttttattatatattatactctgaaatgaaaaaatattttatttatttatttatttttcaaaatttttttaaaattaaattaaattaaatttaaaattaaataaaccctatatccaactatccaacttgttgcaggtgtatgtgttttatattgtttgagtgtaaacaaagttttataaaacctattattgctttatctaaattgccatgattaacttgttgacatatccaatgatccgattttaacccatggtttaattgccaatatgtaaaacctgtgacagtcagtagtccgctgatccgtaaggggaaataccgggtaagctgtgcaa

SEQ ID NO: 347563 - DNA, 510 bp, Cannabis indica
gcacccaaagcagaacataccactagaccaaatgcccgctgatgtttatcttgcattgaatatgtttaacataggggaagacctgccatatggcctccttctcttttttcaaaaaaaaatatgcttaacatagattgatttctttatacttgctagtttcattttcagatcctaataaaagtttgagatgtgtgaatcgtcattatagttgaacaatgcaatcttttgctaagtcaggaaaaggttatgcttaaagtaagtaaaatattaaaaatggaagctgtttgcagtcttcatataataaattggagtagtttttagatccaaaatggaaagctgtactagttagtagatttattttcaatgactgataatataaaattaaaatatgtttgaaccaaattggggcattccgagaatcgaactcgggacctctcgcacccaaagcgagaatcataccactagaccaaatgcccactgatgtttatcttgcatccaataggctaacat

SEQ ID NO: 347564 - DNA, 850 bp, Cannabis indica
tgcggttcttggtcccgaccttggttctttgtccctagtctggttcggtgttttggcttgagttcaggttcgggttcgagtcctgagtctaggtttgggtttcgatccagattcggctcccaattcgagtctagctatgatttggagtacagaacctggtccggttacggttctggatctaggtccaatttcagttatgattccaagtcaaagtgctaattccagtctcggtcaacttccagttttggttctaattttaggtcacagggtacgggttcgtgtcaacttttgggttttggtatgggttcaggtccgggtgtgggtttcggtccttgtcagggttcgggtccagtgctgggtcccaaatccagacacagactacgggtcttgtccaagccctaggtccagatccggatcccaatcgtgggtcctagtctggttctatttctggtgccgagtcacgagctgggttctaggttcaagttcaggtttgggtcgggtactaagtcccagtcctagttttgtttcccaagtccctatccttattctgggcctaggtcccagttattgtgcgggtttaggtcccagtctaggtttgggttcgagtcctagtcttggttcgggtttaggtctctatctgagttttgatctgggttcgggtttgggtttaggtcctagtcctggtcctagtcctagttcgattctagttccatttgagattcatagttcaagttgggtttgcgttcgggtgggagttctagtcctggtctgagtttgggtaccggttccgatttcagtctaggtcaagataaggctccgggtgtgggttcgcgtcctggggtcttggtct

SEQ ID NO: 347565 - DNA, 997 bp, Cannabis indica
gatctcgaaagataagtatttccaagtttccatctctattagactctccctacgctgactacttagagataaatttacaaagtacgaaacaatggtggaagctcataaaatagaaatcttgactctcgcctaccgggacatcattgaattcttattttgatcgaataaaatgttactagaatggtgtccattttagatgagcttactactctattcaatgaataatatttttgactctcgcctatcgggacatagtattagtttgttggaaacgttggaaaatatttaagatgtgcttgttttgtattttcacatgtctttgttacttgctaaatatatgataatttctaaatgtgcatgaatttatattgaaccatgttattttctattattcattgtagttataaattttgagtcttcattgttggtctaacttaatttgttatttttaatgggacaaataccaaaggattgtcatccgttagacaaacataatagtgttagatctcgatagataaatatttataaatgtaacatctagttgtacatccaaagatgacaacttagactagtgtttgcaatatgaaataataaagaatttataaaataagaataattttgactctcaccttctgggacatcgttggactcttattttattcaaaattatcctttattagtatcctcttatctttttcatttcaaatttgcttaaatagtgtatcattggatgaatggtttgtaaatcatctgcttatgatgtcactctaacttcttcttatgaaattgaatggcgcagatgactatattgctgacattctattctaaaatgatatgaatcctcgatcttagaaaatctcctacttatatatgcttacttgaggcagcttaaacttagagttagattagtagtggtggtccgagctagaataattactcattgtatatttggcatacttttaagttttttactttaaattttagatcccaaataaaa

SEQ ID NO: 347566 - DNA, 795 bp, Cannabis indica
tatagagagagttgtactgtgtgatgtcaaagcacgcgtaatctttttgattgagattatcatcataaagtcatatatatatatatatatcaatataatatatgtatttagatatagagtacctttagataattaactactcttatattacatgttttaaaaagggttttcaaaaacacatgcatatcaaaatattgtatccaagaatcaagctctccatattacacatgtcataattgaggaatcaatttgctaggtaaaataatagaatttttttttttttgttaaattctcttaattattattttacttgtatttaactttttaagtgtaaattttaatgataaaactctataaattactaaattattaacaaatttaaagtgttatctatttatcacaaataattaccaacatatactgcttatgtatacaattttatacgtacatatgttatattattttataatataataataaagtagattaaaatgtgataaatatatgtgaataatatatattaagtgtatggtaaataaatgtgtaacctatgattttataacctacacttttgtaacctacatgttgtaacttggagaggagttacaatttgttgtcacttgtaactcatgtgttgatcacacattattagtgtaataaaagggttgttacacaatttgatgataggattcaaatggtatgaaatatagttgttacaaactatattaatactcatttatatgagagaaatgagtgttgtgtattttgaattctaagtgatcacctatacattat

SEQ ID NO: 347567 - DNA, 520 bp, Cannabis indica
aaatagatcgaggaaagaaattcctcacaagagaattactccctgaagaatattcattaatagcaaatcccttgtagcaagcatgttcccactaaactaaaaaggtctgcaccatgttacaagataacagtgaaggtgcatacaagtttggcgagtacaatgagaactttgagttggaacttctacccacacactgaaatagggaacaacttggtaagtattctcactagccaacttgtcaattaagttcctctaatgtttcattgtgtaggaacccataaaagcgctagtacccactgcctgattggcgtgttctcccaccgttcttcaatggtggcctctgcttcgtaaagccgcccaggggtagccactatgtaatttcaaaagcggacactaagttgtaagcttttattacacattagaccgactgtgtctaaccacttgctcacaagactaacttgttaatgttactctttcagttccacatgcgtactatggacaccacccaaaggaagaaccc

SEQ ID NO: 347568 - DNA, 643 bp, Cannabis indica
ttgagaaatttcctgaggctaggaaatagatctcagcttcaggaaatgggctttaatgatgaggagaatagggtctgtgcagaggtcaaggctctctacgtacagaaggtctttatcgtctatgtgtagccggtctttctccaagctatgtgtagacggtctttctctctcatcctctgcttaggagaacgacataatggttttcccctagtggcatttttttaaagagaagtttgtaaccagtcttaggtttttcttatcttaaatgccttgtactgttttcattcgaacttaatacaattgtatttgcttgcgttattattcacaatgtaaacaactataatttgatcgaatatacaacacttttgggtttttccattgctcgtaatcttcttgtttaagtagttagtaatctaccaaactttatgatttttgagcagttgtcaattctgcctcgcaattgcagttataatctaccttaagcaaacttaaatatactttaaggattttatcactttgtatatttttattttgctcgcatgaatagttatattatctatccgttttctaggtttaagtactttatcaaggcgtcgtgatacctcgtttagtactttcctagcacgcgagaaccgttagtatt

SEQ ID NO: 347569 - DNA, 602 bp, Cannabis indica
tcacaaccatttaatagtgatccaatagttaaaaaaaaatgtaaccatgatggttacaataaaaatgtaaccattggaacctcctccaataataaaatatagaaagtgtttatgtttcttaaagaattactattgtgatataatttcctattgcaactaccaaacaaatatctttttattattattttttaaaaaataataaaataataaaaaaatgtatgatgagtaagaacgttccatactagggtatagccactataccacatacactacgtacctcactgtatgagtgttggtagggtttgtttcatactctgagtaccactgagtgatataccacacacactcagtactttctcatacttgtgctggtatcactgtaatgtactctcaaataacattcactataccaatgcactatataccttaactgtacaagtgttggtagtgcaactaacactttaagcatgcatgtacacataacatatacatacactcagatattgatatcacacattatatacggttcttaccttctttccgacttcaagtgtgctggccgacctgaacgaaaagtctcgagctagatggatgccctaatc

SEQ ID NO: 347570 - DNA, 598 bp, Cannabis indica
ttaaaccatcttaaatcatacagcaacttaacactcaatttcttcaaaataactaacttaggttaaagaaaaacttaaggaaaaagaataggggtagttaccttcaattggaaccttggaactcaattagaattcttgatattcagctgaaaactcacagccccttactgcctagaaaaatcgagagagaggggaagaagaaggttgagggaaaaatggtgacttttctaggtttttctttttacttcttcatacaaaggacaattgactttgactttcctttctcttcttttcttcttaaaggaaaagcttaaattcagatttaaataaaaccaaataagacaaaaacctccctttggcaatttactaatttgcccttaactaaaatccttaaattaactaactaaaaagggtaagttggtaattaaaaccccgaaaattctaacgcttctaatatctactataatactccgatatgattctaaactatataaaatgcgactctctataggcccaacgtcgctttccacagcttccgaacacattcacagaaattaggtaattaaatataaaacagcataaaaatatatatgatata

SEQ ID NO: 347571 - DNA, 654 bp, Cannabis indica
aataccaactgcttcgtttggatctccacaaactttgcctaccaaacacaagaattgtgttgtgcataaatatatatatatatatattatatatatgtacatacatggaagcccttgagtgggctcctcactagcccactttcacattctccttcattagtaaaaggagtactatcgtattaattggctcttgtgtgtagttagcttctggcccttgcattgcatgtactagtggagtttttaggtactgatgatcagctacgtcgtccaccatcaaatagtaaactttctccttttattttctttattaatttttgtattagtagtgggataatgtgtggtgtgaacattttcaagattaattttatgtatatttatatatgtatgcatataaaaggactagtggttatcactcaaggcatattatgttagagattttattacaatggaaaaaaatcaagacattataacactattgcaatataataaaggatcaacaaagagattaaataaatgttacaacaacataatatacaatatatatacactatatatattatatataagaaatgtagaagaaaataagaacacatgtaatataaaaaatatatatatataacaagagaataatatatatgtatacactcactcaca

SEQ ID NO: 347572 - DNA, 560 bp, Cannabis indica
gatataagagatttcatcttgtagctcttgtaggtttgacatatccaccaccttagcgcatagtgacttgaaaaacaagcacaacctagttattatctctcgaactgttttcggcaagactgatcgaatagccactggtaatacatgttgcatcagaatatgacaatcatgagatttcatgccactcaaactacaagtttgtatgtttaccaacgaacttatatttgaacaaaatccatctggaactttcatattgaacaaacaagtacaaatttcctttttttcatctttagttagtgtgtaacaagctggaggcaaatatgtcctatttttcataatctttggagccaatttttctcgcattttcatttcaaccaagtcttttcttgccttaattccatctttactctttccaggaatattcaataaagttccaatcaaactatcgcaaacatttttctctatgtgcataacatctaaattatggcgtacaaccatatgctcccaatactcaagataaaaaaaaaaattgatttctttttataaagtgacttaggttc

SEQ ID NO: 347573 - DNA, 520 bp, Cannabis indica
ctagcgaagaaggagtgtgtcccatagttgtcttctcggtagttctgtgggcccagagcacctaaggtagctcgtcaacccatctgcctttgacagcgtctaacttcttcttgatagtatcatttagggttttattaacagcttccacttgtccatttgcctgaggtttggataccgacgagaagcttttgataattttattcctctcgcagaatttagtgaacaagtcgccatcaaattgggttccattatcagatactatcttcatgggaattttgaacctacaaataatgttctcgaccacaaagtcaaggactttcttgcaggttatagaaacgaggggctcgacctccgtccatttagtgaagaattcgactgctactatcgcatacttagctcctcctcgcgcagtgggtaatttcccaattaggtcgatcccccatatagcaaatgggtagggcgaggtcatcattctaagttttgttggcggtacgcgaggtatatgtgaaaacctctgaca

SEQ ID NO: 347574 - DNA, 562 bp, Cannabis indica
ttcaatataatacaatacaatacaatacgacctaatacggtattccaaacgagtacctaaaatattttttttatatgaaaaaaattgaaagctaccgtggcagcaacaacggtagctacctctgagcaacggccttgtatcttcaatgcttaggcaacatctcaaaatggcttgaccacaaacaccattgagcaagtttgggttgcacaatcccataaaacacgtctctattaaatgatgtgattaaattaataatgaataaaaaaaaaaaaaagacttatgcatgagtgttgtctcatcacattattcaagtacgagtgatttggagtgtttatattatatttaataattaccaaattttaatccataatacaccgataatagtatgatactagtattgagcactatatatcctttttgatgtttaattaattaaatatgcatgagaaaaaaattaaatatgcatgagaaaaaaatcattttactataatgttatatcaccaatgagtactaagtgattatttttgttgtttatgttagacttttatttgggcttacatta

SEQ ID NO: 347575 - DNA, 596 bp, Cannabis indica
agttcccaaaaaatccaactcaagtataatccaaaaaaaaaaattacatcaatattatagtaaaatatttacccttgtgtattttcgttgttttctaaatttctaatggtgaatttgttcatattaaatcacgaagagacatgtagatagagttatgtacgtggaaacagtgttctaatttttaattgttccagaacaattgcataaatattttgctaacagatatttctccacatattagtattaaggtacaagtaattatcgatcagtgataaaaaattactgacaaatagtttcttacacatacacattcacatttttacattttttagttgcaattaagttacacgttagttggtcgcaacatataactattgcattatagttttaacagcaacccacgatccatgcttcttgggattaaaaccttcgtctgatgcaaccttcgttcaacgacctagcaaccttcatctgatagaaccttcggtcaaccactcagcaaccttcgtctaattgaaaccattgtttgatgcaaccatcggccaaccacccaacaaccttcgtctgattgaaaccttcgtttgatgcaaccttcg

SEQ ID NO: 347576 - DNA, 1059 bp, Cannabis indica
ccccaccccccccccccaaaaaaaataattattggtaacttgctgtaggaagtcaacatatcaccacatcattattttttaaaaactgattcaactgttaattggacccaaatagaaaaaaaaaaaaaaacactttaaaacacaaagtccaatggataagaagggaggaaaaaagaataaataaaatagaaataaaattaaataataataatgcaaaaaaaaaaaaaaaaaaacaacaaacctttcaaccgagatagatctttaatattgcattatacattttaatattaatgtaaggataatataataattaaagtaaaataaattaatttctaaaaataatttctcaaaatcatcattctctatagttaaaaaaggaaatatataattttttaaaaaaaaaaaaaacttgttggtaacctactctagcaagtcactaaattgtcacctcatcaatttttttagtacacattaatgggtattactcattaagaaatcatccatttatatatatataaatatatatctgaaattcggtgtttccgcaacaaaaaaaaaagcaatttatttttacactaaatgaacttgataaatcatgttggaaacttgattactcagaagagcaatttgattaatcaaaaatagtaaaataagtaacgcaaaaaataaaaattacacaatttttttttacgtaatgtcagtattctttcgaatactcttaatccacaagatcatgctcaaagaatgaaattaattaataaaattttaaaaattacaagaacagataacttatgcaaagtgtgaatcccgctaaacctttgtcgcaatcttcttgtaaaatatctcatcaatccaatttctggaacacatcgagaagttgaatccattcaattcttggtatatactcactttcttctgaaatgagactggagaaaaattctctcaaagattcttggcttgttcatttattcttcttgaatttgttaagaagacaaatagaaaaaaaaaataatacatatacgaagctatagctgagcacactaagctttacacaaacac

SEQ ID NO: 347577 - DNA, 806 bp, Cannabis indica
tctgacactgtaaaatctctgacttgaccagctgaaacctcttttctgatcttcactaactctggatcagttagctgagcagctttaattcgttctaatagatcagattgcagcgtcaagttatgaagtttgcctacaacaaactcgatgttagatctgaccatgttctctgctaattgaggtgaaatctaaaccatactagttacttgttcgagacccttcctgctcagggcatcaacaactacattggccttccctagatgttaaaggatctcataatcgtaatccttaaccaactccaaccaacgcctctgtctcattttcaaatctttctgagtaaagaaatatttgagacctttatggttagtataaatttcacatccctctccatagagataatgccgccatatcttcaaagcaaacactactgcggcaagttctaggtcatgagtcgggtaccgttgttcataatctttcaactgacaagaggcataggcaataacccatcatcagtaccaccctagaccctgtctggatgcgtcacaatacacctcgaacttctccttatcaaaatgtagggctaatactggagctgtgattaatctctgcttcagctcctgaaaacttgcttcacacttttccgtccatacaaagtgttgattctttttggtaagctcggttaagggtgttgaaattttagagaacccttctacgaactgacgataaatacaataacacaaatatcaaggaaatccttgaataccctattcatgagatccatgaaagctgcgggagcattggttagt

SEQ ID NO: 347578 - DNA, 699 bp, Cannabis indica
ttagcattacctttgcaaaagatgactagatcgtctgcaaaacacaagtttgtcaggctcatatgcttacacagaggatgaaacccaaaacccttttgactagagtaatagctcagcaatctagtaaggtagtccattatcaacacaaagagtaacggggacatcggatctccttggcgaggccttttttacctttgaaacttccttggatacgaccattgaggagcaaatgatagctagtgccccttagacaagtcataatccatctgatgaaccgagaaggaaaacgcagatgcctaagtaagtcttccacaaagtcccaatcaacagtatcataagccttactaagatcaattttcatgatgcacctggtagagacattctttctagtataacccttcaagagatcttgaaaaatcattatgttatgagctagaagtctgttcttgataaacgcaccttgattgttactgactatggaaggcagaacttcagacaatctagagcagatcattttcgagatgcatttataaacagtgttgcaacaagcaatgggtctatagtccgtagctgaagaaggatttgtcactttcggaatcaaagagatgacagtctcatttaaggtgttgggcagccggccattggaaaagaaactcaggactgcagaagaaacatcatcaccaattttgctccaaaggt

SEQ ID NO: 347579 - DNA, 683 bp, Cannabis indica
tcagatatcagactactaacatgcttcctattaggcttttcttaaagcatactaataaaataaactactaaagcaataaaggtttacagaaccgtgagtcgagcttatcactgatgatgattgtacatgttgtgatgatcttcggaagataacctgtcggctctgataccaaattgtaacaccctactagtttatgcgtgttatcgtgatttttgattaactgtgcagctcgttgctaatcaacgagtttattgaaaatcgtgagtaataattttttttttaaatacttataatatcaaaataaataacatatatatataaccgagatcccctgtataaaacatttgcaactgattcaagtacttgatacaaaagttgtcacctagcgactatacaaaatataaccagctgtcccaaagatcgtacgctccaagcctaaccgccccgacatatacaatctttatccgctcgctctcacggttactcacccttagctttgcctatacctacacatgcaaataatacctgtgattcgacaaactcagtaggtaaagtataatcataatcataaatataactcaggtgataattaggctcccatacacccaactataaccctatccttgtgtccaacatgttactgagtctagaatgttcatacggttgggttttgtgccctaaat

SEQ ID NO: 347580 - DNA, 727 bp, Cannabis indica
ttggatggttttttgcaagtaaattgatagttgagggggttttgccgcaaattactctaactaaaatagagccagttatataacataatgagtacaaataagtaacacgcaataattcaaagtgattataattaaaaaataaagggaaaatcagttcctaaaacattgaaacataaattaaaaacaaaactaattctataataaaaattaaattattgtaatattcatttattcaatcccttaatgaggcttcccattgaccttaaatgattgacaaagcttcttcaaagttagcaagatgcatgtttgggtcttctgttggtaatccctcaaactggactgtggattgaaccatctgtatagtgtggccgacttgatctcaaaattgttagcatcaaggtggcctaatacaggatttgacccctatcaagttaggtatcaaatagttcctcaggctacgatcattttgattgggaccattagcctaatcttctacagcacctccattattaccattattgacgttcaaccgtacctacttcttgtttagtccctgttacagctctttccaatcttttcctccttctattttgtctgcaagtcttctcaatttcaaggtcaataggcaatttgatagttgcttcttgacctcgcataaactaattgaacttgagaaaagagaaaaaattgaaataaatagaattagtactgaaattaaaaagaaaaa

SEQ ID NO: 347581 - DNA, 637 bp, Cannabis indica
caaaaaaaacaagcaacaaccggtcagacaccattctcaatggcgtacggttatgaagctatgctgcccgtcgaactcgaaccaccatcccacagaaggttgacgtacgatcaaggtaccaatcacatactccttgcagaatcacttgatgaaatcgaagaaaaacgagcaactgcaaacttaaagttggtagctcatcaacaaaaagtagctcggtatttcaacaaacaagtgaaagctcggaaattctttgtgggagatatggtcctaagaagggtattcctaaacaccaaagacagcacgtcaggcgtactgggacccaactgggaaggaccttatcaggtggtcgaagttctcgactccggagcatacaaacttggtaagtatgacgaaaaatgcaactcattttagtaccacgatactggaatggagaacatttaaggaaatactaccaatgagtactcaggtcgggtagaccacttcaaagtactcaggtcaaatagaccatttcaaagtactcaggtcgggtagaccacattaaagtactattgaacattcgctataagtgaatggcctcttgggcggactccgcgcaaaggtttcagaaacaaaagtactcaggtcgggtagaccactt

SEQ ID NO: 347582 - DNA, 560 bp, Cannabis indica
cctactggggagttggttatctccagcgggtgggtgagatcccttccagtatttgtggaaggaaggaagttatcagttgatctgatagaactaaaattggaggactttgatgttattttgggtatggattggcttgcaaaatacaacgccactattgattgcaagagaaaaatagtaacttttcagcctgagggtgaggacccctttgtgtttgtgggtaagatgcatggatcctgaattcccttaatttcagtgcttaaggcaagagatttgttgtgtgaggggtgcattggtttcttagcaaatgttgtggatattaccagggaaccactagcgggaccggagcatctcccagtggtcagagaatttctggatgtgtttccaaaagagttaccggggttaccaccgaaacgtgaaattaattttgaaattgatctaataccaggagcagaagctgtatcaagagctccttacaaaatggcacttgcggagcagaaagagttaaaagttcaattacaggggatgatggatttaaaatttactagacctagtacttcacc

SEQ ID NO: 347583 - DNA, 893 bp, Cannabis indica
attaaaaactaagaaaaagggaaactaagaaaaagaggaatgttgattacaattaatggtaataaataaaagatttgggcatccacataattattaatatttataacaaatataaatataacaaaattttttacataaaaaatataatttgatattttatttacaaaaatatttttataaagtgttggtaatatttttacttttaatgagcttttatttactaaaatattacttacacaaactccatgcatgtcatctcaaattgcatcatgtttttcctctttttatttcttattattttctttttattttgagtgttagttttcagtttctctttctttttcattttcagtttttcgttcaaattaaaacccattattctccacgatcaaaacccacgatcatacccatttcgagcaataaccatcttcaacttcttcatacagctgtctacattctcattaactttttttttatattatatctttcatttcgtgtgtataatggctattactcgttcctctgcttctccatctccattgtcaaaaaaagcttccaaaataggtcttaattagttgctaacaagtctaaagggaaacgctcagtgatccatgatgatgactctgctttggtccccccgttgctaaaggtgatcatcgaccagtgaaggagaagtcgaaggtttctttgcctgaaaaaaaattccaactttgacgatcagattgaaaagaaagaactagatgtccttcctatggtttgtttgtagtttcattttagttttacccctagccctgaaatttcacttattttgtttaagttggtctttattgctctaatttgattttagggtttagtttttgttgttattttttatgtttaatttttatttttta

SEQ ID NO: 347584 - DNA, 683 bp, Cannabis indica
atattaatttcgttattattttatgttgaatttttttttcagtcttaaaagcttaggggatttattcctcattaaattctctttcttttgatatattatttgcataaaattgttgagtaaattaggagaatttgaagattaaacttttagggttgttgtgttcttaatgatgaaattatatttagatttttttattataactataattgactaaaattgattatgaataaatgattctacattattttctaatacggctacctatttccattaccgatttagtccaaaatcagtaggtttaatgattttctttcatttgaaattttcggattaaattaccagatctaccgttgttttggatgttttaccccgaattgaatccatagatagagtagaaattcaatcccgaataaaacccctcgttttcccgaagtttttgtcgcgtttttggccgaaaagtagctccgacccgcctgcgcacgaattgggtcgcgtgacccgcatgaggatccggctggaggaagaagaagaccctcctctgcgatgcccactcttggcaacagcgcgtgggggcacgtgcggccacttatgacgtcgttttttgacgtttcttttttccagcgtgcttagaatttaatttctgatttttctatgatttttaaataattttttgactccgttta

SEQ ID NO: 347585 - DNA, 532 bp, Cannabis indica
gtccactgttgcaaagattctataggtgtcccatttcacggtggatcactcttttatatacaaagcaagtgtccgatcatttacacaaggattgcattcattgtcaatccatttgtacattgatttacaataatgaagctaaaaaacgtaaacattaataaatgaagaacaatttctattcactaaatacaacaacgtatgcgacttctaatgtgcgagttggctgttcatattcttgtgtaagctcgcagactcagaatacacctaacacttagttgagtctaagatgtttgcgttcttgtatagtcgcacttacggacatcgtataacgagatgatagaacccagtcatgcgagtctatattggcttattgaggttgttggatcatcaagaccagctcgctttatagagaattgatctctatgttttttgcaggaggatcacgaggatactaatgctagttaaatccgttccttggtcctacataatgcgagcctcacgaatgcgactagacttggtcatattcgcatca

SEQ ID NO: 347586 - DNA, 1053 bp, Cannabis indica
atcaaggctaaacatcaaaaactggtagggttacagcctttgacactttctgagtggaaatgggaagatgtcaccatggattttgtagttggattacctagaactaccaaaacatatgattcagttgggtaattgtggatcgtttcacaaagtcagcacacctttcgccagtgaaaaccacctttacaatggattagtatgctgagttgtatgttaaggagatagtgcgtctccatggagctctgaaatctatagtttcggatagagatccaaaatttacttccaaattttggcaaagtctcaagaagtccatgggtacgaagctgaagtttagtacaacttttcaccttagatagatggtcagactaaaaggatgattcaagttctagaagatatgttacgagcctatgtgttagatttcgaaggttcgtggagcaattacctaccattaatagaattttcttgtaacaacagctaccagagtacaatagggatggctccttatgagttgttgtatggtaagaagtgtcgatcacctgtgatgccatcgaaaagatcaaggcacggatgcttacttcccaaagtagacgaaagagctatgatgatcctaagcgccgagacatagagttttaagtaggagaacatgttttcctacggatttcaccaatgaaaagtgcaaaacgcttcagaaagaggggcaagtcaagtcctaggttcatagggccatttgaaatactcaagaaggttggacaagtagcgtattgactagctttacctctagcattgtcagtagtgcacaatgtttttcacgtatcaatattgaggaagtatgtatctgatccaactcatatcttgagttatgaggccctagagttggcaccagatctatcctatgatgaacaaccagtttagatccttgataggaaggacaaagttctacaaaacaagactatctccttagtcaaggtactttggaagaatagcaaggtggaagaagccacctgggagttagagcctggaatgaggactcaatatccagagttattcaggtta

SEQ ID NO: 347587 - DNA, 702 bp, Cannabis indica
attttggttggggaacctgtctactagttggggcagtttttggaaccctagtattttcccatttttgcaatatttagggtattgccatgttatttatcgatagggaaacttttagtttcaagtttaaatccccgaaaagtgatttagcatgtcgctcatcagttttaggaataatgtgatttaggggcctgtaattcgtcgagcagctgttccactcaggttggccgacacacctgaatttggaaacaaggtaagattactataatgatatgcatatgtatttacatgtttagtgtgcatgttagttaagcctgttagattacatcagaaatttatgttggcttatttattattcaacaatatcacatcagtacgcctagagtatgactagcgtaccgagtataggctaatatgatggtcgatagtaccgtactacttaaccatatcacatcaatatggctagattatgactagcgtaccaagtataggctgatattatggtcaatagtattgtcatatgaacgttttggactcagcactgtgttggacacggggatagggttatgattgggggtatggacgtctgatcataattcgggttattgctatgttattgtctatgcttttcttactgagtctgttgactcacagttgctatttccatgtgtaggtaagggcaaggctaaggctgagcagccgtga

SEQ ID NO: 347588 - DNA, 588 bp, Cannabis indica
acttaatggcagatgatttgaaactgtgataattatggtgagaaagaagagaggaaatgctggattccacaaatgtgaaagattacgtttattttccttcagcttcttccattaatgattttccttcccttacttgaaaaaaaccctcaaaaaatctatagttgacactgtcttcctttcggaagtaaataatcttctgaaaaagttccaaaatacaataagcaagatttgaggtggaaaggaaaatcaacataactgagagagagaatttcaaaaattcctacgagttgaggatttttttgaactcaaaatcaatatcattaagaacttttttccattcaaattggaccttcttttttctagatagtaaaccagctatggcattggcccctattgcaagtggcaagcctcgatattttttgagaatctcataagataatttcattaaatttttagggcaacaaccattaaactcgtgtctaaatgtctttttaaaaaatagctcaagagccattttattgtaaaaaaataattatttaaaaattattataagcttaatgcccaacactagcttgaggcctcatcatc

SEQ ID NO: 347589 - DNA, 577 bp, Cannabis indica
tttagtatatacataaaaaaagcctaaaaaactttcaaatgctaaaactgataagaatgcataggtgcacccttttatggagattcgtagatttttttttttgaaacatttctgtaactatgagaaacatattctcatttttatgtataaactatatatatggtataaatttatatatactaatttaatttagtagccttgttattaattagttaatcttattataattgtatcacaattttattatgttattaatggattaattttagtcatcgtattaaatatcaatttttgaccactaatgtattatattaagcttttatgatattattttcataataaaaaaaagagataattgcggtaaaagtccccaaaaacttagagttgatgcaaattagtccccaacctcaaaaattggcggtgatagtccccaaggtcgcattttctgtaagtccgttggtcccttttctaacagatccgttaaactcaaataaaatgccacatgtcgacaaagtattggtccaaattatatttttcatttaaaattttaaaaaataaaataaattatttaaacatt

SEQ ID NO: 347590 - DNA, 928 bp, Cannabis indica
ttatgttgaaaatattttgtttgaatttaattttatattcgcttagagttgaaaataacatttgtggtataaatgagaaaaagaaatttaaatgatacaaaattgaggctaaagaacaaaaaaatgtcattattgaacattaaatctagaaagcccaaagtaccgaacccattcaattttccagtccaccagctcgccccgtggtttgcctcaatgccgcaagaactaactatgaaactcaagaatttccctaaggaaactccgaaaaagcatttctttgggtttagtttcattttatactctcatataatggaaaaagcttcttctaaatcttcattatggcccatggaagtcttcgacttcaccagcatgtcatcgacataaacttccatgttccttcccagcacatttttgaacattttatcaaccagtcgctagtaggcagctttagcgttcttcaattcaaagggcatgaccttgtagcaataaatgcttttgtcagtttgaaagcttatatgatcttggtcagcctcgtgcattttaatttgattgtaagtggagtatgcatccatgaagcttaagagtttgtaccccgaggttgcgtcgaccatccgatcaattcgggaagtagaaaatagtcttttggacaagctttgtttaaatctgtgaaatctacacatcctccatgtcccattaggctttaggacctggttggctagccatatgggatataaagcctacctgaggaaattgttgttggtcaacttatctacttctgttttcaccgcttttgatctcactagatctaggggtcttcgcttctgtcaaactgaatctgccttaagatctatgttcagtgcatgatagatcacacgaggactgattctgctcatgccaaaatgactccaggccaatacatcaatgtttg

SEQ ID NO: 347591 - DNA, 870 bp, Cannabis indica
tttttcctctctgtggaagctttgagaaaatttggtgaaatggtgaaagtaaccaaatgaaatgagaaggctggtttttataggccagaacgggtgtgagacagctgtgatcgaccatcatcgtactgtcagaatcgcaatcgattcgaattctacagatccaacagttgggacaagcgttcatcaaggcggtaggatatgtttgagtacttgactgacacccatttaatgcgttgcatcattaaatggataggaaacgaatcgttgtctgtaaaaagctaataattgcagtaatgatggtcataaatgcatccccacgcgctcagggcacgtgctaggaagttaataagacaactggaggcacctaagcaagcctcgtttactttctaccaaaaggatcagcatttaacatgcttcccggagaaggcatgagggtttcacatactcccggagagcaaggctttaacgaagcacctccgggaggtatcaaatcctatctgaacagtcacctcgcatttaatgccgcatgggagaaggcgtattgaaactgccataagtattaaagtctgacggcgtaaccccccttctgcagctactatgctatgattaatgagcctagtgacggctactttatgagaaatcacatcaatcaagaaaggataatggattacatccatctaacccctaaaaagcctagggattagaccatgcatttcctatgatatactcgttgggaatgtgtgcctttactgaataatacagaaagacatgtacctcggttctggagatcacccacaaaaacactataaataccccccaaactcattaaagcaggggtcgagaattcatagtttcataagaactagagag

SEQ ID NO: 347592 - DNA, 579 bp, Cannabis indica
ggatcaccttgtctaatacccctcccaagaacaatcggtcccagctcatgtccgccatgaattattttatacctcatagagttaaccgtagcaataataagatcaatgaaccgcaagtcgaatcccattttactcatcatagctcgaagaaagccccactccacctgatcataagctttactaagatccagtttgagcgccatatagccttctttacctttacactttcttttaagatagtacataacctcaaacgctatcataatattatcagtaataaggcgtcccgggatgaacgcagattgatttgaggatataatctgaggcaacacttctcttaaacgatttgcaagcaccttagacactatcttatacaagacgttgcacaaggatatgggccgaaggtcacccattgaagtaggctgtttctttttcggaatcaatacaatatttgtgtcattcagtccatcagggatactggcattcgcaaagaattgacaaacttggttcacaacatcactcttcactatttcccagtatttttggaaaaaaccaagggtcataccatcaggaccagga

SEQ ID NO: 347593 - DNA, 973 bp, Cannabis indica
tccaacaagcataactataatggcccaattttttgtattggatattccatcaacctttaacgtcatattaggcctacgagctttgtatgacttaaaggctgatacgttgatattccattcatgccttaagtttgtgaaaaataatggggtagggtgtctaagaggaaaccagcagtttgctcgggaatgttataacgttgccatagccaaggataagaaggaagtatcctctagccagagctcggacaaaggaaaaaacatttctaagtacggaacttcccaaggcggggataaagatgtgcatcctcgacttggggactcaagcagcaatgttgaacctgtggaagaactagaagagattgagatcgacccaaatattctggccagaaagctcaaaatttgaaaggtttgttggtcgaagtaaaattagcactgataaaatttttgagagcaaacgtggaaatttttgcctggtcacatgaggatatggtcggaattgatccttctgtaattttgcacatcgtaaatattgatcccacctatcgactagttcaacaaaagcgaaggctgttggacaaggagcgagctctagccctgaaggaagaggtagagaagctacgaaataacaacttcataatttaatctttctacccgaattcggttgctgatcctgtactggcacccaagaggtttgtgtgttgatttcacagacctcaagcaagggtgccccaaagactgttttccacttccaagaatcgatcagcttgtggacgcaacagcagggcacgaaatataacaggaggagaagagtggacgatcagcttgacgcgccaatcgtgcaacccgaaacccttgctcaaaatcccgctcaaagatatgctgatttgacttaggtcggccaagaggctgaacaggttagtccagccgtgcaggcacagttggacgaactaaaaagtatgttccaaggcctggc

SEQ ID NO: 347594 - DNA, 415 bp, Cannabis indica
agttcctggtaaaataacttccaacacatctctgggttgcaaactacacttgaggatcataagaagaagttataggaggctcttgatgagcagaccattaaggaggattatatcgacttgtcctccaaacttacctacgagtttcatttgcacaaccctcaagctaaattgtcgtacatgggtagtacaacttttgtggagacaacattggctcgtgggaaggcactgtttgagagccagatggagacagaccaggttgctgcttatcgagggggtcatcatcagggacacactgttgggttttgtgccctaaataaaactcatttcaatataatcagatttacttaataataaagatcataaatgatatttttatgttgcatggttcacatgatttatttcatgattatatgca

SEQ ID NO: 347595 - DNA, 727 bp, Cannabis indica
tgtcattaaatttgatgattaggcacttcttatgaggttggtttgggttgttgtttgagtaattttgggtgttttggcacttttttttattcattattttgtccaaaggccttgattttattaatttgcaaaatggccctccggaccatataattccaaacacagtgtgtcagaaattgcagacgcctatttgcaaaatcataaacattgttagatttcagactgaggtcattctgcaaacagtgtagggtgacgtggaggagagagggacagacatttatagaaatattgtagaatcaagatcatatgttaaaagattgtatttcatagtgtattaaacgaatcttattgtgacacatcaattaatttgaccattttaagatttttaaaaaaaatctgtataaatgtttaattttttaataaacgaaaaattagttaatgtgtcaaacttaaattagtttaacacagtataatacacaattttttaacaggagatcttgattcaatattgtagggaaagggaagtggttcctgtctagttatgtagatttgacaatttttttttcacgatgtcttttgtaatacttttttcttcaattttttattttttattttttacgtaaaaaagtaaaactatttttctttaataaaaaaacatgttctataaaattatttttactttttaatttttaattaaaaatcagaattttaaaaattaaaaaaaaaa

SEQ ID NO: 347596 - DNA, 936 bp, Cannabis indica
aatatgatttttatctttttttcatataagagcaaatctatgtaatatatgtatacattacattatttctctagagacaattcagtataataactactttatgattagtatatataatatgatgttaaattttaataagttttttttatattgttaaaactttatagattgattttaaatttttgttataatgttcgataatgatgatagtttaaattgctcaaaccgcaccgcaccgcaccgcattttcgcggtgtggtttttgtggttataagatctcacggtgcggttgtggtttgagaaattagaaaaaccgcacatgcagtttggtttgaaaaaaaattacaacctgcaccacccacaccgcaaacacctctacctataaatactctcattttctttgggtagggggaggacaatttttaatttacagacactttgctaaaatttctagagagcattctctcaagaaaaacaagaggaatagagaagcttacactgtaaacacttataatatctaaaccggtgcccagagaggccaatactactaactcgtggactaaggatcattaacgtctgaaccacgtaaaaatatatttgtttattatttattatctattatttccttaagttctaaatataatcggtttcccaaaatattggtaaatattttggtgctttcattgagagctgaaaagagagaagcatcacctactagacccccactggccaggcgccgaaggtgagccttctctctcccctccaaattctgtgcaatatgagacaaatgtactgttggggattatttaccaagatttagatttactaccatgtatgttatttaacatcctaattatgaatttctaaaacaatgtaatttaaatacatataaagtttaagaaaccttacattagttgcagcggaattaaatgactc

SEQ ID NO: 347597 - DNA, 517 bp, Cannabis indica
aaaaaaaaaaaaaagaatctggaaacctctcgtcattttttttttggtattttcttcgtctccatagtctagaggcttgtttgccaaaaccccacacaagtgttccaaaaatcatcatttactttttttttcagtttttatcggtgttcgtttggtttgtctggtttgaatttctgcttgaatcctcccttgaactgtttgattaacgtttaaagatgtcaaagaaaaatatgagtggaaaaaaggcagagttgtgagctttgttgagggtataagccatcaaatttgagtgaaaacacgagtgaattgagtgaaattattattttttttagtgaaacacatgagggagtgtggtgaggtctctctttatctattctaacttatttttgcaaaattcaatcatgtcaaaagatccagaagaaaatattggtaatgaaagtacaccacctacggtttcaaatttacaacttcaagctttgatgggggagatgacgaggatgatgcgagaggagtgtga

SEQ ID NO: 347598 - DNA, 730 bp, Cannabis indica
atagtcgagctcaactgctctcagttgagctattttttgaaattttgattaataattataaatctcaaccatatatagtcgagttccacgtatttcacttgagccctatacttttaatctataataatatcaaccacttatagtcgagctcaactaacgtcaattgagccatttcctggaaactaatttaataattataaattttaaccatacattgtcgagctcaactattgtcagtagagccctatgttcaaagtctgataaatatataaaaatctcaacgacatataatcaagttaactcaaaccaatcgagttctaactaaagcttacacacaaaaacactaaaatattcaaatacactgatatgaattaattaaccatagtaatttgaaataagcatatccataaaaaaattagaatttagaagtcgtggctcttagggggcatgtcttcttggagtgaccagactttccacataacccacaccttttaatccatatttttgccatttccaattgatgggattctattaatttttcttctaccacgcttgattgggacatttggaggaaaaaccttcggaagtaattcaacttcatcgatatcccaatcttctcgttgaggcactagataaattgtatcaacataagccaacgcccaagtttccaacttataataattggagcacaaatcatatacttctattccagcttgttcatatgctgcta

SEQ ID NO: 347599 - DNA, 613 bp, Cannabis indica
ttatattgtaatgagttttatttagggcataaaacccaacagagggacgccaaggtggtcgaggcggaccatttgaaggagaagttcaatgctttggagacagccggcctcgagctcttcttcgatttttggaaggctaatcccgaggccaattttgactacttgggcgaggctaaagacatgtaccttgagtactgcgcgacccaagttgcttatggtgggaaagaggcggctgcttcaacttctggccaagcttctggccaggctgctatttcttctcctgctcgaacaacagatcctcctgctccatttggctcagaagaaccgaaccaagagcctgggactacagctgtttaaacacttctctttttatctccttatatatatatatattatatatagcctcaaggccttttttgagacatcatgaccgaccaagtggtctttaaactttgaattatttttcattttttggacaatgggctgatccgacagcttttaatcccggtactacgtgcttttgtcatccttaacaaatttcattctcagtttataattgctgtgcaattatgattactttattttaccaaatgctttgtacaggtataggtgc

SEQ ID NO: 347600 - DNA, 900 bp, Cannabis indica
ttttttaattaaatataaacattaagtataaaaattaaaatttttctaatcctgtaataatcacactcatatatatatataattagattcatattacgtatgttaattttattttagtttttaattttttttaatattataattttaaaattaataatattcaatgtagtaataattattgaaatttaaaaacaaaataatgatctaaataaaaacaaaaattactattatactttgtaatagtaattaaaaaaaattattattcgtcataaatttatcttcacaattaataaaaatactcatctggttaaactatcaaaatattcaaatttaatttaaaataatatttaaaatttacctaattctaattatcaaaatttgaaaataatttttaataaaaaaataaacaatataaacaaattttattaattgaaacgcattgagtacattaattatatttaagtttaactaactacatggatgatgaccctttacgtggcaacatctaataatttgttatttttttattataaaaaaaaaagtcaaccaataatttatcataaaccaaaaattatgctatatacccacattttatatagaatagatataattatatatttatgtatatttatttatttatttattttaaaaaaagaaaaataatcaattcaatttaaatttaaatatttaaaaattaatattatatgtttgatattttgtttttgaaggtttagagaaatcgtgaatttgaaattaaaagaatttaatatttttaaatattattttattttctattaaacataatttaactcaatttacttacgtaattagttattttaaaataatatttaaaaaaaacacttgaggttaaaattaataataataattatccttctacta

SEQ ID NO: 347601 - DNA, 969 bp, Cannabis indica
aatatacttctaatattctattgatcttcacaggttacccacctttcaagaataaagcattatactattttcgctttaacttccatggttctcaataaccttctttaattcttaacatcatagccaaaaatatcaaccttggaattttacaagattagactattccttcgtatgaattctgtattctcatttatagtataaattgtctacactgatagacaacatattaactctgtatgtccaatcgttactactcggtcaaaatcataagatcccatagtacataattcgtaattatgtctttctattctttctatgagatctcctaagctgatctactgacttaacttagtaacaagttaagtattcatttctgatagattttcaattagagcacttcttatttccatccactactatatactcctctcaataccttgtcaatctctacttattaacacatcacttcctcttgataatctctggaacgactatcgattctgcatcctaatatgaatcattctagcgtactttgtcctcactcatacgctttccgggatgactccccaaaagatttcccatattgagattacccaagttaagtatgcttaactccaaggtaagctcatggtgggttatcagaaagtagatgcccctttttttgtcgttcttaattgtatttcttgctttcattctttcattaataaaattcaattgccatcactcccttcattaacctcttgcaattcctcatcggttttgttcacttaaacttgaggaattcccatcttattatcaacttgaatcttgttcagttctacttattttaacttgcattaatttctcttcaactgagacaactttaaatttcccaaccacatacagttaactactgttatgaagtgaattgatgtaacctatacggtagaggcaacatttctcataccaggtacctgttggaaattattt

SEQ ID NO: 347602 - DNA, 986 bp, Cannabis indica
ccaagcccctaaagtaaaaaagaaaaactcatcactattcaaagaaacagacactgtgggggtcctactccgtaagacaagcatttttgaagattcacaagatccatacatggaccaagaaatcaaccaggatccctatctctttcagtacaatggattggaatgggagattgtttattctgattatgatgcatgtccaccagctggaagtgatgaagaggatgaaccatcaggttggcacccacttcaagaagaccccaattatgactcagactacaatgctgatcacgagccaattatcgaccgctaataagaagaacaaagagattccatatctcttatttgtgtaagatagcaataagtaaaaaaattcctaatagtcatgatgtttgtaggaattttttcttatcgtttggcaatttctatgtttgtcagtttgtccatttattgtcagactgtccttttctccgtttgtcattttgttggtttgtccttttgttgtcagattgtccttttgtgtatttgtttgcttgtaggaaatttctaggaagtttcctatttcgtatcctacctcatgtaaatggctatatatagagccatccttttcattgtaaggatatatcagaaaactttctactaaataaatttctagtgttcttctctcaaaatgttcttctaaattttctttaagagatttctgaaatagtgatagtgtgcattatgggtcaaactgaatagatattactgtaatgagttaggcatcactcaggtgtaaaggtaactaagcaatctatccttcataatcataagtcacgctgcaaagtcttaagtcgtgttgattcttgtgagaacattgcttaagctgtctttatatttgatgatgcttagcttatagcaggaactctaataaccggttccacaacaaaataactaaaaataaataacacaataactcaaaaaaacggttataattaaaaaaaaataat

SEQ ID NO: 347603 - DNA, 585 bp, Cannabis indica
taagtttatttttttttaataataaggtctatttatcattttatagagtgcaaataaaacttctcaaaataaaacaatatctttctttactattattttttgcccatctttatgatatctagattaaagtagacaagttcgaaatgtgaggatggagtttcttctaatatggttattgtattaaaatctcctaaaattactaattcaatatgatttatttattatagtttgttacataactctaatttggacaatttactatacatgttgatcttgagttatcttatgtggagaagaagatggttaataaaaacttaactcaaggtatttattcaaggttaaaagataataaataaattaaaaagtaaaacaaagacaacattttcccacatttaaattaaattcctccaacacatgtcctcaaaagttctacaatttgttgtcttttaagcctacaaaacaagtctatgcttaaactcttgataatgtcgtcgttttcaaaggctgtagacaagttacaagattttgaagaacaaagagaatccctcttcttatgttacaaacaaagctaaagaaaaatggcaa

SEQ ID NO: 347604 - DNA, 1789 bp, Cannabis indica
ccatacttatgtttcatttctcctctgatgtcttgtggcgtttgagtttcttttatgttggtaaaccttggcttgatgtagtttccaatcaacttcattgtagcttgtcttttgtctgcaaatctgatgtttagatcacaagtgtgaatcacctttctataatttttttgaattatgaatgacttggttgctctgtttctaaatgccgttagtgcccacttgcattttggattcaaacaataaattttgtatgttctggcgcaagactttttcactttgaattggaaattgtttctaattgcatagaaaccaagcacactttaaagtgtttctttgtccttatatatttgtgcttcttctacttcaggatgttgtggatctgtgattagtagtttgtcataatctgtgatttttgcttccatgtttttgttgttttaagttgctcaaccatctcctctgccacaagttttgtgtagtcaataaagtttaaatttttcccccatcttccagcattgtccctttcattgtttgttgttgatttgttgagtcttctgttgttgatgcattgtttaccatcggttctattgcatttgtctatgcaactaatgcattattattttccaagaatgatgaattgatggtatgtgttgggttgttgatgacattcacatacaatggatatgttgtgaagtcaggctccttcagttttagttgtatgtagaaatgtaggctttgatcatcctttatctgcaacggttggtatccttctttcacttggtattcagttgcaggacaatattttcttggttccattcgaagtcctctttcagcttctgtattagttcatcatacttacaatcgattgagatgtattgtcttgtagcttcatacttttcataatttattcgatcatcaaattgcccattgcaaaagactaggaatggaatgtcttctttgtcctgtgatgttgaaattattattagtgtaagataactattttgaaactattttgattctgttattgctaatgttagtaatgtttccgaacatttttgatactaattttttaaacaaaaaataaaatgatctttatgaaatagaaaagaaacttacttctattgcctttcttctgttcaagtcttgtattttcaattctgaaccctatttttttcattttttttgtttgaatactattatgaaactataaaaaaactgaaatgcaactattatgaaacactttaaatatattaaacaaactaactattttgtcgaagtattttctcttttttctctgtcacaataaattcctgcaatattgaataaaaccataatgaaatgatgatgcaactataaattaacttgaaaaacttggaacttaactccagttaacatggttgtagcttgattctatttggaaatcagaaaaacgactatgcaactgaatataccttatctttattgtttatatctgatttggattgattgggagctgttgatcttttttgttatttcaagttagttattgccaattgtaaaccctgtgtttttttcaagtcagttgttgcaactattataaaacttacaatgtagaagtgatcttttttttttaccgtcaaacgaattcctacataatatataaactattatgaaacgataatgcaattataaggcaaccaaaaaaataaataaatagactcatacgtaactggttgtagcttaattcgaattttctctttttattgtgtttataaaaaaaaatattccacattgcaaatcagtaatcaaccaa

SEQ ID NO: 347605 - DNA, 653 bp, Cannabis indica
atgatgaagaagattgagtcaaagagaaataaatgaaaaaagaaaaaggaaataaaaaatattaaagttatttatttatttaaatcattttaaattattttttaattgaaataatgagttggctcaataatatttaaacacgtggcatttttgttagcatttaacaggtctgttaaattgagtaccaacggacttacgaaaatagcgaccttagggactattaccgtcaatttttgaggttggggacttatctgtaatatgtgatgtatatttgtatgtatatgtgtgtgtatatatgtaatatatgtatatatatatttggataattttttaatgggtattaaaaaaattgatgaggtggcaatttagtgacttgcttaagtaggttaccaacaagtttttttcttaaaaaaattatatttacttttttaattatagagaatcgtgattctgataaattatttttagaaattaatttattttacttaaattattatattatccttacattaatattaaaatgtataatgctaaagatctatttcgattgaaaggtttgtttttttttttttttttaggattttatgcattattattgttatttaattttatttctattttttttattcttttttcctccctttctatccatt

SEQ ID NO: 347606 - DNA, 717 bp, Cannabis indica
gaattggaaattgtaatatgaacctttgagaattagtggatgaacttaccctggttcggggaacccaagcactagtcggctgagttgtgttctcagtgcagacgaagcttgtaaattgatgtgtgatttacagcttgacttttaattcatgttcataattcatatcttgaaatcaatcaatctaaagatagacaacttggtaatttgaatcattaaaatctacaagttgcactttcagttaccattaaaataaccttcagggtctagaccatcaccaaactcatcacaaaagggcatttgtactacaatgtcaattctcaacatcatagtgttaaatttaggtaacacatcagctactaacaactccaaattttttgttagaacataagtcccaacctcactacgagtatccttaacaatacttggtaaaagactaagatcgatatagacattcttcttcaccaaagtcacaaaaaagggaacaaattcaacgagcttcttcaaaagtatagataaatataaacttaaatacttatcattacttataactttaggttgatacattaactcttcgtgtaattgtaagtcacttctaatatcaagtcatactgtactttgtcaaacctcgagttctttgtacaaaaactcaaccaaatgtgagtaggttctgtttgtatcaatcttgaatgtcaacttttttctgttgggttttatgcc

SEQ ID NO: 347607 - DNA, 397 bp, Cannabis indica
aatcaaataagtaaataaattatcacattaaccaaataacacattaaataagtaatgaaattaaatttgtttctttattgataattgaatagaaaagattacattgaaatagagttttattttgggcacaaagcccaacactccgatcattgcttctctgattgcaaccctaactcctgggtttggttatcatgatgaatcccattcatccgattacacattgtcgaagtcattttcttcaaatgttgctccaaatgtcgagagagttatattgtgtctttgcctatggtgagttctcgtaccaggtccaaggtgtccacaccaaagaaaccagaggtgattctgttaggattttatgacttaaataaaacccatttcaatacaatctgatttgtta

SEQ ID NO: 347608 - DNA, 763 bp, Cannabis indica
catctacatgtagtttccaggttggcctatcttcactattacttggctgaggtgtttgtaccggctcggggtttcttttgggtatgcttcttccttgcctatgcattctaccacaaaagtctgctaaggcttgacctttgattgttgttcggggttggaaaataatttcgtattggcccaactccaccgcccacttgtgtcaccatccagaagcatctagcttttgcaatatttggcgtaatggttggtcagtgtacacccgaacaggattagcttgaaaataaggccttaactttcttgttgctagaataaggcagtaagcgagtttctctatcaatgggtatcggccttcggcctcaatgagtcttttactgatgtaatagactgggtgctgtatgctgttctcttctctgattagcacgacactcacagcatgcttcgtgacagctaagtatattccaagttcttctccgtccagaggttttgagagtacgggaggtttcgcaagctgtgtttttagctcttggaaagctttttcacattcctccgtccactcgaattgcttgtttcctcgcaggatattgaagaatgggacacacttgtctgttgattttgaaacaaatctgctgagtgcggcgatccgaccagtcaaactttgcacttccttggttttagttggcgacttcatatccaggagggcttgaatcttctctggattggcttcaattcctcgggcattgacaatgaagcccagaaactttcc

SEQ ID NO: 347609 - DNA, 1987 bp, Cannabis indica
tagttgaaacactataaaaggaacatgatactctcactcatccaattaatgtcaacttgactatttaaccaaaccttgatgagagagttccttccttagtgattcaaacctcctccattgctcttcaccatattcgaaaccttagtgacgagtgacatgcccacacatagcaagtcaagtactcaatcatagtgagtaagacggtggtaaccaaacccgaaggagagaaagagatcgatcttgataatgctctgctacacaaaggaatcaagggctagagatcttgaacggaaagagtcattatattccagtgcaattaatgtaaggttttcttaaacccttatgtgtttattttattgttttagagaattcatatttaggatgttaagtcaacatacttgttagtaaatctagatcctcgtaaaatattcccaacaaggtttgcatgtttgatagctattctaagtgattaggcgtggtccatcctatggccatttagataagaaagtgtttgtttcaataaatactaattttctaagaaaatgactatgcttgaaaacaatgtagcaaagtagaggagataatttttttcttgattccaaattgttctatcatcttattctatataagatggtcccactgcctctgttgtcttgacacaactgatgaggccaataccacttatgttcttagacaataagtcacaataccttgtcgtagtgggagggttttaaggaactcaccctgttatccattgttagtttaaacaattaatcgattgttagaatagggaactgagaagtaaagctaagaaaactatggttaaaaccattcatatggagtaaccaaaaagttttctattacaaggacaagataggaaatttttgaaaataagtctattcaatggacttaacaaatcttcctgttcctagtattgaatgtttaagtttatctaaacctagagcttatggtatgcctggtactttacttactctggtgcaagcaacttactttagtaagatgctggagcattttgataatggcaatctatataagcttctcgacttctagatatatattttttttatcttaggaaaattttcaactatttcaggaaagataaagaccaatgaaaaaattccataggatcaatagtgggaggtctcagatatgctttgttatgcattagaccagacacctactgttgagtgggagtaatgagttcgtatcagattaatctacgtaaggaacattggaagataatcgactaaatcttaagatcaagaagaggaactatatattggtcgataaggtggtaattttaatactcttagactacaccaaatcaggtttctaaacttgcattagtgcaagaaagtctactgatgagatggtgattactctgggggtagagcagtgattttggagaagtgtaaaaaccgatctaaatttataactctaccagtgagactaaatgttaaagttgcaggaaagatacctattcagcctatggagagttctatacaatttttggcatagtaccattaatttattaactactagtgttacttcctgactaacacaaaagtagttgccaaatagttaagaatctggtatccctagaggagtagacatatagagaggaatttcagaatatcaaggattttgtgattaaggatatgtaatggtggagaaagtttgtattgaatgcaaactgtagatcctattacagagagaatactacgtaatacacttgatctggatatcaaaaacccatttaaatataatcagatttactaattaatataagttcagaaatcattttatgttgcatggttcacatgatttatttcatgtttatgtttaatgtataaattctacaaagttctgaacatatgtaaatatatatatatttgttcatgattataatatcgtcagcacagtcgaatgtaatcatgattatatgttcaaaagtttaattacccat

SEQ ID NO: 347610 - DNA, 584 bp, Cannabis indica
tatttttcaatttttttttttgaggcggtgatcaaaatcacacaagattatcaaagcagcaatccacaatcggcgacggcgcatcctcgaaccaggatagctcattatctaactgaagggcatgctttgccaaaccatgcgctgcagaattctcatcccgagccacatgggacaaaactgcccccagaaatttagacaataaagctataacatcatcaaacatcaccttcccattattaactagttgtctttagaacaaggcgaaactgaaaaattgcaacaccataacaaaagaacacttatattagaatgacaaactttaaaataaaataatatataaaattagaaattaacacacacacttcatagctctaactctcagcaatactaaaaactaaaaaattaagagaatttctaagaataactagccaaaggtattatcctttggctagtaacaacaaactagcaccctaatataaaagtactgaaaaactatatcaaacaaattaagtttaaaattaggattgtcagtaattctttgtaattgtaggcgccctccacaaaataacctacaaaataacaaa

SEQ ID NO: 347611 - DNA, 780 bp, Cannabis indica
gatgttggccaaagtcgtataaggcggcctatacgtcattgtggcctggaaatgtgtgaggaataagtcgacgaaggtttcccacgtcgatatcgacgcctcaggtaattgggtaaaccaatcatgggcattttcctcgagtgttgccgcaagaatgcggcactttgcgagctgtggtacctgatccacttccattatagtattaaatttttcaagataatctatcgggttagaagtacctttatatttgagggattcggataaatgaaacccttttggaagttgagcctgtcgcacttctgtagtgaagggcgaggtaccatgcaacttgtatatgggcttccgttgatgctcgagcattttcaaagcctgcagaagcatgctttggtcaatccccccaatcgcaggagtcggggctactgtgactgcgggactcgcaactactgcggcgagattcgctgggacattgatcccagtggtcgcgatcggcgcggtaggcgggttattataagtgttgacaccctgatcgtccgcatggggatcacggagtgtctcagtattgcgtgggacgcgagagcgagccctaaaaactgcgttgaggtgatcacgcagatcacctcgatgtacctggtaatgtcctccctgttgcgtctgtacagagccggaccttgtgtacctacttgcagtgcgaccatgcgatgacgaagaggctgattctgcgtcgttgtctcttgatggtcgactgcgaggattacgccgttcagggtcttcatcaacttg

SEQ ID NO: 347612 - DNA, 984 bp, Cannabis indica
gcaagctaaattgcaataaaaaatcgtacaaaaacgcctattgcaactagcgctgcaatcactttagaaatccaaatcgtaaaattgaaaaaaaaaaaagttaaaaaaaatagtatatgtagtgatttccctataatatcatattaatacaactaatagaaatcaatgacacaaacttttcttttcatacatttatatacaaaaaataataaatacataaaatatacctgaatttattaacactatttatttggccaaatatataattgttttaaaggctaaatataattatttttttgtatttattgatttcaatgtgtgtaattatatgtgttatatattgagagaatacatttttgtgtattctattgtatttaatttaaataaaatttaattaggtgtattattaattatttattcattgtaaatgtggagttcaacggttccacataatgacaataacatgaaagcatttattataatataataaactttttattttatttttttcagtatttattaattaggcctattattatttttttctgaatataattaggtgtattattaattatttattcattgtaaatatagaatttaacggttccacataatgacaataacactactataatttctttcatatttttttagagcgatattttctttcaatatttaatatgcgttttactatatatttctatttatttagccaataaaaaatttcacatgcaaatcaaatcattaatgacaaagatcctgccaaagtaacaacaatataaaatcataattactaacatatataaaaaaaattattagcatattatatatatataaataaattaatggacgcacagtaataaactgaaaaaaaaaattgatagtcttcatcattcatctaaaatgaaaatatatatatatatatataattacttttaatgggtaatactcattgatgggaaactaaaaaattaataaagtaat

SEQ ID NO: 347613 - DNA, 943 bp, Cannabis indica
aataaaaaatatgaataaaaataataatcacattctcataataaaaatcatattgaaacttattaattctctttttttagtattaagaaactcccacattctacaaactctcttgttaagaaaaagaacactaagaatagagaactaaaattaagaaaaattaaatagttaattgaattatgaaattaagataaaattattaggatatatgcaaaatttagaaattgaattaaaaaaaatgatcggtgattattttttaagatgtatagtgtatacacatatttattcttgtaaatatttttaaatttgatttttttttcttttttgaaaaaagaaagagaaaaatgtaatatagattttaggtaattttatttatttaaatacttaataatactaattaaatatattttttttttcatatgaattttgagtgaataatgggagtgacaaccatttttttaggattcaggatcatagtatatttaggatatacacatattgatatttttttttattgttaagcatttacttttgtttggtattatagattattagggtatgtgtatatatatctacatctatataaatatatctgtaggatttaagattaaggtatatgtacatctatataaatatactagggtgatgttacgtgccgagccacgtaaatgttagttttatttaagattttttttattaaattatgataactaaggtggtatgattatttgaatcatttactgtgtgtcggccggcagactgaatgcttattgagaagaaatcgataaaactcagtaattaatacaactattattgcacaagttccagctagtaaaaagttacgtgccttatgttaggtattttctactttatttaaaagtgatacaattaataattgaagaaaaaaattcaaaaaaaaataataattgaagaaaaaatatta

SEQ ID NO: 347614 - DNA, 874 bp, Cannabis indica
ttgaatacctctaagatgtcaccatactgactacctcttttgatcgggagcaatctttgtgggaatggagcttttggaatgaacggtaaagtttgactcgattcttcaaccgagtctttggaatgtgaactttcaggctgactcttttcattttctttcaatgagtctttgtttatttcagcatcagtttgaggtatgtaatcaggtttttcaataatttttccagacctaaggatagaaattgatttagcttcttcagtaggtctagatgtacttacctcgtactgactctttggatttggaatgggttgactgggaagttttcccttttccctttcagctacagcagtagcaagctgacccatttgtgtttcaagttttaacatggactgttgggtagtttgcatgaactgctgtaaggtatcctctaaagatggttttctttgttgttgcatattatgttgggcataactctcattgggtgagttgtattggtccccttggttcattggaggttggttctgtcttcaagaaaaatttggatgatttctccaatttggattgtaggactgagcaaataggctaccaaatgatttcccataagtttgaagagcgtttacttcttcaaaaaatacctcttagtatatagccaatgatggacaggactgggcactatgacttataatatagcataaggaacaaatttcattcctatgtataggggtattcatggattgacttaatgacatagcttcaactctcctagttagatttgctaatgatgtcttgatatctacatcatctttgacatcgtaaattccacctctcttaggtatgttggaagcttttgatctaggatcttggcaattccact

SEQ ID NO: 347615 - DNA, 590 bp, Cannabis indica
tcttaggtatgttggaagcttttgatctaggatcttggcaattccactgttgagaatttacagaaagattctcaagagactcccaagcctcatcccctctaaattgcaaaaattttccagtgtgcattgattgtaccatttgtcggtttgaaggagataatccatcataaaagtattttaccaatctccatttctcaaaaccatggtgtggacattttagcaataaatctttaaatctttcccaacattcataaaattcttcgtgatctttttgataaaattcggagatttctctcctaatattatctgttttagacattggaaaaaatttggacaaaaatttattaactaattcatcccaagtagaaatagatcgggctgggagtgaattaaaccaggctttagacttatcttttaatgagaatggaaaaagtctaagcctaacagattcatcagaaaaattttgaaatctaaaagtagagcaaatttctaaaaaatctttcacatgcatgtatggatcctctttacctaacccataaaaagatggcaaaagttaaattatggaaggtttcagctcaaaatgtgtagca

SEQ ID NO: 347616 - DNA, 605 bp, Cannabis indica
aaagagaaaaaatcgttgaaatagaaatatcatcagcagaatcacttctcttgccaaatgaccaaactacaaaactactataaacaaatagggacaagccataaaatggcacaaaagccataaaaagcacaaaagttgtaaaaagtatcaaaactatcaaaaaacaatgcaaaaacccatgagatctcatatatacttttacacaactattaatactataatagtcaaaacaaggagtaaataacatcttaattagaattaaaatatcccacaaaatatatatttatatataatataatattttaagaatttttaaatcaaaactcaactaaaataaaatatatttatttatggtaaaaataattaatttaataaaatttaattatagttttaaaaagtaatggataatgaatgcaaaaagacattataaattaataactttatgtgaaacaaaataatacattttgagtgaaaaacaatagtaagaagatataaaatattacacaaaattataaatggtaagaaaaaaattaaatgataatgtaaaaataaattttatttaaagtaatttaatgagtttcataaatcttttcctaaaaaagtat

SEQ ID NO: 347617 - DNA, 535 bp, Cannabis indica
gtgactaatacttttagccgaccttttagtcacaacataatgataataatttataattagccacaaattttttatctttagtcacaagttttgttgtgactaaaaaagcctatataatagggagttaatttatactgcactctttttcttttgatcgagttttttttagcaaatttttaaatgagacaatttttatgaacatcaaagaggaagtattataaaatattattatagatgtccaaatcaatgtattaattactactatatatatttgattatatttcattttattttattaattaatttttcattattctaattatatttttgtattatatattattttataacaatatatatttaaattaatttatttatcatgcaaatatgcaaagctagtagaattaggagttagcctttggagggactgagaagtcaagagccaaactagaatatttgtttgcaaggtcctacttccttatttatatatatagatttttacattatattttgaaatttttaactttttattttt

SEQ ID NO: 347618 - DNA, 745 bp, Cannabis indica
tttgttaaaaaaaaaaagttttgaataaacaattaaagaaataacaaagaatgtccatgtaacaagtgtgaaataagttattaatataattaaattattattttatctaaccaaatattttgaaaatttagggttgttaaaaacaacctaaaatatcttttcaaaatttaaaatattcaaactaattttaaaatatctaggcttatttgaattattttatcaaattaaattaaatatctaataagataaatgatttgaaaataaccaaatagatattttcaaattattttctaatcttataatttaataaaataagatcccagtactcacttaagcatcggagggtcgacgacaaatattattttatcaaattaaattaaatatctaataagataaatgatttgaaaacaaccaagaagcctatgcaacaaggctcttacaatcgggtactattggccgacaaagacgatagattcgcatgattttgtcaaaagatgcgacaaatgcagaggttcgctcaagtgtcacacatggcacctgaaaagctccattaaacattaactccttggcctttcatgaaatggggaatggacatcgtcgggaagatgcctacagctccaggacaaagagttttcatgttggcggtaaccgactacttcaccaaatgggtaaaagcagaagcctacgcacaagtcagggatcgagaagtcaaaagctttatttggaagaacgtcatatgcagatt

SEQ ID NO: 347619 - DNA, 590 bp, Cannabis indica
gtgttccggggatccctattatagaagatttaaccaaaagaccatatacaatagcaattcaaaacacaattcaaaatacagcagatatagccagtccaaaataactcctggcaacttggcacacaggcaggtagggtcaatatgacattgttggagaagactgtcatctcatggttggtttaattttttgttacccttacctgcaccacagagcacccgtgagtcatatagactcaacaagaaaagtaataaagaaggatacattaaatagctaatcatacatttcattatcataaaatgattaaaccataacattcaacagtaggtaatataaccagtcatatgcataaaaatagatatgctcatatatttgcattgcctaatcaagcaagctcgtgtcataatgcaatatcacatataatattattgcaccaccaccacctaatcaagtgagctcgtgccacaacttggcactaatatatcgcatcgtctaatcagatgagtccgtacctacgcttggtacttatcatatgtcactgacgtccctacttacgcccgatacgtcgccaggaagaaacccaacaatggtt

SEQ ID NO: 347620 - DNA, 807 bp, Cannabis indica
agctcatccgcttcctagccattggcgcgagaattgtagttctcttgggcaacagggcccttcattacttcctctagagtggccaaggtggccgcctccttcttagaagatttcgtcccggaggtaggagcagacatttttttctgaaaaaaaataagaaatccaacagttaagccccaaaccaaaccctaatgttaaaaagggaatgggggtcccctaaccgctcaaaagaggccccctccggatgcttgccaaaaaaggaaaccccaaggactttccttaacaagcatcgggtgccaaaatcccaaaggcagcgacagtggaggaaaggaaaataaaaaagaaagagaagagaaaggagaaaacgccgagggtggaaacaagaatcgccctatgccctaaaagcgtcatctcgacgaaagagacaactctaaaagaaaaaagcaataaaacaacaaggacgcaaataagtgagattctacgcagtacacagcaaatccagtcatttcccaaaaattcagcacttaacccagacattctaatcatgttatacaaacaaatagtagacaaggctggcttttataggccagaacgggcgtgaagcagctgtaatcaggcatcatcgtacggtgagaatagcaatcaatttgcattctacagatctaacggttgtgataagcgctcatcaaggcggttggaaacgcttgagtatttgactgacacccattaaatgcgtcagatcattaatggacgggaaacgaatcgttgcctgcaaaaagtaaaaactgcaatgatgatggtcataaa

SEQ ID NO: 347621 - DNA, 1542 bp, Cannabis indica
gataactaatcagattgtaaagagttttatttagggcataaaacccaacagttaacctattgagaagtcctcctttggtttctttttatcttgaggcttctttgtcttttctttataattagtctcttgattatcttcattggagttacaagactcaaccatattgcatgtattctcaatattcgcttgataagaatacttataaatgtaaaacttgatttctttatcattagcactcaagcttaagtggcctcttcaaacatctataagcgcactaccaattgctaagaaagggcgcccaagaatcaatggcatatccttgtcttcttccatgtctaataccacaaaatcagctggaaatactaacttacccactttaatttgatcatcttctattattccccttggataagtgaatgatcgatctaccaattgtaacgaaattgttatgggttgtaacgccctaaataaataggcacgttacccaagatacttaggaaaccctaatgccctaaactggattactaataaaattagcgcgagaattaaactttagtcagaaaccatttgaaaataaacttgtaacaatttaaactttacaaactaaaagttacaaaagtcgggatcccaaaaatatttacataacattattacaagtctttttccattggccgacctaagcggaaaaatagagtcacaaacatacatctccgatagaccccaacccgcttggtctagtgtggcccgaacatgtacattcgccattcaactctcatactcatggctgatcagaaacagctttaccctttcctgcacagtagagcacccgtgagcctggcccagcaagatagcataatataacaataacatctttgttacactatataaagagtaatgtcattcacatatgcttgtatgacacagaccttcatgttacgctcacatgcctatttatgtctacgtagcgtagacctacgtgttgcgctcacatgtctaaatacaataaggccttagaatggttcatctcggttctagttaccaagtccaacctggttatgccttgaacacataaccctaaatctcaatatacataaatattcaacatggcatagcatttacacaacatatatcactagggtaataaccctaggctattaaccgctcatgttagggtgataaccctaatcccagttactaattactcacatatatcatttataatataagcgccaccatgcataactctacgtgctaactactgtcttacctgatgtcccgcaataacaaagattccaaatccccgggtgctcctaaccaggtgtcggtaatcctagtcacaaattctagaattttcacaaatagagttaacccctaattgcattctcataaaatatattcatggcatttaaaatacagataatcacatagagctcgggacgagctttccaacgatataaagaactccaaaatcagagttcggatcacaatgttagaatgcaaatctgcccaaaaacttgagggtgtttggttttgtgccctaaa

SEQ ID NO: 347622 - DNA, 1201 bp, Cannabis indica
caacaaacaagcaacatttaatacaaaaacacaataatttttagaagactcaaaagttatcttactaaataaaaattaaactaaagctacttaaaattaagcaaccaaacacattttcactactctcctcacaatagttgcagttttaaagcataaaaaataactctataccatagagttatcacaccccaaacttagagtattactcgtccttgagtaatgaagaacaaaaaaatcaaaacaatacgaacagatgaaaaacatgacaataacaataacacatttgcaatagagaagatattgctcataaaaatttggttagcgacaaaaatgctctcagaattagatggaatggaagtgaattggtggtagttaatatgccttgaacttgtgtgtttcatgcgagttttacatgctatttatgtccttaattcttatcaagaataattcaatcaataaagtgtacatatgcttcccaccaataccttgaatttctataacaactaccatcaatcctcaagtttaaaaagttttcttccataagttgagctagtgcaaccctctccgctaatgtagcttagctttacatgttagatcaaaattggactttactaggcttgtaatgtgaggcttaggtttaggtttggtaaaagatgatatttcttaggcttatgacctaattatctcaatttatcaaggactcttcttttcctctcaaatgctcacccaaactttcattctcaacctacaatgatcacccaaaattttggtttgtccttgataaattttcagcgattaggttcgggttgtgaaggatgaaatttatgtgtgtgtgggtctattaactttgatgggtgttaggaaaaactaggcttttggctcaatgaggggtgactatagagaatcaaaattttttgggttagcttgaaaggctcaatcctccaaaaatggcctaaataatttccatgttgtaaagctatcccagattttgcttcaagaattacactaaccaattctagaaccttaaattctctcaaagtgttaatcgttctacaaaatcaaagcataatgggatagcataagtcacatctattttgaagaattactcttaaacaagcatttagaaaaattagcatttttaacacacaaaaatcagtgcacatcacaaatgaaagaaaatggatatttttcatcatcgagc

SEQ ID NO: 347623 - DNA, 580 bp, Cannabis indica
ccaggtggcttcctccaccttactgttcttccagagaatcttgaccaatattatggtcttgttccgaagaaccttttacttcctatcaaggatttgaattggttgttcgtcataagataaatctgactgtagttctaaggcttcataactcaagacatgagtttagtctgatatatatttccttagcattgaaatatggaatacattatgaacaactgacgatgctagtggtaaggctagccggtacactacctaccccactttctcgagtatctcgaatggctttataaacctaagacttaacttgcccctcttttcgaagcgccttacaccttttgttggtgaaactcgcaagaaaacatgttctcctacctgaaatgcaatattttgtgcttaacattataataacttttctgcctccattgcaaagcaagcattcgagccttaattttgtccattgcctcattggtcctttaaactaattcaagacctaaatgttgggttttgtgccctaaataaaactcatttcaatataatcagatttacttattaataaagatcagaaataacattttatgtt

SEQ ID NO: 347624 - DNA, 606 bp, Cannabis indica
atatataaatatatatttataattgtgtacgtaattatttttcataattgtgtacgttatacttatagttatttagaattatttataattgttcacaaaattttaagtaatttttatagtgtaaaaaaataagatttaaacaattatttactatacggataagaaaatataatcacgcgtacaataaaatattttaattttaattaatggtttttggagtaaaaaagaaaaggccaaatgtgggaatgttaatgggcctataactagagtagatggaactttggatttgagtaggaatggtcatctaaaaaacttagaaaaatttatatcccattgtttttttttttcaattttattttaattttattgttacccaataattattacttttttactattttatttttatactgatatactgtttttttaataaaaaatttgttattctatttttaacacacgcagcggttcattgtatttgcatgattttttttattattatattttaggggtgttcatccgatccaatccgtacttttttgggccaaacaacatccaaatccgcactaagtgcggattttatattttggatccaatccgatccgc

SEQ ID NO: 347625 - DNA, 989 bp, Cannabis indica
tcaaacccaccacctacgggttttgataggactcggtttggtaacatagaggcccaaaatcaattcatgagaattaagaatagggcttatattgaagatcggggtattgaattcctcgagaatcctttgagacgtcaacctcggtttgaaacaattcgagctcaaatagagaggatgaagtgggggagctttgtggatgctcagggtcgggctaatgttactatggcctgtgaatttcttgtaaattggcccgaccgccagaattgggaagtaaaggtgctgggaaagaaagttcccgctactgctgatgcgtttaatgtgatgttctttgtccaagattacactagggaagaacaacgcctcaaaattattgaggaggaagagcagtttgatatggtggatgtggcagagactgtggaatttcctgggttgaggttccacgacaacgatggcacagaggggtcgccaaatatcctataccggtgtgaattgaatccagtggcaaaaacatggatgtactttgtaagtgctcggttagtgccaaataagcacttcttcgatgtccaaatggatcgactgaaatatgtgtacgccataatgaaggggtacaacataaacattggacaagtcatcatgcatagtattgattagatcgtacagggagccacgggaggtggttttggtttggcaggagttatcacagaactctgcggggcatatgaagttccccaattggagtatgacaacacggtgttgccattttgcaagatggacatcgcctttgtcaacaggctgaaagagccacatccctatggccagcctccacctgatgcaccgcaaggacgtaggcggcaacgagagcctagtgttaaagaagaagaggagcagcccctacaattgcctgggcctatcgattccacaacgcaatacactcatgcacagctgagttatataattcagcagaagaaccacatgcaacaatacatggt

SEQ ID NO: 347626 - DNA, 613 bp, Cannabis indica
ctataattctaagctccagtaaattagattatttaatgagtctcatcaaccaaataatcccttattttttaattccatgattactctactataaatatggaatttcactcttaatattcatagaattatatttactgagtttaactgtagtgtccattgatataattaactcaagtgattagcgcccaatgtgttggtttgtaattagttttggttaaaatatcgttttacccttctaattacttctttatcctttagtatctttaattcactagtggaagtataattcaagatcccatctaaatttgtacacaacattccaattccataattaacacataaagggaaccaacatttgatacgttaggaaagttaggattctataattgtacatcatgtttccagccatccatattataagatcccaaaatagaagttataagaatcatctcctctaagaaatttaatgagtgaatcaaaaaaactaataacatgaacatgagttcatgataactcaagatttaggacgatctactattgatcatcgttgtgatatgaattaggtctttatgataaatgacatgtaataaagacaactttattcatatcgatc

SEQ ID NO: 347627 - DNA, 533 bp, Cannabis indica
tttttaatccatataattcagccctcagccctagttgaaacactataaaaggaacatgatgctctcactcatccacttgatgccttcaaccaaatcaaacctagttttctatgtcagacaaatagttgatgagagagttccttcgttagtgatttcagcctccttcattgttcttccatattcaaaaccttgagtgaaacagtgaaatgcccacacatagtaagtcaggtactcaatcatagtgagtaagacgatggtaaccaaacctgaaggagagaaagagatccaagttcagatcttcataatgctctactacagaaaggaatcaagggctagagatcctgaatggaaggagtcattatattccgctgcaatcaatgtaaggttttcttaacccttatgtgtttattttattgttttagagaattcatatttaggatgttaatcaacatacttgttagtaaatctagatccttgtaaacaattcccaacaactggccttagagccatggtaatgatttactttcatgtaa

SEQ ID NO: 347628 - DNA, 1367 bp, Cannabis indica
taacttttatttgttaaaagtaaattgatttaaaaattcattcaaataccattcgaaaaaaaaaaaaatcattcaaatgaaacttaccacatgtcattttgctaatatcaagtgcatttaaaataaaaggttttacaacaatgttgtagtatttaagtacctatttttattgaaaaataaaccaaagttgcttaaaatatcttaagattatggtcataggcatagcttaataattacacaaagtaagttctaaattcgaattctctctcctccaaaattaaaaaaaaaaaacatattaaaaaaattattgttgaccaatattttcgacaactaaataaatgtaggaaaaaaaaagtaagagagcctagaaaataatgatacaaaggttttacgtaattcaggtgttaattaatcttagtgattgtctttacttcagcaccatttttgcttaagaactaaaaatcattgtacaaatgttaggaaaatatgagatatcaatagaaaaataacaataagatgaacaaagagaccaagaaaattacaactctatgcaacaaaattacaagaactatagattaaataaaaattacaatcccaaagcacaaaatacaaataaagagaaagaaagaatgagaacaaagttacaactcatattaatgtataatatgccacattttaatcttcattatatatttattaaataacaaatatataacaacaaagaggatgatgccctatttataggcaaatgttattagcaagagctcataaaccactactacaaaaatatgctttttatcccggttttaaggggcattttatcccagttttcattaaaataaaaactgagatgtatgccagtgggataaaagttcttataaaaactgggataaaaaatcactttaatcctagttattatagagaaactggaataaaagattatttttaatccaaattttcctttaaaaaccaagataaaaagtaattttttatcccggttttcctataataaccggaattaaaagtaaaaaaattattctaaaactaacaagcaatgaatcactacagagattttttttccttaataatatttttgacaaaatatacaataagtacagatttaaatcccgaaaaatcagtacaacaacagccacgaaccaccttcgacaaccacgaatagcggcgaaccaccttcgacaaccgtgagtcattatcaacgaccacaaattaatagcgaccatgaagcttcgtccaccatgaaaaaccataaacccgtcgaccatgaacctgtcgaccgcgaaccttcacacctgaggaaagagagaaggagagagagttgatcgacatttcaaaaaattaaaaaaaaa

SEQ ID NO: 347629 - DNA, 589 bp, Cannabis indica
tcctcaagtagatctaaggataattttaaaagtcatggttttcttcttgattataaaactctcttctgtgagtcaatatgttcacttcaacaagcagcattgcttccgagccaaatgctagcgagaaaggagtgtgtctcgtggctgtcttctcggtagttctgtgggcccagagtacctgaggtagctcgtcaacccatctgcctttggcagcgtctaacttcttattgatagtatccattagggttttattgacgacttccacttgtccatttgcctgaggcttggatactgacgagaagcttttgataattttattcctctcacagaatttagtgaacaagtcgccatcaaattgggttccattatcggatactatcttcatgggaattccaaacctacagataatgttcttgacgacaaagtcaaggactttcttgtaggttatggagacgaggggctcgacctctgtccatttagtgaagaattcgaccgctactactgcatacttagcttctcctcgccgagtgggtaatgccccaataaggtcgattccccatatagcaaatgggtagggcgaggtcatcat

SEQ ID NO: 347630 - DNA, 889 bp, Cannabis indica
tatcatcaaaataaatgagtgaatgacttttggtcaacacataggggtgttcatccaatttagttcgcactaagtgcagatttcatattttggatccaattcaatccacgccataacccaaattcaatcagtaaaagtgcagattgaattgattattttagattagttgctttctaatgttgaattatttaatatttatcaaaaaaatatattttttttacaaaactaacaacagaattaaataaattattgtttttttatgtctctaacaacaaattaaagttaataaaataacaaattcaaaaggaagaaaaaaattgtatataaatttgttttagattatatttcccttacacaaaaattgaacacaaatttgatctattaaattttaaaatatatttatatatgcattaaatttttaaattactattttttacattaaaatattaattgtacatataacttttttataatatcttttatatataaaatgtgattatttaagggtttttgttaatttaacataatattttaagaatataagaatatttcattaaatttaacggtgttattagtagggttagttttataatatatataaatattaatattatttattttagattagtttaaatatataaatatcaatattatttattttcagttaattatacttatactaattttaaattaatttaaataaatatataaatattaatatattatttgtaacattattattttttattgttatttttaatattaggattatattcaattttaatattcttaaattttatatttactttcttcaaatttttaaaattttaaattaatttttttaaaaaaaaaagaaaactaaaattaaaaatttaattagtttccttta

SEQ ID NO: 347631 - DNA, 1493 bp, Cannabis indica
atgccaaacatgcactaaattattcctcatccataaatcttcatttttctttatgcaaaaccataaatcaaactcattaaacaatcagaacccaaaaattcaagggcaaccaccaccctcgaaaatcggttacgtctctctctttttcttcatgtcggcctcaatggcggattgatgaacattgacgatgaatgcgagccaccaccctccgccttcctatgcgactcaaacaaacctccttcacctctcccttgctcgcattgctctcagatcgaggcaccacaaatcctctcattcttctcggcagcccaaacaaaccatgtcagatctctatgtttcaccgacatccatggcagatcactttttcttgctcgtttctgcatgttctgcctgtgtccatgactaatccttcattgttatttcttttttgttttgctctttttagctagtttgggcagggatcgagagattaaaaaatgaaaaaaaaaattgattatttgtttttataatttatttacaatatttataaaaaataataatatattcataattatttttcttatttttaaaattagttaataaattttttaaaagaaattatgaagtggaccaatacttgagtaacatgtggcataaaaatattctcaattatatttaacagaaaagtagtaacaggagtgagtaaaactaaactttagatatttaatccgttgaaataaaagatgtggtatttaagtatataaattgaaaacatttatgacatgtttactaatcaggattgggagtgataggtatggtaatcacttcttttcatttgtttactttatttaatggttggaatactctaagggaaaggcataaaattaggagaaaagaatgggagaagttttcctcccaatttcttcaggtataaaccattacgggtaatgctattttttagttttttatttattttttattattaaaaacaaaaagacacttttgccaccaaatattatatactttattatatatattatataccctaaaccctaaacaaactacttttctattctctttcgtttctttttttgcagcagccattttcttcttcttcttttttttctgagagaggaacaaccacatatcaacatcaaggtgagttttaattctttatcattcattatatatatatataatttttgatgatgcatgtatgatgcatatattgatggtttatgtttattatcatgttttattattattttaattgaaaaacatcttctataatataaatctgacattgacatatatattttggtacaattgaatagtccaactcaatcaccatcatcatatttaattttaatttttatattatttattatattttatattatttatgtataattgaaaagtcataatctattattctcacaacttctcacgcttgtcatatatttcataatatatatatatatatttcataacctatatatataggtcttctctat

SEQ ID NO: 347632 - DNA, 821 bp, Cannabis indica
tgtatttataaaataaattggaatctttttaaaaaaaaaaaaatcggtttaaggcggtttaaaccgaccaaaccaagattcaaaacagtcggttttaagataagctctggattggtcggtcggttttcgaattgcaccaatccagaccgaaaactgaattttgaattttttatatagaaaaaaaccgaccgatgctcaaccttatccccaagttcaaaattcttgtaattctatcagtcatctttttaaaagacttgttaattactctctaagatgtcacgtgttaatattaaaagaaaataatttttttaatacacaatggcttttttatatattcctgctagtagaagttttttttttatttatttatgtataatattttttaatattaataaaagaaaatgaaaataaaattattaaagtttttaataattttattattatttatttaaataatttttatgttgtgaaccaataaatttttgacacgtgaaaattttaagaactacaaacagagcactattaaattggtacctacggactaatgaaaatatcgagcttaggaactatagtgacaattttttgagattaagatttatctgcatcaaagtaacttttttagggactcatctgcatcaaaataaatttttttaaagacttatggcacaatttaatatcaacatgtgacatttagcgaggaattaacgaatttgctaaaaagaagatcaacagacttacaagaatctcgaacttggagactattgtcactatttttcgaagttaggttggggacttatttgcatcaaagtgaacattttaag

SEQ ID NO: 347633 - DNA, 734 bp, Cannabis indica
gtggccccagtgcacggaccacacgttcttggagaactcgacccgacgttggtcctagtatacggacaacacgctcgaggagaactcagcatgggaatggtcagaaccccgggatgagggatgaagagctcaatcgtggaggttcccaatcttttggagaataacttatgaaatggaaaatcaccggctgagatgctgtctggaagaggtgcagcgtcgaaacgctgagttcaagcgtgatgcagcctcacctaaggcgacacagggaatgaatcctcaaaatcaacctaaacctgaagtgagaagaccacgagcaagaccttgtggctcatgaaccaggagacaggaaaaggcccgggaagaacaacccagggaaaatgagacaccccccaaaaattagaacgaacagccagatgggagacaacaaaaaactgatgatcgagaaatccctaatgagaatgaggaggatcttgggactcaaccaggagaacggaggtcacctactagaaatcaccaacattattcccaaacccatagagtgaggactagtacagaccctaatggggaaaatacgacaaacggctctcgggaggaaagaacagagcgtgaagaagcaagtgtgatttcgaggcggtcaagaacccatagtcgatcaactcgaagaggagaaagtactcaacgagctaatgatcaagaaagtatgggaaccaataaatctacgagccactcaaaga

SEQ ID NO: 347634 - DNA, 1137 bp, Cannabis indica
ggttatggaaattgaccattttacccctggcttttgaaataccctagttttgggttaaagggcaatttggtcatttggttaaatggtgtattgggtggctgcctattggagtgacacctagctttagtttatttcagctaaggttaaggattaaccttcaactcatttagaggaaaatcaaggaaaatggaaaattaaaagaaaaatcaaaatagagagttttctctctttctctctttcggctgaagcaaccagaggagatcacctcttttcaccattatttttctggaattcatctaagaattcaagtgttcttggagctaaggtaagcccttgtagcacccttccttaatttttaagtttttactttgtttgagtttgtgcttttgtgtataggggctgttagggttagaaatatttagaattcgaattatagggttcaattgagttggtattagcttcttggagctggttttgatggttggaatgggtgttgtgcaagtttgagctttgagttcaaagctttgaactctaatggcataaattgattcatttggtttttctgtgaaatactggttgggaaatattgtctatgcattgtttaggtactctggaaagtttggtggcatttgatggaaaattgagcaagaggtgaagggtttggggtgaactggtgcaaaccggctagccagttttgccagacctctctagccggttttggtaggatcccccaaacacttcatttcctcgattttcatccattttggtgccgtggttgggtgtttccctaattccagagtttgagtaacctttagggggtataacagaacctagggttatgggttcgggtttcccgggatcagggttttgaccatgtaacttactcggtttcatgatgtgattagggcatccatctagcacgagactttcggttcaggtcggccagcacacttgaattcggaaagaatgtaagaactgaatataacgtgtgatatcaatatctgagtgtatgtatatgttatgtgtatatgcatgcataaattgttagtggcactaccaacacttgtacagttaaggtacagagtgcattgatatagtgaatgttaattgagagtacattacagtgatactaacaca

SEQ ID NO: 347635 - DNA, 542 bp, Cannabis indica
tctccaaaccatcaactttttcaaaaaaaacaattaagcttgacagatatgtcactctcaaccacagaaggttgtcctggaataggaatactcttgtaagaattgtaatcagtgtcaaacttgaaactgctcaatttcaaagctttaaactcagcagcagtgggtttcatatttgatagttgcagctgagaaaaaaaatataaaaaggaaaaatatcgataaaagtgactctttaaaataataaaaaaaaaaaaaacaacaacaagacaactaataaaaaaccaaaaaaaaaaaaaaacaaacagaaataccttgtatttggagacataaaaaatactagtctttaaaatttcgaaagtcgactggctgctacaggtccactgaataatccttggaatactagaaatttccttttggcactacttaccattcatgtacttataacactcataaaactaaacttgaaatacatgaggacaacatatcaaagtgtaaaatacactcggcctcttttctaaatgttaggttatttttggtattaa

SEQ ID NO: 347636 - DNA, 544 bp, Cannabis indica
aatgatcaagcaccaaggcatgctcatgttacaaaatggccctagtgtgggtgtgccatggggcagcacgccacactaaacatataataacatatgcatatcattatattaatcttacctcgattccaaattcaagtgtgccggccaacctgagtggaacaactgatcgacgaattacaggctcctaaatcacatcaattataacataggtaagtgacacgctaaatcacttttcggggacttaaacttgaaactaaaagtttccctatcgatggataacatggcaataccctaaacatcacaaaatgggaaaaactagggttccaaaaactgccccaaccggtagaccggttcccaaccggaattccagttccaacaggtccccctgaaccgaaattctagttgagtacaggaaagcttcaaaaaatcactacaacctcaaagcaaccccaaacaccacaaaaacttccagacctgttatctataccccatagtgttgggttttatgccctaaataaaactctttacaatctgattagttatc

SEQ ID NO: 347637 - DNA, 630 bp, Cannabis indica
agagattctagggtttatttgtattaagagactttattaattctaattaataaatatgttaaatggcaattttatttgataattaattttaattattaaataaatagttttggcatttaagtggttgaattggaaaaatggtatttttgagaaaataagagaaattgttgaaaaatggcaaaattggaaagtgggggcccacatcctatggccgaccacttgaagggattttaccatttatttttcaatattttaatgccaaataattcaaacctaaacctaggtggttgcctataaatagatagtgatgccctcaaatcaaaagatgatgaaaacacttgcctttagtataagtttcagccatctattctatgccattcgaaccactcttctctctttttctcttcatattttcaaaccctataatgatagagtaagtgcccacacacatcaagtggtactcaatcataatgtggaaggctgtgaatccagattcaagagaaggagattcgggctcagatcttggtgatactctgctacagacagatacaagggttagagatctgagtggaaggagtcattataattctactgcatccactgtaagttttctcaactttatatgtgttt

SEQ ID NO: 347638 - DNA, 962 bp, Cannabis indica
ccaccaccacgaaaagtacagtacttgaacatgctctgaggtgtgtccgggcacaaggtgaccggaagtctcaccttccccatcgagacaagtgttgttccgttaaaccctgtgagttgagaaccactcggggagaggtctcggtccgtcaggcctatcgcagtaaaggcctctttgaaaagcaaattcacggagctcccgttgtcgatcaggactctagccaccactttattggcaatgggagtctctatgaccaacgggtcatggtggggaaaacgcaccgtcttcgcgtcttcttccatgaatgtgatgggttgatccatcagccgggacctttgagctgggagttgggtaacttcccaaacctcattgtgtttcatggccccttcataccgcttcagttccttccgggtagttcctccgatatggggtcctcccgagatcatggccactctcccgttaggtctgggtggtaggccggggatgtgctgggcatctccggggggaacaactggagccaatactcttgtcgcaccccctggtgttccctgtggcaaaactccagccgcttgacccaggtggtctccggtagtgtgtattttgcctagtagcaaagtacacacgctcttgggagtccgttaactccgtttactgggtgtattggggagtgtacccccttttctgtcgcttttcctccgtctgggtgctgcctttggaggaccttttaatcctcaagccctgggaaggaccgactaggctggcagttggagcgaagtgcgagggggcttttccatttatccccgagggattcccaaaatgggacgatgcgggggccaaggcctggccctggctatatccgggagttgcagagaactgtatgccgctcatcggtggagctgctgctggcacagtgcccgagggctgggctccaggcacatatcctgctatcccggtgggataat

SEQ ID NO: 347639 - DNA, 837 bp, Cannabis indica
ttggcgagttgaatggttatcaccaatggatcgacgtgaggaattctcaggtttttctcatcttcctccgtgaatgtaatgggaggttccttggttttcacctttcttagaaggttttggggcaaagaccgactactcgttctttatctctttcacatatcttttctgggcattattgctttcccctatgatatgtagccctcccgaaataaccaagatgcgctctccttccacaggaataggttgtaacccttggttgtttgggttattgggcagatcgcgctggttgtatccctggccctatcttttcacgtactgttaaaaatggcctcgagcgatgagactttctatctcttctttcaattggtgacattcgccggtcgtatacccaatatccttatggaatttacaatatttggtaggatctcttttgctattgaattcctcataggctcgagtttgccgaaggccacctcctgctcatgtgcgaggtaaatattctctcgagtttcattaagctcggtataaataatatacactggcacgtatttgtcatgcttcatttgttttttttctatccttcgacggttccttaatttcgtccattctctttggaccagaagcccccgagttatcaattctcgtggaagtagtacctgttgaaacattgctgggtttgcttcccgagcttgttttcaacaagttcatttccttttgggcttcttccttccggacaaacacctgagccctttcgctgaactcagtgatgcttctcaccggacgtccttataagtcatcccacaactcgccccctacggttaatggatcagtagagat

SEQ ID NO: 347640 - DNA, 575 bp, Cannabis indica
ggaagagattgaacccccttaattatggggagtacaataaggctgggcaaccaattgatgctgacagggacgtcctggttgagggcgttgattatgtcagtgaggagattgctgaggcggttcctcataagaggcaaggtgccttgggcgccaggtgggtgagtcctccgtccaagatttcggaggcacgcctccacactctcgaccaggacggatacctgggcgagctggactgctacattcccgcccacgacaatcatgccacaaaccctgataaggggatgtgcgcctggttgggggctcacggccagcaaggggtgctgatgcccttgcgtaagtacttccggggtgtggcggactttttccgcctctggccggctcagattactcccaagggcattaagtatttgtccgctctcttcgtcctctacgcttcccagggatgggatgctccttctgttaggatatttttagtattaaatttaggttaattttagcacatttttcggtttaatttaaatcatgtttggagcatttttacgcttttatcttttaattttgcagatttaaaatag

SEQ ID NO: 347641 - DNA, 1109 bp, Cannabis indica
gctcgcacaattcaaaagctacggtctcagacaaattccaagagaagaaaatacaactgcagacgcgttagctcaattggcaagcagcaatgtaagtgacaaggcaaatttggcccctatccagttccttgaagagcctagcagtactggcacggaagaaatcaaaatcattgacacgtccccaaactggatgacaccaatagcaacctacctcaactttggggaactcccagataaacgaaatgaagctcaaaaaatgattaggaaggcagcacggtatatcatagtagaagaggtcatgtacagaagaggattcccgatgccattactcagatgtgtcacacaagacgaagctgtacgactactatctgaagttcacgacagattctgtggaaatcacgccaccagacagagcttatccaagaaaattctaaggcaaggttacttctggccaacgatgattgaatatttgagagcctatgttaagaagtgcaacaaatgccagagattttcaaagatatcaagagctccgcccaacaagctgacacaggtgcaaagtccatggccctttgccatttggggaattgacctgatcaggcaattacctaaatgtaaaggtagagtgcactacgcagtggtagcagtcgactactttactaagtgggctgaagtcgaaccactggcaaccattacatcaaagaaagttcaagactttatagtgaagaacatcatatgccagttcggactaccgtacaaaatagtctcagacaatggcaaattgttcgacagcgaatctttcactgatttctgtgcgaaccatggtatcatcaaaagtttctccgcaatggcacatcctcaagcgaatggtcaagttgaagcagtcaacaaaaccttgaaggatacactaaagaagaaacttgaagatgccaaaggaaactggccagaagaacttctagaagttctatggtcataccgtacaacggaaaaaacaacaaccggtcagacaccatttgcaatggcgtacggttatgaagatatgctgcccgtcgaactcgagccaccttcccacagaagattaacgtacgatcaaggtaccaatcacatactcc

SEQ ID NO: 347642 - DNA, 596 bp, Cannabis indica
ataattcaaccctaagccctagttgaaatactataaagggaacatgatgctctcatctcatccaaatgactattcaaccaacttaaaactagttttcattctctcacaactagtagatgagagatactttctatagtaattttgagcctacttcattgttcttcataatcggcctatagtgatcgagtgccatgcccacacatagcgagtcaagtacttaatcatagtgcggaagacggtagtaactaaactcgaaggagagaaagagatccaagttcagatcttgataatcctctacgacagaaagaaatcaagggctaaacatctgaacaaaaggagtcatattattctgctgcaatcaatgtaagattttctaacctcttatgtgtttaatttcatcgtattagatatatttatatttagaatgtcaattcaacatatatggtagtaaatttagatcatggtaaaatattcctaacaactggcctcagttccatggtaataatttactttcatgaaatatggatttaaaatgatgatattgttgatatgaatgtgttcaggttggtttatgtgtgatttgatgattgaatgtg

SEQ ID NO: 347643 - DNA, 1331 bp, Cannabis indica
tcactagtgctgcggtcacgatcccgcattcccagagggaaaaattcaagaggaaggagtcccagaagacgcagtccacaaagacagcggagtccaaagttagccaagtccccttcaaagaaggagtcctctccgaagaggaagggtggtccacgctttgtgaattatacagagttggcagtccctcgggaccatatctacgccatcgaagagaagaacggggtcttcaaaaagcctcccccaatctagggaaaccgcgacaaaagagacccgaagaaattctgtaagtaccacaagggtattggttacactactctggaatgttggtttttgtaggatgaaattgaagagttaatcaggcgaggtaagttcaacaagtataagaagaatgaggaaagtcatccccaagcagatgacaaagaggaaaatcacaatgcgagtggttaaaggactcctcgcaatatattgactattattggcggaccccatatcgtaggagattccaggaaattgcaggagcgatatgcaaaagaagccaaagagaagccgctcaccaacgtgaacaatttgagtgagaggctaaaaaagttgttcaaacgggaatgtgatgatatcacattcatggaaagcgatgccagatgggtccaccacccacattctgatgcactggtcatcgttgctaatattggaggagacaatgtccaccgcatacttgtggacaatggaagttccgtgaatcttctgaatttccagacctttaaacaaatgggattacaggagaaggatctgcgacccgtggtatcgagtatttatggttttagtggagacaccattgcgctgaagggaatgatcaaactcccaattactatgggaaccgcacctgtggtggctaagtcaatggctgacttcgcgataatcgaccaacactcggcatacaatgctgtgattggtcgttctatgcagaaagagatgaagatcatgacatccatttatcatctcaccatgaagttccctactcgcgctggagtaggatctgtgcgaggagtccaatcgaattcacgagaatgctacaatgcagcgttaaaactcgtagagaaaaagtcagtcaacgtcatttaattgctaaaggcaccaccccctcgacaggagatgttcaagataagagaaatatcgcataaagacgaaccagacttggatcctagggtccttgattacactaccaccgcccaagccgcgaaagacactattgaggtacctattgatcccatagataatagcaaatttttgaaaattggttctaaactaacttttcaacatcgagaaaagctcgt

SEQ ID NO: 347644 - DNA, 578 bp, Cannabis indica
gtgactaattcttgtgctagtttcattttgattgagatatgtccaattttgagcataaatgccttgatcatttaattgtgtgtgatttagtaaaaatttgtgtaaatatgtgattttgtgatatcacaagtcttaaaatttatttgagtctctcttgaggcgaaatcctaaacaatgcttaaccaaagacatgatttaggccatttttagaccgtttgagcctttcgagccaaccataatattatttcatccatagtcaccccctttgagcatcattgaatccctttatttttgttttaccatatgtaagcctagccaaatacaattttttccaccatatacccattgagcaccttattattctaagatatttgttagttgggtcatgaaagggatgagaggagtgtaattttggttgagtggtaattgggtgagtgttttcattgtgtcattttattattctcaccattggggataatgttgaattttaagttgggggagagttaacatattttgtgtatattgccattattatatttgtattgttagaataaaaaaaaaaaagagcaagatttttt

SEQ ID NO: 347645 - DNA, 657 bp, Cannabis indica
aggaccactcattaatataaaaggacaataatatcctcacaattatgtagtcactaaatatatatatttaataagtcaataaaataccaaaataatatctaacatccattatttctcatttctaactactacatagctaatttaagtcatccagaccatccattcaagcttaaatacaaaatcagtttcattgaaaagtttgataaatagaataagaccaaaataataacaatttttttttcctcaacggtaccatcctcatccaatatcatcaaatagagttcctggaataggagaaataggaggtgagcttataaagcccagtagaaaaacaactaatatcaaaggaccctcggcttaataaaaattcctgcatgattagcttttaaaaataaaacatctcatcactattgtcaaaatatataaataagatagagagaccacaaataatcataaaatcaagcttcaaatacatatcacaccgtctactagactcctagctctcaataccaatcatagaaaataacatccaaaaattgggtagtcgcacctgataaccaccataatactatggctcaaattcaattcactcactgtacagattctaggtcttcaactataggtgagtgcaccgctgatctacctatgatgacacag

SEQ ID NO: 347646 - DNA, 671 bp, Cannabis indica
ccttgataacatcgtcaagaaaattgcgaccttatttccaagctcacagtattgaagttttgacaaactaccccttaaggcaagttctggcaaaaccagaagcatcggggaggttattgaaatgggcgatggagttgagtcagttcgacatcaagtataaaccaagaactgcgatcaaggggcaagccttggcagattttatccttgaattccccagcaccgaggtagcactcatagaagacaaaagcgacattgctatagcgaatagagagatgtggacattgtacgtcgatggagcctcaaatagcgagggctctggtagcgggatcttattaatcagtcccagtaattttaaggtacatgctgctttacgttttgaattttctgcatctaacaatgaagccgagtatgaagcattaatcgcaggattgaaactcgctctcgagatgaaagtcgagtatcttcaggcttttagcgactcccaaatcgtggtgtgccaggtgaatggagaatatctggcaagaggcgggagattggttaaatatttagccattgtatgcgaactaatgcagaaattcaaaaaagtaactgtgtctcgagtaccgcgtgctcaaaattcacacgcagacgcactggcccgtttggcctcaactagagaagccgaattgctc

SEQ ID NO: 347647 - DNA, 521 bp, Cannabis indica
accagacacctgttgttgagtgggaggaatgagtaggtatcaaactaattcaagaaaagaacattggaagatagtcaagtaaatcataagatcaagaagaggaactatatgttagtcgataagggtggtatgttaatcctcttagactacaccaaatcaagtttcaggggttgcgttattgctaaaaattctattgatgagatggtgattactctagtggtggagcagtgattttggagaagtgtaataactaatctgaagtctctaacattagtgagactgaatggcaaaactacatgaaagatacttattcagcctatggaaagttctgtgcagtttttggcactgtacgattaatgaattaacaactagtgttacttactgactaacacagaagtagttgccaaaaagtaatgatacagtatccctagaggagtaaacatatagagaggaatttcacaatgtcaagaattttgtgattaaggaaatataatgatagagaaaggttgtattgattgcaa

SEQ ID NO: 347648 - DNA, 501 bp, Cannabis indica
taaaaaaaaaaaaagaaagctagaagagtttaaccgattggctggtctctaggttctatttatagaacataggaaccctagagacagccacataatcgattccatagctgtacaaacttttataaaatgatacctactttgcaacatcagaatcaggttctacagcagcaaaccagactagaaaaagaaactttccaaataggtggccgatcatgaacatggactagatacctgccaaaaataatgtgctagatctgatttgatcaagacacaattaaacacattaaagagaaatagcaatggtcaaagtttccatatcaaaccaacttacaataagagaatttattctcttacaagaagcttataaaataagaaaaaggatagctgaaaaatgattatttcctttgatagaaaagaacaataaatacataatattaaggcaataaaatcggtttaattgcacaaagaaattacaccataaataaaaagtattttgacacc

SEQ ID NO: 347649 - DNA, 950 bp, Cannabis indica
acacgaaggacctcgtgatatagaaagtagtgtgttggatacatttcttggagattcacacatttccaaatatacctatcaacatacaagttgattaatgagcaaaggtaaaccaatatatgatgtgtaacaaaacaataatgttaatattaccttttttaaccatgtactgaaattttaataatattcagcttgtacccatttttgatttcatgccttagttggattagtggtcttgatccaattaaaatggtcctttcaagtattcgatggattaatttttctttcaattgaatataattatattgttttaactttgaaaagttaacttaaacttactcaatgtacagttggaccacgtcagtattttgcaacacaagttagtgcgcttcttcatgattagcctgacttacactgtaaagaggaatacccttactccctctaattatttcactatcgacccaagtagggtgagagccaacggtggtaacctctgacaagtagtctgagtagaattcaattgtctcttcaacgatgtatgactcaacaatacaaccctcaggcctacttctatttctgacataacccttcaagaaattttatgtatcgtttaaatgggtacatccatctcaagtacacaggtccccacaacttcacctctctcaccaaatgcacttttaggtgaaccagtatgttaaaaaaggaaggcaaaaataattgttccaaataacacaaaacttctataatttctaacctgagattctttaacttagtcagattaaccactttacaacaaagagattttaagaacaaacataacctagtaattccatatctaactttcttaggcaacacaaaatagatactcactggtagaatgtgttgaatcaatatataatgatcgtgagatttcagaccactcaaaattaattttttcatatctacccaat

SEQ ID NO: 347650 - DNA, 586 bp, Cannabis indica
attcatgtcagctcaaatatcaacttttcattttttttcctcgtttttctttcatttttaatttcaaatttagcattcagtttctttttcttttttttttctcagttttttatttcaaaactaccttccagccattaccctttcaaaacccacaaaaatcacctcacggccataacattcgccatcttcttcttccaagtgcctcctttaccaaattttttatgtatcttatatttcgtatataaaatggctattccctgtggctctgcttatctatctctattgtcaaaaaaagcttcaaaataggtcataaattagttgctaacaaggctaaagagaaaggcccagttatcaacgaagaagactctgattttggtctcctcgtggctaaaggtggtcgtcgtccagtgaagaagaagtcgaaggtgtctttgcctgaaaaaaattccaactccgacaacaagaagggaagaaagaagcaggggacgttcctaaagtttgtttctagttgcattttagttttgccctagctctaaattgcatttgtttttgtttttggtttgttatattcttttgcttacatttt

SEQ ID NO: 347651 - DNA, 504 bp, Cannabis indica
ccagaatacattgaacactacagtacaactttcacaagttgttaatatctattttttatcaatggatccaaactgtatgttaaatgtatggattatgaattttatattctgtgaccaaaattcacttgaactattctaagaattctttattgtaactagacctaggaatcatggaaagtccacaaccgcaataatatatctatggaatttacatcttgttcatagtaattttaacatgattcttctctgtaaagagataacatgccaatatccacttggaagtgtatccatctgtatatgaacatatagatgtacatttaggggtggatatgagttatcgtgaaattcttaaacgatcactctagatatttaccttatgcaaagaaatttgaaatgttcaaaaaatttcatgaatttctagcaatgttaaaaaccaataaggtaaatggttaaagatcttgtgaactaataggggtggagaaatatttggttatgaagttcaaa

SEQ ID NO: 347652 - DNA, 1056 bp, Cannabis indica
acccagatctcacataaaatagaacattaccccttcatgcaaaaggttgagaaattttttttgagaacaagtcctatgaattagggttcatcttctagggcaacactactacaaaattagcttttctcatcagtttataattgtcttttatactattttccatcgattcctaaaaccgctggctatgtgggtgtcataaaaatataaaattttaaaagacggtttataactattgggaaaagactttaaatgatggtttacaatggttgggaaaaactattttaaataactatttataactaatgacaaaagtattatgtagattaagaaaaaatacatttaagctagtttattatatatgaattataatctcattataataatataaataaattttaaaaaaaataataatataaataaaaattaaagaaataagaatcataaaatatatattcaaaatttcaaattattatgtttacaatatttttcaatataaaatatatacaaattgtcaacaatataaaatatatacaaattgtcaacaacaaattcttgatttacaaacaacaaattcttgattcacaaacatatcccactcaaacaattacactaataagtaaataaattatacccaaacaattacactgaaacttatattcgccgacgttatgagtctcaaaattagattcaaagcttgaagagaagccaagaattctaagaacaacggttgatcaaaatgcgcactggacctactccatgggtggcggcggttctcggttaaagtggatgcacgaaggatcgagccacagatccttgatggctttaaggaggaaaacccaaaattgggtttttttcttgcttgttaaccgccagagatggccaagtcaaagctgaaaagcttcgactctagtgagagagaaaaacttgagaaatagctttgacaagagacaaattaaaaaggctttaggctttggagtttgggtttttgtaataccctactagattaggcgtgttaacatgattttttaacttaactgtgcagcttgttgctaatca

SEQ ID NO: 347653 - DNA, 692 bp, Cannabis indica
tttcaggaagacagtaatcatcccaaattgtttgagcttgaagcttggtatgggtactagacagaagaggcctaatcttaacggcttaatctctcggatcatcgctctcaatggcaggtttgagaagcttagtttccatcacttttccaccatgcgccttgtctaagttcttagacttaggcactgtcagcttagctcttcatcaagtaatttctgcttctcttcatcaagtaataaactgagcaacatggggatcatattcatcaagtaattttttgcttctcttcatcctagccatctcaagttcaacaatttaagctacttacaacttaaggaaagtcaatgtagcttggaagaatttttcaaggcacaagtaaagtgttttggatttttgaaaggtttggaaaaattatttcaagggtttttataagttaaatagttcttggactaagatcaaccaagaaagagaagaagaaataaaaaaaaaatggcgtcaaggggaaaggaaaaaaattatttttctaacttaaagtgaagaaggcttggagattcgatgaaaatgaaatcccaaaggtgttctcaaggtgctataggcgtgtggaatgaagtgagaagtgtgaaaaggcgtttggttgggaggaatgaaaatataggaagtgggaatgggaatgggaataggaatggaatggaat

SEQ ID NO: 347654 - DNA, 849 bp, Cannabis indica
atggtcattaagataaaaaaaaatgttttcaacaaatactacttctctaagaacctgactaaatctaaaaacaagatagcaaagtagaggagatatttttaattccaaagtgttctatcatcttattctacataagacggtcccactgcctctgttatcttgacacaaccgatgaggacaataccattaatgttcctagatagaaagtcacagtaccttgtcgtagtgggagggtttcaaggaacctaccctattatgacttgaaagacacttgtgataaaaattcattgttagtttaaacaagtaatgtatagtcagaataaggaactaagaagcaaatccaagagaactatggttaaaatcattcatatggagtaaccaaaagctttctattacaaggataagaagggaaatttcaacaataagtctattcaatggacttaaaaaaccttctcgatcctagtacagtaggtttgagattatctaaacatgtgccttgtggtatacttggtaaattatttactcaagtgcaagcaacttaatttagtaagatgcttgagtatttttctaaatggctaattctaaaggaagttttttggctcttggagatagattttatttatataaggaatagtttcaactattctagaaaaagataaaagtcatgaaaagaattccttaagcacgtgagaagtcttgtgtatgctctggtatgcattagaccagacacctgctgttaagtgagagttatgagtaagtactagtttaatccaagaaaggaacattagaaatcaaataaatcttaagatcaaaagaggaactatatgttagtcgataagggtggtactt

SEQ ID NO: 347655 - DNA, 521 bp, Cannabis indica
aattttttacgtaaaataattttattctggaattattttggttggatagtatgggaaaaattaagcaattcgctattttacagaatttaatttcgattttatttgaattagttatgaatttttaaaaatcggaaaaaatcacaggtggtgacaccccatgcgcatgcggacatgtcagcgtgttcggacagcaccttgttcgaaggaacaagcacgcctttgtctgaagccccattacgcgcacggaaatgctgcgggcagcctctgtgtgcggcatttcacgcccagctgccctgttgtgcgcgcgcgcataccatccgcaccaaatgcaatttttttcgtttttttttcattttttcatgctttttcatggaattaatttcgaattttttgtgtaatttttatatttttgattttttattctttcaaattttcaaatctaattatcagaattaaattaattaaattttttaattaacttaagatattagtagtttttgaacctgaaaatagataaaatc

SEQ ID NO: 347656 - DNA, 566 bp, Cannabis indica
tacatatttaccttttgttctccttcctcatatctaacctcagtcagatttgggttcaacatgccatcgctcactctctcatcaagcttaccaaacttttacactcgtcttcgcacaatcaccatatgtagcctctcgttatcacgcaaagcctcttctcaagccaccactattgtttaattgatgtttgtaagatcttctttttcttcttcttcttcttcttcctattttgctaaattacaaaaataaaagtttagatttaatagtttttataagagtttgttgtttatttgcttatttattactgatttttctatttttcttacagattttaggaattttgttcttattattctgtaagttgagttctcatatatatacatataaaagtacacttgctaagtgtttggtgaaatgcctaagagaattcttcactagcttaaaggaatagggcatattcaaatgtgattttatttcaactttaagttagcattttcgtggtattgtttagatattacttttgttgatctatattttatcttttttatgaattagagattttatct

SEQ ID NO: 347657 - DNA, 896 bp, Cannabis indica
ctggtaaaatatatccaacaggcgcatccaacgagcaaggctcgggtgcagggttgatattcattttgccagaaggctttaagtttcagtatgccttgagattcccattcatcgcatcaaacaacaaggctgagtatgaagccttgatcgctggtttgaagatagctgaagcattgaacgtcatctcatatgtcatagtgattcgtaactaatcgtaaataaggttctcggggaatactaggctaaaggcttaaaaatggccaagtatctagagaaagttcgaaagaacttggaaaagtttgattatttcaaaatcgagcaaataccaagagaacaaaactctaatgtcgatgccttagcaaaactggcctcgtagaaggatttggaagaattaaactttgtttcgatgaagatgctaaatgaatcgagtatatgtgagatggcaaacatcaagatgatatatagtttgcccacatggatgactcctgtaatcaactatctactcgatggacaacttccaactgacaaaaatgaggcacgaaaactcttgtatttagtgcctcgctacacgatagtagagggcgaattgtacagaaggggctattcgatgcctctcctttggtgtgttcttcctgtagaagcaaacgagatcatcacggaaatccatgaaggcttttgtggggatcatgcaagttggcaaagtctatcaaaaaagatcattagacaagaatattactagccaaccatcaacaaggacacacatgaatttgtcaaaaagtgtgatttatgtcagagattctcacatatacctcgcgtaccaccaacggaactgagaatgatgacctcaccttacccatttgcgatatggggattgatcttgtaacaccctaactagc

SEQ ID NO: 347658 - DNA, 820 bp, Cannabis indica
acactacaagaaaataggttttctgcgactagagtttttgtgactaaatcaatttagtcactaatagttagcttttacgactaatatttagtcgtagatatttttagtcatgaggcattgtttaattgaaaccaacagaattaaccactaatttttagtcactgtttgttatttttagtgactaaatttgtacttagtcactaaaactttagcgccaaattaatagttgtggcgagagcaataagttttggtgactaaaattatttagtcactaaaaatctaaatttgtgacaaaatatttagtcagtggaagttaatgattttcaattactaaaatattagtcatagaaaaatctatatagtgtacttgcaattattaatggtttatatataccaactaattatttagtcatgataaaatataaatttaaattactatataatattatgtgactacaattttagtccataaaaaatataatatttgtgacatgtaattttttttaaatatatatttgtacaaagacacataccatataaatgtaatagtaaatttataattttaagatatttattaccaaaaaaattattatctgaagcatattatttaaaaagtttacatatatatatatatattaaattactctattttgaactgatcgtattgaagcataagaaattttttttttttaaaaaaaaattaatttaaatttaaaatataaaataaattaatatattatgtgtagatattttatcacactaataggttataactaggatctttagtccttttctacaaaaaaaaaaaaactaggatctt

SEQ ID NO: 347659 - DNA, 671 bp, Cannabis indica
agccagagtggcgtactcatgtataagagccattcattctgtgggtgtgaggacccaatagaggcttgaaatgggaacgttacagaatgtctacgtttcatgaatggttacaggtgataagatcccaaaggaataactgtcatcctagaatcttataaatagagatagaacccaaggaacaaatgacgactgttttgggaaaagagagagaattatatctattattcattctgtaaaacaattaatgatattttgtatacaatttatcaactcagaataagatagactcgtggactataaaaaaattaactttgaaactacgtaaaaatcatcttgtcatttattgctattattatttaattattacttaattaatttcagagattataaaaagacgtatttaatagttaacaaaaatttgcgtcagcaatacacaatacgtagagaattttttcatctaaaaatttttattttctatcttaaaaacatgctagatcaatctatgaaccgtattgttaaaattgcgacttatacaagaaagaaatacccttaaaaaacttgacaataaaatcttaatattaaaaagaaaaaactccacatttatatcttttgatgtcccaccaaaagaaacatcgttaaaaaataatgaaaaaagtgaatttgtatcgcat

SEQ ID NO: 347660 - DNA, 524 bp, Cannabis indica
tttatcgttcaacaaaactgtatagttcaggtggtttaaccgccaatatcgctatttttttatagcatattacaacactagcatattacaacacaacttatatcacgacacgacccgcattttttatgacacgacactgcacgacttatatctatagcacaacccttatttacgactagtaaaatctatcctaaaagtatataattatatatatatattgaaatttcttatggtgggtaggagaaaatgcctcacaagttgggtcacaagaggttaccacatcaataaatcttccgaagatgatctctactaagtcatccacagttgcttgtcctccatcttcgaattcccgaggtgctggttgaaagatgtctataaaatcttccgaagggtttgagcttgagccttcatcttctacggtcaatctttcttcgaaagagaggtaattgacttgagcaaaattttctccatcttcttgtgtttcatgtccccgaactagtaattctcaaagatttcttctgttt

SEQ ID NO: 347661 - DNA, 546 bp, Cannabis indica
accaatatttaacatttatacttgctttcttttcttttacatttttacattttaaatttttttctaatactattataaagtttactaattacaattatacgaaaagtgttatttttctttcttcctcctctattcacatatatctatttagagtggtagccatatctacccttccatctcacatccagcccctctcgtctccagcccttcttgccatgtagaacctcttcttaaccttcctatggtgcagtctaaggagaaagagacactctttgagtttattcatctcttggtcaaatcatctccatctctttcaaacttctttttgctgctattgatatagtttcaagctctgatttgtaagttgttcttttcttcttctccttcctcttcttcttttttcttttcaaattacatcaatataaaaatttagacttgaaagttttattagaaatacatcaagtatttgcataattatatatatatatattttaaaaaaagacaatagttgatagtagttttttttaactattaacaactatttaa

SEQ ID NO: 347662 - DNA, 523 bp, Cannabis indica
agttcaaaatggtatttatccttattagaatgatataattataataagataataaaatgatgcataattattaagtacaaataaattaatgtaagaaaataacacttataatcaaaattatactgagggtaatttttatttttatggttttacagtataagtttgcaaaaatatgattttttttctttaagaagttattttgtgggaaaattttagaaaaaagttaaaacatatgggaaaatgaaattacaaggtatacctattttattttatttgttttaatttttacctttatttccatattctttaagatatactcacttctatagatgatgtccccattatactctttaggtttatgtaaattatatgctagacttaagtggagagtaatgatatattaagcaaccgactcacaaaaatgggtatattttaatgaattataatataaagatatttttgattaatggatacaaaaaaaaaatattccttaacttatcgaaaaaaaagtgaaaattacatg

SEQ ID NO: 347663 - DNA, 687 bp, Cannabis indica
aagttttgggaaagtgtgcaaagtgctttgggcacaaaactgaagttgagtacagcattgattaatggtgaaaaatgcacaattatttgtcttaaagtttaaaataaattaagtttaaattgatatttttatagaattaatgaaatatatttgtttattgaaaatatttaatttgaatttaatttgttgttattttataggaactaaaaattattgtggcattttgctgaaaaagaaagaaagaaagaaaagaattggaaagaagcccaaaaaaagagcagctcaggcccaagcatttctccctccagcagcccaatcagcgtttccttttcctcttcaacaggcgacgacgtggcagcgacccattggttatggcagctcctttttctccttctctcctttctcttcagcccacgtgggcttctgctgctgtccaactccaccacgccaaagccatgcttcaaacctgcatgaaaaatcaatccaacccatataaccacaaaacatttcactgctatatcaaatcatcaacaatcaacaagttaataatatataataataatgataacgtgttaaataatatcattattattattattactattattattattattattatttcttttgtaacccaaaactattagtattttgcattttagttcattttgagactctataaatagg

SEQ ID NO: 347664 - DNA, 727 bp, Cannabis indica
gtggtatgagcttcctcgaggatttcacttcttagtttttcatttcttggaacacaaaccctggtcttatacaatagcatcccaatatctgatatcataaaatctttagcttgaccagctgtaacctcttcttggatctttactaatttcggattagttaactgagcagctttaattcattctaacagatcagattgtaacttcaaattatgaagttttcctacagcaaactcgatgcttgatctgaccatgtcatctacaagctgaggtgaaatcttaatcacgctggttacttgcccgggacctttcctgctcagggcattagccactacattggccttcccagcatggtaaaggatttcacaatcataatccataaccaactccaaccaacacccctttctcatattcaaatctgtttcggtaaagaagtatttaaggctcttatggtcggtgtaaatgttacatttttctccgtagagataatgccgccaaatcatcaaagcaaacactatcgcggcaagttctaaatcatgagttgggtatcactgttcatattcctttaattgacgggaggcataagcagtgacccgatcagcctgcattagtacacactccagaccatgtctggatgtatcctagtaatggggttgctccattttataatgtaattgtattattttttttatttttagcctattgtcgtgcattgtgtgtcattttgatt

SEQ ID NO: 347665 - DNA, 629 bp, Cannabis indica
agtcaatatcaatggttgatcttaggtctatggatcttaatccttatatggttatgttcaacttagctgtattatttatgttcttaaagttattcgtggatgctaactaatggttctggcggatatttacatcttaggaacatggtagttcaattgagtgagagcactgatcatagatatagaatctatagcttctataagtatttagaagtaaaacgatgatttcctttgagcttcgcttgattaagataaatgattgaggtctcatttcagtaattatattagtttactgaaatatcatttattggtacttaagtgttttaaagataaaatacattgaagggtagaacgataaatttatctatataaagtgtagatcatctattgaggatctttgactattagtattgtaacaataagtaatcatatcgtatctatatcgtggtacatataaaacgttctatataattgaaaatgttatgaaattccaaatctattgtggcacaaggcagaattaataagctagggaatttacttggtgaattctaaatctactcattgaaagctcggttatataggtccatggtcccctcacaaattgagataatactgcttccagactcaattaa

SEQ ID NO: 347666 - DNA, 784 bp, Cannabis indica
aatagctatcaaacatgtaaacctaagttaatacttctagcttttcttaaggtcacaatcaggatatccatgaatctagaaatgcataaccattccatcattctgaaattttccattcactagggtactccgaaaacacttaggcaactgttagtaactaatcataacctttcactttcatcaatatgcaatccaaatttctagggaggtaagtttggatacaattcaaaattcaacttaatgaccattgaactgtatatctaggaaatatttctccacccctatcagttcgtaagatctttagccacttaccttaatagtttttcaccattgctagaaattcatgaaatttctcaaacatttcaaatttctttgcccaaggtaaagtctagagtggtcgtttaaggaatttaataataactcatacccaccgctgaatgtacatccatatcttcgaatatgaatgatcttactttcaagtggatataggcgtattgactctttgcagagaatgatcttattaagaaacactatgaacgagataggcataatataatggttttggtcttttaatgacttaggtctagttacaataaagagttcttagaatagtccaagtagaacctggtcatagaatactaaactcaaattccatgcattaacatattgtttgaatccattgacaaaaaatggatattaataacttgtgaaagtcatactgtattgatcaatgtattctggaaactgaaattaaaaatttctatttggaatctaaaatttaaag

SEQ ID NO: 347667 - DNA, 860 bp, Cannabis indica
ttgagaatcaatttgctaccaacacaggtttccaagaaaatatctcaaatacccacaatctttgatgcaccactatttcttattctgacattgccaaaatcactagtagtgtaagaagtaaagaaatcactacgagcggtaacatggaatgaagtgccagaatcaatcacctaactacaatcttgggtagaaagactaacacacccatcatcacatacaatgacaacatcaccttcagtggaaactatattagtctctttctcatttttctctccttgttttttctctctttttaatattctgcaatcccttattaagtgacgtggcttgttacaatgatagcacttaatatttttttgagacttggatattcttctagaaccatgctgattttcagtttgacatcttctccccgcctgtcatgcttttcagttataagaaccccagaagaagaagaagattcaccttgtgctttccttttggcctcttcattaagcgaactagctttgaccaaatccatagtcaaagtcccttctggcgtggaatcagaaatcgttatcaccaacgtttcccaactgtcaggtaaagaactgaggagtaataattccatctcatcatccttattcatcttcatggcaactaactggtttgcaagactctgaaattgacttgtatgctcaaccatactaccaccatccttgtacttcaaatctacaagtcttctaagtagataaattttattaccagtcattttttttggcaaagagatttcttagctttttccaaacgacattagctctactttcattagagatatgttcatgaagatttatatcaatccatcgtctaatataggcaat

SEQ ID NO: 347668 - DNA, 716 bp, Cannabis indica
aaaaatcctgtaaaaaaaattccttgtttattgtctttctcaagtgtgtgaatatgtggattggaagaagttgtctcatctttttattaagtatggctcattgtgaagttgaatgaatttgttctttgctcaaatgatcattgctcacttgttaattgattaggccactcattgtgtttcctctttacaagttgaacatgttaattcttgagatatatcatttggcatgtttttgattgaaataaaaataaatctcatttgtagcatcattcgtaatatcgtggtgatctgattgttttgcttggtcaatctctcatttgtttatatctaatatccatatgttttaggtcatgttgtgagatggtttgactttcttctttaatgttgtaatagatactttggaatttctttgcaatgaggagtctatgttgcattttctgtcgccattcagggggagctctttgataaacttcttattttcttagggggagaatttggtttaggacaatattattgacatggattatgctcaatgaagggggagaaatacttatcctttgtgtaaagtggtgcatttgttgtttggttgtttaaagtgtttgcttttctgtttgtttagactctgttatattttgatggttgctttgttttgcactggtattgttgtcattgaccataatttgtcaagggggagattgtaagaactattattttct

SEQ ID NO: 347669 - DNA, 571 bp, Cannabis indica
taggtcgcctttctgtgacatctgtctcacttgagggaattgcatggctttgatactatttgttacaactacttaggtaaaactcacttccaaaagtagcctcagagagtgctcgaatagttataaaccaccaaccaaatctatacttagtcgacgagggatcctaatagtcagtatattcctaatcctaaaccatgcatttatttgtgaagaaacatacaccattttatgcaattgtcatgggaaaggaaaagaagtaatacaaagtagcttacaatgcaaattgcaaaacaatgctatgcttcaaaacaagattaatggcacactgatgaaaagaaaaacaaagaagacagtggaaaaccaacctgtgcagtccgactaggcagaggcacatccaagcagtttctgaggccatccaccctgcaagacggtgttatcagatcagcgtataggagatagaaaatcttcaattaactcagcttcatgcttggcaaaatagcattctcttttttcttttactataatttttgacaaaatggtttttccagaatcgaacaccctgtctatcaaa

SEQ ID NO: 347670 - DNA, 637 bp, Cannabis indica
gtgttagtctacaagggtggtgctttaaatcccataggctatactgattcagatttccaggcatgtcttgaagacaggaaatctacatctgggatggtatttactcttgggggtggagtagtggtttggagaagtgctaaacagaccgcgatttcagactccaccatggaggcaaaatacatagctgctgcagaggcaggaaaagaacttgtctggcttagaaagttcttcactagactcggtgtcgtccctggaatggaaaaaccaatggttttgctttgtgataacactggagccatagccaactgtaatgaccctcggagccacaagagaagcaagcatattgaacggaagtatcacttaattagagaatatgtggcaagaggggatgtactggtgcaaaaagtggacacagaggacaacctaggtgatccattcaccaaagtcttggcaggaattgcatttgaaaagcaccgtcagaatttaggattaattgaaatgtactgattattttatattagtgcaagtgggagtttgctgggttttatgccctaaataaaactccaatttcaatgtaatctttatctttcaaatatcaataaagaaatagaagtcttttcatcacttattgtgtgtc

SEQ ID NO: 347671 - DNA, 656 bp, Cannabis indica
cgtcatgtccaaatttgggggcatagacgaggccgtgaggatcttgagggacctgtctgctgaaaggcaggcgatctaggaggaggctgaccgaagggaggccctcgcggaggcaaagctcaaggaggaagccaaacagagagaagcccaagcagaggcgaagctccaagaggaggccaaacggagggaggttgagctggaggcgaagcatcgggaggcattgaaggcggagggtgagcttcgggaggctaaggaggccatggacgaaatgactgccaaggtgaagtccctagaggaattgcaccaggcgcttgcagtctaaggccaacctggccgtggagttgaaggtgctaaaggactttagagaccaggccttgaagaaggctaaaagagatgagctcctgacccctatttcctgcaagcactgtgccaaacgctttgacgatggcgtctatatggcgtgccagtcgaacggccagagcatcaaactcgacttctatcccaagcctgaggaggctcttgccaaattccgagagaagaagaagaagcttgatgctatgcttgaagcgcgtcggggtcctcgccttcctcctcgtattgattaggccgcgtaatccagcccatttcatcatgattatatctcttttttttttttt

SEQ ID NO: 347672 - DNA, 666 bp, Cannabis indica
aatcccaaccaatcccgacattcccaatgtctaactacatcgcctcgctatactaaaaatactaggatgtgattctaatagccaaacactgcgttccaatattgtcgggtactgaatatgcaaaattatgaaatctctgtatatgacatataaaatgcattctgaattcaaataaatcatcataaattaataatttagaattaataaataatttcaataattaaaccctaactgtctgctaatttccaaatttaagctaagcggtctttacactgtctttcgaccactatttggggttgaaagattatttcgtattgacccaattcaactgcccatttgagtaaccgtccagaagcgtctaatttttgtaatatttggcgtggttgttcagtgtatacccgaataggatgagcctggaagtagggccttaacttccttgttgctaagattaggcagtaagtaagcttttctatcaacgggtatcgtccttcaacttcaacgagtcttatcctgatataatagaccgaatgctgaacattttttccttccctgattagcatgacactcacagcatattctgtcacagctaggtatattccgaattcttcaccgtttacaagttgtctttttagttcttgaaagacattcttgcattcctctgtccat

SEQ ID NO: 347673 - DNA, 715 bp, Cannabis indica
aaaaatttataaataaatttggaatttttcattttttttttgaaaaattacactgcctaaacgacatgtcgtttttgcaaaacgcaaaacgacacttcattttccaattatgaagggctgataatgcatgtaaaaaaatgacacgtcgttttccttaaggggaaaaataacacatcgtttaacatcctgaagggctgcccacaacgacaaaaaacgacatgtcgtttgagcaaacgatagcagccagggaacttggaaaacgacatgttgtttttccacagagtgaaaaagacacgtcgtttgggtcgtcttcttcagccaacccgggtcattttgacccgtttttctgcacgtggtccgacggacccgacccaaacccgatcaaaaaaagttctctaatgacgaaatcacatgtttttaaccccgaattgatccaaataaaaaaaagagatcaaagtgagttttatacatctaaaacacgtaaatgtcaactttaatttcaattaaaaattgagtcctcacggtatatacatatatatatgaacgtatacaatatatatgaatgtgaatgaatgtatacaatatatatatatatatgaacgtatacaatatatatatatgaatgaatgtatacaatatatatatatgaacgtgaataaatgtatacaatatatatataaacgtaaatgaatatatatatatacgtaaataaaaa

SEQ ID NO: 347674 - DNA, 1318 bp, Cannabis indica
ttgcagcaatcatgcaagtctttgcactaaacaaaccatctgttgtagtgtttccctctggattcacacaccaaaactgaacaagtaccctgattcttcaaacatatgaattagtgggctccccacttcaacttggaaagaacttctcttagaggaatacccctcaagatatagctcgcaagctaaccgcatactcacatacggtccttccattccaaatttcactttgatgaagttgctgaactaaagcctcggtcatttgactctttacccctcgacattttaatattgccttcgtactttagtcctactgactttcaccttaggcaaacattgccatggtgttatcttagtacttgagtcctgcagactttcaccctagataactggcactgcctgtgccccgagtcttcttgactttacatcctgaacaacaatcaatctccatgatactcatcttgatgcttgtaatgaataagtagtctgttgagtgaaccgtgaaggtctctcccccatttcatctattggcatcctcgacaacatgccgacactcgaatgcctgaccgccccaactcttcatgcacaccatgccatctaaaagtgcatcccacaggatgtgactctcgagtcaactatctcatatagcaccccatcgatttttgtatgcatgcattgtccgctcaaccatccaactgattcacacttgtctcacacccttctagctcacacgatgtactaagttccaatgattcaaccctctggccatcatgcaaactttaaaacccttctcgaccttcgcaagctcacatgactactaagtctcattggcatggccctctggcctccacacaaactctagtgccatctcgaggcttgcgctcggtcttcttagccatgttggcttctttgatgcattcattccacaactgcgcatctctattgatgcccttatgtgacttacgctcgctggcgcttttacaagcccacacatcccactcaactgcctcggcacttccatatggatctaataaaagtcacatgcgaacacctccaagtataatcatcctctgacgattgcggcatctaccccccttggtctccatgtgcgtccctcttgacacattcatgtagcaattgaagcattccatgtctattccaaatttaaccatcttggtcatcaactctcgaccactgtcgtgactaacaagaatctggcagtccctgcactacttccacacccctgccaataagcttcctttcaacaaagcgcctcctgcggcttacgatgtcactcaagcaaacttggcctagtgtacca

SEQ ID NO: 347675 - DNA, 275 bp, Cannabis indica
ataaaatataatttaatataatattatacaatacaatacggtataatacgacataccaaacgaacctataaagtattaatacttaggctactagtagtgcctaatactacttaaaaagagataccctacaattaattaacaatatttctaaaaaagtaaatgaaatagaatggaaacaatttttattctatcttttattttgttatattttaaaatattaaaatatcatttcaatagaatgacttttttactattttagttgaatgactattcca

SEQ ID NO: 347676 - DNA, 795 bp, Cannabis indica
ctactccgatgacttttccggtgctggacagtaaactccggtgacttttccaacacgagtgacaacttcggcaatcactattagttttatttgttttaattttttaaaaaaataaatatgaagggaattttaatatttttatggtaatttaattaagtttttatttttttatgaattttaaattcagatttctttttaatgttttatatggtttgttttaagaaaaaaaaaccatatttttagtttgattggttagataatgccatatttagtggcatttactttttatgccatatttatcataaccttaataatttttcctatattttttaaaatagccctagtagtttctatgtagaatttacgtaaaaaataacaaaaaaaaaaaaaaaaaaaaaactagtttaaaaagtataaaaattgaaaaaagctcaaaaaaaaaaaaaacctagcttttaaatataaaaataaaaaaactcttatatgtataagaccacacattatataattaatagaaagagataatttggcgtgcgcggaatgactttgtttggcaaaaaaaagagttgggttgcttcaaatattgtaacatcagctagaatcatgcttgatcaatacaaatttgctcagggaaggaagggcctttcattgtctcctttgtttgatgggggccggaactgtgagcgttggactgcacttgtgttacacaagattaaagttaatgttgatggagctttatctgaacaagaggggcggtttggagtgggctggtgtagctcgagatcatcatggaac

SEQ ID NO: 347677 - DNA, 510 bp, Cannabis indica
atttatgtgttgggaaaagtcatatttgctagcgcttatcattttatgctggcaaaagttctaataccaacattgatttgccaacccccatttgccaacacagcacaagtaaattctattttaccagcgcaataccaacttgtgccagcagtaaaatgtgctgacaaaagtgacatttcttgtagtgcctgcacccgctcagggatcctcctgaccagttcggacccagttattggtggcccggactccttagacctggcagatttttgttgtagaaagagttgcagcagtcagctcctcggaaaggtcaataacctctcgagaaggtctcttctctgaactcctctctccgcccttcaccttcttggccggaggggaggcgatagagcttccgcccatcctcttccttagagcgtcaagcatctgccgagacatgtctgcacaaaacaaaacagcatggttagcaaaaaactgacagaaaatcaaagcatgaaagtcaagaagctgaaa

SEQ ID NO: 347678 - DNA, 1050 bp, Cannabis indica
atagtaggcagttaattataaagttgacagtaatctttacgacatttttctcctgaaatcatggagtttgattacatatcacgtagtgtaaatgcagttattatttgaatatcgcacagctgtcattttccaacttatactgggtcaaaatgatcgtgtaattaaacacatctttaactgtagcattctgggatatctcgataggaatttggctccaatgaccttgatagcgagctagagctttctcccctatctttccaaggtcgatgatgtacaccttgctgcttctttgtttgaagacttaatgtttcattctgataattgcagttcttattaccaaagagttcctcggtagtcatttaaatgtcagcttctgactcatcaagattataagtctcactggaagatgtctgaagttaattggtgaaggtaccaggaatgcgttgtcctatagagagacaggcgcctcgcttattacgtctcaagtccacccaactgttatacttagtttgtacattatacactaagtgttttctcagtcgatatgcgtcgctttcatcttcccaggtgtaacgaagttgatgtcttgctttatgcatggtttctcgttaatacacgaaattacagtttgtatatcttttcctcgcataacaccttatagtcagcgagttgcaagtatactctgttacttacgcaattaatgagttgttccattaaaagtgatttcatcgatccatattccctctatcttgacatgtgtcctccactcaaatggtagtcaaattttaggtataataattttttaataaaaagtgctttttaataattacatagggcatttgcgtcataattgttggaattattttaccaggatctagatttactaacaagtatattattaaacatcctaaatatgaacttctaaaacgatatgaaataaacatatataaagtattagaaaccttacagtggttgcagcgaaatataatgtctcattctacttagacctctaacccttttatcctttctgtagcagagtatcaccaatat

SEQ ID NO: 347679 - DNA, 590 bp, Cannabis indica
agcatgtctacgtttggggctctaggctctcagagagctcctgatgaattcgggaaagaggtcaatatcgggccgcgttatcctcgctctatgtcattgacagagattcaggcgtctaataaccaccaagatcctatttctcttttcaagatcgagggtgtcagttcaggagacttaagataccattcttctgatgatgataacgctgttcaccatgtcaggggttatggtgccatttttcaggcaaatgtcttaggagatgttgataataaagatgatggggatttgacttaccgggtggacgaagatttctttccgtgtctttaccgtttcttgaaagataagaaagtgcataacgattttgtctttcgggggcgagccggctttatgaggtgcctcattgaatggactgatcaagtattacttcaacactcaggtgtcttaaataaggccgggatttatggtgctgtttctgtatcccggtacccctttttatgggtttttcatgtttggcgggctttttcagaactgtggggccctctgtccaacaccttccatcatagtagtggcgaaatgggtatttctttgta

SEQ ID NO: 347680 - DNA, 616 bp, Cannabis indica
ttatttatcaatcttccaggagcatctggttttgatgtccaaggtcaatccccaacatactccaacaattgtttcaatattcagggtcaatccctgacatatactggggttccaggtaaagtaatcctagttttagttgtttgtcttcgactgctactggttgacgtccagctttccacacggcagcttgatatggcaaccacagtgggccaatatccactcacgtcgcaattcttttacacaattgctttactagagtaactgccctttgtattctagtgacccgctccctctcaagaaaccaaagtgtcccttcttctcacggaagagggttataatcttcagtcgctcgagttattgggcagattgactgatcattggcatcttcttgcccctttatatatcactgaaggcgcccttgtaatttgagaccttctatctcatctttcaactgacgacactcttccacggtatgaccaatatcaccatgatattcacaccacttatttggatccctcttgcgccacgcatgtttcaaaggtcttggctcgccaaaaatggcttcttgtacatgtgcgaggtagattttttcccgagtttcattctcatgagcctg

SEQ ID NO: 347681 - DNA, 631 bp, Cannabis indica
agaatgcacagaaatgaaaaacaccattaaagctcaagctttgagttctaaactcaaacttgagcaaaccttgctaacatgcaaccaaactagctcaattctacttaatcaagcttagaataacctcagaaaacaataacaaacatcaacaacatcacagcaacagattcaaatcatttctctcaaaaatcatatgttttgcatagaaaaacccatagctttaaacaagatagcaagcatgcattaaaacctagataatccattcattttaaacctaattaagcttctgtaaacaacatataaacacagcaacaacagccacaaattcatgcatgcatcataccattttcatcatttttcaacaatttaaagaaggaaataagaggagctaacctagcttgaaatgaaccttaaagagagatgaattcacaagcaaaacttcaaggaaaaaggccagctccttgctgctccaagatggccgaaagtgagaggaaagaaagagagagttttgttttgaaacttttctctaattttttctaagtgtagaaaatgaggctttgaagagtaaaatgaagtaaaaaggattcttttcagccaaataataaacaattaaacatttatttttcaatta

SEQ ID NO: 347682 - DNA, 786 bp, Cannabis indica
agaaaagtctttgcaaaagccacctccaccatttcctcaacgcttcaagaagcaacaagacaatggtcaattccggacatttcttgatgttctagagcaactctacatcaatataccattagtggaagctttggagcaaatgccaacctatgtgaagtttttgaaggatattttgacaaagaaaataaggcttggcgagtttgaaactgtcgctttcacggagggttgtagtgctatgttgaagagcgaaattccacctaaattgaaggatccgggcagcttttcaattccaatttctattgggggtcgagatgttggaagagctctttgtgatttgggagctagtattaatctcatgcctgtgtctatttttagaaagttgggaatcggagaagcaaggccaaccaccatcactttacaattagcggatcgttccatggctcatccagatgggaaaattgaagatgtgttcgtacaagtggataagttcatttttcaagccgatttcaatattcttgactatgaggaagatagggaagttccaatcattttagggaagccatttctagctacgggaaggactttaatagatgttgaaaaaggagagctcaccatgagagctcaagatgagcaagccacattcaaggttttccatcctatgcatgctccggatgcaataggagaatgcttagcaattggagatatggatcctaacatggttgaggagtccaaattcaaaaatagtaagaaagtgagaaagaagattccccttaaagaaattgcaaa

SEQ ID NO: 347683 - DNA, 1576 bp, Cannabis indica
agaatttaactgcaaagccacgtaaaaaatcttttgttttcatactttttccattattgtttttatcttactgtgtgagattattactattaggctcaaatttcggttaacgaaaatgtgcgggaacacttaagaaaaatattaaatatttaagtatcttgagtaaaatcaacttaaatattaattttttaatttaattaaatatatagaaaaataccaaaaagtctaccttaaaaatatctatctagatgattcataaactaattacttattttctaattaaaatgtgatatactttagtctatttattttaattaaatcattaaaaaaaattacatgatttaagttgatttaaaattaaatgacaaattaatctaattttcacgttgaagaatttcaaaatatctacatttaaaataaatgcatttccaaaattttatgtgggaaatgattcttaaaataaaataaaatatattctaaaaattattctaatttaagttggtctgaaattgaaaaattttctagctttaatataattttctacttaattaaatttattaaaatataaataattaagtatctagaataaaatcaacttaattattaattctaatttaatatctaagaaaatattctaatttaagttggcccaaaattaataaacaaattaattttcaacttaaatatattttttaatttaattaaatttcatggaatagaaacaaataatttagtatcttgaataaaatcattttaattattaattcgatttaagttgtaagaaaaatactctaatttaagttgatctaaaaataattaaaattaatttttcaacttaaatatatttttttacttaattaaatattaaataaaatattaattagttactagaaatcactatctagaatattttattaaactgtctgtttttctaaattaattttcaaaaaatgcaatgaaaataattttatttattttaaaattaattatgttgctaatttaattttaattagattaaactagtatagttagtctaatacaattatttaaataaggcaaacaggccttcacaattcacattggagttgttcatatgagggaggactgggtccagtatgtcatacccactactaatggccccctaactctcacacaaggcccaaaggaaaggaattaaaccttacattaaataattgttattcattaaataagcccaatattaattgggcctaaataaaactatcatgggtgatattttattttagcaacctagtccatttatctatctaaaaataaatgggcttcctatatgcatctaagcccaaaagcaaacatataggctcacacaggtcaaattgaattgaatggaccctatcatgtttctaggtttacacagatgaaagaaatacaaaatttatctgttacaaattatttataggatctattgacaattagactatgattaaaatttgatcattggatctgtcaacaaattaattatagcaatttagatcaaataaataataggcttgttaaaaaaattaaataaatattataaatataacaaacaatgtcc

SEQ ID NO: 347684 - DNA, 1080 bp, Cannabis indica
tggaacgaactacaacaggaaggagctgcaaaccttcaggactttcaaaaaagagtccaaaaatacatcaaccttgaagaggcccaaatagtcgcctatggaggatactatcccactgggatagcagggtatatgcccggagccccgtcgtcgggtactgtcccgacctcggctccacctataagtggcatacaattctctgccactcccggatacagccagggccagactttggcccccgcatcgtcccattttggaaatccctcagggataaatggacaagctccctcgcactccgctccaaccgccagcctggcaggtccttcccagggctcgaggagtaaacgatcctccaaaggcagcaccaggacagaggagaaacgacaaaagagggggtacactccacagtacacccagtacacggagttgaccgactcctaagagcgtgtgtactttgctaccaggaaaaatacacactaccggagaccacctcccctgtacaaggatagctcccgcagggaccccaacaaaagatgcgagtaccacaacgacattgggcacaacaccaatgaatgcaaaaatctcaaggatgagattgaaaacctaatccgattggggcacctctatgagtggatcaagaatcggctgcctcaccttaatccgggtcaggcgacaggggttgtgccgcaggcagcaccaggggtgcagcaggagtattggctccagttgctccgaccagagatgcccaacatattcccggtctgccacccagacccaacgggagagtggccatgatctcaggaggaccccatattggaggaactacccgcaaagaattgaagcggtatgcgggggccgtgaaacacaatgaggtttgggaggttactcagctcccagctcaaaggccccgactgatggatcaacccatcacgttcacggaagaagacgccaagatgggcattttccccaccatgatccgttggtcatagagacccccatcgccaataaggtggtggccgagagtcttgattgacaacggagctccgtaaatctcgtttttaaggaggccttcactgcaat

SEQ ID NO: 347685 - DNA, 639 bp, Cannabis indica
tttttttaaataataagatactataatataccaaaataaactaatagatttattagcatatacgatgatagactatatgaaaaggctactatataaacaaaagaatgaaaatttatttcaatatgccaaaataaactaataaatttatttagcatatatgagtataggcatatatgccaaataaacttatgagcaagatatttaatcatatttgagaaatcatatattgttatctaagtttactagtaagacatgttacagtcatgtactttgtatacaactagatttgatgtctcaacttaaaaaaaatagattaattagtttattattttataggcacgcattgtgtttgaattaaaaatgaattattgtttcaatatacgaaaaatagactaataggtttattggcgtatatcgctatgtttgattacatagtttactctgtattgaaaaaaataaaatgttgttccaacgacaatagaaactagtaggtttattgaaatatataatggtaggctatataaaatgaaatgaattgttgttccaatatacgaaaaaaaaatgaaaatttatttaatatgccaaataaactaatagatttattagcatatacgatgatagactatacgaaaaggctac

SEQ ID NO: 347686 - DNA, 1765 bp, Cannabis indica
ttttttaaaattaataattaagtagatttttctaagaaattagttattcaaatattctttaaaaatatatttaagttaaattttttagttttagattaacttaaattgagatattttttcaaattaaggtgattagttcaacatacttaatttgttatttaattaaatttttgaaagttatttaagttaaagatttagttattttagaataacttaaattagatattttcatgtatttgttttattatattttaaataattttgaaattatatttttatataaatatttttgaaatttaaattgaaaattaaactgaagttggaaattaattttttaattaattttagaccaacttaaattaactaatttttattattaaagtatatagattaaaatgaatgattaattaaattacataatttttagaataattagcattttcccccctaaactttcggcactacttaattttgttaaaaatttctctttaaactataacagttacataattatgccccttctgttagattccgtttcttttactgttaaatattaacattactaccctctgaactttgaccaatacaaaattttgcccccttttattaaaaaaaattaattttaaaattagaatattttattttttaaagcaattacaatattctatttatttagaaaaatattaaattaattaataaatattttcaaactttattttatttatcaacacgtatctttaaaaattaaaccgaaattattgagaatctaataaataatttaaataaactaacatttttaagaaaaaatcaaacttatttatatttgtaaattaatatcttaacaaataaaggaaaataattaaaaattcaataaaaatattaaattattttgaaaaaatttataaattaaacgaaaaaaaatattatgtttacttaaataaatctctattatttgaataaaaaaaatatactcaagtttgttcccgtaaaatttagttttacaaattacatttttaatatctaaatgaattttctaatgaaaaataaataatttttttatatcgtttatttagttttgaagtttagtttattttataaattttcttaatcattcaaaataatttttttaagatctaaataaatatttaagatttattagaataaatattgaatattttttatttttatttgaggggttacggtttgatagttatcaaagtttagggggcaacattgttaattgacaaagaaacgtcgtcatttaaaaagaataatgggacataacctaacacaaggactaaatttctgtaaatgtaaaagttcaggggagattcttaacacgccgtatagtttagggacgaaaatcattattgtcgatagttcagggagaaaaattactaattatgattattttaaataatgagctttaatctaaagaacattcaacttctattgttggttccacgtagttcttgtttaagtgagattcatcactaatagatgttcactcattaacaatttgacgtcgtaaaatctcgaaagataagtattattataagtcttctattcttagtaacaatcacccttatagtggttgctaagggtaggacttacaaagtatgaaacaatggtagaagctcatgaaataagatgaccttgactctctcctaaatgggacacatcagattcacttttcgatcaaataaaaggttgctagaatggtgtccatgttagatgagctggctactctattcaatgaatgata

SEQ ID NO: 347687 - DNA, 463 bp, Cannabis indica
aatgcatcctggtagttgcattcttttcctttcactgaaatttttcctaagccgccactttcactctctctttcttcttctctgtttcgaaacctctaagtgatagagtagcgcccacacacagcaagtagtacctcaatcatagtgaggaagactgtgaagaatttagatttaacaaagaaggacattcgggctcagatcttgataatactctgcaacaggaaggatacaagggttagagatatgagtggaaggagacatattattctgctgcacccaatgtaaaggtttctcatactttatatgtgtttacttatattcgttttagaagttcatatttaggttgttaatcaacatacttgtgaagtagatgatctaagatcctaggtaaaataattccaaacaaacacggtgggtctatagccacatagacataaattgacatgtgagtgtaacacgacaa

SEQ ID NO: 347688 - DNA, 572 bp, Cannabis indica
gtaagtcccttaacaatacattacgtcccttctgttcgcgaatatgctagccttaggcccgtcgagttcgatgaacgtctccttaggtttaggatgccttcgaccagatagggggatcatgcaaaggattattatttctccaacttaggagattatttaggtcaatcccggatgggttctggacctccggagcccgttcccttggatccttcggcctatctttcttccagctggttccggccctcggacaactatctcggggatgatgcagccagtattaagattcgaaactttgctaggcccgaattagagagtcagggtaggactagcttgattgttttctaagtgtttactgcttttacagatattctaacacttaactcttttctcttgttgcagcagctaatcccatggagacaatcttggcaacccttgccggagcccacagtcctgatgcttcccttcctccaacttcttcccagatggtcacccccatgaaggcttcttccagtgcccctccagacactattgacttagtggatgaggaggaggtacttcctgaggaagctaaa

SEQ ID NO: 347689 - DNA, 756 bp, Cannabis indica
ctggggaagttgaagaaagtgaagaagagcaagaggttgctctggtccgcaagcgcaaaggcaagatggtggctgaagagacaccaaaacggtcgcggaaggtggacactccggccccgagccgtgatttcgggatccctcccgaggtggaggagtttacagtgcctcctaacattgtgctgactccggttcccggagatgaggcgagacacgagcttcggatagccaagtacaattatgccatggacgagtactcccgggggcatgctgaggtggaggccttgaggaggattttgcgagaggagatgcaaaattcccttaacgatcagaactaccagaacccgtgggatctaaacctagaccccctgacggactggttcaatcgtttccttgggcccaccttggctccttttgccgcggagatgaccggcgagtacgtctcccagctaacccggtgtgcgcctaagcggttcgctgcttgtgcatccttgaactccgtctttcaagttcaggatctcagccactccttgaccgtggtaagtattccgtgatttacttctttcctcattatttttcttaaggcctttacccactcttgcttccttttccatcttgctgcagaggtcggccgcctttccaaaaacatagttaatcacagcttcgtcttatccaaatttgggggcatagacgaaagtcgtgaagatcctgcagacctgtctgctgaaaggcgggcgttccaagaggaggctgcgcggc

SEQ ID NO: 347690 - DNA, 657 bp, Cannabis indica
cacctgctccagatggcaagttacttccaggaagctgagaatcatggagctattatagattaggaaactcaagtgagtttgatcttaaatagtttgactccagcttttctgcccttcacctcaaattatgtcatgaacaagttgacttttgacttccacgagttaattaataaccttcagacatttgaaaatttgattggaggtccacagaaaggaggaaacaaagctcctagttctggcactgctaatggtacggccaaggcagaggcaaacactgcctctactttaaacccatcaaaaagaagaagtgaacaaatagcaaaaagtcttttaaagttgttaacaccgctaataagaataaaaaggctgctgattcaaaggcaaagcaaaaagaaaagtgcttctattgcaacgaaaagggtcaatggaaaccccagtgtcctaagtttttggcaaagaaacaaggtatttctatccttgctataaacccatgtgttttagagaattattatccccttgcgttattaattctggatctactagccatgttcatttttcttcttatttcatctccagctgcttaaacttggattgctatcctagcgagttgagtcggatgtttggacagaagggtggagattgtccaagtgaagatga

SEQ ID NO: 347691 - DNA, 809 bp, Cannabis indica
aaatttggtaaaaaaataaccaaaagaataattttgggtgcaaagcaccctagctgtcgaggctaaggctgcgttcaacctcaatatgcgcgtggaagggctttttgcagggtttctggctgagctttctcgccgccttgcaacatcatcatgtgagcagctcatgtctgaatgagtgaggatcgagttttagacacgaagtgtctgaggcacgcgcgcgctgggtcttcttgtgcgagggtctggtgcgcatgagcaccaccctcgacacctaatggacctcgattttcaaatcaacatatcttcttcgctgttcatctgaattgagttccgtaaaaacaaattttgcttaattttttacaaggaatccaaataaattattttcagaataaaaaaaaattattttcataaaaaaaaaatcgtaaatcacattcaatcatcaaataacacataaaccaacatgaacacatccaaatcaacacaataaacaaaattcatcgttttaaatctgtatttcatgaaagtaaatcattaccatggctttgaggccagttgttgagaatattttaccaggatctagatttactaacatgtatgttgaattaagatcctaaatatgaatatctctaaaacaatgaaaataaacacataagggattagaaaaccttacattgattgcagtggaatataatgactcctttcgctcagatctctaacccttgttctttactgtcgcaaagtattataaagatctgagcctggatctctttctctccttcagtttggttaccaccgtcttactcactatg

SEQ ID NO: 347692 - DNA, 511 bp, Cannabis indica
tcacctataaatatagggtctcggtccccgagctcctgactcactctgttcataacagcaaaattccatctaaagagagttgagagagcgaggaagcccgattacccacatcaatcggtttcttttgcagatcatgcttatgtgggactaaagcttaaagattcaatgactggaggtatttcgatacttaaattatagtgcatatatgatttattaattctgcactttattcataatcatgtatgttttagtctatacaaataaaggtctaacaagaaaatgttggtggttgcccaagtcttgaaaagggcttcatcaagcctcttactacactggagatttggtatctttttgtcagccataaaataaaattaaaataaaataataatatattaatatcaaatcaaatttgctgttaacaaaaaaatacatcaaaccaaatcgtatcaggggtttctctcccttttatgtgaaaacaggaaaagtatatattattatatttttttaaaaa

SEQ ID NO: 347693 - DNA, 651 bp, Cannabis indica
gactcggaccaagacccagactgggatcgaaatgttggacttggatctggacggagatcttggccctgacccaaacttggacccgcactcgggacctcaagttggacctggacccgaacctagacccagatcgggctccagacctggacacaaaacccggacaaagacttggacccgaactcaaacccacaccttgaatcagacccaaagctagacccggacccggacgacaactcgaacctagaccagaacagaaccaaagacttagacccagaactgaatccagactcagatctggattggaactagggactcggacccgacctagaccaagacccaggaccgaacccacgcccggagcctgatctggacctagactgaaatccagacccgaaccaaaactcagaccaggactcgaactccgatccgaactcaaacccaaacgcgaaccaagaattgcaaatggaactagaaccgaactaggactaggaccacgacaaggacctaaacaaaaactcgatcccaaatcaaaacccatacagagacctaaagccgaaccgagactaggacttgaacccgaacctggaccgggacccaaacccacacaataaccaggacctggacaaagaatcaggatagggacctgggaaa

SEQ ID NO: 347694 - DNA, 620 bp, Cannabis indica
cttcaattataaatctatttatgcagagcatttctacttcttcttttagttcttgtgcatattctttgtccaataatctccttttttggtagacgggacaaaagtttggatcatattgagggcatgagacatgattgttagattgatctcgaccatgtcttcatgggaccatgcaaaaacgttgaggttttctcttagaaattttattaaagctaattttatttcgagcaacgaacccttaccaattttgagtttcctagtcgacatggtaggatcaatttcaacttcctctagctcttccactagcccaacatttgtgttaggttccccaaggtaggggtccatatcttcatccccgccttgggcgaattcctattaagaattgcttttacccttttctgaactctagacaaaattgtcttcctttttatcctcagataaagcgaggttataacattctcgtgcagttctttggtttcctttcagaccgcccactccatttcttattggaaattttacacataggtggaatactaaagtgatacccttcaagtcatataaggttggtcgacctaacatgacattgaaggtagaagttacattaatcactaagaattaag

SEQ ID NO: 347695 - DNA, 923 bp, Cannabis indica
tctcgtattgctggggtagttatatatatgggtgtagaagatagagtacaatagggatggctccctatgagatgttgtatggtaggaaatgtcattctccaatttattgggatgagactggaggaaggaaatatttaggtcctagttagttcagcagaccattgaggcaataaagaaaatcaattctcgaatgcttgcttcgcaaagcaggtagaaaagttattctgattctaagcacagagacatagagtttcaagtgggatgacatgttttcctacgagtctcaccaatgaagggtgtaaagcgctttggaaagaggggaagttaagccctgggttcataaggtcattcgagatacttgataaggtcgggcatgtagcgtatcggttaatcttagcaccaacattatcagttgtacataattaatgtatttcatatttttatgttgagaaaatatgtgtcagacccgactcatgtcttgagttacaaagccctagaactatagttagaattatcctatgaggcacaaccagttcaaatcctcgataggaaggaaaaggttcttcagaacaagaccatagtgttggtcaaaatactctggagaaatagtaaggtggaggaagccacctgagaattagagtccaacatgagagttcaatatccagaattatttaggttagtcttcaaagattaaatacttttaacggggggataattgtaatgaccgcatacttaggatatggattagtagggtagttagcattaattattcgcattttatggttatatgttaagatcttgtgttgtgggtcaaattttaagaaatatgcaatagaattataattttccaattctgagaattttattaaactctaggtgtattgtttatgctatatgtgaaaattaatatttttataattttt

SEQ ID NO: 347696 - DNA, 753 bp, Cannabis indica
tccagaagagagtccaaaaatacatcattcttgaagaggcccaaatagtggcctatggaggatattatcccaccgggatatcagggtatatgcccggagcccagccattgggtactgtctcgacagcaactccaccaatgagcagcatacaattctccactactcccggatacagccagggccatgccttggcccccacgtcgtcccattttggaagtccatcggggataaatggacaaacccccccgcactccgctcccactgccagcttggccagtccttcccagggctcgaggagtaaaaggtcctccaaaggcagcacccaaactaaggaaaagtggcaaaaaagggggtacactccccagtatacccagtacacgaaattgacggactcccaagagcgtgtgtactttgctactaggcaaaatacacactaccggagaccaccccctctgtacaaggataggactcccattaagagatgcgagtatcataacgacattgggcataggaccaatgaatgcaagaatctcaaggatgagatcgaaaacttaatccgactggggcacctctacgagcggatcaagaatcggctgcctcatctcaacccaggtcaggcgactggagctttgccacagggaacaccagggggtgcagcaggagtattggctccagttgctcccaccggagatgcccaacatatccccggtctgccacccaaacctaatgcgagagtggccatgatctcaggag

SEQ ID NO: 347697 - DNA, 434 bp, Cannabis indica
cttttagttattttatatgtttatagttgatttatagttatcgtaagattgattctcgttatgttttagttgtttcttattgtttgctgagaaaagtgtacttttgtaattttaaaattttacaagaatattttgtaaacaaaaactttaggtcgtaaaattatatataaaacataaaaaatggtattcttattattctacgaattggtataaattttatactctttttatttattatttctctaactggtatccaaaattcaactactaaataccatcaactatatattagtaacaactacgtgcatcaactactaatgagtatacatcttaattttcttcttctaatatgcttagatttggtatatgttataccttcttgtaaaaatccaatagaaatatgtttggttttgtgtcctaaataaaactcattt

SEQ ID NO: 347698 - DNA, 546 bp, Cannabis indica
atttaaagtaactttttgccacagttataaaccgtcatttaaagagatgttttccatcagtttccaccagatggaagtctttcccaacggttataaattgtcatttaaagtgactttttccaacatttcttaaccgtcatgtaaagtaactttttgccacagttataaaccgtcatttaaagttctacatttttatgacacccacatagccaacggttttaggaaccgttgggaaataatataaaagacagttataaactgttgggaatacccctttttgtagtagtgtgtattcttcacagggtttgttaaatttcgtgggtgtgttttctttgttgttttgggttaaaagtttgtagatttctgggtttgtaggtgtatgattaatctgtatattgattcaaattattaaaatttgtattttagttttttcatagcttatacccattttgatgtactattttttttaggtacaattaaatataagaaaacaaatacacaaaaaatttgttcctactatttaattgttaatatacacattatttt

SEQ ID NO: 347699 - DNA, 601 bp, Cannabis indica
tccatatgtgctgaattttttcctttgtgcaggccggtgtgaagttggcttacacttactcccatgttgaatctgtgggttccaagagcgcggctctgtcgacaccttgaaggcagaggcggacttggccaagaaggaagctgaggaagccagggcggaagctggagctgtttggttggagttgggcgaggccaacaagaagttgttcactgctgagaagaagatctctgtgctgacaaaggatctcgaggcagctgatcgctttgaggagaccatcgagatcttatctgctgaagtatacagtctttaggatgagaggacttctctgcgagcggttcttcttcggatgaaggaggagaaggacgctaaggtgggggagcttatggctgaatttgacaggttgaaggagaagatcaatgctttggagacagccggtctcgagctcttctttaacttctggaaggctaatccccgagccaactttgactacttgggcgaggctaaggacatgaaccttgagtactgcgcggccctagtggcttatggtgggaacgaggaggctgcttcaacctcctgtcaggctgctgatgcttctcccgtt

SEQ ID NO: 347700 - DNA, 721 bp, Cannabis indica
tttttttttgaaaaaataaaacacttatttataattatatactcatattttaaaaaataaaaataaaataattaaaaatatacaattatcttaaaaaaaaaagttagaaattaaactaaaaaaaaattatgtttacttaaacaaatttagatttttggagaaaaataatacatttgttcctaaaaatttaattttacaaaattaaaattttaatatatttttttatatctaaatgaattttttaataaaaaaataaataatttttaaatcgcttaactagttttaaaattttaatatttttttaattttcttaatcatttaaaatgattaagatctaaataacttttttaagatttacaaaaaaaaaaaaacgttgaatctttatcatttttattttaaagggtacgatttgataattgtcaaggtatatgaggcaaaaatactaattaatcaagatacactaccatttaaacggaataatatgacataatctaaaagaatgactaaatttttgtaaatgtaaaagttcagggaatccttaacaagccgtatattttaaggggaagaaacagtattgtcaaaaatttagggaacaaattattaattattgagtaaaaaatgataaaaattaataaatatgttaattttatttataaaaatcattgttttactgtttgtaaataccttaattatattatttcataattttatcatcattatt

SEQ ID NO: 347701 - DNA, 687 bp, Cannabis indica
aagctaattcaagcctaggggtaaaatactcaaaaaccacaaccccgctcaaatctggtatgctgttgatctcaaatattaatcccataaatacaaaggttctagacttacccatgtgactctaacagccatccatcgcattttccgtcgtcaccgagcaaaaatcataaaaattgcatattctatatttagtacaaataatacctctagagtttaataaaatctctagaattgagaaattataactttagtgcccacttaaaagaatggaactcataattaaataaattcataaacaattataaaaatattaataattaatgctaattgcctttactaatccatattctaaaatgtggtcattacaccggtggtggcccaagcaaatcgagagaagagagagaaagtatcatcggtaatggagctcgaataggggtttcttggtggtggacgaccctctgaatgagggtttcatggtggttgtccttcatcggtggtggatgccgccccgaatggggtttcttggtggtagatggctaccttcggtggtggatatgactttcatcttcaaggcttcaaagggagatccagagtgagacgagagagggacattgtgggtgggtttcgtggggttttgattctgctagtgagagagagagagagagagagagagaggagagagagaga

SEQ ID NO: 347702 - DNA, 1435 bp, Cannabis indica
tttaacgtatcacttattatttttgcgtatgttgtgacttaggggcctataatcatcgagcaacagtttcactcaagttgatcgagacacatgacttaaaaattgaggtaatattagtatgatagtataatatgtgattgcatctttagcgtacatgtttatgaatgcctgttagttagcacatcattaatgatagtattagtatacatagagttacactgaataccgactgatatatttttggcttaagtactgattgatactatcctatcagtatgactagagtaccaagtataggctgatattacggtaaatagtactgtcatatgaacattttagactcagtacaagtgggacgggatagggttataattgggtgtatgggtgcctagttatacttttcttactgagtttgtcgactaactattatttaaggtttcttaaactttacatatgtaggtaaaggcaaagctattgttgagcaacaaatagtgcgagcagataaaaattgaacaaatcgggcggtaagacttgaaatgtttgatcttgggatagcaagctttattttggaagtcgctggtcaacttttgtagttatatattttgtaaaacagttgtaactttttaagataggatctcaaattatgtaaaatttatttatgtaaagttttaggttcataacgaaaagttttaattaaacatgattttcaataaacccattagttcatagtatatttccagtttatatttgaaccacgataacacgcctaatctgataagtgttggaaattattttagcaggatctagatttactaaaatgtatatttgattattaattataatctagtaccataaatatgaatttccaagagattaagaaatctatacattgatggtagcggaataataattactcatttcgttcagatctctagaccttgattcttttttgtagcagaacattatcaagatctcaacatagatcttctcttttttagtttggttaactacagtcttccacactatgattgagtatttgacttgatatgtgtgggcatggtactctatcattaaaagctcgaaattgatgaagaacaagaagaggaactcaaaattacataagaaggaggctctaattttctagttgtttgataaagaataaaaacaatatttttagttggatgagaatgagagccatcttattccttttagggtttaggatttaattatatggatttaaaaagataaaataataagaaaaaatcactaagtggctggcccacacaaggttgattcaactagttacaattttgccactttatttcataattcatctgttttttcagtaatgtcatattttcaaatttcaatcctataaatttcaaaactatgttggatatattttaccaggctctagatttactaacaagtatgt

SEQ ID NO: 347703 - DNA, 1074 bp, Cannabis indica
tatttaatataaaatttttaatttaacacggttttttttttagaaaaatctttgattagcaaagacagcactgtaattgaaaaagcattgtagcgtgccttagcattagggagttacaggaagtctttgacttcggggcttggaagatataatttcaaagtccaggtcacctggtaaaaaagcaattgtgactttgggtaaaaacaagggtttagccaaacgaataaaagataaaaatggaggttcatgccaggctgcatctcgcaagtaacgatgttttattaaatggtctcaaatttttgcatcgtttatctctagtttggactgaggtttgaaaattctgggtttgtacgggagggctagttcattatgatatctatttctacggactttggagaataaacttctgaaccagattgggatatttttacaaaaaaggcaatcccaattcctagatgaaatttatcaaactagaggcttataaatacgataaacctaaatttttactctgcctaaaccctaaaggttacctagaaaattaaatcaaaatcactaaaacccaacgaagccacaaaaatgcaaataataaaataatgatcataacccaagatttgaaaaggattagaagaaagaggatggataacttaccgttcgaagttgggttgtcacacaatgaagaactttgaaaccgaggacagaatgatcagggtaatgacctctgtggattcttgaggttgaacgatatatcggaatagacgtagaggaagtattgttgggattttatgccctaaataaaacccatttcaatctaatctgatttgttatcaataaaaattagaagtcatttatgtatacatgtaattttcatgtttatggtttaatgtgtacaaattctgttaagtccagaacatatagttattcacaattacagtgatgtcaacacagtggaatgtaaattgtgattatatgctctaaaaagattaaatgtccctggttcaccagtgtaactggtatttacactgtaatgtgataatcgagcgataagtataactctaacattggataagtgttatg

SEQ ID NO: 347704 - DNA, 618 bp, Cannabis indica
tcagcagtcaggtcctgaaggattttcttgacttcgtccattcccccaaaatcggacaggacgaagccatgattaattatgttcttggaaaggcggctggcctcagtagtaagctaggaaaggatacaagtatgagtaaggatgtctaagaaaaactaataatgagaaaagtaaactacaaaatactcaccacgatgagggagtggctgagatcctggacttggaagatggagttcaaggatgcacaagcagcgaaccgcctgggtgcacaccgggtaagctgggacgcaaactcgccggtcatctccgcagcaaagggagctagtgtgggcccgaggaaacgaccgaaccaatccgacaagggatccaaatttaaatcccacggattctggtagtctgggtcgttgagagtattttgcatctcaactcgcaaaattctcttcagagcctccacttcagcatacccccgggagtattcatccatggcgtagttgtgtttagctatccggagctcctgtctcgcctcatctccaggaaccggagtcgcacaatgttgggaggggctgtgtgttcctccatctcgggagagatcccgccatcgagaccatgggccggagt

SEQ ID NO: 347705 - DNA, 604 bp, Cannabis indica
tctgtaataaatactctcattaataaaaaagactcgttgactaaggctcattaatgccccaaccacgtaaaaatctcatgcattaaactttctgcaactcttcttatacattatttaattggttgccaaaaacctcggtcaacactttcttagctattttaagaagcaattacactcgacttttcaactaaaaaaccttggtcctatccgtttttttgggggttggaaatatgtcgttcctcggctggaatttctgtttctcagcggctttttacacttcaacttcttcatgatacaggttttttgggagccaaagttacctccactcccatggaacccaatattaaattgagcaaagatgtttgcactcctctttcggacccaaccattaatagaagactcattggtaagctcatttatttgtccattactcgtcccgacatctcctatgctgtcaacactctaagtcaatttttacatgagccatgcacacctcattacatgttgcacacaggattcttcaatatctcaaaggcacactggacaggactgatttttatgctaattctaatcctcatttgtgtgcttttgctgaatctaactt

SEQ ID NO: 347706 - DNA, 533 bp, Cannabis indica
tttatcacatttttatttaaaatactaagtaaaaacacaatattaatatacttaacgtagattatggagtgaacaagccgacgcccattcatccttcatgcagctttttatgataattgataatggatgttattatttatatacagggtcgtcgcaaatattttggaggctctgttctaattttaaaaagtaggtccctaacaataaaaaaatataaattgtaaataatatttttaaatattatcacattacgaaagtatattttacataattaagcacccaaaaactcaaacaattttattaatattgctattaattctaatacaacttcaagccaatatcaacattctatttaaaaaaatggtcatccttcgaacgttttttgaaacaaattcatcaaccaactcttcatattctatcgtctccaaaatctcattttcaattaatatcgatgctaatccatgaagcctttcttgtaacatggtagaccgcaagtaggacttcaacaactttaattttgaaaaacttctttc

SEQ ID NO: 347707 - DNA, 908 bp, Cannabis indica
aattttatttatttaattatatttcgatttttttattttattttttattcttttgaaatgttattattgggttggttggattttttacaataatgcaaaactatgccaataccatttagaaaataccctaatttttttaatgataaattaattagttaatattaactcattttaaaaatataatagggtaaataattttagaaaaatatattttgatatattcttatttatttcgatatttaaaaaattttttagtctatttttattttttataatcatgtatactgtagttatttaagactatttataattttttaaaaaattgtgaataacttagtatgttgaaaataaaagagtaatttgcggcataaatacctaagtttatctcaaagttgtagataaatacctaagtaaaaattttagcggtaaaaataccttctgttaggattctggaacttctgtaggtacctctccgttaagttacatgtaagtgtccacatgtcatcttcgcattggtccacatcatttaatttatatttttattatttaaaattaattacaatatttgaaaatcattttaaaattaaataaacattaaaattaaacctaattataaatctttgcgcttgacctcagaaaaaaggaggttaattttctcatcctctgcctcaattagatttggaaattttcaatagagaattttgtttgttgggtagatctaaatatacctcaaaatctaaaggcatcaacccatcttcttctcttcaacaccatgaaatttttctcagccaaaaatctcaaaaaaaaagtctcagactgaaaatttcccttatcaccgtcctccaccgtgatttttggtctctatcaaccatcactacaagaatgcattctccctcctcacgaagctt

SEQ ID NO: 347708 - DNA, 511 bp, Cannabis indica
agaatgcattctccctcctcacgaagcttaaccctccagtctcgagcctcctcgcgagtccttcgctgattaaaaaaaaggatgaaatgcaccgcaagcccaccagagacggctcagaacctcatgttcgaggacccatcaagataaaacaagagagaatgacgtggtctaggcaaatctaggctgaagaagaagaagaagaatgaagaagaagaacaggcgcatttgggttaatcataggattttgtgatttgcaatttatttagttttttaaattttgatttagttttttaaatattttattttattcatttatgtttttttatttcttgaaaagaactgagatttttatttaatttaagttttactaatttttttacttttaaattatttctaaaatttttaaataaaaaaattaatgatgccgaccaataaaataatggcacgtgtgtactggcctggcacttaacggccaggtacctagggaagttccacactagtgacagaaggt

SEQ ID NO: 347709 - DNA, 665 bp, Cannabis indica
ttaaatttaaggacttttgtctaatttcattcaattttactgtttcaatgattgtttatgtactaaaccatgctctccagactttgatatctaccaaatcatgccactcaaactttgatatgtactaaattatgctccttgaactttcatccatattataatttttttttactaaaattaaataaaagtccttaaatttaacgatctcaatagttcaaatggaattttaacggcaaaagaattctaggggacacaatttagtacatgtcaaaattcattaatttagtttctattattattatagtataaataggttcaccctactaaaataaactattgagaaaaatctcatttagtctctcatctttttcttctctttgtgttctcttttttcctattttttttttatataattaatattattttacaataattatacatatatatttttttgattgagatacttaattagataagaaacaatatatatatatatatatatatatatattttttttatgaaactggacattatattattattattaataataatattattattattaggctaattaggactttttttccccaaattttgatatgtacttaatcatctcccttgaacttttttagccgttaaaaattttcctgaactattgagat

SEQ ID NO: 347710 - DNA, 1203 bp, Cannabis indica
tttttgtaatgatgagtttacaggttactgtcaagacaatggaatccaaaggcataggaccgtgagaaaaactcctcaacaaaatggtgttgctgaaaggatgaatagaaccatattgaacaaagcaaggtgcatgcttttcaatgccgggctcgcaaatggattttggggagaagcagttgtaactgcaacatacctaatcaacagaagtccctctagtgcaattgaaggtaaaacccctgaagaaaggtggactggtaaaccacctgacttgtctaatttgaaagtttttggatgtgcggcttatgcacatcaaagtgtaggcaagttagagcctagggctctaaaatgtgtgtttctgggttaccccgagggtgtaaagggctatagattgtgggtgaaagggaaaggaggtttcaaaactctcattagtagagatgtgatttttcaagaaaatgattttccttgtaaaaatactaatgagcttgatgcaggttccacagaaactaaccctgcaggtacatctattggagtctctcaaaccagcccaactgaagtggaaccgaatccagatcaggtggaaccaattcaaatggaacctcaagaagcaccaaatcaggtggaacaagttcaggtggaacatgaagttcaagatgaagaagacgggaatcaggaagacctcacagaatatcagcttacaagagatagagctaaaagagtccctaaaccgaaccagaagtacagttacaatgtgtgggatgagagtattgcctatgcctatatgtgcaagcttaaagctgagatctatgagccacaatcttatgaagaagcactcaaagaccgaaactacaaggcttggttgaaagcaatgaaggaggaaatgtactctctcataaagaataagacttggagagttgtacttagacccgatggcaagagtgtggtatcttgcaaatggcttttcaaagtcaaggaagggagaaccgaggatgaaccggtaaggttcaaagcgagattggtggcaaaggggttcacacagaaagaagggatagacttcacagaaatattctcaccagtggtgaaatataagactataaggttgatgctcgcactagctactcagtttgacatggagattgaccaaatggatgtgaccacggcttttctacatggggacctagaagaagacatctatatggagca

SEQ ID NO: 347711 - DNA, 705 bp, Cannabis indica
agtattcaactaatagcacttcaagcatgaatcacaactgacttatctatagcaggaggtgagttatgggatgatctccagggtggccctgtgaggaatattaatgagttcaatgaaagagcacaagtctttgtgcgtaaagaggaagcaaagattgaaatgaagttgttgaagactggctcaggaagtaaacccaacacaagtatggcaacagcaagcacagtcacaacaaaattagacaatcttggtggatcaaatacaaaaagaaaggatgagtcaaaagaatcatccaagaacaagaaaaaaacatgagaagtatgtatcaatttactcagtatacactgagttgaatgaaactcgtgagaatatcttcctcgctaatgaaaatagggttgcatttcgcaaacccgagccaatgaggcatgcgagacacaagcgagattcaacaaaatactgtcgattccgcaaggatataggacataccaccgaggaatgtcgacaattgaaagatgagatagaaagtttgatctcgcaaggatactttaggcaatatgtgagaaatcaaggaaatgaacctaatcaagctaacaatccgagattacaacctccccccattgagggcaaggatatcttggttatttttggagggccacatctcgtgggaaagagtaacaatgcccaaaagaggtatataaatgaagtgaa

SEQ ID NO: 347712 - DNA, 1281 bp, Cannabis indica
tcaaaaattacgcaacaatcatcttattattattagtgaaaatttatttttatttattatataaatattcaaaagaattaaatattataagaaaaaaattatcgtaatttataatataataaataatatttataaatatattaatatgtataaaattatttaaataaattagataacaaatatcatacctattttagtaattatatatttaacagctatctaatcatttagcttaccaaacacttatatataattttttcaactcacgcatgttttaaaattatatttaccaaacactcagtaattttttctcacagcacagctacagttgctttttctcacagcatagttacaactgtttttttctacagcacagttgtgctaaactgacccttagtactgtgctataaaaaaaacggttaattagtaaattaatattatgtgaaataataaatgacattattttttattaaaaaaatgtttaatttaaattatatttatatataaaaaagacataataatattaaaatttattatgaactataattttaatttaactataatattttaactttataattattttcattttcttataaaaaaatcatacacttttattttattttttataataataataaaaagatatttttttactaacagtaaaaaagatacgatgttacaacattaatttttttaagaaacataaatattttctcagttttattgtttgaaaaaaaaaacaaaataaaaatatttttttttatatgtggacttagtaaaaaattaataataaaaaaattattttttaaatatttacaatgagtttaaatttgcacaattaatataaaaaataaaaaatagtagagatgtttagtatttttaaaaatgaacaccactagctttaaccgtatttaatgtaaggctaattaggaatttctccccgaactttgacatgtattaaattattccccttaaactttcattacaaaaaagtttacttttattcacaacaaaaagtgtgactaaagtaaaaaagttgtgattaattataaattatcatttcaatgttgtgactaaaagatccgtggctaaaaatattagtcgcaaaaattacaatttgttgtgactaaatgtgtttttagttacaatatttattgtgagtaaaactaaattagtgacaatttgtagctaaatactatgttttagtcacaagtaaatttttgttgtgaccaaaagtcacatttagtcacaagaaatttatgttgtgattaaaaagtt

SEQ ID NO: 347713 - DNA, 981 bp, Cannabis indica
agaaaagaagttttggggtcaatttattaattaagagactttatatggtctaattaataaataatataaatgaaaattttatttgataattaattataattattaaataaatagttttggcatttataggattgaattcgaaaatatggtatttgtgaaagaagaataagtggttgaaataaaatggcaaaattgtaacttgaaagtggtccctttatggtcggccactagtgtagattgttgcccaatattttattcttttttaatctatataattcaaccctaagccctagttgaaatactataaaaggaacatgatgctctcatctcatccgcttgacaacttaactattgccttcaaccaaatcaaatatagttttctctgtcagacaactagtagatgagagacaccttctatactattttcaagcctccttcattgttctgcatactcgagccttagtgatagagtgtcatacccacacatagcaagtcaagtactcaaccatactgagaaagctggtggtaagttagagatttgagcggaaggattcaatattctttttctgcaactaatgtaaggttttctaaaactcttatgtgtttaatgtcattattttaaagatattcatatttagaatgttaattcaacatacttgtttgtaaatctagatcctattaaatattcctagtaactggcctcagagccataataatgatttattttcatgtatggatttaaaacaatgattgtgttgatttggatatgttcatgttggtttatgtgcatatttgatgattgtatgcgttgcccttatttttttcccaaaatacgtggactaagtcctaggcgaaagggaagtatctcagggaggtgtcccctggaggagagcacaagaagtgtttctactctctgggaggccggaggtatgctaaggctgttccgggaggtgcagagatctcttgaacagtcacctcgca

SEQ ID NO: 347714 - DNA, 511 bp, Cannabis indica
taaaatagcaactaataagttttgtgtaggcaaactaggaccagttcgcctggagccattcagatattatagggattgaccctaaagttatttatcaccacttgaatatcgacccaaattacccagctaaaagataaaaaagatgaaccttggattctgaaagacaaggggcagtcaaagaggaagtggataagttgctgactaatgactttatacgtgaggcattctattcctcgttgatatctaatcctgcccttgtcccaaaacaaaacggaacttggagaacttgtatcgacttctcagatttaagcaaagcatgtccaaaggattgctttccactaccagggattgaccagttggttgatgtgactgctggacacgagctaatgacattcatggacacatattctggatataactagattaagatgcatgtccctgatcaagaacatacaagttttgtaatcaacatgggactttattgttataaagtcatgccttttggtttgaa

SEQ ID NO: 347715 - DNA, 515 bp, Cannabis indica
cgggggagttcgttgtaagagtcgtctgtttcgatatgagaacatgtgggcgagagacccgagatgcgtttggattgtcaaagaggcttgggcacaacatttacatgaccaccctatgattaactttcataggaaggttaaaagaacaggacaaatgcttacaagatggaataaaagccaatttcgacatgttaaaagacaagtggatgaggccaccaagactttaaatgatgctgaacttcacagacccgatgaccatatactcattcactcggctaaaggacaactggcagaggcattgctacgggaggagatccattggaagcagaaatcgcgagtccaatggctccatgaaggagacaaatgcactaagttcttcatggcttcagcaactataagaagaaggaggaattatatccaatgcataaagaaagccccccaagaccattggattgaagactactctgacatcacacgatgcttcctatctaaatttgaggaacttttccaaaaaa

SEQ ID NO: 347716 - DNA, 453 bp, Cannabis indica
cataaaacccaacaatattaaatccagaacatatataaaaatatatatatatttcttcataattatagtgtcgttaacacagtggaatataatcatgattgtatatgttccaaactctaattcccatgatttgtcagttcactggatttagactaacatgataatcgacgataaggtatacttacaccttagataagttttatgtaatctccaaggcattggaaaaatttaccaatatcggatgtatggagtatacacttgaagggaacgatattgaacttaaacaagatatcataaatttaccattatatctttctaagtcaatatcaattgttgatcttaggtctatggatcttaatcctaatatggttaggttcagcttaatttttttatttatgttcttcaagttgttcgtggatgctaaccaattgttttgatagatatttacatctt

SEQ ID NO: 347717 - DNA, 671 bp, Cannabis indica
attgttacatacgcggccattcgctcgccacgcgtttggtactctcccgatatctgatttacgaccagctgggagtcactgtagacttccactctcttggcccctacggctttcgctagcctcagccctgctatcaaggcctcgtattcggcctcgttgtttgaagctgagaagtcgaaccgtagggctgcctggagtcgcagtccggtcggggatatcattgccacccccgctctggatccattttcattggaggctccgtccacaaatactctccatgtggggaccgatggtgttggcgcatttgcagttgcctctgcttcattacattcggtaatgaagtctgccaaggcttggccttttatggagattcggggaatgtagtgtaagtcgaactgacttaactccattgcccacttgaggagcctaccggatgcttctggtttttggaggacttgccggagtgggtggttggtcagtaccttgatcggatgtgcttggaaatatggccttaattttcttgaggccatcaggaggcagaaaaccagtttctcgatgatggggtaccttgtctccgctcctatcatgcgcttgctaacatagtacacgggatgttgagttttctcttcttcctggactagggcagcgctgaccgcgtgctcggagacggc

SEQ ID NO: 347718 - DNA, 670 bp, Cannabis indica
aactggctggtcatctccgaggcgaagggagctaaggtgggcccgacaaagcggttggaccaatccgtcagagggtccatgttcaggtcccacggatttcgaaaggcgtcctcgtgaagagtgttttgctgctcctctcgtaaaattttctttaatgcctccacctcagcatgcccccggctgtactcatcaagggcgtagttgtacttggccactcaaagattttgcctctcctcatccgcgggaaccggggtcagcacaatgccgtgcgacaccgtgtactcctccgcatcggaaggaatcccagagtcattgctcaccgccggagtgtcccccctccaagtccgcttggaaggttcagcctcaaccatcttgccctttcgcttgcgctcaagggtggccgcatcctccacctcgccttcctcgacttccccctccttgtctatcaagacgatcgtgcctaaaggggcactagaggaggacctcccgggagtcaccaactgggatggagccggaggcaaagaggcgtcggggctgtatgcctcggcaagagtggctaggagatcttccataggcctagctactacaataaagaaataagctaagtgttagaataatcatgagaaaggcatgcgcccaacaagaaagcaataaaactagtcctaccctg

SEQ ID NO: 347719 - DNA, 506 bp, Cannabis indica
ttttttttttttctcttttaaaaggagtggtgtggttgatgtatcaaataatatgtttgtctctctctctccagaaaaagttgtggcgtttatgtgttttgagtacatcaaaaagaaggaaaagaatatgaagcgatcattaattataggtttattaattttcggaaatgaaaggaaacttctagtgaagtttgtgttttctggctttgtcatgatacatgattgtgtggttggcactacacataaagaaataatgatgaattttttgttttataaataaaacatgtaaataaagattgcattaacactaactaatgaaagtgaagaatatttttttaattaaaataaaaagagagagagactgaagaatattggatcttcattattttttttaattgttacatttgatattcataaaagagtctcttatactcatcaacaaccacgaaaaagctaattaaacaattaaatatatatatataaatatatatataatatgaataagg

SEQ ID NO: 347720 - DNA, 514 bp, Cannabis indica
taaacaactgctaatttccaaattaactaagcgggctttacacttagtattacagtttgggaaataaatgagtagagattgcaaaaataaagttcgcggaactatttacccatgccaaaccttgagattgggagcaatggcgatgttgatggtgatggtaacgacgatgatgagaaattgaagagcgaccgggtaaagagagataaatcagagaaacgagagggtgggttgagtcggggtgaggataggtggagagggtgagctgagttgatgaggttgtgagagaaagctgagacagagtttaatttggggaagaagacaagatcgagagagtgctaactgtgccatagaaggctcattaaggtagttaaggtagggaattgaaaatacagggggaaattttggagtttaccgccaaaaataaaatttttagaaaatgaatattgtgtaccagtttgtttttaataatgaataattatattttttaaaaagcaataattatattatttgttat

SEQ ID NO: 347721 - DNA, 876 bp, Cannabis indica
atgtcgattttttttaattttttatgaattgttgtgggttgttgttatatcgattttgttgtacattatatttctatattgttgtatggtatattattattcttagttgatatttactttttattttgctatgtataatagtggtatataattttgttagcataatacaaatattttaaagtatatatataattttattggcatgctatatatacttaattattatttttatatattttaattgtatgatatattatttagggtaaatactattttggaccctgtgttttgcaaaagttaccaattggaccttctgttttgttaaatgacaaaatagacactgtattttcaaattgtacaaataggactttgaactgattttttgtcaaaataaaacttaataataatctaatctaaaaatgttatgataaaattggttacattttttgtatctgttcttgttagaaattgtcttaaagttggttatattaaaaaataaaattgttgaaaattaagctcagggtcctatttttaccattttagaaaatatagggtccattttatcatttaacaaaatagagggcctaattaattggtaatttttgcaaaatacaggtctaaaataatatttaccctattatttattttaaataatatttaattagtttctatcttattataaatggaggtatataattttattgtcattgtatatatattttaattgaggtatataatttgattagtatagtatatatatatattagtaatatatatttttattactattattgttagttgttgaccgagattttcggcaactaataaaatattataaaattattgagctgtaagaaagtgagagaaggattttta

SEQ ID NO: 347722 - DNA, 1911 bp, Cannabis indica
agttaaaaattctgcatagtccacgagtcaatcttattcagatttctgagtatttttttcaaggcctctttcatatgagttttttcgtccccttttttgagattgtctgcaactatttataagtacatagtgggcagttaattacagagttgtccataatatatttacagccattatccccaaaacgtgggatcagattacatatcacgaaatctaaatgcggtgtatgattttgaaaatcgtataactgtgacaaaaaaatattgtgtattaaacacgactttgattgttgaatctggagatgtctcgacagaaacttgattatagtgatcccaatagcgagctgggaccattcttttttttaaggttgacaatgtatgtcttacatttatcgcgagtataaagaaatcttctgacttgccacggttatgagcctcactcctgttagttggatgaagctataagaagtcttctcatagcgagatggtcatctcgcatacttattcttcgagccgatttgacttttacacttagtttgcttattgcaagctaaggtatgcgtcacttttctctgatgcctctttattcacctttagcgacatatggtttctcgctaatacactaagtgctagtttgtacattgattcctcgcctaagaccttacaatcgccaggttacaatatactctgatacttacataattaatgagttattccattaaaagctattgcacagattctcattctctttatcttgacacgtgtccttcagccgaatttcaggtataacaattgccccttaaaaagttcttttttagtaaaaagatattttaagaattctagaggacattttcgtcaagatttttccttggaaaaatgcaccctttaattctgacagttgtacagttttgagagtcattatgaatcatattttcatataatgcacaacttcctaccgttagatttctcaatctttggctttcttgtcaatgaacttcgtgtataaaagggcagcttaagcttgtcatttttcattaacctctggcttcgtagtgagatccatattcagaagggatcatttccttcctgccaaaatgtcccttctgaactcagaagttcatccttccaaactcatattacccagatgcatcaaccattttccatttgtccttacaaacttcaagcctcaaccagagttggaaatgatggtatccagggctgaggagctttcgaccaatccaaaccaggggaaccctgtagctttccatggccgatcctcacacgtgatcctaaagggtataaatcttgtgagcatctcaaaggtcctccttaggctgatgaagaattctaaaggaagattggcatggtttcaagtggatatgggaaggaagttggcgtgttttctatcagagaatccagccaacccaagaccctaacctgtgctaggagatctttgcatcatcctctctctagtgttgaggaatttcctgaggctaggaaaaagatctcggcttcaggaaatgggatcttctgttgatgaggggaatgaggtctgtgcagagatcaaggctttctacatgtagccggtctttctcaagctatgtgtagccgatctttctccgagttacgtgtggacggtctttttcgagctatatgcagacggtctttattgagttcatcgccttcccctctcatcctttgtttaggagaatgacttaagggtttgcctctagtggaatctttgtaaagacaagtttataaccactcttaggtttttcttatcttaaatgccttgcactgttttcattaaaacttaatacaattatatttgtttgcgtttttattcacaatgtaaacaactatattttgatcaaatgtacagtactttaggtttttccattgctcgtaatct

SEQ ID NO: 347723 - DNA, 1159 bp, Cannabis indica
acatactctccactttccattctttttgggaactaccacggggttggcgagccaagttggatattgtacctcttcgatggtattgtttttaagcatttttgcgacttcatcatttattgccttgtttcgatctgttcccattttttgcctcttctgtttgaccgggatgtagtttgggtttacattcaatctgtgagtaatgacggtcggatctattcccggcatgtctgagtggtcccatgcaaatacttggacatattcctttagtaattctataactcgattccttcggtctccagtaagtcacgtgtcgatataggttgttttttcctggtccgttgggtgtatgggtacttccagcaactcctctaccgccggtgattgctcttttgccggggtcgaggagttgattatttgctataacttgttattgttcctcaaggatgaggagtaccactcacgggcccccagctgatctattcgaatctcccttgcctcacccttgcaggggaacttaattacttgatggtaggacgatgtgaccgccttcattgcatgaatccacggcctgccgaggatggcgtcgtaggccgacgagcaatccacaattaaaaattttactaatttgttgactccgtttgcgtagacgggtagttggacgaaacttcgagcaatagtgctttcacccgagaatcctactagtgtaacctgggtgtcctgggctttcaagtcttcgatttccatttctttcagaaccccgacgaacaaaatgttggcagagctcccagtgtcgacaagcatgcgtttcatccgaacatgagcaacgtccagggtgatgacaagagcatcatcgtgggggtgttctaattcggaggcttcccctcggttaaatgataaaagcacgtcagggccatcgttgttaattgacgtcatagcccttactgattgaacccgtcgggcatgggccatcgaagctcgtactgaatccccgcccaggtctgccctcctgcgatgacatttacggttttcttaatgtcggtggaggggactgatcccgatttttgttactcccccatgtggagtgcgacgtccgaaatgaggtagtcccggaagaatcctctttcaccgagacggttgacttctatcttcaactgcctac

SEQ ID NO: 347724 - DNA, 508 bp, Cannabis indica
attgatacggcgcattaatggtgtcagacggacactcaaacgtttccaccgccttaattacaaatcaatctgatccgttgatctttgagaattcgaatcgtgcgtttccccaaccgtttgattggtaggtgataatgtctgttcctcatgcagttttgcctataaaagccaccacctttccttcatttcggttacttcccatttcttgccaactttgctcaagtttcccagagagaaaaaaaaatactcacaccaagaagacactattgaacactttgcaatttttcccgtccatcttcgttcactactgttaatccttcttatctttgtttgatctacagcaggacccccagtcttaacacttcactgtaagtttcttgcaccccttaccttactgttaatgtacatggcatgcttttacttatctgctcgttttttctgggttttgtattcggagtttctgggaatgcaaccttttagatttttcacgtaacaggtatagattcac

SEQ ID NO: 347725 - DNA, 507 bp, Cannabis indica
ccccattccaataccgtggtactagaacaagttgcattttcatcatacttacccaatttgtatgctcttgattcgagaacttcaaccacccgatatggtcgttccaagttaggtccgagtacacctgtcgtactatctttggtgtttagaaatactcttcttaggaccacatctcccacaaagaatttctgagccttcatttgtttattgaaatatcgagttacttcttgttgatgggctatcaactttaagtttgctgtggttcacttctcttcaatttcatcaagtgattcggccaagagtacgtgatttgcttcttggttgtacgtcaatcttttgtgggatggtggctcgagctctacgggtagcatagcttcatatccatattccatggcgaatggagtctgtctagttgccatttttttagttgttcgatacgaccatagaacttcagggagcttctccggccagtttcctttagcatcctcgagtcttttctttaatgta

SEQ ID NO: 347726 - DNA, 584 bp, Cannabis indica
atgttctggacttaacagattttgtatatattaaaccataaacatcaaaaactacatgtaaacataaccgacttctaatctattattgataataaatcaggttagattgaaatgggttttatttagggcataaaatcccaacaaactcccatttgcactaacataaaataagtagtgcatttcaatcaatctattttcttgatattcagatcaagtgtaatatatttgactcaacccaaactttaggaactgtaagtttgtggtaagctactgctttctccaccattacttcctttgtgttcataaaacattatgcaacatcactttttatatgcattactcatctagggatactgaattctttactacttattaagtgcatctgaataaacagaagacatatctctcattctatccaatggaatagagataacacagtgtagaattttcttcagtttaataactttcaagtgctttttgaaacaacaaagttacttatcttcactgatgaagctaaaattatcatagatgggtttttacatccttctagaataattcctccacccccagagtaaccaccatct

SEQ ID NO: 347727 - DNA, 473 bp, Cannabis indica
aggtagcaagaatatgtcttcctttagagagataggtgtcatgccaatcactattcatgtccatcaagatgttatacttagttagtatattgtatattatacgctaagtgttctaacaaccaacacgtctcgtatcgggaggtagatgcctcgctatgtattatcattgtcctcccttgaactatgtcctctgatgcaaaatggtttctcgtcaatacgtgaatctatagtttatacatctttgtctcgctcaagactatacaatcaacgacttatggatgtgctctatcaactctgcattgccattatatttgttgattcgtattctccaaggttgatatgtgtcatcctctgaagttccagccaaattttgggtataacaataaccgagcatccaattagtagatctagaatttaccaagtaaatttcctaacttattaattcctccttgcacaactatagatttggaatt

SEQ ID NO: 347728 - DNA, 790 bp, Cannabis indica
aaggactcaatggaggcttgaagaggagatgttacaacataaacaatagaatttaaattcaatgttttatgaataattatcatttcttaaacaattattaagattttgtttaataaaaagatcttgtgatctgataggggtggaagagttattgatatatggagttcaaagatcttttacattgaactctattatattcaaaacaccatagaatctctatatggaagggttattgatatatatatggagttcaaagatcttttactttgaactctagattatatttaaaacaccacagaatctttataacacatagggatggaagaagttattgatatatgtagttcaaacaagtcttaccttgaactctagatcatcttcataacaccacagaatctctataccacgcatatttcaattagacatagatataatacaataaacaaactagcaaactagtagaacatattcttgatcttgtatagtgttccaatatgtatgttacaatagtaatagatgccattataagtccttggacatagaatcacagtaccttatcttagtgggaagattttaaaattctagcccattattatttggatgacactagtgataacctattatgatatgttcaagaaaagaactttaaaataaaacaaaagaaagttaatctaaccattcatatggatagtaataacttatcagaattatgaggataagataggaaattttacaatatttattcgaaagacttaggcacaattaccggtccttatgaaatattttatgg

SEQ ID NO: 347729 - DNA, 506 bp, Cannabis indica
ataataggaaatatttaaaattggaaatattttaaattggaaaaaaatgaattttgggaaatatttcaaattggctgcccaggaggggctgcacgtgtagccctaggaggctgcaaatcagccttccccgcgcgcatggggagaggagcagggtctcgcgtgcggcaaaccccggcgcttacaggataggcacgggcggatgtgcagggtcgtctgggcgaggctcacgcgcgcgcacggcttcgttgtccgaagcctgatgcgtgcaattgaccacccatggacacccgaaatctgatttttccaaaaatcataactttctcaatttttatcggaattaagttccgtaaaacgaaaattgcttactttttcacaaggaatccaaataaaataattttcaaaaaagaaaacaagatttttcatgaaaaaatttcttacaacacatacattcatcacataatcacataaccaacatgaaaccatccaaatcaacacaaaacatcgtt

SEQ ID NO: 347730 - DNA, 835 bp, Cannabis indica
gagtagagaagcatataatattcaaaagtcaattcgtttttggtggactagtttcatggagcccaatacttggcccaagtgaatgaaaagtctcggatatacatattatattcaggtgcacgtatatttttcttcttgtttttttttttgaataatgattaaatttcattaaactaaatcatccaaaaccaaggatgcaataacaaaaggtaaggagtctctactaaaagtacagtcaatctcagaaagagaagattgcgccaaagcatgcgcaactgcttagcaaaaataaaagaaacaacatcaaaatcagcaaccaaagtcatacaatcataaagaatataaccataaggagaagccatatttttgaacttttgcaaatcactaatgacccttaaacaattcgattcaactacaacatgtgaccatccatttgcttaactctaagagacagcttccttgataccaatggcttcgacaatatgaggttgcaaagagccttctctagataaacttctggccctcgaaaccaaacccgcaacagaccttgcaatcaaacccattccataccgcccttgggcagaaaaaagtgcaccatccacattaactttaacaaaagggaaatcgggtgctgtccattgctccacaggtagtgcagtcggccagtttaagcttgcatctgtgacattaagtttttgagcattaaaccattcaacataatttaactgagccattgccactacctcactcgcatcagggtgtttggagttccaaaccaaatcgttacgataagtccaaactgaccaacagaacataccagcctcaagagcctcgg

SEQ ID NO: 347731 - DNA, 609 bp, Cannabis indica
tattacattcacacatgctatataaatctccataatttataaattattcttatttatccagttatagaaaatttaaaaatttatgttcaactaaattagtaggatcataatcccacttattatctaattaacccatattaataattataaacccttattattaaccagtatgcttatcgggatattacagccatcccctccttataagaattttgtcctcaaaatttacctgaataactcgagatacaactcccacatttgcaactctaattcccaagttgcttcctcataaaataagttgtctggagttcaatatcatcgtaactcaaaatacgtgatggaatgaacacatactttctcaaaatagaaatgtggaagacattatgcaccccggacaacacgggttgtaaaactaattgatagaccatctggcctatctgctccaatatctaaaaaggatcgatgtatctaaggcttaatcttccattctttcaaaatctacgcacccttttcgtaggtgatactcaaagaaatactgagtctcccactagaaatttaatatccctacgcttcaaatcaacgtaggttttgctgtgtactcaatgaagc

SEQ ID NO: 347732 - DNA, 658 bp, Cannabis indica
tcatttcataacataataagcaccataaatattctttttaacgttttctctttttttctatattgagctaccctaattttagtttgatggtcacttttatttaattttacacaatttttaattttcttttaatacgaaaaatatatttttatattctacaaagcaatacaaatgaaatgacttgtcaatttacacttgttatatattggccatatatagaaagataaagaagaagaaaaaaaaaattaatacatagattttaactgattattaattatagtgactgaaagtctactatttttatgctaggaatttaaacaggaaagaaagaaaaatgctttctacaaatatcatactaaaaaaagatatttcttatgcaaccagttcatatgcatctaaatcaagatagtgtcccaatacctctcttctcatagtattcactagctaggagttctttgcagtttatttatatatatatatatatatgagctttataattaatatatttatatatgaaacacttattaataataagtattacatattaacagtaattataataatttgactataaatatttattttaaaaatattaaattattaaattttattaaataacaaatataaaaaaaattaaattttataattaatttaacta

SEQ ID NO: 347733 - DNA, 804 bp, Cannabis indica
aaaattactataattattattttgcaacaaccgcttgacccatcttccttcataaaaaaaaaaaaattcaaaaattagggtgtttatgaatttaaggttgtctaagtgcgtttatgatgttattgtgagctgtgaagtttgaatttaaagaagtgggtttaagaactcaacttttactctttaatggtgaatggacaattttgatgaattgttgagtttttattgtttaattatattgtttttatgttattggactattctggaaagtttgaacaggtgtggtggagttttggatcgcttttggtgaagaaaaccagaaattttcttacctaccagaaccggtggacctgtcctacaggtcactagtgaaccggtcaactggttggtcagcaggggaaaattctagtttcctttgagtttggtttttggctcggggtgtttttaagaatctagtttagtgtattttagagatgtctaagctatttttgagctagtggggattagggtttgtccggttgagcagttaaggtttaattcatagttcgattttgatggttaccagattttgttgtcatgacataggagatcatcgatctttgttccactcaggtcggcatgcacacctgattactagactgaagtaagaaagctaattgcactgctaagcatgttaagtgaggaacgattatcatcgtttgtgactcgattatgatcgaggtaacgatacggtcattaccgttattgagaatgggtaaagatacggtcattaccgtttattgtgaatgagtaattactcgcttaaaa

SEQ ID NO: 347734 - DNA, 906 bp, Cannabis indica
ttcaaaatcaattaggaaaaattgtagcaaagtctcaaaaaaatttactttgatgtagataaattctcaattttaaaaaatagcggtaatagtccttaagctcgaaaatcttataagttcgttggtcctcattttaacagattcgatagttgcttcaaaaatatcacgtgttgatattaaattgcgacataaacccttaagaagttcactttaatgcatataggtccttaatctcttaaaattatagtaaaagtctcaaagctcaacattcccgttaatacataggtacacaatttaacaactttatttgtacttcttaaaattgtcacgtgtcaaaattttattagtccacgtcataaaaaatttatttaaacaacaaaaaatattaaaaattttaataacctattttttcattttctttatattaaagattaaaagactttatatatattataacagttattataattcaaaatttataaaatgacaaaatatttataacataattatttttccaaacttcccaaataaacaaacggcatgtgactacaagatcattactgaaggagaagattattgtattgatcttcttgattgatgccaaaatttttctcattaccacatcaacgtcttcttctgtgaggggttcaagagcagtcgtctgagagtggttcggttcggctcaacgacgtcctccgtttcagatttttgttttcatttattaatttactattattagtttaattccaattaatgtttttatggggttagaataataaggagttcattccttaattaattttaatgttgtgatcgtgtttatgtgttgaaactaatttaattttttcattagtcttgtcttttgacatggttttttagtcttttccttttagttttttctagttc

SEQ ID NO: 347735 - DNA, 1326 bp, Cannabis indica
aaatcgagaagacgaagtctactctaaacccttaagtgtcattacgtgggacgaagatgggtcctcgaccaaaatatggtgaaaagaagtattctaaacgcaaaagaggaggaatctaacgcgttgtgcagaaactcaaacaaaaattcccaaaaattcaacatccaacccagaaaaaatcaatgaacagtaaaacatgctatatgaacaaacagtctagtgtacaagatacgaggaacttacatgaagtgtggaaactgggtgttggtgttgatcgccggtaaaaggtcgactggcaacggcgaaggaacaaaagcaggaaatctatggtgtttgaggtttcttttctctctggaaaacttgaggaaatttggtgaaatgctgaaagtaaccaaatgaagtaagaaggttggcttttataggccagagcatgtgtgagacagctgtgatcagccaccatcgaacggctgggatagcaatcgattcaaattccatacatccaacggttggattaaatcgtcatcaaggcggtggaaacgtttgagtacccgtctgacacccattaatgcgccgtatcaataaatggacaagaaacgaatcgacgcctgcaaaaagcgaataactgcagtaatgatggtcattaatacaccaccacgcgcccaaagcacgtgccaggaagctgataaggcaaccggaggcatctaggcaagccttgttcacttcataattaaacaaggcttggggggtaaatgttgcccctgattttgcccaaaatacgtggaccaaccggatgatgacacgtggatggaaaggggttagcatttgaataaaacagctaagtctccttaaagcgcaggattaccttagacatgcctcccggagaaggcatgtaagtctcgtatgctcccggagagcaagattgcacaaaagcatctccgggtggtgtcagattctatctgaacagtcatctcgcatttaatgccgcatgggaggaggcgtatcgaaactgccatacgtaataaagtctgacggcacaacccccactctgcacctactaggctatgatcaataaagtctagtgacggctactctgtgaggaatcacatcagtcaaaaaggatgaaggactgcactcataaaatccctacagaacctaggattagaccatgcattacctatgatatattcattgggaatgtgtggctttactgatagttacagaaatgcatgtaccttaattctagggatcaccccacaaaaacactataaataccccccaaagctcattaaagaggggtcaagaattctgggtttcataagaactaga

SEQ ID NO: 347736 - DNA, 707 bp, Cannabis indica
aacgtgttccatccattcagcgttgaccgccttaaagacggtttaaatcacagctgtgtgattctctaatgatatctatacatatttaaatgtaatgtaattatagcccacaatttcgggaatattgttacgtgattcgaatttaaatataattaattgcatacctatattactataaataggggcagatcatacagaaaaaagggacgaaagagctgagagagagagagagaagaagtttactgattataaaaccttatttttgtatccaaaaatatctgaataagatagactcgtggactatacagagttaactgcaaaaccacgtaaaacctagtgttattattgtttctattattcttctaagatctctcatagtttctctgccttacaaaaaataggctcataatcgttaacgaaaatctgcattaacaggttgctaagtgttttaaggataaaatacattgaagggttgaacggtaaatttgtccatattcaatatagatcatctataaagaatctttgactatttggattgtaatgatggataatcataatgtatctatatcttggtacatatagagcattttatataattaagagtgcaattctaaatctatagtggcgcaaggaggaattaataagttagagactttactttgtgaattctagatctacttattggaagcttaattatataggcccat

SEQ ID NO: 347737 - DNA, 793 bp, Cannabis indica
tggtacgctgactatgttaatttcttggctacaaaataacccctcccgagctttcgcgtcaacaattgaagaagttcttttctgaggtgaaacattattattgggaagagccaatcctctacaagcactgcgctgatcagataattaggagatgtgtgcttgaagaggagatgtattctatcctaaatcattgtcatgctttaccatgtggaggacattttagtggaaacagaacaactgcgaaagtgttgcaaagtggattcttttggccaatgctaatcaaagatgctactctatttgtgaaggcatgtgatcgttgtcaacgaacaggtaatatctcaagaagaaacgagatgcctttaacaggaattttagaagttgaattgtttgatgtgtggggaatagacttcatgggtccttttccttcttcctttagcaatcagtacattcttttggctgtcgattatgtgtctaaatgggtcgaagctgcagctacacctcagaatgatggtaagacagttctccgctttctacagaagaacatctttacttggtttggtactcctcgagcaataataagcgatgaagggagtcacttctgcaacaagcagtttgaagcacttctttcaaaatatggcgtccgacatcgaactgctttaccataccatccccaaagtaatggccaagccaaaatttctaatcgggagatcaaaatgattctagagaaaacagtgcaaagatcaaggaaagattggtcaagaaaattagatgatgcattgtgggcgtatagaac

SEQ ID NO: 347738 - DNA, 870 bp, Cannabis indica
tgcatagtgagtttgagatgagcatgatgggagatcttaactttttccttggacttcaaattaagcaacaaaagtatggcatattcataattcaaaccaagtacatcaaagatctacttcaaaagtttgacttggaaaatgtaaagtccatgaaaatccccatgagcacattgttatacccgaaatttggctagcacttcagaggaggccacgtgtcaaactgggaagaatacgaatcaacaaatgtaatgataattatatttaaaaatagaataactcattaaatgtagaattgacagagtatatttacaacccactgactgtaaggtcttacatgagataaagatatacaaactgttgcctcgcgcattaacgagaaaccatgcgacactaaatgtgcaaggcgaggcatcaacctcactatgcatgaagagacgtagacgagacatgatgactgttaagacactcagcgtataatcacattatacaaactaagtataacagtcgagtaaatctaaacaactaatagcaaggcatccatctcgctataggaagactcgctcatggtaccttcactaatcaactccaaacatctttcaatgagattcacagctccgtcgagtcagctctctcatatagaagctaacattcaaatgatgttgattgcaaaagttgaccttgtcaccaagaactgcgattgtcaaacggagcgttatgtcttcaagcgcataattgatgaggtttacattatcaacctcagaaagacatgggaaaagttctagctcactaccagggttattgttgctatgttcccagggagacatcccagaacaatatgtgttacacatatttaatacatgtttacattga

SEQ ID NO: 347739 - DNA, 628 bp, Cannabis indica
tcgtgtattttgctcagatatgctatcatcttttcttcccgtgcctcgtgttctccagatacatgatttaccaccagctgtgaaacactgcagatttcaatgtgttcgaccttcatctcccgggctagtcttagtccagcaattagagcttcgtactcggcctcatttttagatgctttgaatctgaacttgactgcagcgtgtaagtgttgcccccaggtgtgacgagggcaatccctgcaccagatagttgatctgtagctgacccgtccacatgtagtttccaggtcggtttgtcctcattgtggcttggctaaggtattagtgctggctcggggttgctttctggtatgctttcttttttgcatgtgcattctaccacaaagtctgccaaggcctagcctttgattgttgttcggggttggaaagtgatttcgtactgacccaactctatcgtccacttgagtaaccgtccaaaagcatctagcttttgcagtatttgtcgtagtggctggtcggtagatacccaatggataccggccattggcctcaatgagtcttttactgatgtaatagactgggtgttgtacgctgttctcttctctgatcagcacggcactcacggcat

SEQ ID NO: 347740 - DNA, 827 bp, Cannabis indica
ttatcccacaccaacaaaccaatgacaaacccatatatggaaaaaaaaatcactcctttataatcaatgacaaccccataaacaaacaatgaatatatttaccataaagacacaccaatgccaaaccagtcgtacaccccaggaaagccacaccccaggaacaaacaccaaaccagtcgcaccagttgcaccccaagaaaaccaccctagaaggatcacacaccagtcgcgccccaggaaaaccaaaaaccaaagacacatgcaaaccagagacacactagtcggaccttggaagaactaaaaacatactctaaaatttctttactcagcaaaataaaacaaaatacactaacaaaattcagatttatataccaaaattcataaagagaatcttaatggtgagaaataaaatctggcaaaaatatacatttaatataaaataaaaccaaatcaactacactcatatctcaaaattacaaaataaaactttaaatttccctaagattatttatatttctttagattaaaaatttcttacgatagattccatgactctcgtcgatgcccaaatctccgccaaaaccttagccaaatctatgtcagtttgcacagagagaaacaaagagaaggatcccaagggagagagaaagagaggcagagatatagatctaggggttttcaaggtagtgaagttcagagtcgttccgtctggctctgagcaaagagaggttgagcaagagaggagagagggaatggagagaactcgaggccatagactgccagagttgctctctggctctgcgcagagaaaatagagagagagagag

SEQ ID NO: 347741 - DNA, 1084 bp, Cannabis indica
ataattgattatgcatgtttagtacttcatcacttctttactcgtcataatataattcatgaacaaacactatacggtacctaatattcttaatctccaagttgaaacaagagtttgtttttcaatatatgtagtcatagtatatatttttctcattattttctcaagttgtcttatttttgtttataaataaattaatatgcaatcgtatgatgatttaatattatatatatatactagaagaaagttaagtgccaagcacgtatatttagttttattctatgtgcacgtataattatattttgaaatcgagatctaacacttttcgggttatagttttattgtagatcatatctatgtgcaagacacatataattaattttattttaggtgttatataagtctattataaatgatataacatactatatatatagatatatgtaatttaatttatttttatagtgtaattgaatttgtttaatataaagtaattaagtcaatatagattaatcttaactattttataggagtttattttatttttattcttgtaatacattatatcaaatatattttgattattcaacaaaaatcatcacaacgcttaataataagttctccatctatccgcataaaatatccggtataatcagtttatatgacaacaccaaaataagtgtgtcaaatctattttaggtgttatctatatattgtttagatattaagtaatcaaagaatttgatacaaatgaaaaaaaaaaagagaaaaatagatcaacaatataccttatgtcattctcttttaactcaaaactcaaatttcaatttcaaactaaatccaaacaaaattcaaaactcaatcaatatacattcactaataaaaaaaataatcgatttaccacatatccatttatccaaactcaaaagcatgtatgatgtccctataaaaaaaaattcatttacaatgaaccagtgcatataaaaaatttctttgacctacctcataaattcaagaagttagttaaacaaaattcaaaactcaatcaatatacattcattaataaaaaaaaaaatcgatttac

SEQ ID NO: 347742 - DNA, 518 bp, Cannabis indica
atatattatttccaaagaggaaagaagaaaacgtcgtgtcgtttggatcacgagcagagtgagagagagagtgaccggtcgtcgtttttgatgttgtgagtctgaggttgtcgttttggctgaatactagtactgtcgaatagaggtgttcatcaaaccgcacaaaccgctagtaccataccacattgcataaaatatgcggtttgaaatctttgcggtgcagttgcggttgcagtttgcacttttgtcaaacccgcagtgcggtgtagtttgcggtttagaatttaataattgcggttcaaaccgcaccgcattatatattacaaaatcacaaatttttacaataagaagaataaatatatatataggtgcactcttaatgggtattacccatgaatgggtaaaattagaaatttttgagtttttatgcttaatttttttatctaattaaaaaaatctctcatttttatatcatatgggctgaaattgttccatcggtaaaaaaaaaatttaaaaaa

SEQ ID NO: 347743 - DNA, 719 bp, Cannabis indica
cacttgtttcacaagtatgctttttgtctgttcaaggctttgggtacgaccaaactttttgtacacatttaatgataaatttataacatgctaatgaacttgactcatttgaattggaataaatatctttattcatttattggtcggaaatatgtctgttactatagtaacttacattgaagctattatattgatctaatatgatcttcagcttagcataaacaaaacaaattggagaaaataaaaattttactttcatgagtggtcatccaacctgagtactttgtaattttatacgaacctttagacgtggtccgcccagaaggccattcacttaacggtaaatgttcttttgtttcgtaattaatatggtcatccgacctggtacttttactcgtagtattttcttaagtgttcccggttccaataccttgttactagaacgagttgccttttttcgtcatacttacccagtttgtatgctcctaattctagaacttcgatcacctgatatggcccttcccagtttggtccgagcacacctgccatactgtctttggtgttcaaaaatactcttctcaggaccatatctcccacaaagaacttctgtgctctcacttgtttgttaaaataccgagctactttttgttgatgggctatcaatttcaagtttgctgcgattcgtttttcttcaacttcatcaagtgattctacaagga

SEQ ID NO: 347744 - DNA, 529 bp, Cannabis indica
agtggagtggaatgaagaagagaattcggtagaattcgtatcgaggtgtctgtcctgtcagcagattaaggctgaacatcagagaccggcagggttgttatagcctttaaccctaccagaatggaagtgggaggacatcacgatggacttcgtggttgggttacctagaaccacgggtcagtttgattctatttgggttgtggtagatcgattcacgaagtttgctcattttctatcaattaaaacaacctattcagtggattagttagcagagttgtatgttaaaaaaatagtcagactacatggtgtgccaaagtccatagtttcggatagggatccgaagttcacctccaagttttggcaaagtttgcagtgagctatgggtacaaaattaaaattcagtacagcattcaatcctcaaatggatggacagtccgaaaggacaattcatatattggaggatatgttacgagcctatgttatggattttgaaggctcttggagtaagtacgtgttgggttttgtgccc

SEQ ID NO: 347745 - DNA, 1179 bp, Cannabis indica
aagaaaaacaatcgtgcgtacgacaaaatatgtaaattttatttttgacagcgtaaaccattcgaaaatttttaaaaatttacaagtggtctaaaataagtacaacgtacataatcatgaaaaaaaaaaagattaaactaattaacaactctcctgtatgccaaaacatatagaaggtctaccaaaacgtacattccattaaggggtgcactatagacttactctattttatatatagcatgttagatttatattttagatgaataaagaatgttaaaattaatgcaatttagatgaataaagaatcatatcttttgtgaatggcaaattatgaattttttgtcatctaaacacacggtagtttcatttgaatatgttttttagggctcatttggtacatcgttatgtattgtatttgtttacccagaaattaatcctggtaatctggacatcaatctttaacacatggtaataaaaaaaaaataatttcatagttgagtaatcctgagtcatagcagtcgacttgggagggatatccctaaccctcgcgcctaggttgactttgtagaacactagaatgggtttttagatcgcgctaagttgtttccactcgccatattttagcattttgtaccacgaagataagaagaatccaaatctaaagcctggcgttgaaaatatacaaaacagcaacatgaaagtcaacccagttacctagcccctaagaagacattcacactagagttttggttttcaggttcatcttactgcaaatggctcaaactttgagctaaaacatgaattagacctgtcacgaacatatttgaagcaacagaatagataagcttatgatcaagtcaaaactccgagcgatcaatcactactacaaatatagcctttagtgacactctttagtgacacgcttaaaggtgagagtcactaaatgtatagagataatttttagtgacacgcattattcaacactaaatatttaactttatgtcccaaagtgcatgattctaaaacatatgaagtgtcactaaaagttatttaattatttgtgaaaaattaattagtttgcacgtcactccacgcgcgactgggataacttttccagtcttacatggagcgacgttatacacaaagaatattgaaaaaaaaatcaatttataaatatta

SEQ ID NO: 347746 - DNA, 886 bp, Cannabis indica
cagttgtcccccttgtggttgtgtcggcgggttaggagtattgtttccgggtgccccctatggttgcacattggcacgtggggctacaggttgttgtgcattcactccttgttggttgtattgcctattccttgcataatgagcaagaggcccattacgtataagagtctctatctcatccctcaagtttcgacactcgttggtggtatggccaatgtctttatgatattggcaatacttggatggatctctcttcgcacgacttcctttcaagggttcaggtatccgaaaggccacccgatgttcgtttgccacatatatggtttcttgtgtctccacaagttcggagtatattgtgaacatggactgataacctttgctctttttggcattgttctgatctcctccattgtcgccctttctcttattattgtgcccagagttattggtggctggagggttggcagttgttgcctttggattggtggaagttgttgttgtagtagctgaaacaggttgtcctgagggaagaggtaggttgttagctaacctggcttcctcaatgtttatatatttttgggcccttttcataaattcgtcaatagtgggggcacctctcccttggaggctatcccatagtaaagatccatgagttatgcctgcccccaaggccatgagtctcccactgtcatcaacgttcttcaccttggctgcctcgatgttgaacctattaatataggcctttagactctcaccgggttgttgttttacattggccaaggaagagcattcaggttttcgagacccgacggcacgaaattcttttttaaaatcactcgacaatttgtcccaagaggtgattgaatgtttcttgaatttattgaac

SEQ ID NO: 347747 - DNA, 742 bp, Cannabis indica
aatttcacagcaccctcagcccgtagggctttctcaacatttctgcatagatgttgctttgttgtagtgatcacaatatgcctaatcttcacattcaaacaggtcaggtacttttctttcttactaaaatctgttggcccaatacccacggcgagtttggccaaatgatcgaacttggtggtgtactcagttctgacattccctcagtctgcactaacttggtgaattccttccgcttagcactgcggacggattcattataacttttggcattgaataattcccagaattcttcccaggtcataacagtgacgtcccgggtgagggacaccaactcccaccacacgagagtgccctcctggaactgaaaagtggcgcaggtcacccgatcattaccaaccagccccataaaattcagaattcgcttaattactgtgagccactcctcaaccttcatcacattaggacctcccagaatcactgtaggtgcttgcttacgaaacctttcatataacagctccatacggttgccagcaacaggttgttctgctggcactgctggagctgctacagcatgagcttgctaaggaggcacggcagtaagaccctactgccttaatctctgaatttcttcatcttgttggcggattcgatcttgcatttccgcaaacctctgctcccaattcggagaagcttgtggtggatttacaagacaaccaccctgagctctgccacggccacg

SEQ ID NO: 347748 - DNA, 573 bp, Cannabis indica
accattcgtcaaaaatactactttaagtaatatttatgtatatgctactgaaacaataaggtcgtgtctcaattacacaacaactcaaaatgagagattcaagatcaaaaatgaccaaggcctttccttctataaagttaggtagcctagttcaataactgaactaactaacttataacaaaaaaaaaaaaaacagaattaatgaaaggacattaactctacctcagcaatgtctcagcttatagaaaaaaaaattactctctttcttctttttcatttattcttgttaagattttctaattcatgtacctatctaacttacacaaggtcatttggatattgatttaaatgatgctagaagacagcaaacaactacagtaaggtcacaaggttttctttttttttttttaatgctaattgattacttataatctcatagttgttaaaatttaattcttacccgcacagaattttcaattgttgttttgattcttattgatgaaatatatgagatattatatatggaatatggtatagtcacatttttttcattgcaaatatatgagattattt

SEQ ID NO: 347749 - DNA, 533 bp, Cannabis indica
tgcattaagttcccaacaaagaatggggtagggtgcctaaaatggaatcaataagttgcacgggaatgctacaaccttgccctgaccaaggccaaaaggaagattcctctggcgagagtttggacagggggaaaagcattgacaaatagggaatcgcctaaggctaggatgaggatgtggatccatatgtaagcgtgttctatatctataagttgcaagagaatgctatatttataagttgctcgggaatgctacaaccttgccctaaccaaggccaaaaaggaagattcctctggccagagtttggacagggggaaaatcattggcaaatagggaatcgcctaaggcggggatgaggatgtggatccatatgtaagcgtgttctatatttataaatttatatatgctaattaactttactttttgtgtagaccgtgttggaaatattttaccaggatctagatttactaccaagtatgtttgactaacatcctaatatgaattctaaaacaatgaaataaacacataagagt

SEQ ID NO: 347750 - DNA, 786 bp, Cannabis indica
ttacctattgaacttaagactaaattttcactagtgttaagataggttaccatcaatgagcaaaacacttagggagtttacgtcccatccctcaaaaaggcatgccttaatcttgtatggagattaagcgatttgttataagctctcactattgattctatatgaatcatgcatgtcaaaatatagtgttcacttcatggctattttcctccttaggtagataagctttgaaaattcaagattaattttcacacaactcaaatctctactaattttaataccacacatataaaaattaaacagtattataagcaccaaacatgtctaaattatactttattttaagacaccaagcatgtctcaaattctcatattggattattactcccacacttcacatttcaccatcaagataaaattttatagcttattttggaatatagatgacctctttgtctctataatttctcttaaatttaatttctttcctaaattgttttgaccaaaatttgacaccaaatatgttaatatgaaatattacttttctatatttttctctttaaatgactctttaagttcactttaaaaaaataccatttgacatttttagtttttttttaacaaaactaaataccaaactcacattactaatcccaaaataatgtgattattttcaccccataattttaaagattatctcctcattgagattagctcaaaattatactaaagtataacaaaattctcatcaatttttttcactactttaattatttaagattccaa

SEQ ID NO: 347751 - DNA, 1086 bp, Cannabis indica
atattaaaggctttaattttttttttttttgtcttatatggcaatttcatctcaagaccggtcctgcactactgatacctaatatattgttattggtataattaaatattgaggatcatataatttaaggtaataatttttagaatatcactaactaatcaaaaaacaaccatgataatattaggcactattaataccaataaaaatactcattaataatatgacatagatacacaacactaactacctacataaatattatggctaaacctagctagggttgaaaacaatatatgtaaaaattttgtatagtgtgtgtggtttcacttccacattaggtagcataattaaagttaataatggattgatctagctatacattagaataggccatatatatagtgtgtggtgatatatagctataaatttttcttttgagttttaggacacatgctacataacaagtttggtaatttaattaaagttaaatatatagacctatatataaaagtcataataattactacatatattttgtatatgtacacatatttggtgaaccaaaaaagaaaaagaaaaaagagttgtagacagttggccctatatactaagtatatatataattagtggccacaaatataaatatatacatgtcggcatatatgtgatttaatttgctaccaagtcttcagagtcatcatatacatatggccttaaatcacacacacattataacatttaatatatatatttataactagcatgtatatatatatatatatataaaagagataacgtcttttttgcaatttgcaatcttgtctaaaatgaagccaaattattttttgagataataaatacacacttaaattacaaatacttattacacacattaatatataataaatataaactatttatatttttaagtgagatcactttttatttgttttatatggttgagattagttatacagtattgtgggtaataaaatatgtataatttaaatgtatatattcctattatttttcatatttctttttgattgatttctcattcttactttttatttttatttttaataa

SEQ ID NO: 347752 - DNA, 494 bp, Cannabis indica
actacatacggtgcttaccacttttcttaccttagttcagaactcaagtgtacaggccaacctaagtggaaaacacgctaggcgatcccggtcctatgtcacgacaagtaaaactcaataaataccttaacccgaaatttcgtaataaaaccctaactcaaaatcaagcataacctaactcccaacaacttcaaaataggtcaagcatcccatattcaacttaaaacagatgctacacaacttcccgggccaaaactgaacctgaagaaaacccgaaaaaattcccttgcaagcaaccggtcgaccggttctggcagaccagttcttcaaggcttttctcttccaaattcggcccaaaactccaccaaacctaatcaaactttccagaacagtataatatagcaagcatgacataaccaaacaactaattcattgcaatatatcaatttgctcaaaatcacacttcaaagtaaagaaaaacacaattctatccc

SEQ ID NO: 347753 - DNA, 832 bp, Cannabis indica
gcattgaaaatgaattttgagtttatcgtgaggaagtctagcaccaataatttattttacgcaacttgcaaggattaaaattgtaaatggagagtgggggagtaagaaggcacgttgtgacatgttagaggtcactgtgttccacaacaaacacacatgtaacttggattctagacatgctgataaccatcaagcaacatcgtgggttgttagccaccttattaagaacaagtacaaatcagatggagctaagtagaaggcaaaagacatatagagggatatgtttgaggattgtggcatcaagatgagttacgagaaggcatggaggtgtagagagaaggcacttatgtatgcgaggggtacgccattagaagcttatagccagttacctggttacttgtacatgctagaataaaagaatttgagtactattacagacactgtcatagaggacaacaggttcaagtaatgtttctggtcactagatgcttgtaggaggcgatttaagtttttctgtcttgtgattagtatcgacaatgcattcttgaagacaaggtatgggggcacaatgttagttgtgtagcgtacgatgaaaatagccaattatttctgattgtctttgatattattgatagtgagaatcacgactcttagaagtatttcttgccaatgttaagggaagtgattggggaggttgaaaacttagtgtttatattagataggcatcaaagcattgaacatgttgttgaggttgttttccccgaagcatgccactatgcctgctataagcttatttctatgaatgtcatgttgggaatattttaccaagatc

SEQ ID NO: 347754 - DNA, 570 bp, Cannabis indica
ttggttatttccaaataaccgacgccaaaagggtttataaccatagcccatcctttcatcttcctcattcgatcagccaacccagaaatccccaaatcagagaaatcccaaaccctctccgccaaccaccacggaaaatcaccccatttcaccatttttttttttttaccattttagctcatttttgtttctaaatcttctatttttcatacctaaaactatatacctgaaaatataacattttttctcattttttagggtaaaccgaaggtaggtagtggttgtggtggttatacctccgaccaccgtttttaattagtggagaaaacattgtatctcaacgtctattaaggtataaatctaatttctactaattttagtaatgtacattgctttattttttattttataaattttttagggtttttctatattactaaatatatgtattatgttgtattgaatatgtactgtgtgtatatatattgtcaatgagaaatgtattgtgtgtatatatattgtgaatgagaaatgtgatataggagagtattttatatattgtatatgtat

SEQ ID NO: 347755 - DNA, 362 bp, Cannabis indica
ggttaggttcagcttattcgtattattgatgttctttgagttgttcgtggaagctaacttttttaactggcaatacttacatcttgggaacatagtagttcaatttagtgggagcgctgatcatatatatggaatctatagcttctataagtatttagaagtgaaacgatgatttccttcgaactttgttgaatagagataaatgattgagatctcatttcaataattatattaaggataaaatacatagaagggtagaacggtaaatgtaatatcctggaaaataaataatatttaaataggcatattttattaaatatgtaattatgttggtaatgaagtaagataatgatcttacttag

SEQ ID NO: 347756 - DNA, 527 bp, Cannabis indica
agttacacacataatcactatcacttactgtgtatacaacctattaactttttttatctttttttctttcatttttcatttcaaatttaccattcagtatttttttccttttctttctcaatttttcatttcaaaaccatcttccagtcattatacttttgaaacctacttttaaaacccacaaaaaccacctcccacccataacctttgccatcttcttcttccaattgcctcatttatcagtttttttatatatcatcttcgggttctcatctccattgccaaaaaaaaaaacttcaaaaattggtcataaatcagttgttaacaaggctaaagtgaaatgcttagtcatcgactacgataactccgatttcgctccccctatggctaatggtggttgtcgtctagtgaagaagaattcaaaggtgcctttgcctaaaaaaatttaactcgacagtgtttaacgcccaaaatgtgacttccactagcggtagttgtagtatagatcgggcgatcgattccacagg

SEQ ID NO: 347757 - DNA, 523 bp, Cannabis indica
atagtgtaataggatacttttcttttttaagagtatagattttcattaactattatatatataaaaatatattttctagtttataaattcaatttttattgtcccatttttttaaaaaattattatcaaattaatgcgtctctagttacaacacttattctatgaaaaaaaaagtttcaacacttttttcaaatttctttcttttttaacagtatttcaagtttcacaataaactacgttaattgtcaaatgctatacatataggggcggagggagggaccttatgggtcatttgtccccctccacttcttataaattaatttttgagaacaaacattttttaaatattttaaattttgcctccataaaattaataacattttagttatatatatatttttaattttacttctataaaatttatatttttaatttttatccgacataattttatttttatctcacataattttatttttatctcacataattttaatttttttcctactaggtttatagtttt

SEQ ID NO: 347758 - DNA, 758 bp, Cannabis indica
acctacccagaaaccacatacacaaaaaatcaccattggagctcaagctttgagttccaaactcaagcttgagcaaaaccaactaaacaagcaatccactagcttaattcaccttaaactagcataatattacctcagaaaacatttagaaacaacagcaacatcacagaacagaatcacaacattttccttccaaaattcatatttttgcaaagaaaactcaaggctttaacaatctaacctacatgcttctaacatagcttaattcatttcaatttaacatgcttacaccacagaaattaaccacagaatcacagcaacaacaatatatccaaaacatgcatgcatttcatcaaatttacttaaaactcaagaaaacacaaaaggaagttctaagagatcacaccttgattagattacacaaagatgagatgaaaatcacaagaattggaggagaaaaatccctgccctagcagccaacaccaagccgaaaagagggaggaagagagagctttgagtgttttgtaatttcttttaaaaaattgactaagtgttcaagtgaaagagaaattggattttaaagcatataacacttcatttcagccacaattattatttaaaaataaacatttaatccatttattaaatcatataagacaaaacactaatggggcaaaaagaccatttttccccttcaccataaaatcatgaaaatcaaactaaaggggtatttttgggacattctaaattcccggcca

SEQ ID NO: 347759 - DNA, 901 bp, Cannabis indica
tgtcgaacacaaaacatgcaaaaatatgaaattctatatatgacatataaaatgtattctgaattcaaataaatctccgtaaaatgataattcataactaacatgcaagtttcatacttaaatcctaattatctactaatttccaaattaaagctaagggatctttacagtcatggtcccgacactaactgggataatattgtgttgtagtctcaattaatttgttttaattaatcaattagaattgtaaataatgctatgtcttatttgtgaattttcaccaaggaaggacttaattaatattgagaagaaaagagaattaaaagtttatttattaattaaaagaccttggagggtctaattaataaatatatttaaatagatggaattagtatttaaataactagagcaaaaaaatagtattattgaagaaagacaagtttgtttcattaaggaaacaaaataatggcaaaattctaactcatgggcttcactaagaagatcagccatgagatgaattataagccattggatctttctaatcaacccattaagctctaatcataaacctaatgaatccctataaatagaaaagtatagatcttattttcataagacttcaatctcttttgtcaggcaactagaaaatagaaagagagcttcttcttccaatttttgaaattattcttcttctctactgaataatttgaagtccacgttgattgagagtatgcccactcatgtcaaagcaatacctagtatagtgtggaagactgtgtctaaccaaactaaaggagagaagatccaggttcaaatcttgataatgcactgctacagaaaggaatcaagtgctagagatctaaatggaaggagtcattattattatgctgccatcaatgta

SEQ ID NO: 347760 - DNA, 831 bp, Cannabis indica
aatattaagcagtgttttaggataaacacttttagtttatcgctgttgtgacataaagccgagttcattagggaggtttctctatttggatggctgacgtgcatgaatgattaaaggtaagaaagtatattatactgcatagcatgttatgttgcaatgtaattaatattgtttagaattgattggtatttagattaagatacagttattgttgttatataacgaaaaaatttcctgattaagtgatgtgatatatggataccgagagaggtattcaagttgtgcctgtgaggaaactgttataaagtcatggctaaaaccgttgttaggtttcttcctatcaactacgcctaattaggcacggtgacagtgatatgtgagtgccaggctatggcatatattgaacttattgttaggtttcttcctgttggcgatgcttgattaggcattggtggcagtgacatttgagtgccaggctttggcacacgttcgtctaattaggcgatgcgatatgttggtgcaaagttttggctcgggctcacctgattaggtgatgcagttattgttgggttttatactctaaataataatcatttcaatataattagatttactatttaataaaagatcagaaatcatattatgttgcatagttcacatgatttatttcatgattatatatgtttaatgtaaaaaatttattaagtccatatcctatatttattcatgattatagtgttgtcaggacagtgaaatataattatgattatatgttcaaaaatttaagtctcatgatttgtcagtacactggatttagactgatatgataat

SEQ ID NO: 347761 - DNA, 896 bp, Cannabis indica
aaaacaaacagttcttcaccttctggttgaaagattaccatcatcctcttacagtaaatactggctaaatatttggatacgaaatccattcccagtatgatatcaaaattggctaagctcatttctattaggtcagcacttaaatccctatcgtcaattctgatcggcatagacctaatccaccttttggagataactaactcttcgccaggtagtagggttcaaaaccctggttcgtaactatcgtacggtctatccaatttactaaagattctggctgccacataagaatgtgtggccccagaatcaaacaatacagagaagtaaaagttgttgaccgagagctgacctgtcaccaccgaaggactggcttctgcatcagcctgagtaattgcaaacacccttgctggagtgggtttcgctgcagcctttggtgccttggttctgagttgagggcaatccctcttgtaatgccctggcatgccacactgaaagcacccttgtcctctacagtcccccagatggtgccttttacaactggggcactctgggtaagtgtatcgggtcttagaactaccctggcgactgcctcgaccctgggtccccgagaacctcttgttctgacctgagccaccggttgtagtggatgccttccttttgtgatccatggccgaaccactacctcccctgctaaagcctgatgcaggaggggtaggagcctcgccaacctctggagtcctaacagactctgtcatgcatccaactgcgccctcaactcgcagtgccttttccaccatttcagcataggtggttttgtcgtctgtagtaatcatcaaatcatgtcgaatcttcgcattcaaccaatccaggtatttttccttttactaaaatcggtt

SEQ ID NO: 347762 - DNA, 833 bp, Cannabis indica
tatcacataatatcgacttgtacccatacgcctatttataaggcttaacaaatgattaagaacgttccatactagggtacaaccactgtaccacatacacttcgtaccaatattgtacgagtgttggtagggtacactaagtgttataccacacataccctgtacttccccgtacttgtgctagtaacaccgtatgtactcttgaataatatacactatatcaatgcactctataccattttccgtacaagtgttggtagtgaaccaaccataacaagtatgcatatacatttcacacatacatacattcgcatatatatcacatattatacgctattcttacctcttttcccaattcaagtgagttggccgacctgaacggaaagtctcgtgctggatggatgccctaatcacataataaaatcgagtaaatatcacaccaaaaccttaatccgggaaacctgaacctccaacttaaggttctactattactaattggaactacaatgtcctaggaaatagggaatcacccaaccaatgcactgaaatggacacaaatcgaggaaaatgaattgttcggggaatctaccaaaatcgattttacaggtcttggcaaattggttaaccagtttgcaccaggtttccccaaacaattccaaacttgctcaaaacttgtccaaataccaccaaactttccagaacacctataattaagggtgggcatcatccaatccaatccaattgaaccgaaccgatccaatccaatccaattacaaaaagttagatatccaattacaattggattggattggatgctaaaagttggattctaa

SEQ ID NO: 347763 - DNA, 707 bp, Cannabis indica
tattgaataatagagattacattgaaatggagttttatttaggccataaaacccaacaatgttatatttgccaagatatgaatcaattattgaagacaatacttgtctagcttagttcgatactatggaaggatatttgcaaaagggttttatgagtaatgccttcttaagttgaagtagagattgattgtggtgctaaactcagttttacaatagtttgaaaagggcactgcctatgtatcaagagaattgaaaagttaaggtttggtagcaatttatctgtcattggcaaagggtataactagtatgggaacagagtttggtaatttaaaagatttgttaacacgactgagtagtcaaatttattgaaagggattaatatgatgtagcaaagagaaagattattgagtaacaaaagattgattatagatttcagttgatgaaaagattgaagcaagaaatacttgacgagttttatgttatgcaatacttgttacatttgggaacaacaagatgtattgtgtattaggtaccccaccatgagcttactctagagttaagcgtacttaacttgaagtaatctcaggatgggtgatctcctgagaagttttgtcaggaagtgtgtgagtgaggacaaagcacgttggaaagacatattagatttggagactagttgtaacaccctaactattttaggcgtattacgt

SEQ ID NO: 347764 - DNA, 533 bp, Cannabis indica
cctccctcatggctgaaaacccaaaaaatgttaataccccacatgaggaaactaatcatcgttctgggaaagaaacaatgggctccagaaggtctaccaactcgcggtctagacataccacctgttccagaaggactcaacctgagggtggccccagcacacggaccacacgttcctggaggacccaacccgatgttggtcctagtacgcggacaacacgctcgaggaaaactcagcgtgggagtggccagaaccctgggacgacggatgaagagcccaattgtggagaagcccagtctatgggagaaggcacttatgaaacgtaaaaccgccgcttaagacgctgtttggaagaggcgcaatgtcagaacgctgaatttgtaatatcccgataaatttaatggtaaataattagggtttatatttatattatgggttaatcaggtaataagtgggattattatcctactaatctatttcagcataaaatttaaattttgctataagtgagtaaataatcgtaatttgttaat

SEQ ID NO: 347765 - DNA, 826 bp, Cannabis indica
aaataaaaattactattatacttagtagttaaaaaaattattattcgtcctaaatttatcttcgaaattaatgaaaatgctcatctagttaaactatcaaaacattcaaatttaatttaaaataatattaaaaatttaactaattctaaatatcaaaatttgaaaataatttttaataaaaaaataagcaatatgaacaaatttattattaattgcaacattttaagtggattaattatatttagatttaactaactatatgtatgctgaccctctacgtaacaacatctaataatttgttattttttatataactaatagagtaaattatagtaatctgtgttttgttaaaatacaaacctgatactttatgttttgaataatgattaattggtctcctttatgtgtaaaaactactcatttagtacccttattgtatttaagattctaatatacccaaacaatcctcatattaatatttaatctgatatagattttggtgggcttcttactcgattactcaagcagtggactcctctaccgttattaatgataaatatatgggtattttacaattttgtatacattattttaattaattacaaaatatgtgcaaaaaaaacttattatcattttttcatacacttttatatactagcaaaaaactacgtgcgaggcacgtatactaaattttatgctaatttttttctatgttatttgaaagttatataattaaaaattaaagaaaaaaaatattattagttattaggtgagattattattatgtgtataggaagaaatcacaaattaattaatcttataatct

SEQ ID NO: 347766 - DNA, 623 bp, Cannabis indica
aattatttatataaaacaaatcctcaaatatctaactacctattcattcaaaaaaaaaaaaatatctaactatctttttattcaaaatatatatatctaactatatattgcttctgcattctaaatttttcagccactactcatcctcctatttttggctttgatatgcaaatagagaaaagattaaagtgtcagacaattttcatttagtattagtgtagcaaattgtaatattgactacaagtgagatatagtgatgagaacggttttgaaattatatggtaaatttttttataaatttgtcaattcttataacaaatcgagaggtcaagcctaacatcatattatacaggtcgtgtttagcttccattataataacaagatttagtaaatacgagttggatcggtccgtttatacacacctattttttcatacaaaattaaatgaaaaattagattaaaatttgatacaatttgttacttagctgtcattaaatgaaaattataatttattttatatatataatttaaaatttcttaaacatccgctgcgaagcgcgggttatttactagtttctaaaataatagaatttaaacacatataaagttcaagaaatcttaca

SEQ ID NO: 347767 - DNA, 444 bp, Cannabis indica
aatcgaaaattaattccatgaaacaaaatgaaaaaacgaagaaaaaaaatgtgagctgtacgaatggtatgcagttgcataccatccgcgcgcacccattaggagatctgccgagaaaactcggtgcaaggcttcccttgcatgatttctgcgcgcggataaggggtttaagacacccctgggcgagtcgcttggacaagaccctgtccgaacacacagcagaccgagggacactcggttccgcgcgcgtggggttgggtaatcaacctaccttttttcaaatcttcaaaaaatcataactaatacaaataaaatcgaaattgagttctgtaaaaaattaaattgcttaattttttccaaactatccaataaaaataattccagaaacgaaaattcaataatttttcacgaaatctcagattcatcaatcaatcatcatataac

SEQ ID NO: 347768 - DNA, 616 bp, Cannabis indica
gcttcagcggaagatttcgaaactattggctgatttttggacttccatgagaccaaggactgaccaaggaagacacaataccctgtgatggaccgacgggtgtcaggacaagagccccaatctacatttggaaaaaaaattcagttgtggttctacatttgtaaagttagattcagcaaaagcacacaaatgaggattagaattagcataaaaaatcaggccttggcccggtgtgcctttgagatattgaagaatcctatgtgcagcatgtaaatgaggggtgtgtggctcatataaaaactgacttaaagagttgacagcataggagatgtccatacaagtaatggacaaataaatgagcttaccaataagtcttctataaatggttgggtccgaaagaggagtgccaacatctttgcttaatttaatattttgttccatgggggtagaggcaacttttgctcccaagaaacctgtgtcatgaagaagttgaagtgtaaaaggccactgagaaagtgaaattccagccgaggaacgacctatttccaaccccaaaaaaaatcgcagaggaccaaggacttttaactgaaaagttgaatgtaattgcttcttaaaa

SEQ ID NO: 347769 - DNA, 591 bp, Cannabis indica
taaaagtttatgaacaggggatctccgtatttagcagtggttttgtataaaagttatttttttaatttaattagaaagtttttaattaaactgcacttttaattaactattagattaactatgaattaatttgtaaaagtacacacgtggcgtccctgtgggattgagcgacttacatgatgctagattggattcttaggagaaattaaatgcacaatccatgacattaccatttggttgcatctaatccaagaatcaagaagaggatcattaacagagggttaggaagagtactttcaagaaagggagttttgtttcttacttcaatggaaaacttgaagtcacatttctatggttgaaagttttgatctgtaagaataggtgtaacctgtgctaaattagaatgatcagcagtgcttagatagtaaggagatcggacatccttataagtaggtctatcgatcggagttgaacgaagaactggtggaggagcctgttgggttttatgccctaaataaaactcatttcaatataatcagatttacttattaataaagatcagaaataacattttttgttgcatggttcaca

SEQ ID NO: 347770 - DNA, 1113 bp, Cannabis indica
agccaaaaacaacatatctaaacataatttaacttctgaaaacaaatccaaataaccacagtaactacagaactcaaacacccaaattcatgcaaaatctctaacttaaaactcaagaaactagcaaggaaaggtactagaaacttaccttggcttggatagactaagacttgctggaaaactcaagatttgctgaagaaaaacagaacactagctgtaactataggggtcgaagaagagagagtttccttatttttctaactttgatttttttgtaaaaaaatgagataaataggatatgttttatttaattacttcagccataaaatcaatttaataaacttaattaaaacccactaaagtccactaaaggacaaaacataattaggcaaaatgaccattttgccctccacttagccaaacgtcataaaaatcacttaggggtatttttgtcaatctaaaatctcaactattcccaacattcccattgtctaactttattgcctcgctatactaaaaaaatactatgatgtgattctaatagctaaacaccgcgttccaatgttgccaggcacagaacatacaaaattatgaaattccatatgtgacatataaaatgcattctgaaattcaaataaatctccgtaaaataataataataactaacaggcaagtttcataattaaaccctaattatatgctaatttccaaattaaagttaagcggtctttacaattatccctcccttaaaaggatttcgtccttgaaatctaacctgaacaactttagatattgagctctcatgtcggactctaactctcaggtgactttctccaccttgttgtttctccagagtactttgacaaaagctatggtcttgttataaaggaccttatccgttttgtcaaggatttgaactggttgttcttcgtgttataagtctggttgcagctcaagattttcataacttaatacatgagtagagtctaaaacgtattttcgtagcatataaacatggaatatgttgtgaactgctgaaagaactggaggcaaagctaaacaatacaccacttgtccaaccttcccgagaatctcgaaaggtcctgtaaatct

SEQ ID NO: 347771 - DNA, 585 bp, Cannabis indica
caaccaatccataccaagaattacatcaaatttccccatagacaacactagtaagtttccagacaacttgtgtccctcgaacacaatacaaactaacctatatagggtggatacctcaccatgtccccccataggtacactcaaatgcaatgcaggactaaaagtttcccaactcataacccaacatactagcaaacatcaaagatataaaggaatgcgatgcaccagtatcaaataacacatgagcccaagagtgtgagataagaaccataccatcaacaactccctggtcagcaccgccctgtacatcatcaaccccaagagcgtaggcttgagcagaggactttgcttttgcctttccccttccctgactaggatagcttgtacttgcactagaccctccaccttgattgtaccgtctttgactcccactagaagcaggagtttggaaaccttgtgagtaccccatgttgaactctgaaccttatggcctgaactgatgttgatactgagactgctagcctgattggggtgtgaaaccataggatgaagactgggactggttggtcctgggctgtccatgaa

SEQ ID NO: 347772 - DNA, 1240 bp, Cannabis indica
atccgatccgacggatcattactgatccgaaacattcggatagttattggatcttggatcaaatccgacccgccccgcttaatttttttacggatcggatctgacccgatccgtttgaaatatatattttttttaaaacaagaaattactttttaatatattttttttttttaaaaaaaaagattagttaaagcacaaggaaacattcatcacattaaacattcatgatcacatttaggatcaaagtatttttctttgttattattaccatactataggatcaaactattcttttttactaatagtttcacacaagattatatgtaattaatatattcgtatatatagctacaggctccgtttttagttaaagtaattttaacggcaacagaaaaaaaaactctgaagttttaaaaatgtttgctacttatatgattttacaaataaattgtaaggtaaatcttataattaataccgcatatatatattagtctatttttattgttgtaagaattttttaatagacgtacggttatttatttatctaaattaattaaatattgggtttctagtaatgagcttatagcttatacaaatatgtgtatatatatatttttctgataaaaaatatgtctacataattgcttttattatataataaacatacctatatattgaattgttcatttatttacttgtttcttttactgtatttctgggagataatactgaacactactttatgttaattataataattttggattcctcacatttaaggtggtgttcacggattggtttggtcggggttttttaattttttcaaaccaaatcactattacgattttttaaaaattcaaaaccaaaccagaccaataaaatgatcaagccaaatcaaaccactcaaaaatgaattagtttggttcggaccattgtatttcgtagttgttctaattttttttacaataattattcattttttccttattttttttagttattgagggtagttattgaatggggaaatatgagtgtatacatatgggagtaaaggagagagaggttatgcgagaattgaggttacacatgatcacatttttatgtgataagaatttgatgttttttttattgattttgacaaataaaataaaaatatataacaaaaaaatgatgcattattagttcttaaacaaataaattttgaaaaaaataattataaatttagatataaaatatatat

SEQ ID NO: 347773 - DNA, 647 bp, Cannabis indica
ttgccataactagacgtcaaccagtggcagtcgaagacagaactaaaaccaggattactccacggtccacctggaacttcggtatatgtcagggattgaccgtggacatcaaaacccgttttatcaaaaccagatgttcctggaagattgataaaataaacaattgaactagggaagttcttttgagattaatgactgtaaatcacattactgatggaatattttgaattccatttgtgaataaaataatcatgtctttcaaacaagtaattacaaagcgtaaaatctttaaaattacttgaggggcatatatgtatgattaactggaattgatctggaaatacatagtacaatgcaaacccatagtttcaaattttgaaaactttataaaagggcctcgaccaaaactttttgacggaagaggggtcgaactgttataactccctgaccaaaccttttcgacggaaaatgggtcgaatcgttatgacaccttgatcaaacctttttgacaagaaagggatcaaaccattgtaatttttgatttataacctatatgatgagaaagaaaaatcaaaagttacgactagcgcataaaaatgaatactaacagttcgcgctagggggaagtattaaacgagacatccaaa

SEQ ID NO: 347774 - DNA, 981 bp, Cannabis indica
aatgagacccataacataataaaataaaacataattataaaaatgtaattaattaatactaattgtctttactaatccatattcatgcagtcattatagctgacctctctgttgcggcgatccaactgtgcttagtgggatcgaagaatgtactctcggtcatccatccacatcaggaatttgcgtctctactgagcgaaaatatcgcaatcagcaatgtgtggttcttcagttaggctagcttggccaacgaattcttaagtctgactatccaagatcttctcccaaatccacatgggactcaccaatcgtaggctcgccaactcctggtcctgtgtctccaacgtagtactggagacgagatcctactactgtccctgagggctgtcgcccatgagtccttccttcagtgggaggcgccagcgaaaggtccacccttagaggtaagggcctgctattctgatccaccgggataatggtgttggaaattattttaccaggatcttagatctactcacaagtatgttgattaacaccctaaatatgaactttctaaaacgatgaaataaacacatataaagtttaggaaaccttacattgggtgcagcggaattaaatgactccttccgttcagatctctaacccttgtatcctttctgtcgcagagtattatcaagatctgaacctggatctctttctctgaatctttgatgctgaaactccttttgctgaagatctttcttcacgatcttcctcactatgattgaggtattgcttgctgtgtgtgggcactactctaatcactaaggggtttcgaaattatcaaggaagaagagagagagagagtggcggccaaggtagagagagaggctcaggttttctgaatgaaaagtgtaatttcctgaagccttcactacctattatagcattccactagggtagtttgaattatttgcattaaataatgaaaatatcagaggt

SEQ ID NO: 347775 - DNA, 397 bp, Cannabis indica
actacccctgctgtcaccaacaaccataatatggtcactatatctaaagctggtgtctataaacccaaagtatacatggcatctaaagaacctttaagcctgaaagaagcttttcaagatccaaattggttctctgccatgcaaactgaaaatgcagccttgaaaaagaatggaacttatattcttgttcctcctcctcctggcagaaaggccataggttgtaagtgggtttacagagaaaaaaggagaatccggatggaagtctaaataaattcaaagctgggcttgttgctaaggggtttcttcaaacctatggatttgaatttcatgagactttcagtccggttgtgaaacatacaacagttagagtgattctttttggaaattattttaccag

SEQ ID NO: 347776 - DNA, 779 bp, Cannabis indica
atcacgagttgcttcatcattaaacttcaccataatcagtcccatggatagtttgcttacttgatgaacacccaaatgcccccagatcctcttcacgaacccttcaaaaatcgtcacacgtgggttagctcccagcactttgcaaattactgttgtattccagctttttttcctctttttgcacttcttccaaatcgacttgtgcgattttgatgccatcccgaattaagggttccgtgaacaatagtcgttgatctcgagtctgagttttctccttcgtgaatgtctcccagattcgtttagcagatcctggagattgctggttatccaatcccaaatttcgatcatcttcaacctcctccgcccaactcttggttcgattactcccagatctgttgatctccgtttcttgtgtttcttgagaacgagccatctctgcaattaaattcagcccatctgtttcgtgtgaatcatcagcaatgacctcttcgatttcatccatgccttcttttcctgcatcaatctcatcgtcaagtgatcgagtgactggtttcctttcaacttttttcttcctcgccatggagggagaaagcagagagaacgaaacttttaacaatttcgtttttagctttaaaagaaaaaaattattattttaataattattattttatataaaatttatatatttaattgtactaagtttttaaattattttttcaatctatattcttaaaaatatacacgtcacattaaaataaattatgttttaaatattatga

SEQ ID NO: 347777 - DNA, 587 bp, Cannabis indica
ctaccaattttttttatgtttttatacataaaaaaaaaaagcatcaggtgaccatcggaccaccatcgaaccaccatcggaccccatcggactagatctgctactaatttttttttatgtttttgtacataaaaaagatagcatcaagtgaccatcagaccaccatcggaccaccatcggaccccatcggactaccaattttttttatgtttttgcactaaaaaaatttgtgggtccgatgggtccgatgaggcccgatgcatgtgctgaaatgcgagagagatagggttgagttatgagaggggtatttttgggttttagataaattggtcatatattcaatggtgatatgtattagtttagggataaaatattaggtatatgtaagtatagaaaatcaaatttcccttagaatattgagacaaaggagggagctttgatgcatggtggtacatataactaaagctcattattttaaagattttattttcatttgatatatattttaatctatttattttaatatatatatatttatttaattaaaattattaatttagataactttaaatataaattttaattta

SEQ ID NO: 347778 - DNA, 1178 bp, Cannabis indica
gtacttggcccaaattgggaaggatcatatgaagttgaggatgagattggctccgggacctacaagctaaaaagaatggactgaaccacagtgcctagggcctgaaacgctgatcacctccgaaagtattaccaatagctaaaaaacaaagtttatgtacagtaaaggaaatttgtacccaacaaatatatgcgacctctaattaattttgtaagactaagtgacttaaaaatcaattttcatgtcacttagggggatactaaggcatatcacgcgatcaaatgtaaggaacttaaaaactaaatatattcgaacgtaatgtagattgtttgaacaaagaaaaaactttagaaagaaaaggcctggggacgggccataaaagtctccccttaagaaaaagaaagaaattgtctgaaaagtgaggggaagacaggagatgtaacaaaaaaaatgatgatgataatggcaataacaaaggagataaacaaacaatttaatcagcccaaggaggaagacgaggacccctgcgctcctccaacgccgcatctagccttttcttcttctcccggaagcgaacaaggacctcttcaggcttgggataaaagctgaggtaagattctgaccattggattgccaggccataaagactccatcgtcaaaggcctcctggaagggttggtaggtgactcgggccaggagggcatctctctttgccttggccgctccttctgagcctgctgtttgaattcacgagccccttcacttcacagcttgcaaatccgcttggtgcagctcttccagagacttcaactttgcggtcaattcttgcactgcctccttagaatctcggagttcctgcctcgctatggccatgaccgcatccctggccttcaacccctcatccttggcctttaacgcctcatccttagccctcagtggctccgctccgtaagggccgctttctgctgggcttcctcacggatagctcttttctgtacctccaagtcccgaagactcttcatggcctcctacatgcccccaaactcgggcatggtgtacccatggtcgataagagtcttcgaaagatgactagtctcggcagcaatctgacaacaaaaaaatatatatataaggtttacatgacgtcaggcaccaaaagaaaagaagtctgaaaatac

SEQ ID NO: 347779 - DNA, 449 bp, Cannabis indica
ttaagtgtagagaaggcttaattattaatctctagtttaatactaggaaaaatatacttaacttagattgtaccaaaattaattattaaacaattaatttcacaatcaatgatatatattttttttgaatgctaattatcaatgatattttcacagttaattatctatgatattttcttaattaaatattagaaaatataattagtactagaaataactatctagaatatatatcattaactaagtatcttttcaaaatttggaaaatatctaatttaagttgttatagaaagaatctaaaataaccaacttaaaaatttccaaataaaatttaattaaatatcaaaattaagttgtaaccacctaatttaagaatatttcattttaagtttaacaacttaaaaaatatctctagaatgttccataatcaattcctagaattcctcaac

SEQ ID NO: 347780 - DNA, 648 bp, Cannabis indica
gtttatactaggtagcttattctatttttttgttggtaactctgatttattaagtttgctttttaagttgatcatgagcaaagtacaattcaagcaagaccaatattgtaattgaaatgattgacattgtaattttttatttaatgaataaatatgtataatattgtttaaatatatctttgattaatttgtttttattatttaatttaaatgaatataaacttttaattaaaaaaattataaattaatttctatgactaaatattggacattgaataattaatttatataattctttatttattcttgccaactaaattatttagtcacaaaatattagcccttttatgactaaattttagttgctaaagtttacttttttggttgttgaaagtgcaaattggtatttatgtgaccaatatatcaatcttattgtgactaattctaatatattttgtaactaaattttagtcatagaaaataacattattcgtgactaaatatattagtcactaaatctcttctacgaccgactttcagcgactacatggcgactaaaaataattagtcggaaaaaattttgggtgactaattaatgagttttaatgaccaaaaaattagtcggagaaaatgggtttttttgtagtg

SEQ ID NO: 347781 - DNA, 844 bp, Cannabis indica
gaagatggtaaggggaattggcccgaagaactaccataagtactatggtcatacttcacaactgaaaaaataccaactagacagactccatttgctatggcctatggctatgaagatatgttgtccataaaattagaacctccattccacagaagattgacctttgatcaagaggctaaccatgccctcctagcagaatcaattgacaaaattgaagaaaaacgagctgcagcaaacctacagttggtggtccatcaacaaaaggtggcttggtactgaataagcaagaaaaggaacataagttttttgtgggagatatggtccttagaagagtgtttttgaacaccaaagatagaacgactggtgtgctcggaccaaacttggaaggaccatatcaactggttgaagttctaaagtcaggagcatataaattgggatggcatggagaaaatataaaactcgttctagtaccaaggtattggaatggggagaatttaagaaaatactactagtaaaagtactaggtcggatgacctctctaaatacaaaatataagaacatttacttttaagtaaatggccttttgggtggaccccacccaagggttcaggtgaaatgactaagtacccaggtcggatgaccacctctaaaagtacaatttcttttaaatgcaatttttttgtttaaatttagctaaagatcatattagataaatataatagcttttatgtaagctactacggtaataaaaatgtcctgaccaatgaatgaataaagatgtctatttaaattctaattgtttcattctattagcaagttataaatttaccattaaatgcgtaca

SEQ ID NO: 347782 - DNA, 822 bp, Cannabis indica
agctctgatgtaagttactacggtaacaaatacattctcgatcaataattgaataaagatagttatttcaaaattaaaattgagtcgaaataatcaacatgtttctaatttaccatcgagtgcgtacaaaaggtttggtcaaacccaaaacaccgaacaagatacttgtaaaagacaagtgaccaagagtcatacatctgctcggtcacttgaggggcacctatacctgtacaaaccatttggtaaaaataaaacaatcacaattgcacgataaacagagaatgaaattcattaaagataacaaaggcacgtaataccgggattaaaagcttcccggtcagcccgttgtctaaaaaatgaaaaatcattccaagtttaatgacctcttggccggtaatgatgtcttagaaaaggccctgtggccgaataagatatataaaaataaaaaggtaaaagaagaagtgtttaaacagctggagtcccaggctcttggtttgggtcatctgggcaggcaagagctggaggatctattgtttgaacaggaggtacatcagcattttggccggaggtagaagcagccgcctcggtttcaccataagccgcttgggaagcatagaactcaaggtacatgtccttagcttctcccaagtagtcgaagtttacctgagcattagccttacaaaagtcgtagaagagctcaagaccgactgtatccaaggcatgaactttctctttcagtttcgtcacctcagccgtaagctcctcctccttagcttccttctcttccttcactcgacaaaggaccgctcgaagagatgtcct

SEQ ID NO: 347783 - DNA, 873 bp, Cannabis indica
taatcgcattcgtatagctcgcactatggaggaccaaggaacgattttaagctcgcatgtaccaggctatattcgagtatccccctgatcctcctgcaaaaacatagagattgattctctattctgcgagctggtcccgttgacccaacaaccttgataaaccgatacagacttgcatatcttggtcctgtcagctttttatatgatgttcatataagcaaccttaaaaggacgcagacatcctagactcgattagtctcgaatgcatcttaaagcctgcgagcttatgcaggaatatgaacagccaactcgcactatagaagtcgcatatgctgctgtgttaaatgaattatgctagaaactgttcttcatttattgtgtttacgttttttagtttaattattgtaattcaatgtatgaacggattgataataaatttaatccatgtgtaaataataggacacttgctttgtatataaaggagtaatccatcgtgaaatggaataagaaaagaaatccttggaacagtggactaagcagaccgtgatctgactgaaccactatattctgtcgtgttctttgtatttcgagtttctattaagtattttatgttcctgatttgagtgctcaccattctgggtttagtattcgcatatattttctattattattattattattattataatttaattctggtgttgtacaaattccttcaacaacaatttaacttttatgtgtaaaagtttaaattatatgtacaaaatgctgtaggaaaaatatataaattagttcattaaattattaatttttaataatagacagaatcaaaattacaaaataataattcaaaaatatcaatactattcatca

SEQ ID NO: 347784 - DNA, 869 bp, Cannabis indica
tttttttatttaatatatgtgtttttagaaaaagataaaaaattgttcatcaatgacttcaaaatatctatacaaggaaagagcaagttgagccataaagtaggaaagcaatttaggtcacgatacacacgtttgatatgaatacgactcaagattttatgggttggacacgacgatgcaagaattttgcttcttgtgtttgtgttttatcaattttttatgttacaggtcgtgttcgtgtctaccatctaaaataaattttaaaattcaacataacacgaacatgacatggtgacattaaaataaataatttagcttacaacccgccaacacgacatgagattttgtaggttcggcatgacatgaacttatttgagtcgtgttcgtattcgtgttttataaattttttgtgtcacgtgtcgtgttcgtatcagtaactttttagtaaatttaagatcttagcacgacacaccaatactatttgccactccaactgtaaagcatgacgaacagaagaaagttcgatcccaattcaaaaagtacatgtaacattgtttattaatgcatgattggctatagtatgtgctatttgattagcgtccctacaaataaaattcaaattaattacacaaccatgtgtaatattaatttattttaatatgaattaataaatattattaatttattttaagtaatttgtggcgtaaatacttaagtttaacttttgattgtaataaatacctatgtttaatttattacggtaataatacataacttatatttctgaaactttcctagttacctgatcattaagtgttaagtcattattcatgtgtcattttttattagtatatttagattaattttta

SEQ ID NO: 347785 - DNA, 531 bp, Cannabis indica
aaaaactaattttacacataaaaaaatacagaaaataaacccacataagtcaacgtacgtactcaacttaaaaaaactcactttccactttccactataaatataatatatatttaattaaacactgagaatagatcatatacctctcctcctactgtatattgttaccaatattaatatgtttaatgacaacttttagaatagatctaatttattttttataatagagtataattgttagtgtattaatttatattttttataaattgtgtatacagatcagcaaatatgagaagatcttctttttctgatgtaccgagaactctaagtatgaggagatcttctttttctgatgtacagagaactcaaagcatgagatatacaccgatatcaccaaatcatcttcatcatcactttgagtttaatgatgtacaaagaccaagagaacaaaagaaaaaattaggagcgcttaaagaaattaaaggagccgtaaataagatgttcaaaagcctttttaagagtaaaaagaag

SEQ ID NO: 347786 - DNA, 813 bp, Cannabis indica
aatctctttatgaagcctgggagagatttaagaacttattgaggaagtgcccgaatcatgggatggaaaattggttacaagtgcataacttctatattggattaatgagcaacacctgaacactgataggtgccgcaactggtggggcttttatgaggaaaagtgctaatgaggcctttgaattacttgaagagatggccataactaatcaaaaatggtcaacaaagagaggcccaactaaaaaggttgcgggaatgcatgaagtcgatgccataactaagttgacagcccaagtggagacattaacaaagctggtgactgcacaagcaaaacaagctcaagttgtcaggttgttgtgtggaggatctcatgccactgacacctgtcctatagatgtcaacagtttgccaatggagtaggcccaagccattggaaagtatcagaataatttatggtcgtcagaagaactttcagaagtagttttatccccagcaaaatcaatctcagcaaagccaatagtatccacaacaacaacaacaagcctcgagtggagggtctaatcctcaattagacacattactgccattcatgacagagattaagtcttccattaaggtcttggaaactcaggtggggcagttggctgctcaaaacactaacagggctcaaggtaacttgcctagcactactgaagtcaatccaaaggagaactgtaatgcaattaccttgagaagtggtaagacctatgttgggccaaataaagatgaaccaaaggaggaagatgatgtagagacaacacctacaccagaaaaa

SEQ ID NO: 347787 - DNA, 570 bp, Cannabis indica
aaaaaaaaaaaaaaaaacttgtgcgtatactcctgttaatgtaatttaatttcgaactcatattttaatttaaaatgtgatttaaatttttttaaatcactacaacgtttgtcattattactagctaataatgcccaaagtcctcactaataattaataccggcgagagtctgctgttatatatttccctctaggtagtttaagctaaacgtagttattttgacacaacatgacacggtgctaaaaattgacatggcacgccacgagaaacacgaaaggcacgaaacataaacatgaatagactagtccaaaagcacaatcacacgttaaaaacattataatgtgatggtatataataataacaattgtttactgaaatttttaaaaactaaatatttagaaaaataaagttaaaaaaaaaacgaaataaaagacaaaaaatacatgtatttgtaagtagtttagacgttaatgataatttcttcccatattgacataacttatagagatctttttaaattacatattttttaaatatgtttatcatttataggtacctatatagaatca

SEQ ID NO: 347788 - DNA, 1041 bp, Cannabis indica
atattaatttatatattactataatttcttgttttagtttagttcatgttattaagttgtataagttgtaactaactagggtagtgtttagttgattggaatggatccaagaatggaatgacttttcctaaagtgaatctattcatttgtttagtttgtcatttataattgtaaagtttacataaatgtgtatagaattatttgtgttatatcgcctaatttgttacaactagctagtaattaactagttatttgtgttatgtacttttccttcaatatttatatttttttagtaaaatttatcctaatcctactaaaatttcgatagtataacagctgtgattggacgttcccaaatttttaaaaaattcctaaaataacaaacaaaacaaataaaataatacagaataaacaaaataacattaacaatacaaaatttatccacccattcgaccgcagtacatgtattcgtagaacttactttcactatggttgaatatttaagatatttaaactcaactaacatgcatattattacacccatccgacaacagtacaatatatcacagaacctacttcactacggataaatatctaagatatttaaactccactaagcatgcattgataattaattataataacaaaaagttaagtgaatctatatacctatagcaacttaaaatctgatcaacaccaaattctttcgaacctcaaaaattagctcacaacctacaatacaatgaaagacaataaaattaaaattttaattatttaattacttactagttatataaaaaaaaaaagtaacaagttagtagttactaaattatatagattaatttttgaaaaaaatcacatatacatacatatataataaattatatctcacacttacacaatttaaactttatttcttaactaatgaaatatctcctatctcattctcattcacattaaatatatatacatacatatatattacttagaatatatactgttggagaatattgtcccacatggattaaatgtgaaagtatt

SEQ ID NO: 347789 - DNA, 1108 bp, Cannabis indica
caagaaaattacatctatgcaacaaaattacaaggactgtagattaaataaaagttacaatcccaaagcacaaaatacaaataaagagaaagaaaagatgaggacaaaaatacaactcaaagcaaatatatacacataaatataaaagcaaaaagagaatatatatataatatagagatatatatgaatgatatacagtagatatatagcatatatattagtaaatatagaagagatataatatatagtatatatatattgaatatagaagagatataataaatagtatatatatattgaatatagaagagatataatatatatattgaatatataataaagagaagaagaggcagaaaactaataggaaaaagaagatgaagaagaactcaagtaagcaatgggggatcaccaaaggcttgaacaaggtttaaacacctttgtccaaaaagcttatttccccctataaaaaacacttagggaacagaatggaaatgcttttgggaataaacaagcctctcaatattttctagctagtgtttagaagatagaaaattgttgttgtctacaagtgaacaaagccctctatttatagtgttttgaggatcacatttgaaaatcaaattccttcatcacatggctgttaccaacacattaatttgtgtttaatgggataaaaacgttggacaagagagctggaaacatgctcaattaatttgtatacgtttatgaacgttttcaaaaatctggttccagatgttcgaaaacaaccataaaacaacatacaaacaactattaaacaactgtttcctgagaactcaaaatgtaactcctctccgagttaaatcatttcccaacgtcccaatacccatttaaatgatataattgagtattgtaacagtttctaacagctagaaacttatcccattaattccataactcccatatgtaacaactcacataattacatatttatcaatttttgatccttaggttacaatctatttcagatttgtaactcctcatttgttacaatttatgtgtattattatactataatgatataatataacctccaacacataatatatattaatctcatattaat

SEQ ID NO: 347790 - DNA, 390 bp, Cannabis indica
cctgaagttgatcaaaaagatcatcgatcctaggtaaaggatatttattcttaattgtcaacttattcaattcccggtagtcaatgcacattcgcagagacacatctttcttcttgacaaacagtaccggagctccccggggtgacacactaggccgcgaaaacccaatgtcaagcaacccctagagttgaatttttaattctttaagttctattggagccattctattaggtgccttagaaaccggttctgctccaggtaccaaatcaatgacaaaatcaattctctttgaggtggtaaacccataagttcatcaggaaaaacatcgagaaattcccgaaccaccttgatgtcttctggccgaacagagtcaggccgagtggtatccaa

SEQ ID NO: 347791 - DNA, 977 bp, Cannabis indica
ctatagtaaaatatttatccttgtgtattttttcgttgtttaccaaatttataatggtgattttgttcatattaaaccacgaaaagacatgtagatagagttacgtacgtaaaaacactattctgatttttaatgtttcataacagttgcattacagttgcataaacattttgctaacatttatttctccacatattactattaaggtacaagtaattatcgattagtgacaaaaaaatacaaatagtttcttacatatacacattcacatttaatatttttagttgtaattaagttgctcgttagttgaacaatagttttgttactacaatatcatagtattataaaaatagggcttggaattgtcaaaatacgcagcttgaacagataaaacacgattgttgttgttgggttttgtgccctaaataaaacatatttcaatataagcagatttactatttaataaaagatcataaattattttatgttgcatggttcacatgatttctttcatgattatatatttattgtatagattctattaaatcaagaacatatagttattcatgattatagtgtatccaaattgtatgttaatgtatggattatgagttttgtattctgtgattaaaacccacttggactattctaagaactctttgttgtaactagacctaagtcatcaaaagaccacaaccacataatataaatctatggcatttgtgtcttattcatagtagttttaacaagatcattctttgcgaagagaaaatatgcgaatatccacttgaaagtaagatcatctatgttcattcatatggatgtacattcggaggtggatataagatatcgttaaattcttaaatgatctgtaacgtccttgctccaagcctccattgggtccttacacccacggaatgaatggttcttatacacgagtacgccactctggctgcttcctggattgatgactgacc

SEQ ID NO: 347792 - DNA, 679 bp, Cannabis indica
tttttctagtgagcttaattgtagacattttccaactataattaatggtgtagaattatagttgagtttaaagaatcaatattattaggaaaatataattgcatgtacgaagcttgtgtcttccataatcattttctgatcacttctcattttaattacttgtttaacttttaaaaatcattttctcaatcttctcatcatattcaaggttcttgttttattcttgtaaaattactaactgtccttttgagtgtatttatcctccctgtggatacgacatatagcccatttactaccgcgatcgcagtgtaactaattgggcgacatcaatttttggcgccgttgccggggaggtttctgcgctacaagaggttaatatagtagtttttttttaattacatttttttgtttcttttttatttgtttatatataaaaaaaaaaaattagttaatatagtaaaatttaatttgttttagttatatatatagattcaaaaaaaaaaatcaccatatattattagttttttttatcttcttcacttttagtaaagaaaaaaaaagatgtaagtagtttttgtttttagtttattagttgtatttattattttgctactatattagggtgttaggtttttaatatttttacattattttattttgtgtacatttttttaggatt

SEQ ID NO: 347793 - DNA, 1108 bp, Cannabis indica
ccaagctgggtagaaagcttcaattataaaattgttgttgcgtagcttttctacttcttcctttagggctaatgctcgttctttgtccagtagcctttgcttttgttgtactggccggaagtttgggtcaatattcagaacatgcaaaatgatagaaggatcaattccaaccatatccacatgcgaccaggtaaaaacgtctaggtttgctctcagaaattttatcaattctgattttacttcaagcaacaaaccctttcagaactttatctttctggtcgggatatctagatcgatctcaatctcttctaactcttccacaggtacaacattgctgcttgggtccccaagtcgaggatccacatcttcatccccgccttgggaagttccctacttggaaatgttttttcccttgtctgtgctctggctagaggatacatccttcttagccttggccactgcaaggttataacattcccgagcagactgctggtttcctctaagacaccctaccccattctttgctagaaacttcaagcacgagtggaatattaatgtgacaacctttaagtcataccaggccggccggcctagcattacattgaaagctgaaggaacatctaatatcaggaggtgtgccatgatagtcatgcttgtcggagcttgtccaacagttaagggtaaatgaatttgtcctagaggtgcgactctttgaccagagaaaccatagacaggctggagacatggggttagatcattgagctggagtcccatcttttcataagtagttatgaataagattattgcatgagcctccattatcaatcatggttctggccaccattttattggctatttagacttacacgaccagcagatctttgtgtggaaatcaattttaacagcatcttcatcgttgaaagttatggtacaccaacctgctcgtagaactttgggctttctttcttccacggctggataacttcctcttgctcgtgctgcgctgttcgggcatacctctcccgagctttgcccaaatctcctgcaatatgcggacctccaacgatgacttgcagatgtccatcgtaccggtggaggtagtaaatct

SEQ ID NO: 347794 - DNA, 665 bp, Cannabis indica
ccacgattgaaactgaacggatgttcaatcaagttctataacttgagggaacttccgttgagacggagggctattgtctctgaacggggactttggtcgtgaaggactttgtcttggagtagtgtttggtgattcttgttttggatgaagtgggtagtggggtatggacacctcggtgtagtcgagaatgtcatccatgataccctctaatttttctcttgaagtgttggcttcttgcatggcatgggctgaatggtagaggtgttccgccagtttgtatgactcctgcttggcctccgtggctcttaaatgtgccttccttataagtttttcgtgttcgtggagaacagtctcgagccttgcacagttaggacatcctgaaatggaggctgaacggagtcttggactccgtgacggtgtacctacgggtcttgtggaagaaaaaggatgcggtggggatttttgaggacttgtttcaaaagggttgaagttttggtaagggtccatttgatttaggtaatagtaaaacggggtttgaaaaaaatgctttgtttggataacctaacctttacttatatagtggtttggtgggttgatgtacacgtgattgggttcatgtaataataatggattttttttcccaatttaaccatttaatagttaat

SEQ ID NO: 347795 - DNA, 767 bp, Cannabis indica
tgtattataatatttacaaagatttggaattaacaccaatctccgacccaaacccggactcaagacccagatctagacccgaacctgtagttggtgttagggtcgagtgtattgaaaatatattataactttacacaatcaattaatacaagtcaatatcaaatgttgtagtgtattaaataatactaagaatacaatacaacacaatacgacataccaaacgagcccttaaagttttaatatcgggatgtgcatcattcgattaaatctaataataatcgattgatctaattataattgattgtcaaatattgaatatataattatgattggataagactggatgttatttttcaataacctattagttcggatcagatgttgaatgaggtgtctaaaaattcaatacattaaatatccaatcactactagaaaaaagggttttggtaacccacattgattgacactacaggaaatgtcatttttgccagaacatttttgtgctggcaaaagtttggtattgcgctggtaaaatataatttacttctgatgtattggcaaaaggggttggcaaatctattggattttatgccctaaatacaactcatttcaatataatcaaatttactaattaataaaagatcataaaatcctttatgttgcatgacacatgatttatttcatgattatatttaatgtttaaattctattaagtccagaatatatatataaatatgtatatatttgttcatgattatagtgtcgtc

SEQ ID NO: 347796 - DNA, 507 bp, Cannabis indica
aagggtttaaattgattctttctagagaattacatggtcttcctaaataggctttttatttggttggtaacattgatgaagctactatgaacactacaaacttagaaatagagaacaaattgaagaaatatccataaagggaagggccttccctttgggggtagaaaaatcatgatcgggatcgcatacctaaagctacgaaatttgggcgtgggtattttgttgaaatggaatgctaaaaaaagattaagaaaaatcagtcattcataaccactaatgaaggttgcatattacttttagtccaatagagttgtttcaaattgctttattgttaggatcatttacaactttatcaaatagcaatttgattttttttgtccttctaaattaatttgaacgaaactagatcttgtggaatcatattgaatatttgacattctgtaccttactaaaaactaatccttgagttccatctacaaatagataaaattttggtattagtctata

SEQ ID NO: 347797 - DNA, 453 bp, Cannabis indica
taatggaactaaaggataaataagtaattagaagggtaaaatgacaatttgaccaaaactaattttggaccaacacatagatggctagtcactgaaattgattatattaatagatattgcagtcaaactcaataaatataattctataattactaagagtttgattccatatttatagtggagtaatcatggaattaataaacaaagaattatttagttgatgagacttgttgccccttattttgcccaatatacgtggaccaactagacaaggacacgtggatcaaacaatttatcattcaaactatttgctaagtttttgtgtaataaggcagcatctgggacatgcctcccggagtagacatatggaaccccatatgctcccggaagcccaagtaacgctaaggcatctccgcgaggtgtcaggcttcccctgagcaatcaagtcgcatt

SEQ ID NO: 347798 - DNA, 496 bp, Cannabis indica
gctcccactcaacagtaggagtatggttaaagtaatacacaagtgtacacttaacctcttactattggttctcagggaaatcttgttgtgacttattttcttagtctgaaactataagttccttctagactaagtcatcaacgtagcattctagtataaacattaatgtaaaatacttacttaagaataagtagtaatcattaaagataccacaaaacttttcattatgactagggtttttgcctgagtcattcgaatagactttgcaaaattctcctatcttatattcaaaattctaataagttatttctatccatatgaatggttagattttctttctcaatttcatttaaagttcctatcatgatcataacattgtaagctaagactagtgtcatccaaataatgatgggctagaattttaaaattctcccacttagataaggtactatgatactatgtctaagaacttcattggtatcaatttttattacta

SEQ ID NO: 347799 - DNA, 802 bp, Cannabis indica
agggcataaaacccaacaagatgatcatgagagagtacataaaataaacagtatacaattcttgcaaattttagagactttcaaaggtagaaggaatctctccactaacctcacaattggtaataccactgttaagtaagcaatataaagaaaaaattaggatttatctcagttgaatagataaattgaattatatacaatccatactacatacaatacttctaatttgtttaaaatccctttttctaggggccatgggtcggacaaattattcatgggaaagttcctgtattcgaaattgttttagaagaataaatataaataatatcacgtaaattaaaaaattagaaagataagtatagaataataataagattgaattggacaatagaaatttcataaacaaaaagaacacctataacttaaacttacaaagatgatagctctgtcagtttgaactctagttgcaattactatatatataataaatatatatagatattaatttcataaaatataaatattacgagtgagagggggaatgtaatgccattactataatatattcaaatggtttgatccggtgcgcgacacccctgcgatgagcgactttctcacactaatgtaagcatggttaggagcctcaactcctttggtcctccgtaggagtgtaaatgaatcaaaacagatttgatcggtagcgtactttgtttccaaattaacattcgcgagaacggtgttggtcctacaaaaattaataaataatttatataaaaattaaaatagaaatatttgtaagagt

SEQ ID NO: 347800 - DNA, 568 bp, Cannabis indica
agtgcagagcacttatttttccactgcactactgctgctgtttgcttgcagagggttaaaaattggcttggatggcatgtcaaagctgattcaatgcccactctcatcaggtggcttgggagatcaaagatcagtcggttcaggaaaaatgtcctagctgctgcgcttgctggtttggtgtataatctgtggaaagctcgcaatctcagtgtgtgggaaaagaaaaatctgaatgtagcagaattgtttgaaaggaccagaagtgatgtacttcgaatagttaatgcaatttggccgaaaaaggtatcaactgaagataccaactggtttcaaagattgtgattagtaattgaatttgttgtatgtacagattgtatagattctaaaaaaaaaaaaaagaatagtgagaagagtttataactgtatagcagttttgttattttaggccctttgttgggtgctatttgattgtacaaaatagattttgagcaatacaattttactgattcatcaaaaaaaaaaaaaaactacgtttagttaatcaggaaattaacactagtagtttcag

SEQ ID NO: 347801 - DNA, 568 bp, Cannabis indica
aaattataaaaaagatactaaaaaaatacaaacacatattataaaaaaaaaaagtttaataaaaaaaacttatatacaaacacttaaagtaatgtaaatgtgtacttatttaacttttttaatttaatttttatttatacttattatatataatttatacttaatttaattatattaataataaaataataatatatatgaaaaaataaaattagatttttaataaaaataaaaaaaatgttaaaacacaaaattttgaagctgaaaaaaaatttataggaaacccctcagagacagtttttttcataataatcgacgccatatgatctccatagtgtcgattgtttttaatccttttagcatcacctggaacaacgtcagtagcgagttttgccaaaactgacgctgaaaggccttaaaaaccgtctctaaagtccaattttatagtagcaatataaaaagagattaaattaataaataaactcactccaaaaaattttatttttagtcacaacaaaatttgtaactaaagataaaagagttgtggctaattataaaatatcattat

SEQ ID NO: 347802 - DNA, 941 bp, Cannabis indica
tatttttgtaattcttttttttttttagcttgctatatctatctttagcactcaacaatatctatcatatgtattacatcaatgttattataaaattactctaagtatttaaggattatctaaatatatataaaaaattattcttataaaagtaagttaaagaaagcataccttataccaaaaattatgtacttgactttcgataaagtcacttctgataaaatcctaacaactaaatttaagagaaactaaaatcaaatattatcctaattctactgaaatttcggtagcataacggctataattgaacgtttccaaaatattcaaacctattaataacaacaaaacataattcagaacaatataaaataatcccaacaacatttcacaatgctacacaccctatgccgttggttattataaatggcataaaatttccttctaaaaatttccaaacttatactaatggttttttattattatgctgaaaaaaaatgtctctaaaagcttattttatagtagtgccttgaacctttttattagctgacgaaacttatgaagccatagatgagtggtgagggaagtgtgggaggaaagagaaaggcatgggtctatgtcaagacctctagattattagtaaatatataggtgttactaatgctgtgttactaatgctaaaaaaaaataataataaataaaaataatataaaaatataaaattacacaaaaacaaaacactgggaaaacctttgtgaatatcatagatcagataacagaaagtaaaatgaccactaaactataacaataacaataaaattaagggaaaattttagtattatacctataatataatcaattaacagaaataaccttaattaaaaaaatgaaccctaataacgtgacacgtaggcttctcctacctgaattgaaaaaaaaaataa

SEQ ID NO: 347803 - DNA, 987 bp, Cannabis indica
ggggggtactaaggcataccacaaaggcataccacacggacagacaaaaaaaaaaaacaggaccaagtaaagcaccctgacccaaagggcaggtcaaaaaaagtaaagcatcctgacccaaagggtaggtcaaaaaaaagtaaagcatcctgacccaaagggcaggtcaaaaaaaagtatgcacaaaaaagaaaaaagcatatatataaacatcctgacccaaagggcaggtccaaaagaaagatatgtgcatcaaataagatcatatatatatataaaaaatcatagccctaagggcaggtcaaaaaatatatacaaagggcccggggacaggccttaaccaatgttaccccttagaatataaaacagctatataaataaattgtcttaaatgtaagagaattggctgtaaataaaaaaaaaaagaaagagataagaaaaatctgggttgaactcataacgacctagtcaattcgaggaggaaggcgaggaccaatgcgcgcctccagcatggcgtcaagcttcttcttcttctcccggaatttagcaatcatctccgcgggtttggggtagaagtcgagcttgatattctggccatttgttgaccaggccatgtaaacgccatcgtcgaagcgcttgacgcaccggctgcaagagacgggagaaaggagctcatctttcttagccttcttcaaggcttggtctttgaagtccttgagctccttcagctccacggccaagttggccctagactccaagtccgcctggtgcacttcctctagggacttcaccttggcggccatttcatctaaggcttccctagcctcccggagctcgcgtctggccttggcaacagcctcgccctccgccctcagctcctcctggtgcttggcctccagcttgtccctccgaatggcctcctccctgatcatcgcctctgcttgggcttccctccgcctggcctcttcctcgaacttggccttggca

SEQ ID NO: 347804 - DNA, 478 bp, Cannabis indica
atatatttttggccatcacagattacttctctaaatgggccgaagccgtaccactaaaagaaggacgggcagaagatgtcgctgattttataaggacccacgtaatttaccgatacggggttccttcaaaaattatctccgacaatgccctttatttcaaatgtaaggcaatggtcaagttgatgaacaagtacaaattcaagcacagtttctcggctagttacaacccgtcttcaaatggtcaagcagaagcatttaacaaagtgttatgcaaaatcatgaagaagacagcaacaaagaataagagggattggcatgaacgcctcctagaagctttgtgggcatatagaaccacggtagaggaccgcgactggttgcacaccttataacttggtgtttgggtctgaggcagtgttacctttggaggtacaaataccttcattaagaattgctactcaactaacaaacccagatgaaa

SEQ ID NO: 347805 - DNA, 676 bp, Cannabis indica
ccactttatgcatgctaattacccatcaatccactgacccaaaattctatattcttgcaatacttactattctccactaatataaattaatgcacaatcaagaatcagaaggtctgtctaggcttgtattgttaggcttaggtaaaggtagatgaaatggtcattcaggcttatctataccataagcttctccaatcatatcacccaaaatattttcacgcacccccaatacccctttttctaattgcatgagagatgtttttcaacaagattgcaacaactttatgtttattttttttttctttctacctttgacactgattgtcagattttcttttcttctttttttttttcaagttgttgccaatcaaaaaatttttgtattctctcaattttcactccttttccacacacatacaataaactccccatccaaattcccccaaactcaagatccacttatggtataattagggttaaatatttaggatattcatgggtttatctctttaggctcaatatgtgtagaacaaagaataggctaaggctcaaaaagggtaactaggataaaattacaaggatggcttgaaaggcacaatcgatccaaaaaattgcctaaatcattttcctagtcatgcatattttattatttcgcctcaaatagcaagcaagcaag

SEQ ID NO: 347806 - DNA, 695 bp, Cannabis indica
actataatctttaaccaattcatatgttctggacttaaaaagaattcatacattatatacacttataatcatgaaataaatcatgtgaaccatgcaacataaaatgttatttctgatctttattaataagtaaatctgattatgtgaaatgagttttatttagggcataaaacccaacaaaaacgatccttgacagtaatgttgttaagagctctatagtcaacacaaaagtgccagttaccatccttctttctcactagcagtattggtgaagaataggggatattactatgctgaataaacccccaagacaacatctctcgaactagtttttcaatgatatcattttggtaatatgggtagcgatatggtctcacattgactggagatgatcccaattctaagaaaattatgtggtctatgctccggtatggaggcagtgtagtgggttcggaaaaaacttcttggaattctcggattaattctctactctccccaagaagattttccaaccaagttgaaataaaccccgaggaatggtcttccttcttggcgattgaggtaatgcaatatgcttcccttatctctccatcgcgcaagatcgcatggaattgagtgaatgtcaaatgatgcgtctgttggaaattttattttaccaggatcttaaatctactcacaagtatgttgtttaaaca

SEQ ID NO: 347807 - DNA, 802 bp, Cannabis indica
aaatgatccctgagttatagggattgagttgataactcatgatgaggaagctgaattcgctaagtgttgattgctctgtacggatcgctgaatatcttattcaggacatgccagcgaggcatcctgctcggcctatcttccaagcagatgttccaagtggactccacgtgtcaccattctcgtgatgccacgtcagagtgcaaaatttgggataacatttgccccccaagtttgtacgggacctccgaggttgcgtgtagacttcttccgagccggttctgcctttggatggggacacgtgtcgagcgtgaccgttcgggactcgatgtgaagctgactgggcgtcccttcggttttcggctaataaatgctctgacaattaatattttgaaatccgattttctctctccacggctgacggttgcactcgattacttttgatttcccgtattcgtttttgaggcgggaagctgaggcgtctgaggtttctttgagaaagttacctcttttcgtgacttgcctataaatacccatggcattggcacataaactcatttcatcacctttctttgctaagtaagctccagagcgaaaagaaagttttctggcttcaaagttgctgaagtgccttcatacaagtgctggttggattgatgcagcttgaacccagacattttaatcttgagtaagtttctgatttcctttatgcttatctttgcatgtttacatatcgaatgcaacttttgctgtgctgtagaaaaatgcttaggaaaccctagggttagaaacttctgcgattctt

SEQ ID NO: 347808 - DNA, 991 bp, Cannabis indica
tctatggtcggtgaattttccatttcagttcttatagaagcagaaggtcaaaggccatggtggttctctggggtatacggtccatgttcatatagagaaagattagaattctgggacgagatggctgggttaagcgcaatctgtggcgagatgtggtgtttaggaggggactttaatgtggttaagagggtacaagagaaactaaacagcatttcttggaccaagagtatgaagatgttcgatcaactgatatgtgaattgaagtttatggatccaaaactaaacaatggaaaattcacgtggtcgaactttcgaaataaacctatttgttgtaggttggacagattcttattcaccaatagttggagtaacatgttctctttcttgaaacaagaaatgttggtaaggattgtttcagatcacagcccagttatactagactctaatcccccttcttggggtcccagccctttccgatttgacaatcaatggctagaacacaatacattctccaaggattttggggagtggtggaaaaaggctgaaggatctggttgggcgggcacaattttcatgagcaaattgaaggaagtcaaaaggaaaattcaggattggagtaagaagacatatggcaacaaacacgtggtcaaaaatgctctggaaagaagactgatggctctggatagattggaagcttcaggtttgtgggatcaatcattagtggtggaaaggaagaaactcaaaaaggaatggcagcaattggtatttgaagaggaaagaagtgtgtggttgaaatccaagtgtaaatgggctaaggaaggcgatgccaattcaagattctttcataatcttttgaatgcaaggaaagccagaaacacaatttcaagaatagaaaaggaagatggaacaataattgaagaaaaggaagaaatagccaaggagataattcttttttttcaagcccgtacacctccgaaagaagattgtgtag

SEQ ID NO: 347809 - DNA, 848 bp, Cannabis indica
atattttattttatttctcttttctattttttatgaccctattttgttttaaaacgttctaataaaaattattaaaataatattatattattattgaatatattaaataattaaattttaatactttatgataaaataatgaaaaaaacagagaagctatatataagagcatctctataaaaaaaatttatattaaataaaatatattaaatttatatatatatatatatcttcacatctctattagaagatataaatttatattagtattattattttttatatatataaagcacaaaaatataattatttaatatatattaaataataatataatattattttaataattttaagagaggctaactattaaaatatttatttatatattaaaagtagtcgtctaatggaatttaattttttatttaaatagaatattttaaaaatatacgaatattctgataaatttaattgtgttagtagagttagttttttaaatatatataaacattaatattatttattttaaattaatttaaatatatataaatattaatatattatttgtaatattattatttttattgttatttttgatattgggggtatgtttaattttgatatttttaaactttatatttttttttatttttaattttattattgcgatatgttaaattttaatattcttaaactttatatttatttttttattgttattaaattgttatttttaatattgggagtatgttcaattttaatattcttaaactttaatttattttcctcaaatttttaaaacttgaaatattattttttaaaaaaatattaaaaaattaataaataat

SEQ ID NO: 347810 - DNA, 619 bp, Cannabis indica
ctggcacggaagaaattaaaatgatcgacacattcccaaactggatgacaccaatagcagcatacctcaactctgcggaactcccagataaccgaaatgaggctcggaaaatgagaagaaaggcagcacggtacatcatagtggaaggggtcatgtacagaagaggattctcgatgccattactcagatgtgtcacacaagacgaagctgcacgacttctatatgaagttcacgagggattctgtggaaatcacgcagctagatagagcttattaaagaaaattctaaggcaacgctacttctggccaacgatgattgaagattcgagagcctattctaagaagtgcgtcaaatgccagagattttcaaagataccaagagctccgcccaacgagctgacatagatgaaaagtccgtggccctttgccatttggggaattgacctaatcgggcaattacctaaaggtagaggcatagtacagtacgcagtggtagcagtcgactactttactaagtggactgaagccgaactacttgcaactatcacattaaagaaggttcaagactttatagtgaagaacatcatatgtcggtgttggaagttattttaccaggaact

SEQ ID NO: 347811 - DNA, 693 bp, Cannabis indica
acagatgaatctaaatggttgttagacacaataatacatagatttatactggatcctaagttcaatgtgaacttggtcatactctagtttgaaagtattgtcaccaatctttattgataatgagaataagagatatcaatctcaggagctacaaggaaataatcacagcaagtcatccatggtgtaatccctcaaccctcattaactcactaacccgagccaacataatcaacaatgttgctcaatataatttcccaatcccaaccctctctttctcagatatctcgctccatttctcactctaacaactctctctttctgtattgtatctttatcttgtgtttgacttcactccttgttcttacaccttgtgttttttcttgttatgaaatgagaggagtagttctctttatataggccaagggaccaatatgcaagttgtcctatttgatagttaagttagttaaagacaaactgactaaccgaatggttgttgggggtttaaggaataataccacaaattccaccttatttcttcaagccccaacaagctaagcgtatctatccaatggaggtggtaatgctttcatgtgtagctaccgagcaactaaggttgagtaagtccaagcaatgcttgaacttactaacaggtaacaccttagtgcaaatgtcagcagggttctcttctgactt

SEQ ID NO: 347812 - DNA, 587 bp, Cannabis indica
agaatgggctaaacacgagatttttgggtagtttttaaattttgccatttgaagatatcaacgttaatttctatataagggtctcgtgttttagaagcaaaatactcaaaaattaaaccctagaactaaagaaggaagcaagtgaagcaattgtggcaacttggagcgagatcaccaactagttctttcttttccctttttatttcttcatgttaatttctgtttcaatttttattatggatgtgaacatgagttttatgaactaaattcccaatttagagatataatgaatgttaaatgatgtttcttcaatttagttaatgagattattagtttttcttctatatattgtatgatttgttcttatttgttttaattacatattttagactggtcatcttaaatgtgatttatgatcttaatatgaaatccgagaattgaatattagaaatgctctaataagacaaacataagttttgatgtaaaacgggagtatttacatagcttatgcaatttttagattctgaatttaatgcaaattatatgttaatttacttcagagatacaagtatataatatatgattta

SEQ ID NO: 347813 - DNA, 580 bp, Cannabis indica
gggcacaaaacccaacacttttcacataattagtgctgaaggctacaaatatttttttaacaattattgatgataaatcaagatatacatggacacttatgctaagaacaaaatctgaagctcaaactgtgttcattaatttttttaacagtatttgcatacaattttatgcaacaatcaaagctgtccgctcggataatgccaaagaacttaatatgagttccctttttgcctctaaaggcatccaacattaccactcttgtatggaaagatcacaacaaaactcggtggtagaaagagggcaccaacacattctaaatgtatcttttgcactttgctttcaatccaatatatccctatcctattggtcttacataatacaaactacctcatacttgattaagagaaccccatctgttttgctaaaggggcttacatcctatgaaattcttcacagcaagcctccatcttatgaccatttaaggacattcggctgtgttgcttatggctccactttggcctcaaaaagacacaagtttacccctcgatgccatgcatctatatgttagaatttatttta

SEQ ID NO: 347814 - DNA, 559 bp, Cannabis indica
tccgaccgcagtacatgtattcgtagaacctactttactacggatgaatatttaagatattcaaactcatctaacatgcatattattctacccatccaattgtagtataatatatcgcagaacctacttcactaccgataaatatttaaaatattcaaactttactaaatattaataattaattaataattaaagttagtaaatatatacctcgaggtagttagaaaccaatcaacaccaaataagtcagatccttgttaattgacctccgaacctacaacataataaaatactacaaaattaatattttttttatttaactacttactagttatacaatttataagtaactagttactaattagtttatttattactaactagttcctaatgagtaactagttagtaataaaaatacatgaaaaggaataaaaattaataacttgttaagtagttttaactaacttttactagctactaaaaaaaatacatgaataaaattgaaaataataaaaaatagaaacttttttttataaactaattttttaaaaattaattt

SEQ ID NO: 347815 - DNA, 718 bp, Cannabis indica
aatttcacagtcaaatgtatcagtcatacttgcagtttttggcatagtcgccaaacaatttgcaattaatgatgaatatgatgacgcagttgcctcaggcgtctcatgtggcacagtctcagatgccacaaatgatgctgacacaacatatgtcatagatgcctcaaaatgttccgataatgtcgacacaagggcagcagtatcagcaaacattacagacaataccgatacagccatagcagcatacatcgcataagatgccgacacaactagggcagcagacatctcacatgatgccaatacaacaagggtagcagacatctcaaatggtgctgacaccacatgggcagcaaacatctcaaatgatgccgacaccacatggccactagacatctcagacgatgacaagttcgcaaattttgccatactacccacaaatgtcggatattcctagagatgctagtgaagatgtactactaacttcttttagaattttattttagttttacaaattattggttaatgtttttttgatattttatgaacactcatatttaaataaacagtattgtaatatttgtgactcactctttattgtaatgtttgtgactctaaatattaaaaaatatttactttttatactcttaatttcataaattaattaaatcatttcatatattaattaattaaaaagaaatataaatatttaatataattt

SEQ ID NO: 347816 - DNA, 761 bp, Cannabis indica
aaagaaggtagaactaagaatgaatctataagatataaggccaggttagtggccaaagggtttacacagaaggagggtatagattttaatgaagtatttgcaccagttgcaaaatacaagactataagaataatgctaagtctagctactcaattcaacctagaaatcgaccaaatggatgttactactgctttcctacatggtgaactagaggaggaaatctacatgagacaacctaaaggatacattgaaaaagggaaggaaaactatgtatgcaagctagttaagtcactgtatggtttaaaacagtctcctaggcaatggaataaaaggtttgatggatttatgctaaaactggggttttctaggagttactatgatcactgtttatactataaaggtactgatattaataaagtcatatatctacttctgcatgtagatgatatgcttataatcagtaaggaaagggaaaaagtaaacacaatgaagggcctactcaagactgagtttgaaatgaaagacctaggggaagctactaagattttgggaatctctattaagagaaacagagcagaagggacacttatcctaaatcaggaagactacatacataagattattgaaaaattctcaatgaagggatctaaaattgctagccaacctataactacacagttcacactatctaagaagcaatgccctgagagcaaagctgagaaggaggaaatgagtaaaattccctatgctaatgctattgg

SEQ ID NO: 347817 - DNA, 879 bp, Cannabis indica
tttaaaatatgtccaatattaaaatatataaccatatatttaattaataaataaatattaacaaattaacaaatttttaaaatatgaccataacttaaaaaattaaataatcaatttttaaatttaaacctcaaaatatcataaaattaataataatctattgaaaattaaatattattaattttaaaattgatatttaagtttaaatatattaaaaataatattttattttgaaattagtgtttgaaaattggaaaaaaaaatcaaaatttggggaaaaataccacaaaaatcgcattttggtgtggctgcccaacagaaggctgcatacagcctccttacgtgcgcggaaggttaaagcgtttgaccgagtttcctcggcgtgtgcagggtgggatgcgcgcaggcagctggggcatcgtgtcgtaacatgggacatcagcgagttcagacaagattttgtcagagctccgcggggggacaaggtgtcttgttcgagtacgtggtgcgcatgagcacccctctcgacaccattgaaccccaattttcgaactctcataactattttaatttttatcggaatcgagttctctaaaaacaaaaattgcttaatttttgacaaggaatccaaataaaatattttcatggaaaaatttcgtaaaacacattcaatcatcaaataacacataaaccaacatgaacacatccaaatcaacacacaaacaatattcatcgttttaaatccatattacatgaaagtaaatcattaccatggctttgaggccagttgttgggaatattttaccaggatctagatttactaacaagtaagtggattaacatcctaaatatgaattctctaaaacaataaaataaaca

SEQ ID NO: 347818 - DNA, 513 bp, Cannabis indica
tttaggcctctttttgaaaaactccatcaaaatactctgagggttggaatgttgtttccagtcaatgaaggctcaagagttttcatgagatttgggccacattttttctgagaggataaaacctttaaagattaaattttggaaacacaagcttaaaattttagcttttttacctcttcgaaatgaaactatttggttcaaaatgtgggaggccaagtcaatagatactcctgaggtgaaacggtagaggaatgaggccatatcttgagacaccacagtcttgtttgaatttggaacccaattgctaagagcaaatcaaatgagagaggcatgagcaaatgtgagatgtgtaatgctaagactctccccaaatttcagttcagcctgtgcaccagtgagttcagtgagcatcaattggcgatccatagacattatggaatttgggacattctctggtagttgcaaggcttgagatatgtctttttcaaagaaggaaaaccaatgtcccctaac

SEQ ID NO: 347819 - DNA, 632 bp, Cannabis indica
cccctaacatacacttttcgaaaaagtctagaattctcatcaagaaaatcatcagataaattagcatagaaatctttgacaatatttacaatgtaccatttgaaaccagagagagtgttctcctattgatggtattgaatgaacttaacaattccatacacccgatgagcatgcaaatcataattcctttcactctcaaactttcgggtagcatacaaattccaatcacgctcattatcatgatagtagaaacaaggaaaataggagatagatgtaggaatgttaccaggagaagattccttcattggctgcttgcctttggcagtagcaaaagcctttgctgctgaagaggatcgagcaggggttgaagcggattttgtcaaaggaggctctggctcgagttcagtttcctcactgtctgaggaaactctaatgtcttctggaatctccttctcagaatggagagatacggatttattagaggagacttccattggttcttcttcttctgaactcgaagaaaccgaagagggattcgtcttaagcttcttggctggaggtgttggcttgtcatgacttcgggatgatcgaagttccttctcgatagaggcttgctgggcacgagtgcgagt

SEQ ID NO: 347820 - DNA, 535 bp, Cannabis indica
taatcaccataccatattaatagattattttatttgagactttttaaatttttctttaattatttaatttctcttcctataccatattaattctttcatatatatatacaaatatccaatctagctaatttcacgccaaaaaaatgcagatataggaattcatcttttggtaattagcatgtctttgggaggtcactttctaactaattggagctagcaagtatgaagataataatgataaatgttaaaattaagatgagtttatattgttatatatattttggtatagatggaggggctttgctcaataattttggaaatttgatgtataaattttggatgttgcaatcatgtaatatatatagatttgttgaatattttttcatgttgctctccagtagaggagttctctattttttttttttttttggaataggagtctctatgtttctcatattaaaataatataatttagtttaaataaaataattacactaatatgtgcgtgcttcgtatatacataataagtaaaaat

SEQ ID NO: 347821 - DNA, 652 bp, Cannabis indica
tgagctggggacaaaaattcgattcctttaattcaaatcaagcccaaacttttctataacttccagaatacctgtaaacatcatactaaaccaatcccaagcaataaaactcaacaattcacacagattttcaaatcaccattagagaattaagtttgagttcataaactcaaactttgctccaacctcaaatcaacctttaactctagctgaaatcatctcacacaacaacaaataaactccagaacatccactcaaactcttataattcatacagcaacagaaactcaaaattcaatcacaaaacctaacttaaactaaagaaaacctaagaaagaatagcaagaagaaataccttgattggaacttcaaaactcaactagattagtaagatttcagcaagaaaaaccaccctccttgctggcttgatggatcgaaagagagggaaagagagagatgaacatggagacttcaatgctaagtttcctctaactcactcctttcttcttttcttttcttttttttttaaacaaaatcaatatcaatattaataaaagacagcccttactcactaaaatccaaaacaagggcttgaaagaaaaagacctaattacccctctaactaatagattagctaccaattcccaagggc

SEQ ID NO: 347822 - DNA, 1056 bp, Cannabis indica
gcagtaatgctcctttattgaatgaattatcttgtatttacaatatgtgtcttcactaaaaaaactagttacaactgagttagacaaaggtattgatagctttgtcatttggtgtcaaaactgatagttaacaaacttaattgtcaagggtaagacttaacagaataaccaaccatatatcttacaatctctaccttggttggaattctggtaagactaactctaattacaagaaatagacacaaaaataggactttaagctagaacatctctgatgaaatgtagtcttacatcaatgtttttagtcctctcgtgatacatctggtttttgctcaagtgcagtgcactttgactgtcacacagtatagtaatggctccttgatttatccccagttctctagtgattcccttaagccaaatggcttcttttacagcttctgtacaagagatatactctgcttctgtagttgagagtgccactatggtttggagattagctttccagcttatagtgcagttgtttactctgaaaacccagcctgactgagatcttcttgtatcgatgtcacctgcatagtcagagtctacaaagccattcacagtaagttcatttccatcagggctatacattaacccaacatcagtagtgcctcttagatacctcattaaccatttaacagccttccaatgctccatgcctgggttccccatgtacctgctaacaatactaactgcatgacttaaatcgggcctggtgcaaaccataatgtacataatgcttccaaccaggtttgtgtagggaatgttctccattgctttggcttcttgttcattcgatggagacaaattgctagataatttaaagtgttgagcaataggtgtgcttactggtttggcatcagaaaaaccaaaattgctcaatactttgtggatgtattcagcttgagatagcttcagtgtctttgatttcctgtctctgagaatttccatgccaaggatctttcgagcaggtcctagatccttcatttcaaactccccactaagcattctcttgac

SEQ ID NO: 347823 - DNA, 520 bp, Cannabis indica
ctcccactccgcctgcgttgctctaccaaattaacactatttcatttcctacgcctacaagcccaatggccaattcgaaagacccaaaagagaaaaggactttccctatttctttttcttaaaattccaatataattttttcttttctttttttttttttgttcaaaacaattaattatatctaactaatttatatataaatgtagatttgaatttagataaataattcattttttttttgggataattgcggcaaaactccccaaaaacttgaggttgatgccgattagtcctcaacctcaaaaattggcggtgaaaatactcaaggtggacaaagttgtttgtccgttcatactcagtctgttagtatgactaacgtgacacgtggacgcaccagatttaatcccctttttctttttaattttccaaatataaaagtaataagttaaaaaaattaataaataaaaaactttaatattttttttatttcttttttctttttcatttattttctctttga

SEQ ID NO: 347824 - DNA, 661 bp, Cannabis indica
accacgaagtccatagcaatatctccactttcactctggtatgttagtggctgcagtaaccctgcaggtttctaatgctcagccttaactgttgacaagtaagacatcttgcaacatactcagcaatgtcattctttatgcctggccaccagaacatggcctttaggtcttgatacattttcgttgaccctggatgaattgaataaggagtcgtacgagactcatccattatctctcttttgataccatcatccataggcacacaaacacaatttttgaatcgcaacattcccgtttcatcaactcaaaaatcactagtctttccagccgaaaccctatctcgagtttttaccaattctggatcttgcatttgcacttctttaatttgctctaaaagagtagattgcagagtaatattagctaaataccctacaactaactcaatcatagctcgggtcatctcatttgctagttactgggagatttgtttcaccgtatttatctgattctatccctttctgctcaaggcatcaacaaccacgttggctttatcagggtgataaaggatctcacaatcataatccttcaccaactctagccagcgtctttgtctcatattcagatctctctgggtgaagaagtatttcagactcttatgatc

SEQ ID NO: 347825 - DNA, 733 bp, Cannabis indica
caaggactcagaaagaaaagtaataattacaattatatagtttattatttgaataaagtcattcatacacaataagaatcaaaccatcacacattgttcataagatgaaatccaaatcactactgccatcttccacgaataaacatcaatatacagataatggaattaataatataatggtaatacaaaaccattataccaacaatggaattaatattcatttaatcatataaataatatttatgttacctcataaagcaactatcttcagaacatcacgttgcttaattaggcaagtcgatgctttaatctgataatcttttattgcatagcctaatcaggcaagcccgtgccatagcctgacacccatatgtcgcataacgacatcacctaatcaggtgagcttgtgccaaaaacctgcaccctgtgccataatctggcaccaatatcgcatcgtctaatcagacgagcccgtacctacggccagtacttatcatatgtcactgacgcgcgtacctatgctcgatacgtcataaggaaaatgctcgatacgtcataaggaaaattgcatcacctaatcaggtgagctcgtacctacgctcggtactcatcatatatcaataacgcccatacttacgcccagtacatcgccaggaaaatcgcatcacctaatcaggtgagcacgtacctacgcgcggtactcatcatatatcactgacggctgtacttacgc

SEQ ID NO: 347826 - DNA, 650 bp, Cannabis indica
gagagatagagagagaaagtgttttgaatttttgttttttatttgtttaggggtaaaattgtaatgcaaaaatggtttaagtatatttttcatgatgcaaaatatcctagcatatttttagtgtaccatttatttttaagcatatattgtcaaatttccctctttaaatctctctaaataacactattagttaaaaataacatatctatcaatctatttctatatataaagctaaagactctattattgtcggtaacagactccgttattgtcttaaataatgcacatataaagctcaattctaaagacatttttacaaaaaatgttagattttgggcaaaagtttacaattttactgttacacggaattttttacaaatatattgtctttgtataaaacaactgtaaaacaataaaatagaacaattaaaacgacagtggaacaactaaaaaacaaccgtaaaacaactgtgaaaacataacacagtacacagtatttttgaaaaaaaaattcgccccacaataaaaaagtaaaaaagttataaatctcaatatgtggtgtaaaaacctcagtccgtatgcctgatttgacatctaacttctcatatttttttaaagaaatttatatgaaaaattaataatgttaaaat

SEQ ID NO: 347827 - DNA, 1156 bp, Cannabis indica
tacaaaaatactagatacaaaattacacaaaaaaattagaaattaaatacatgaaaaaacatgaaaaattgaaaaaacgaaaaaaaaaaaaaattaagcattgggtgcagatggtatgactgcataccatccgcgcaagcaagcaaggaaggctggccgaggtttgctgcacaggggagactgcaagcagtattcccgcatgtggatggggcttcaaacacggccttgagcgtgttccttctaacaaaatgtgtctgaacacatgtgctgatcgagtgacactcaattccgcgcgcgcacgtgggtgtcaccacccctagatatttttcaatttttcaaaaaatcataactaattcaaataaaatcaaaatcaagttctgcaaaaaaataaattgcttaattattttcatactatccaacaaaaataattctagaataaaattctaattattttacctaaaaaaatttgcaaacatcaatcaatcatcaataaacacatagattaacatgaatcacatccaaatcatacatacatcgttttaagtcgaaatttcttgaaagtaaatcaattaccatggctctgaggccagttgttgaaatttattttaccaggacctagatttacttacaagtatgtttttaacatcctaaatatgaaattctaaaacaattaaaaataaacacataaaaggtatgagaaaccttacattggttgcagcagaattaaatgactccttttgctcagatctctaacccttgtatcctttctgtggcaaaatatcaccaagatctgagcccgacactccttcaattgtttggattcttcaccgtcttacacactctgattaaggactaacttgatatgggtggacatgcactcaatcactaaggctcgaattttgatggtgaagaagactaagaatcttgaattagaagagagaaaaaaagaagaagaagtctcaaacactagttgtcagatagaatgaaaactaggtttaaagatgtagaagcattacttgggtggtgagaccttactcttctttttatactaattctattagggttaggattgaattaattggaataaaaaaatgacaaacatagagcaaaaataaggttaagtggctgaccctttatgtgggtccatcactagtta

SEQ ID NO: 347828 - DNA, 1393 bp, Cannabis indica
catctagcaacgcctccagttttagcaaaaccaatgactggggagaccctgtttctctatttagccatctcagaagatgcgattagtgcagctatagtgcgagaagtgggcaagcacaccaacgtatttactatgtaagtaaaagtttactaggggcagaatccagatatccccctctagaaaaactcacattgtgcctagtccatgtgtctcataaactacgaccatacttccaggctcaccccataaaagtgctaaccgatcagcctttgagacaagttttatcaaaaccagatgcttctggaagattgataaaatggtcgattgagctggggcaattcgacataacataccatcctcgaacatccatcgagggccaagctttagctaacttcttgatagaaggtatagctccaaaagaaattccacctaatcgacgagacgcggaaaactagaaattatatgtggatggtgcatcaaacgaacagggttcaggtgtaggggtaatattaatatcaccagaaggctttaagtttcactatgctctgagattccaatttgacgcatctaataacgaggctgaatatgaagccttaatcgttgactaaaagatagcagaggcgttgaaagtcaaacatctcatttgtcatagtgattcgcagttgatcgtgaaccaggtcctcaggtaataccaggccaaaggcttaaaaatggcaaagtatttagagaaagttcggaagaacttggaaaggttcgattactttaaaatcgaacaaattccgagagaacataactccaacgccgatgccttagcaaaactagcctcgcataatgacctggatgaattgaatctagtaccgatagagatgctgagcgagccaagtatatgtgaaactgaagacgtcgagatgatagatagctctccaacatggatgacacctattatcaattatttactcgactggtaacttccaaatgacaaaaacgaggcacgaaaactattgtattcagtacctcgctacacaatgatcgaaggaaagctatatagaagagggtattcaatgtccctgcttcggtgtgttctcctcgcagaagcaaacaaaatcattagagaaattcatgaaggcttctatggggatcacgaggtttggcaaagtctgtttaaaaagatcattagacaaggatattactggacaacgatcaataaggacacacacgagtttgtcaagaaatgtgataagtgtcagaggttttcacatatacctcgcatactgccaatagaacttagaatgatgacatccccctacccattcgttacatgggggattgacctaattggggcattacccactgggcgaggaggagctaagtatgtggtagtagcagtcgactt

SEQ ID NO: 347829 - DNA, 486 bp, Cannabis indica
aaattttcttgagttagggcaaaaaagttcatgaagcttagaataagcaagatgaaaggcggacggaatgcagttctgagacaagctctatggctgtaaacccacatgaagacatgataaagaagaatcgcagaagtttctaatcctagggtttcctaattatttttctacagcacagtaaaacttgcattcgaaatgtaaacatgcaaagataagcataaaggaaatcagaaacttactcaagattcaagtttctgggttcaggcaacgtcaatccaaccagcagttttatgaaggcacttcaacgactttgaagccaggaacctttcttttcactctcgagcttacttagcaaagaagggtgatgaaatgaatttatgtgccaatgttgtgggtagttataggcaattcacgaaaagaggtaactgtctcaaagaaacctcagacgcctcagcttcccgcctcaaaaacgaatatgggaaatca

SEQ ID NO: 347830 - DNA, 793 bp, Cannabis indica
cagctgactcagaaagaaaacatgagtgttactgaatacacgacttagtttgatcgcttggcaagattggcctcaggaatcgtgccaaccgatttcaacaagaaagagaaatacctagatgggttgaatgcaaagatcagacacgacttaatgatcactaccgatggcaacaccacctatgctgatatggtaggtaaggcactgcgagctgagggcgcagtggagaggaccttagagtctcgagggactccgaatccttagagtctcgagggactccagatgttggtggagctcttactcctcctacattaggctgtagtaggggaggcagtggctcggccactaatcagaaaagaaaggcacctactgcatccagtggctcaggtcagaacaagaggttctgagggaaccagagtcgagataatcgtcaaggtggctccgaaacccgatacacttacccagagtaccctagttgtaaaaagcatcatttcagggagtgtaaagggcagggatgcttcctgaagaactaaagactgcagtaaaacccgctccagcaagggtgttcgcgataactcaggctgatgcagaagccaacccttcagtggtaacaggtcagctctcgttcaacaactcttatttctctgtgttgtttgactttggggccactcattcttatgtggcgtgcagaatttttagtaaattggatagacagcacgatagttatgaatcagggtttggaaccctctgcctgacggagaattagtcatctacaaaaggtggattaggtctatgc

SEQ ID NO: 347831 - DNA, 1600 bp, Cannabis indica
cttctctctctatatacgtctcatcttttcttctttggtacctcttcttcgtacccaccagtaataagtttcaagcttttggaaacttttttattctcatgttagtttctaatctctttggtatattgatcctcatgacaattttaaaatgtacaatgtgtgactttttgatggaaaagattcaattttgacattcattctgattcttgactctttgagtcataaagaatatgaggcacatattctagtttcgaaagaaaaacacacattaggattcaaaacttaccttggccggcctaggaggtcttgattgagacctggccggccctagggctgaatcatggaagttggcgagctctaggattttaccctataaagctagcatgttcatgcttgggtttggtgaccctggctagttcttgactgagtcatgggaccctagtcgaccctttcaaagcttgagaacttagccagcattagccttagttccaagtgggtagccaattttctgtcctcttttgactttgataagaatccggctctgtaggcatatacaaccctagcctcatacatggttcccttggaaactctacatgaatcttaatggtgagtctattatagtcgaatgttcaacttaagactcaacatggcttggaacatataaggaaccttgccttagtcgtagcccagtacgtggcccctataagagctctgtccggttcttttctggctatacagttcttacagggccttgacctcatgcatgtgaaccgatttcatatttgacctcaaggctttcatgctcctgctttggcctataggccctctatgttcaaacactactattatttagccttaaagccttctatgatggacatatgattttcctggctatcttcttatggccttgacatgtaagtgtccagatttacttatcaagctaaagtatgcctgcacgacttagatgtgggtttagtagcttattataagcgttaaaatttctctacataagttcttcgtactagttcgatgcattgtatggtatgggtgctccccatgtaaccaaacagacttaggtctcttggtaacttgctattcaccaagtttctaggacttttcttggggtgctacccgttttacacatgtggaactaaaagattaactttaagaagttaatctttattagcaagtggtttagacaaagttggtcttacgtgtaacaacaacatacaacttagtgtctacttttgaaatcatgtagtggccacccctacgtggcttactgcacaatgaccatcactgaagagtgatgggaggccatgctaaaaagcaatgggtattagctcttttatgggttcttgcacggtgaaatgttagaaagactaattgacaagttggctagtgagagtacttaccgagttgttccctatttcagtgtttgggtagaaattccaactccaagtttccgttgtacatgccaaacttgtgtgcacctttatttttatcttgtaacttggtgtggaccttctcagtttggtccgaacatgcttcttgtaggatctttgttgccaaggaatattcttcagggagtaattctctt

SEQ ID NO: 347832 - DNA, 459 bp, Cannabis indica
ttattttcatcgttttagaaagttcatatttagagggtattaattaacatacttgtgagtagatctaagatcctggtaaaataatttccaacattggtctatatataaagaccactttactattcatttggtgtgagctgagagtgtttgttgttgtaaagagcatgagaatttataactcatggctctcaagtgaacctattttcagtaggagcatgactccatttagttctattcttgtccatgtttgtaccccattcgggcttcatcttcaagcaataaaggcaaagcctcaaggcagttcctctcaaggaatagatccaagtgttacagcttgtgatcgaacattgtaactcactatgttcatttactttgtttttatgttcttgtggtcaatattttctggtttatgttttcattgttttctttgatctgtgttgacgtttgttatgttcttgg

SEQ ID NO: 347833 - DNA, 709 bp, Cannabis indica
agttttatttttccaacttaggagatttcctaggtcggtcccggatgggttctggtcctccggagcccgtccccttagacccttcggcttatatttcatccagctggttccggccttcggacagctatctcggagacgatgctgccagcgttaagattcggaactttgctagggccgaattagagagtcagggtaggactagcttgattgctatatctgagtgtttgttgtttcccatggatgttctaacacttgccttctttcttttgttgtagcaggcgtttccatggacgccattttggccgaacttgccggggttcacactcctgaagctccccctccctttacttcttcccagatggccccccctctaaaggcttcttccagtgcccctccagacactattgacttagtggatgaggaggtgcttccgggagaaggtcaagaaaagcaatgggcttttctgaggaagttgaagaaggtgaagaagggcaccgggctcttcctgaggaagttgaagaaagtgaagaagagcaagaagttgctctgattcgcaaacgcaagggcaaaatggttgcccaggaggagcccaaacggcaacggagagctgatactccggcccacggtcttgatggcgggatctctcccgagatggaggaacacactgcccctcccaatattgtgctgactccggttcctggagatgagg

SEQ ID NO: 347834 - DNA, 593 bp, Cannabis indica
ggttcgggtttggatcctggtccgtgtcctggtcctagtcctagtccggttccaattccaattgtgattccaagttcgagtttgggttcgagttcgggttggggttcgagttctggtcggggttcgggtcctggtccgagtttgggttcgggttcgaatgtcggtctaggtcctgattgggctccaagtgtgggttagggtcctgggtgtgggttaaggtccttggtgtgggtccaggtttaggtccaggtcccaggtttcaatctcgaattgagttagggtttagttctgggtctaagtcctgggtttcgatcacagtttgggttcgtgttcgggtccgggtgcaggtctaggtttgggtccgattctgggtctaggtcttgagtttgggtcctgagttcaggttcgattttaaattcgagtttgggttcgggttttttcctggtatggattcgtgtccaggttcctgtcctggtttgggtcctgggaaggtttcgggtctaggtctaggttcgacttcagattctttggtctaggtcaagtcctagttcgggtttgagtccacgtttagatctgggtctgggttccggggc

SEQ ID NO: 347835 - DNA, 612 bp, Cannabis indica
ttttatttaacatttatttttatattaattgaaataaaatgataatatgtcttttcattttataactcctatatcaaattaaatatgtattattgttattatgattattattatcacattctctttatattctcatatttaatacgtaatcactatctatgttatatatactacctattactatattatttgagcatcaacaaatatttttggccaaccatgtaggcatatattttattattgaagaagtttatactctcaaggcatgatatgtttctcaacgccgttttccacctcttgcctctactagttgtcgtctcttttatcacgaattgtaactgactcgatatagtttgtttgtataaaaaattattcctatgaaactaaagaaattttggaatgcactattatatgtttctatcttatgttttagttaattaatcaagttggtatggcttgtgatcatttattttttacttggcccgtacacatatttacattgattttgtaaatattgtcagtattatatgtattctatttattttattcatgtatttttttttatatattacccacttaaatatcttattattatcccaatgtacttataat

SEQ ID NO: 347836 - DNA, 1625 bp, Cannabis indica
attataacactgttataaaactgattctattttaattataactgctttgagttattttgtgttatttactatatttcaatcataaccagtttgagttatttatttttattcattatgtgatagtttcagttctatttttagttatatctgagacatctacttctggtgacttttccagtgacttttctggcgatagtgatttttccggcgacggtgacttttttggcaccggtgacttttttcgacagaacttattattacaagctttattaaatttatttattattttttcccatattttaagctttaatttattttttaatcccatattttttgcattatttatttatactacaaaaaagtaaactatactctcaattctcacatttatgaaaattctcctaaggaaaatgatagtaaattgccccaaattataggactatgttagtaaatgtcttcatttcaaaacttgtagcaaaatgtcccttttagattatttattatttatattatcttttgccacataaaaaatcaataaaatcaactaaaatgacaagcagcagctcgctatcaaagtgatcttggctccctcctcggcgaggcatccctatgagatacgacttaccgtatatctttaattatgcgctcatctcggtccaataaaggcagtatattcatagttgtgtaaaaacctcatttatttggcttgatttgtagtcaaatccataattttagggatataactgtaaatgtatttcggtcaactttataattaactgccactatgcaattataaatagtggcagatatgatcaaaagggggaggccctgaaaaaacatactcagaaatctgaataagattgactcgtggactatgcaaaattttaactgcaaaaccacgtaaaaaacccagtgttcttattttatttttctataacttttattatttctgtgttgaatcataatcgtgaggcacaaatttggttagcaaaaatctgcgttaatagtttggtactttcattgagagcctatgtgaaaaagctcagaaaaaagcctcttgacataaaagtgatggatgacaccaccggtaatagtcctcaagaaggaatcaatcatcgtcccgaaaaagaaccattgagtcctcagggatctgctgaatcatcacatgaatagaatgcaagctccaggaagacccagtattggggcccttggttcgacggaccttggaagagcaacaatcggtcattccctagtcaggttgatgaggatggcgcttacaacccaaccagatacatatcgatcgtggaattagaaaatcgccatcttaggcatcgattggaggaagtaaactggagtaatgccaagttggagcgtgaaataattgtcgcaaaggcaacgctgggagattgtacgcaaaaacaacccgaccttgagaaaagagatttacgaggaaaacctcgtggctcacaagccaagaggtaggagatgacccaggggtatgctcagagctctcaggaggtgaaacctgaggaaactgagaaaagactaggggtacagcctgggatacgtgggacatcagacgaaaattgccaaccactatttagtctcataagaatgaaactcgt

SEQ ID NO: 347837 - DNA, 1327 bp, Cannabis indica
ccttaatgagatcggtgaactcaatacatactcgccactttttgttcggctggggcactagtttgggattcgccacccaggccgggtagaaagcttcaattatgaaattgttgttgcgcagcttttccacctcttcttttagcgctagggctcgttcattgtccaacaatcttcttttttgtcaaacaggtcagaaattaggatcaatatttaggacgtgtgaaattatagaaggatcgattcgaccatgtcctcatgtgaccatgcaaaaatgtccaagtttgctcttagaaattttatcaacactgattttacttcgagtagcaaaccttttccaattttgagtttcctggtcggaacagttgggttgattttgatttcttctagttcttccacaagaccaacattggtattttgttccccaagttggggatctacatcttcatccccgccttgggcagtttcctatttggcaatgtcttttcccttttccgaactttggctagaggatacttcctttttagacttggttagggcaaggttgcaacattctcgttcaacttgttgatttcctctcaggcacccaaccccattcttgttggaaacttaaggcatgaatggaatatcgatgtgacagcctttaagtcatacaaggctggtaggcctagcattacgttaaatgttgaaggaacatctaataccaagaattgtgccatgatagtcatgctcgtcggagcttgtccatcagtgaggggtagatgaatttgtcgtaaaggtgcgactccttggccggagaaaccatagacaggcaggagacatggggttagatccttgagctggagtcccatcttttcataagcagttttgaacaagatatttgaagaggctccattatcaatcatggttctggctaccattttgttggctatcttgacttccacaaccaacgggtcgttgtgtggaaacctgattttgacagcatcttcgtcgttgaaggtgatggtaggacctcctgcccgtggaattttgggcttcctttcttctacggcaaggattacttcctcttgctcgtgctgcgctgtccgggcatacctctcccgagctttgcccgaatctccagctatgtgcgggcctccaataatgacttgcagatgttcgtctcccggtggaggtagcaagtctttgttattgtcgttcctctgattttgatcggtcttgacatacttttgcaagtgtgggttatttttctttatcacgaattcaatttctcggttcaggttgttgcattcgttactattgtggtcgtagtctctgtggaatcgacaaa

SEQ ID NO: 347838 - DNA, 897 bp, Cannabis indica
ggggtggagcagtggtttggagaagtgttaaacaaactgcaattttagactttaccatggaggctgaatacatagctgccgcagaggcttctaaggaacttttctggcttagaaagttcttcacaggacttggtgttgttcctggaatggagaaaccactcgtttaactttttgataacactagtgctatagccaatagtaaagagcatcgaagccacaagagaagcaaacacattaagaggaaataccacatcatcagagaatatgtggcaagaggggacgtactggtggagaaagtggacactaaagataacttatttgatccattcaccaaagtattgactgcaactacatttgaaaagcacagattgaatttaggataaattgaaatttactgatagttttatgttagtgcaagtgggagtttgttgggctttatgccctaaataaaaccctatttcaatgtaatcttctctattcaaatatcaataaagaaacaaatttaatttcattacttgtttaatgtgttatttggttcatgtgatcatctatgtacttatttgattaataaattcatccaaacccttatcacacttatattcttgtttattgtgttgtcaacacagtggaaagtaaacaagattgtgtgattaaatctattcctagatttatcaatacacagggcttaactgatatgataatctacaacggagtttactttcaccttggataactgctatgtcctttctagggcattggttaaagtaagcttgggttggatgtatggaggatgcatcggaagggaccgatattgaacttgaactagatatgataatcttaccgtaatatctattcaattctatatcacctagagtatcctagatcaaaggatctcaa

SEQ ID NO: 347839 - DNA, 617 bp, Cannabis indica
ataaagtttaagaaaccttatattgattgcagcggaatataatgaatccttccgttcatatctctagcccttgattcctttctgtaatagagcattatcaagatctgaacctggatctctttctcttcttcttgttgattggattcttcacagtcttacatgccatgattgagataccacttgatgtgtgtgggcactcactctatcactcaaggtttgaaaatatgaagagaagaaataagagaatgtggtttcaacttagtagaaagaagtctcaggaaaatttctctaaaggtgaaatttcattagtctttaagtgtgagccatcactatctatttacagggcaccacctaggtttaggttagatttaattagcattaaaatcaattaactgagtcttacaagcagtatggtctcaactagtatggggacaatgggcctatataaccgagcttcaataagttgatctagaattaacgaagtaaattcactaacttattaattccgcatgcatccactcatagaacttggaatttcactctcaatcatatagaatgctctatgtgttccacgatatagatacgctattaattatcctatgttatgatcccaataa

SEQ ID NO: 347840 - DNA, 587 bp, Cannabis indica
gagagctgaacggcgaatgtacatgttcgggccacactagaccaagtgggttggggtctaccagtgatgtatgttgtactctgttttgttgcttaggtcggctagaggaaacgaacttataataatattttgtaaagtacttttgggatcgtgacacatgtaacttttattttgtaaagtaaaaaagtattacaagtttattttcattccgtttgtaattaaagtttaatttctacgctaattttattagtaatccccactaggggattagggtttcattagtatattgggtagcgtgcctaattagttaagacattacaatttggtattagagcgctaaggtttttaaacttcttgtagaccggctgaacatgtacattcatcgttggagacaagctcgactcatggtgcagtaagtattgagagtaaatactttactgtttatgtgatcatctgtttacaactttccattttaggcagtatgccaacatctagaatatttatgtgttatgtgatgccatgctttaaattctatatgattaagtgtttatttatatggggtagatagatgagttagggtttaaggc

SEQ ID NO: 347841 - DNA, 882 bp, Cannabis indica
aaaccactcacactgcatagatggtcttcattacaccatactaccaacaaaaaaaaaaatataaataaaaaaaaaatcaatttgaactttgaactctttgcgatatggttaatatttacatatttcttaaaccgcatagtgcagttcaattagcagtatctcatcacttttaatttaaacaataccattttttaagatatagtatttacttttgggtatttttttattttataattgactataaaagacaaaaattataaaaatacgaatgctctgtttgattttgtaattttttttttaaaaaacaaaaataggcagggttgttttcacataaattgagattatttcattaatatacaaaaatgactaaattttttactatttttacagcttatttatttgtgtttttttttttttaactattttacagttttttaacaaaaaatacagagtggtttttttgaaaacccgtagttccataaaaatgtaagtaaaagaaaaggtctgtaaaatagttaaaaaaagtctataaaaatgtaaaaaaaaatctattcttttggtgtattgtgtaaattttccaaaacatttatcctatgttatcataaaaaaaaatataatttaaaaaaaattaatctccataaaaatgttaaaatttggtgtgcaagtaaaaaatggaggaaattacactctatactctttttatattgtccacttttatttttaccctcttttttaaatcctattatttttatctctttttaaacattatactaattttacccctgtcatttcaagatactctctatgtgactctcttatgtcaggatattttgggtacaatatataataaaaagaggtatgtttcaattaaatataaaatta

SEQ ID NO: 347842 - DNA, 755 bp, Cannabis indica
ctgggtttgatgtttgaattttctgggaatttttgtcttgagtttctgtgtaatacgttagattcctcttttctggtgttcgagttacttctattctacgtattttttttgtcaaggacccatcttttctttacgtaatgaccttcaagggttcagagaggactttgtctttctcgatttttacccttttttccttttctttgcttattcgtaatgtcaccatctgtgggattcttgcacccgacttttgtcaaggaaaaccttctaaggctttcttgttgacaactgtccggagggggcctctttccagcggttaggggacccccattcccttttttgacttagggtttggtttggggcctgactgctggaattttcaatctttttcagaaccaagatgtctgcatccggttccaaatcttcacagaaaggagggaaacgtctggccaccttggaggaagtaatgaagggtccagtggcccaggaagggtataagccccgtgctaaggggtgggaagcggccgagcttcactctacccttacttgcccccaccagctggagcacattgtggtggtggcaggcatcaagcctgcgacttccgggacttaccaccggcccccccgggacgcggagacgcctaatcacaactacgggggcttcggagcttggagccaaacgcacttgatgaccggggccatgcttccccttcaggattactttattaattttcttgtatttttcggccttgcgccat

SEQ ID NO: 347843 - DNA, 761 bp, Cannabis indica
ttcactaagattcagttcagcctcccgaaacttctgaacggatataacatcccgccctttcttccaatattggatctcccgcttacaatgactaattcgttttttaaaattgcatgtatactcacgcccccacgcttgaagagattccccacaatacgagattttcttcataacatgctgacctgcacacagctcccaactatccttaacaacctggcgacacaacggttcacgcaaccaggtattttcaaaccggaactgacgaaacggcaccgtaacagaacgcaccgtcggttcaagaagcagagggcaatgatcagagacaggatcttccaaattatgaagctgagccatacgaaacctttggaaccaactggaacaaacaagggctcgatcaagacgaacttcaacccatgaatcagtgcctctcccatgctcccaagtataaagatacctgattaactccatatcaacaagatcacagtcagacaaagcttggttgaaaccatccaccagcatttgtggatatctattacctcctcttttatctgtatgactagtagtattgtttaagtcgccaataatacaccaaggaagagaagattccgactttaacaatctcaataaatcccatgttttataccggacagctctattaggttctccataaatacccgttaacgcgccaaggagaagaagctacttctgaaatctaaagatcaatgtgatgaaaagagtatccaagtagctgcacatcatca

SEQ ID NO: 347844 - DNA, 317 bp, Cannabis indica
gaatttactaagtaaattcttaaacttattagttcctccttgcgcctctatagatttggaattgtaatcttaattatatagaatgttctatatgtaccaagatatacatacgttatgaattatccatcgttctaatcctaatagtcaaagatccactatagatgatctacatcgaatagggacaatgacttaattaatttagatatatactcaatattagtttgtttaaattagtttccggtatacattcaaataagaatagcttttatttgctttctattcctgtaaaaaaaattattaagcattcaatattaact

SEQ ID NO: 347845 - DNA, 531 bp, Cannabis indica
cacagatcacaaaagcctaaaatacttcgttacgcagaaagagctcaacatgagacagaggcggtggttggaactggtaaaagattacgattgtgagataactataccatcctggaaaggctagcgtggtggcagatgcacttagcagacacaactatgcaagcttgtcaatgttaaggcattaaaagtgtcgttgcaacaggaaatcgagagatctgggatagagttagtaacaagaaagctagctaacctcacaattgaatcaaatttattagagaagatcaaagaagaacaagccagagatgagtttttaatgaagaagcgagtcgaactacaaaatgagaaagctagggacttctccattaatgaagagggcattctactatacaaggcaagggtgtgtgtacctaataaggcgaagttgcaatcaaaaatattacaagaggcgcacactgttgggttttgtgtcctaaataaaacccattacaatctaatctgattagttatcaatttaagagatttgaagtgatt

SEQ ID NO: 347846 - DNA, 1068 bp, Cannabis indica
actatatgttctgaacttatacagatttttatatatattaaaccataaacatgaaaacacatgcaaacataaatgacttctaatcttttatttgataacatatcagattagattgtaatgagttttatttaggtcaaaaaatccaacaaattatatttttaaatttttcgtagttacttaatcgttaagtatatttgaatgaacttttaattaaaaaataaaaatgtaatgatattaaccaattaaagaccgttatgtgactattaattagggctgtacataaatttttgtaaactgcccaacccgaacaacccgtccaaaccaaaccgagataatcggacgaagataacactcgcccaatctttataatgggcgggttgaaaataatatcaacccgcccaatcaactcgaactaacccgactaacctgattaaaagagttttatatatatatttttattatatttaatctttatattatataatttatatacatatttataaaaaatagaaagttcaaactactatatttttttttatgatggatgatttgaactttaaattcaatctttctatttatttcattatcacaataactaaaatataacaattaaatgtgaaaaaaaaaaaaaaccgatctttatattgggttaaataaaattaacctaaaccgacgaattcattaagcgggttgaaaatttattttttcttaattgggcaagttgtacttacatttttgtaaaccatgttttttttttttgaaaacatgtaaaccatgtttacattgggttaaataaaatatatcctaaaccgaccaaatctactcacatacacccctactattagagcatgtttgctttggtgtaatcaagattggaatggaatggaaattacaattacaatgtttggttgggccttttaactttttgtaatccttttacattgtaatgagtattacaccacttgcatgaattctcattacatgagtatgactcatgaatgagggttacaattatcaatacattacaaaaagacttttttaccttctctctcttacctctttatcaaa

SEQ ID NO: 347847 - DNA, 933 bp, Cannabis indica
ttagcatccttcctggccaagtccgcctccgccctcagggtgtcggacaaagtcgtgttcttggaagcagcagacttagcccgggagtaagtgtaggccaactttagactgacatgcacaaggaaaaaactttagcatttgagctaagtatggaagattaaagggaagtattaagaaagagttaccctggtgaactccttcaagactccgcccaccagcaattccaaagaagagtcattgtcagcaccagccagttgctcactgacctcaggaaccagccggttcatataatgggccagcatctccttgccctttttggcctctggaagcaccggcaaaggtggagcgcacccgttcaggatcactcctgacaagttcagacccaaccttcggtggtcaagactccttagacttggaaactttgggggtagaggggtttgcagcagtcagctcctcgaaaagatcaatgacctccccagtaggccttttttcgttagtagaggacccctcaccgaccttagacttcttgaccggaggagaggcgctagagcttccgcctattctctcctcagagcgtcgagcatctgtcgagacatgtctgtacagaatgaaaacaacatggttagaaaacagacatcaaaaataagatgaagtaatatgcaaggggactgcccgaacaagactcagaagtccatcatcacctgacaacggtcttgtttcagacataacagctttcccttttccgaacacggaaggggatggccgaacaggtgaaatgggctcccttatgcgaatcgcatgttcaagaggcctgggcagggccaggagtttcttcttccttttcagtggagtcacctgctcttcctcatcctcaccttcaggattcaagggctcctgagcatactgcttggcccttgcaccacccttcaactt

SEQ ID NO: 347848 - DNA, 813 bp, Cannabis indica
gatcctcgtaaaataatttccaacaggttggtgtatacccaaacaaggtgagcttgaaaatagggccttaattccttgttgctaagattaggttgtaagtgagtttttctatcaaaggatatcgaccttcagcttcaatgactcatttggtgacatagtagactggatgttggatattgttttattctcttatcagcacgacgcttacagcgtattcggtgacaactaagtatattactaattcttctccgtctttgggttttgagagtacaggaggctttgcaagttgtctttttgtttactagcctttagtatgtagctctagcagtttttagaccgaacgacattcctttataatagtacagacccatatttattcgaaaacttgtatgttcttgttctggtggatgcattatgatttgattataacccgaataggcatccatgatgctcaagatatcatgtccggctgttgcatccacaagttgatcaattcttagaagtgaaaaacagtcttcgggacatgccttgttaaggtcggtaaaataaatacacactcgccattttttgtttgactttggcactaatacggggttagccacccaagccaggtagaaatcttcaatgatgaacttgtttgtgtgtagtctttctacctcttctttcagtgcttgcacgcgttctttgtccaacagtcttctcttaaactggacgggacgaaagtttaggtcaatgtgtagggcatgagacatcatagtgggatcaataccgaccatatcctaatgtggccaggcaaaaacgtccaagtttgct

SEQ ID NO: 347849 - DNA, 1132 bp, Cannabis indica
tccctcttctcgcactattgctgaactaatcgcgtcttccgagattgccaggtagaggagtaacgtttctccaattactggtttcgccaaaacaggaggtgttgccaaatgccttttaatattctgaaaggcctcctcgcactcttctatccaaatttcttattgcctcgcaatacattgaaaaatggcaaacacttatcagtcgacttcaaaatgaatctgttaagtgcagatccttcctgttagggcttggacttccttaggctttgttggtgatggcatatctatcaaagccttgattttctagggatttgcttcaatgcccctcgcgttgactatgaatcccataaattttcttggggaaactccaaaggaacattttttcgggttaagcttcatattgtacttctttaatattttgaagcattctgcgaggtctatggtatgactcccacttttcacttattttactaacatatcatcgacataaacctccatgtttcatccgatctgattcgcgaacatctcattccccaatcgttgatatgttgccccaacattcttcaacctaaacggcatgacattgtaacagtaaagtcccatgttggttacaaagcttgtatattcctgatctgcggcatgcatttttatctggttatatccagaatatgcatccatgaatgacataagctcatgcctagcagttgcatccaccaactggtcaatcctgggtagtggaaaacaatcttttgggtacgccttattcagataagagaagtcaatacaagttctccaagttccgttaggttttgggacgagaacaagatttgctattcacgagggataaaataccttgcgtaaaaagtcattgaccaacaacttatccacttcctatttgagtgctccttgtctctcagattccaagggtctcctattctgtctctttgctgggtagtttagatgaacctttacatgatggcagataatcttagggtcaatccctatcatatctccatggttccaggtgaactgatccttgttcgcccttaagaaacttattagctggtatttcaattgctcgtctaggtttttcccaatgtaaacacactttgtgggatttcctgggtccaga

SEQ ID NO: 347850 - DNA, 835 bp, Cannabis indica
ggaaatttcatcctgattggtttctattagatgatccctaattttggcatcgtttatctcaagaatggttttaggtgcataagttttggtctcaaatggaagggctaaatttacaagacggtcggtttctaagaattctggggttgtaagttctggattaaattgggtcatactttatgaacgtatgtaatcctaatttctcaaaaaatcaaatacaacctaacccaagaatctatgatactaataacctaaaaattttctttaaccctaaaattatccagacaaacaaaacaaaaactacttaaaaaataatcatataaagcagataagaggaacaatcaatcacaaagataaaattacaaatacagaaaagaaagacattagaaaaaaggggagtgaaccacttactatattgctgaagatttcttggcaataaaaaaattcgtgattgagattgtgatgactgagacgatgaactctgagagtctctaagattaaagatgaaatctgatgaaatacgcaggaagtaggtcaatgacagtgagggcatgcaaatacggaggagtaaagcaatctgaacaatgttttgtacaaaaatttgaaagtttgaaaagcaaaaatggcaaaatgagttgttactttcaaattttataccctggattaatcaccgttagatcaaaagaaatttgatctaacggataggaacactgtagattggaagaaacggatcattaaatgctaatgatatgtctcgaaatcttgaaacgccaaaattcaaagcatgtaatttttcaaaattaggtgaagacaaaaatacccttgtaatcatttaaaa

SEQ ID NO: 347851 - DNA, 599 bp, Cannabis indica
cccagttcactcctaagggcatcaagtatccgcctaccctcttcgtcctctatgcctcccagaaatggggtatgccctctccccacgaggttgcttggtactttgatttgaagtccactcccaagcaatgtaggtcggggtacttctacttctcacaaccaagcttcaagtggttaacgggcatggacgatacaaccatcagcaagattgggcattttgctgatgagtagttcattgtggatggcacgagcgtcacttgcactcggttccagcagattctgacatatcaccgcccacccatcactcttgctcttagggatagagctcaaaaactttcccgactcccgggggaagaccagaatattatccagttgacctccgaggataatcttgtgaggtatgggctctatcccaaggactttactcctaagtccgtgacagggaagaagaggtaatttggtgctggccggactgaacgagctcattcagaggatgagttgattcaattgaagcgcgaggctaagttcaagggtggtgcaagggccaagcagcatgctcaggagcctttgaatcctaaagataaggctgaggaagagcag

SEQ ID NO: 347852 - DNA, 995 bp, Cannabis indica
ttctgttgagagtcgggctacttcttcatccctctcagccaataatctttgcagttcctgaatcttctcttcattactgattgtcccagttactaacactggcatatttttatcattgccaatggttagtgcttcgaactgagtaatgagatcagcagacaccccctcactgtgttcaataaagggagtgtcttctaaagagtgttcagatgtacaacacccctcttcctgaactttttgaaaagagggattcactgattcctgaataggagttgtacgcatggcacgagctctcgatcgagttacagggcccgtgtaggaggtaggcttaacagttgaagtgacccttgttggtcggtagccctggagaaacatccagtcaccatgttctcttcggaatgagttagggcttgctttgggaacccttacactatcgcttctagccttctttgggaaggaaaaaggcgtcctacacccctcatctaataaagggtgttcattgatctcagcagatgccccctgttgaccttggcggttgacagagattacgatcggaggcctaatcggggtgcctcctactaattccctcgtttcaagagggtttggtgaaggtgaagtgtttgttcccctcctcccttttgttgccttcctacctctccgaggttgagaagtcggtgttgcctcagtttcctccgcagaggtaaccatcactgaggcgacagtgggcaagaaaataggaacggaaccaatcaagatacgctcccattcctggatcattatgggggagccaatcttcgttggccccccttctgtcttggcaacctttgctgcagaccttttcattgcccgggcttgcctctttttaaagccctttgctgccttgcctctcaaggcctgtgcagtcttagggatatttttcacccctttccccttccagcttttctagctggtttaggtgtcttaacattcttcattggttcgggcaccctgcatga

SEQ ID NO: 347853 - DNA, 638 bp, Cannabis indica
ttgttaatccaacatacatgatagtaaatagatcctggtaaaataatttccaacaccaattagagtggaagatagggagttgagcgctgacttagtagagctggaattagcagagttcgatatcatacttgggaatgatattctgtccaaaattcagccagcattgattgcaagcggaaaatagtaactttccaaccagagggcaaaaatctatttgtttatgttggatcttttcaggagtctcgaatcgcagttacttcaattttaagggctaaagatttactacacagtggatatgtaggatttttagcgattgtgactgactccagcagacctaaaatattgggcctaaggtagtcatagttgtaaaagaatttcttgatgtatttcccaaggagttaccgggattaccgccacaacgagagatagattttataattgattttgcacctggggcagaacttgagatgctataagagaactatcatttttaaagtggccacaaatgttttcctgttgtttaacccatgagtctttttcaaacaaaattattttgatatataatatatatgtattaaaattaatgtatcccaagtaggagaatgttagactttttatttgggcttacattaactttt

SEQ ID NO: 347854 - DNA, 679 bp, Cannabis indica
atagttaattataattaaataattctaaaaaagaaatatctatttaattaattattttaagaaaatagttaattataattaattaaatctaaaaaaagaaagtctacctattagtaacctgctattacaggttagagaaaaatataaccatatggctacaataaaaatataatcattgaatagtcaccctatttatttataattagctttaaatattattaattatagatttaactaacaaaactccaaaccataatatatgtctactaaaaaattaattttaattatatatattgtttaattttaaatttacataacaatatattttaattaaatttattttaaaataataattatacttatagaaaactataaaatgttcaacttataataatcaatataagcactcttaaaacaatcaaaagttcaatcctttaaaagtgattttttttctttatttatatttaattgaaaattttaattaatttaataatttcaaaattttattatattatattatattaatttacttttcaaaattataatgttcaatatatttaaaaattttataaaattaattattaactttaattacattatttatataatcatgcatgaaatagtaaataatacatattcataatatactttttcttcaacttagttcaatgtatttaaa

SEQ ID NO: 347855 - DNA, 340 bp, Cannabis indica
aaagtagacatagtctcactttagaattataattgattaataaaaatcaattaactgagtcttacaggcagtatggtctcacttggaattgcactctcagtcacatagaatgctctatctgttccacgatatagatacactatcaacatttaaccatcgttctaatctcaataatcaaagatcctctatagatgatttacaccgagtaggaataaatttaccgtttcactcctcaatgtcttttatttaaaacagttagcttcatgtaaatgatatttcagtgaaatataatcactgaaataagagctcttccatttacctctattaagccaagctcgaa

SEQ ID NO: 347856 - DNA, 683 bp, Cannabis indica
agatcctggtaaaataaattccaacagatggaacgctaactaaaaatggtaaacgttattttattacatttatcaatgattattttgactttatttatgtgacttaataaaaaataaaaataatgcacttgacatgtttaaattatttgtggctaaaattgattcaataagaaaataaaaaatgcttcgtagtgatagaagaactgaatatgattcaaacttgtttattgaattttatgattcacatgacatgatacatgaaaggactgcaccatatttacctgaaatgaatggtaaagctaaaaaaaataaaaccttactgaattagttgtggctattttgttgaattctggtgttgcatctcattggtggggtgaaatttttttaattgtttgctatgttttgaatatagtttctaaatctaagagcaaattttaccttatgagattttgaaaaataggcaaccaaatgtgtcttattttaaaacttggggttgtttagcttatttttgaaaacctggtcctaagagaaacaaactagctagtagagcctatgaatgcatatttattgaatatatggtgaattaggccggaacataaaaaccgctaaaccgtgggaaccgcctgcatagaaactgcccattaaaaatctgcaaaaattgggttgggttgagttttaacccg

SEQ ID NO: 347857 - DNA, 752 bp, Cannabis indica
aataataggtttattaaaaaaaattgaataaaacaattaaataaataaataatacatgtaacaatatctagaaagtatgttaagatatttctattttaaaataaaacatttaaaaaatatcttaacttgaattcaaattaggttgttagaaaatatttaaaatataagaaactcctaattatcttaaatttaaatttgatattcaaatattcaactaattttaaaatatttagtttatttaaatttaaattaattaaatatcttagtatcttaatttgaaaattaagatatttctaatattatttttaaacttataatttaataaattaaatttaacaaaataaacaatttaaaaataggatatttttatggttagtatattattaattttacttaaaaaaattaaatatgctaaattttaaaattttatgtttagaaaatcctaaaatatctattcaaacaaaattaaccaattattcaaaacattgcatgtcattaacaaaaaaaaaaattataaatttattagataaatatcataattagataaaatgtcaaataattaacatttatctaatcttataatttaaattaataaaatatattttaaaaatgataaattttttaaaatctgatctggttagcaatttaaaatttctctagattatctttaaattttatttaatattttaatgtcaaaataaaatcatttcatattttattaataaaatatctaaatatctgatcttataatt

SEQ ID NO: 347858 - DNA, 652 bp, Cannabis indica
aaaagaaagaaaagaaaaaagacctaaatcaattttgtttcagatctgatctacaaagaaaattctaaaaacttacctcaaagagaagagcaagaagagcttgcaacatcaatggagctcacctcgagagaagcttagttgctgcactatcaaagaatcaatttatattatcaatggaggttctaagtcacacaaatagaatggtaaccttctatattttcaatctccctcaatctcattagtctaatatattgatattcctttcaagttctattttatgagttctaaacaggggaagctttctctctcagtcaagatctcttacaaatgtttttggtagtgagaatagtaccaattactatattcataagatattatagatcgattttgtgcatcaaaataattttaataccttaaaatctgaaaactttactggaaaaatctattcggacccgagaacaccttttgaaattaaagtatacattttgcgtgttttcgatgcttgaaatcaatatagatctcttaattttttcatttagatcattttggaattgatttcatgatttttggaagtttaaggaaaatttattatgtcgtttttcagggcagatttttcaaaaaaaaaaaaaaaagaaagaaaaaattaagaaaa

SEQ ID NO: 347859 - DNA, 642 bp, Cannabis indica
taacatatttctaggtaagtcttcactagtttcccaacgtatttcaataagttcaaagttttaaaaatacgtacttgaaggtctgtatagagtacgtcacttctacatttcaatattgtgtgacctgtttaggcatatttgggtattacgagaaaatatgggaaaatattttcaatttacaattcattttcggacatgtttttgtttatgttgttgtgttaatatttgatatagtatttttttaggttatgcaagtagatagtacaacctactaatttgaccttatattgattgatgggaaaatattattaaaatgattatttttatgaaaaaactagacaagtactggtcatttatttatcgtactttagggttttttaaaaaaccacaaactatcagctgcattgtttaaaaatttattggaaacacaaggtcttttggggtgtttttcattttcaagggtatagatagaaaagttgacaaaagcttatgtcaagattgtgtttcattggcactactagaaaaataggttttagagacccacattgtgtaactctaaacctatttagtgacacttcaccgcgcatcactaatgagggtgattggaaagacagtttttagtgacacttcacatgtgtcact

SEQ ID NO: 347860 - DNA, 920 bp, Cannabis indica
atctaagcccaatagcaaatatataggctcatacaagacaaaagattttgatgcgctctatcatgttactagatttttcacagatgaaagaaataacaaaatttacctgttacaaattatttatataacagattgacaactagactatgcttaaaattagattattagatctatcaacaagttaatatagaaatttagatcaaataaataatatgaaaagtaggttaagatatttttattttaaaataaaatatttaaaaaatatgttaactagaattgaaatttaagttattagaaaatatttaaaatttaataaactcctaaatatcttaagaaattcaaatatccaactaatatttaaatatttagtttatttaaatttaatttaaattgataaaataactaataagataatataacataatatcttaattaaaaaatttaaatatttcttttattatatttcaaatcttataatttaataaaataaacaaatttaaaaaaaaaaaggacatttttatagttaggagattatcaatcttaaataaaataaaatatcctaagttaaaacaattttggttagaaaatcctaaagtatgtattcaaataaaaattaataattttttaaaatttcatgttatattgacaaaaaaatataaatttttaattaagataaatatctaattagataaaatgtcaaaaactaatgtttttgtaatcttattataggatttaataaaatatatttaaaaattaacaaattgttgaaaatcttatattgttaagaatttgaaatttatctagatgatctataagttttattaataatttaatgtttgttattcctaatttttgcactctgacgtggtatcacacaatggtgacatgtggaatcgactctggggtacctgctcgcaaga

SEQ ID NO: 347861 - DNA, 507 bp, Cannabis indica
acagtttaatgtttgttttgcaattgtttattttctgactttgttttttctttaggtcccagaacccaatctagatgttgttggtgaaaagacagctgccattcctactaatgaagaagttgaggacactatttctgatactcctcttttggataagagaaagcgtgcaccggcattgaatcgccttttgttgatttcgggtcggcgtgatgtgaggagcactccaatggaggtaatgtcctcaacttctcaatcaggaggggatggagagggattttaagatggttacttatgtgaagggccgttatgctcttcacaattcatttgctgatcctgtctctcctgaaattgagacaaagtttgacgcttgggttggtgaagacttgctaaaaatcctaggtgactattttattctttttgtatttgtattctgttttatttttcaattttattttttcacaaattttcattttaattattgtttttttgttgtttgtttgttctttt

SEQ ID NO: 347862 - DNA, 545 bp, Cannabis indica
aaatttccctaaactaaacatttgctcgacctcgagtaaaatacaaaaacgaaaaacaaaagttaaacaagtcaatctccagaacatgagtaatttttaaatatactcaataacatgattatgaaaatttttacctatgcatacaatccaaaatttcagttcaattacgccctcgacacacttcaatttattttcattcagctcacaaaacaatagaacgcaattcactaacaattgaaccactttatgcatgccaattaccatcatcaatccactaacccaacattccatatgcttgcaatacttactattctccactaatataaattaatacatcaccaagaatgagaacgtctttctaggcttgtagtgttaggcttaggtaagggtagttgaaatggtcatttaggctttcctatatcataagcttctccaatcatgtcatccaaaatatttttcacataatcccaatacatttttttctaattacatgagagaatttttttcactatattgcaacaactttatatggatttttttttttt

SEQ ID NO: 347863 - DNA, 613 bp, Cannabis indica
ccaaagtttacatctattttagtttttagagtttcgttagtcagcagttaaatgccaaacaaatctatcattatgtacgcatggcaggttgttattggtccacatcattatttaaatattattaaaataatttaaaaatcatttaaaatataaaaaaattagagaaataataatataaaaaaaaagttcttctctctctctgagtctctctattatacccgaattcggatgtgcttcagaaagtgatgcgtgtcaatctcgttgaaaatgaacaaatagatataatgataattatgcaaaatggaataactcattaaatatagaataaatagagtatatcggtaacttgctgactgtatagtattaagcgagacgaggatatacaaactatcgattcatgtactgacaataaactatcttacctcggaaggcataatcctgagggaactacagacaatattagcgagacatctatctcgctacgcataagaaattatcgacgagacgaattggttgttgaagcacttagcgtataacccacgttataataactgcgtaataacttgaggacttaaaggacatgattgtctattctacaaggccttatggtcaa

SEQ ID NO: 347864 - DNA, 990 bp, Cannabis indica
tttaacttttatttgtgaattaaaaaattaaaaaaacaaaagcgttaccaaacggcaccataatgttttaatgttttatgaacaatcttactactcacatttcataatatccactcatgtgcttaaacaagtgggttgtttctctttggtattaaatacttattaaaatgggaaccaaaaagtaagagaatttttcattctcttattttgtagcttaattgatgattttatttatttatttatttataatcactttatatcctttacatgattaaaatgaaatccactacaggtgacttttttacattatctacaacatgtgagcccataatctttacttaatatgatgtttattagattgtcttacacttagtctcatgtgaaagaataaatatagttctttttttcttttgtaatcactcattcacagatcacaaactcagcaccaaataagcatcaatcaagtaaaataaggcaaaaattgatcataaaggtaaagaaataaaacataaaataaaaaatttgttaaaaaaaaacaaaaaaacattaagaacaaaaaatttatcctgattgagtttgttagggtttatgctctgaaaatttgtaaagaaatttccatttataaataagagaaatattttcatatatgcttaaatgttaaattattaatatttaatattaaataatttataatatatattggaattttttttattcaaacatgagactattacttgtattatatggagaattaagatcacttagctagtcatgaataaaatagtcagcaatatatttaagttctggaatatctttaatcaacggttgctaatgcggttcattgatgcctgttactcggtgcaagcaatcttgatttagattgttgatgtagtaggatatctaagtgaagatgatgtatattagagattatatatgacaatgactgatgtgtaattaaactctctttatcaaacatgtcgtttaccataa

SEQ ID NO: 347865 - DNA, 743 bp, Cannabis indica
tttaggttgaattggaaggaggcagtggagatacaggcataaatcagatggacaaacctgggggggaattggaatttcctgagaatagctactatgaaaggccattccacacggtcgaaggctttagccatgtcaagcttgatcgacatccatccctttttcccccgcgtcttaagcttgatggagtgcgcaacttcttgggctataatgatattgtcagaaatgagtcggcccgggaggaaagcgctttggtgtggtgagattagagtattcagaacaagtttcagcctattggcgatagtcttagaaatgattttatatatgatattacagagactgataggccgaaactcagagatgtacttaggctgatggactttgggaatgagcgtgataagggtgttattcagaggggccacattcgcatttccattgaggaaactggaggcggcttcaagcacgtctttcctaacagcatgccagttggctttgtagaagtgagagttgaagccatccgggccaggggctttgtccaaaggaagctgaaaaaatgctttctcaatttcgtcctgggaaaaatcctcacttaagagggatttgtcggagtctgagagagagcaactaatgccttccaaagctatattcacgtcagaatcggtggggtttgaggaggtgaagagctgattgaaatgagactcaatttctcgaataattccttcctcgtcagagaccatgccaccatt

SEQ ID NO: 347866 - DNA, 838 bp, Cannabis indica
aaagccgaagcacaagtaattaatctttagaaaaaacatccatatggccactctcattccagcaactcttaacaatttcatagcaaactggttccttcaaccacacattctcaaatctaaaccttttattagaactaggaatagaattgcattcagtctcaagaaaaattgggcaatgatcggatgtggatgtttctagattaattaatctagtttggggaaagaaatcataccaattattagagaccaaagccctatccagtcggctttccacccaatgttgggttcccctgcctctctcccaggtgtaacggtggccttggagctcgacatcaaccaaattgcagctccgaactgcctgttggaaaccttccagtaaccaccggggtagctgcgtccaccaccctgatcgctgaagttcaggagattattcatgtcaccgatcatacaccaaggttgcaccgattgagtcaccagagaacgcataagggtccacgtttcacggtgcaagtttcggttcagctctccatacagtccggtgagcctccattgaagtcggtcatctatcgttactcaacatcaatgtgatgttgggagtaaccaagaatacgggcctcctctttatttttccaacacataatcaaacccccactcaagccttgggcctccacaacaaaaactccttcaaagcccaataaccggcccacattatttacacgatttttatcacattttgtttcacgtaaaaataacaaattgggtttcttttgagaaattagctcttttaggaattgaatagcccgttggttctcaagcccccggcaattccagcttagaa

SEQ ID NO: 347867 - DNA, 626 bp, Cannabis indica
ggtctgcgtctgcgtctgcgtctaggtcccacgtttaaatcccggtctaggtctatgtcggtatttgggtccgtgtatgagttcgtgtccatgtctacgtctgaattccaatttaggtcaggggcttggtctaggtctgggtccgggattgggtctgagcccgagttctggggctaggttcggtctagttctgggtccgggtcaacgtccaggtcacggtcccggtcttgttccgtggtcttgatcaccttcttgttcaagtttcggttttgggtcctaggtttgggccggggtctaggtcgttgtcaagcttcgggtccttgtccgagtccctaataaagacatcgactatgggtcttgtccaagctccgattcattgatcacgggataagatgtgcatcccaatcacgggtcctagtcttgtttcaattcatgtcccaagtcagggtcttggtttgggtctaggtcctcagtcatgttcaatgttctggtctggatttaggtctttgttcgggtctcaagtcctggttcgggtttggatttagattttggacccaatcccagagtggctctttgaccgagtcctgttcttgttccggttacagttttggctctatgttcatgtc

SEQ ID NO: 347868 - DNA, 589 bp, Cannabis indica
gaaagggctaggtattcgttcgaaaagaagaagcccgaaagaaatgaatttgttaaaataggctcgggaggcacacctagcaatgtttcgacaagtactgtttcaacgagaatcgataacttgagtgcttctggctcgaagagaaaggacggttctaagaaaccgtcaaaggataaaaaaaacaaaagaagcatgataagtacgtgccagtgtatactatttataccgagcataatgaaactcgggaaaatatttacctcgcacttgagcgaaaggttgccttcggcaagcccgagcccatgaggaacgcgaggaaaaaaagagatcctaacaggtaatgtaaattccataaggatatcgggcacacgaccgacgaatgtcaccaattaaaagatgagatagaaagcctcatcgcttgaggccactttaaacagcacgtgaagagacagggccatggacacaaccagcccagtctgcccagtaactcgaacaactaggggttacaacctctttttattgaaggagaggacatcgtggttatttcaggagggccacatattgtaggggaaagcaataacgcccaaaagag

SEQ ID NO: 347869 - DNA, 499 bp, Cannabis indica
taacttttaaataatttatagagaagatataatgtaatgtgaatctttgatgtaaaaataaaaaaaaatgatatttattgatatattttaaagaatagaataaagagtcgtgtgttatgagtgctaaacaagttttgaagtataatttttctttataactattatacatcatctattaaaataagtattaatattgttataaaatattatttatgaatgtccaaatcactaaattaattctcactattaatgcttggttgtatatttttttaaaaaatattgatttagtttcctatttctttagtcatatttttgtataaataggggttcaccccattagaataaacaactgagaaattcttattcagtttctctttctctcttcatcttcttcttcttttcttcttatatattttatattattttatagcacgttatcagcactagtatctagccaagccccaaggtaagtattttgttaaagttcttgaattgtttc

SEQ ID NO: 347870 - DNA, 742 bp, Cannabis indica
aagactgtgaagaatccaaacaacagaaggagtttcgggctcagatcttgattatactctgtgacataaaggatacaaggattagagattgagcgaaatgagtcatttaatttcgctgcaaccaatgtaaggtttctcatatcttttatgtgtttattttatatcgttttagaagttcatatttagaatgttgaaaacatacttgttagtaaatctaggtcctagtaatacatatttcaataaatggcctcagagtcatgataattgatttactttcaagaaatatggatttaaaacgatgtatgtgtgatttaaatatgattcatgttgatctatgtgtttattgatgattgattgatgtttgcaattttttttacgtaaaataattagaatttcgttatagaattatttttcttggatagtatggaaaaattaagcaacttaattttttacaaaacttgatttcgattttattggaattagttatgattttttgaaaaattgaaaaaaaattaagaaatggatgcccacgtgcgcgggcggatccccttgtttctcgggtgcacgcgacttcagacaagccttatgtctgagttttctcgttcaggagggaagattttgtctgaaaaccccatctgcgcgcgggaatgctgcttgcagcctcccctatgcggcaatcctcgatcaaccaccctagcatgcgcgcggatggtataaactgtataccatccgcaccaaatgc

SEQ ID NO: 347871 - DNA, 587 bp, Cannabis indica
gttcgaagctagtttcaccaggttcaacacttcgaaattgattttatcgggttcacaagttcaaaactaatttcacatgttttaagggatctgtaatggggtcgctctattttatgatgttattgtataattttaattttaagtttcctttttattatttttttctaggttcgaaacttgttctcacacttatgttttatttttagattattgttatacattgtgtattgttttgattatatttgtgatttttttatgtgtgtgtggttgggggggggggggttcttctttcatctgctaacctaatgaaattagtttcatttaactttattgtttagcatttatatttgttattacttttcatagtgttgaaattagttttgtagggttcacagtctcgaaactggtttcacaggttttaaggattctgtaatgagattgttctattttaagatgttattgtatattttcaattttaagtttctttgtattattttgtttctaggttaagaactagttttcacatttatatatatatatatattttttttattattgttgtgtattgtttgttgttttgattatat

SEQ ID NO: 347872 - DNA, 534 bp, Cannabis indica
ttagggtgttaatcaacatactggtgagtagatctaagatcctggtaaaataatttccaacaaaggtctgcccgcctacagctaggcccacaagtggaactcgtgataggggatttagcggctgaccatttacagttttggaagtattcatcgttggatcttcgtctgtgtcacccagggggatgacactcggaggttgctgacctacagttttgtaggcctttcatatcagcacagtagcttgccgactacgattttcaatctctgtatgatgagcccttaacacttccatctctttgtctctccactcggtaaacatacgcctttgttcctcgaaagcgaaatttaccgcaacgtggagttcttcctaatcatgatgtagggtattggcatgaccctacacgagtccaagggcagcatggaggttttgtaactcagtagcatctccaatggtcttcggagtgttggcagcaggcgtgacgaatgtgttatgaatgccctggttgggtgctgaactgttattcctagtctctt

SEQ ID NO: 347873 - DNA, 500 bp, Cannabis indica
tattttcaaaaataaaaaaaatctgacaccaatataaagaaagttaaaagtacttatatgaataattgaaataaactaaaccaaaataaaccttatatatgttggaaaaaagtaagacttttaatatttttcacaatcttcgtcggatttctctattattccccatcttcatcatcatcatatccattaccattttcccattatcccccattatttcactgagtttgtgctgatttaatgaattgattaagtttatataatttatttaaaaatatttttgattagattctttttacagccaccacaacacactacaaaattttttacttttagtcacaataaaatttgtgactaaaaatttaaaagttgtgactaattataaattattattcttatgttatgactaaaagatcaatggctaaagatattagtcgtaaaaattacaatttgttataactaaatatattttgggaaatttcaatttttggccttaataatac

SEQ ID NO: 347874 - DNA, 744 bp, Cannabis indica
tagattccatatctatgataagcactcccactgaattgtattatcatgttcccaagctgtacgtgtgacccgaaccaaatgataggctttaactaacatttcaaagaacataaataatactcttgagattgaacctaaccacgtcaggattaagatcttttgatctaagatcaaccagtgatattgacttagaaagatacaacggtaaaattataatatctttactaagatcaatatcggtgacagtccaatgtatactccatacattcgatactagcatactttgccaatgttctgaaaagaacataacactaattcaaggtgcaagtaagctttatcgctgactatcacatcagtgtaaattcagtgcaaagatgaatcatgagacattatcttttgaagcatataaccatacttaccttccacacactacaagaaaaggcctttttaccagcgcagttcgtcaactgcgccggtaaaagttgtcgacgtaaagcaaaatctgaaatcccatttgtatttatgctttacttttgtcggcgcaataatgcgtctgtattactatgttttgctggcgcaataatgaatatgcgccggtaaaagtgaggaaatgaagcgccaacaggcgcgaaaagttttccgcctttcattttatttattctggcgcttatatacttttaccggcgcatctatgtgccggtaaaagtcccaaaaaaaagagagggaaacttcccgcgtggattt

SEQ ID NO: 347875 - DNA, 430 bp, Cannabis indica
tttcgagtaccaaattccataatcaggagtgctattaacatatctaataatcctttttacagctgatacatgagattccataggattactttgatatctagcacacactcccacactgtaacatatatcaggacgactagcagttaaatacaaaagacttccaatcatgctacgatagagtgtagtgtctacctttactccattctcatcttttgttaatttcagtgtggtgctcataggagtacttacctgcttagccgattcaaggccaaatttcttgacaaggttcttagcatacttactttgagatacaaatgtacctccttccatttgtctcacttgaagacccagaaagaaattaagctcaccaaccatgctcatttcaaattcacttttcatttgatcaacaaatacctgcacttcatggtta

SEQ ID NO: 347876 - DNA, 549 bp, Cannabis indica
tttccaaaaataggcaaattaaggaaatatttcaaggtcaataacaaaatacaatgaatatgaaatcaaattttaaaaggtaacttatcaaaataaatcaatttagatcaaatgttgatacttatcaaacaaagcaaaaattttcttagcccacaagtcaagtcacaaacgtgtccctcccttttttatttttattttttataatctgaataaaaataataacaaagagattatgtaaaaaaatataagttattctagagcaagcaaataatcaagtctcatagcaagagacaaatatacatattatactttcaaaagaggataactaattagtatctcaaaaaccaactacacttcatagatgttgagagaaaatagacatgttacaaataatgtgaatcaggataatttatatttgagtagaggagactaacacacttgaattcacttggcagacataagtgtgtgcagtgaaaataggaacattgtccttggcaatatttttattttttgcctttttcaatttgatcccacaactggatgctatca

SEQ ID NO: 347877 - DNA, 945 bp, Cannabis indica
tgcagaaagggggttacgccgtcagactttaatacttatggcagtttcaatacgccttctcccatgcggtattaaatgcgaggtgactgttcaaataggatttgatacctcccgaagatgcctcattatagtcttgctctccgggagcatatgaaacttacatgccttctccgggaggcatgttaaatgctgatccttttaattaagaagacgtagtcgaattatctcaaagtcttgcttcttcagcccacgtgtcacagtccagttggtccacgtattttggacaaaatccggggcaacatttacccctcaagccttgtttggtaaaaagtaaacaaggcttgcttagatacctccggttgccgtattaacttcctggcacgtgctctgggcgcgtggggatgcatttatgaccattattactgcagttattcgctttttgcagacaacgatttgtttcctgtccatttaatgatactgcgcattaaatgggtgtcagtcgagtactcaaacgttttctaccgccttgatgaacgcttgtcccaaccgttggatcgatagaatgcgaatcgattgctatcctaaccgtacgatgatggtcgatcatagttatctcacacccgttctggcctataaatgccagcctctcacttcatttggttactttcaccatttcaccaaattttctcagagttttcacagagagaaaagaaatttcaggcaccatagattatttgcttctcttccttcgccgttgccagtcatcactctaccggcgatcaacaccaacccccagccttcaaacttcatgtaagttctcaacacactttacatttgattactgttcgtttatatagcatgttttatgatttcagggttggatgtcaaacttctgggaatgagtttgcctgagttttctgtatgatgcgttaaattcctcttttt

SEQ ID NO: 347878 - DNA, 622 bp, Cannabis indica
caggtcatggtggtgacatcatgaatctgacacaccatgtcccaccagactaaagcgtcttcttggaactggaaggtggcacacaccactctatcatttccagtgacacccataaagttcagaatcttggtaatcaccgttagccactgttccgctttcataacatctggacctcccagaaaaaccagaggtgcttgcttccggaaccttacatacaagggttccattctatttgtcgctactactattttggcctgagcagcaggggcgggtgccgcaggaacttctggcacaggcactgcaggagccccctgctgcctcaatgtttgtatctctagatcttgttcttctatcctgacttgcatttcagcaaacctagtctcccaattctgggtttcttgctcggcttgggcagcctgtggcgggttatcgtcaccccgaccacgagcactgcccctgggacctctaccccggcccctagcatgcgggggaaactgggctccctgaccctaatttgaccctactgagttgccctggctcctagtattctgcttggcatccatctaatctgaaccgcctgcgaaaccaagagttggcacatcaggtcatgatcaaagagagc

SEQ ID NO: 347879 - DNA, 650 bp, Cannabis indica
acagtatttttgtaagaaaatagcaaaagttagtatactatgtaaatttcccttgaacaacaacatgacaaacgttcataatcaaatatcttaaacaaagacattaaaattcactctcaatatttttccgaaatcgaattcgaaacctctctatcaatctagtagaaacaactcttaattttgagtaaacttttccagcaggtaaacccaaaataatttcacaagtagattttcttgcatacttaatatttataaaagatcccaatatgtgaatcttagtatcagcaagaacaattctagtttttgtagcattctcaataccaaacttggtttttttataaattatttttacaagttttttacaacgtgaaaataataatttttataaaaaaataaaaaataaacaataaaatccgtaaaattgtatttttgtaaacattcttatcattttcaagtatttataaaaaaagagaaaattgtactctatactttttttatattgtcctcttttatttttaccttcttttttaaaatctataattttttcctttttttaaacattgtaccaattttgcccctgtgacttcaagatactctccatgtgattctcttattatgtaaggatattttgggtacaatacatataaaaa

SEQ ID NO: 347880 - DNA, 1716 bp, Cannabis indica
tagatctggtttctgtcgaaatttgagttttcagatgttatcgatagtttatcgatagaatatcgatgctatgtcgatattctgctaagaaaggtcagggatgaccattatcgacatgttgtcgatagtttgtcgatatcatgtcgattagaaagcaaattaacatacataagttatttgagaatttgtcgatagtatgtcgatattaagtcgaccaacagtgtcgacaatatatcgacattctgtcaatatattgtcgactttaagataaaaattgaaaaaaatcttttgacataacagacattaaaaattttgaaacaaacataacaaacataacattaaaaacattaaaacataaaataacataacaaccatagaaagttcataacaaccataacaaacattaaaatattaaaaagttcattaaaaaaataaacattaaaactcaccacaaaacaaccataaaataacaaattaaaattgtttgccttatgggtgagacttgatatacttgcataaagattcaggcttcaccggtttaccattaaagatgcctaatttgcaacgaagacacccttcggggaaccctagtggtggacccggccatacaccagttttgtaaatttctctttcaagttgtagcaacctatactcgttccgatttcgttctttttcaaaacgtctatagtcgtctagaactttttgcatttgaggagtaacttcgccaacatcaggctcctgcttgagctttggctcctgcttgacctcttcaggagttagaattgggaatttactcttgttctttctagtagacatatttagaacttaagagaattataagagaaatttgcttttaatttttaagtataagagaagaacacttatgaattagaaagagattttcttttatagagcagtatacatgtttggaatgtaggaaaaattaattaacattaaatgtgtaactgtacaagtgcaacacatgaattgtataattatcgatagaatatcaatacaatgtcgatagtttgtcgataaaacttgaacaaaaagaaattcggcatacatagtattgatatgatgttgatgttatgtcgatagcttatcgatatatgtgtgattagaaagtgggaaaaattaattagcattaaatttctagttgttgagaatgtaggaaaaattaattgacattaaatgtgtaactgtataagtgaaacgcatgcaatgtgtatttgtcgagtgaatatcgatacaatgtcgatagcttgtcgatagttgataagattaagtaccattatatgtctaattgtacacgtgtctgacatgcaaagtgcattttggagtctatatcgatagtgtgtccatagtttgtcgatatgcactgccaaccgaattgttgatgtttttatcgacataatgtcgatgggatatcgattggatgttgatatttgttatgttttggtattttttcctgtactcacctttctttgtttgaaatttcaggatcgactgtgtttcttgttgtatcgtacgatggtgtttggtgtgttgagggttataattgggtttataaagccgaaggcagtttgacattgacagttagaactgacataaccctacaacaaatgcaccaaattttatatgaagagttggaggttgatcctttggcatataatttaaaattggagattttttccttgtacatgaagggacaaa

SEQ ID NO: 347881 - DNA, 669 bp, Cannabis indica
aaatcacgtaatacgcctatgttggttagggtgttacagcaattaaggatcatggtaaattggatcctcaaggaggatttcatccacttccacatttttcaattctaaaaatggtttcaatttttgtccattaactttgaatacattaccattattaggattttcaatttcaatggctccatgtggaaaaacagtgcggataatgtatggacctacccacctagagcgtaactttcccggaaagagatgcaaacgagaattgtataaaaggactttttgaccgggagaaaaatcttttctcaaaatatttttgtcatggtaaaatttcattcggtccttatactttttcgaatagtcatatgcatcatgcctaagctcttctaactcattcaattgaagctttcttttctcacccgctttgtctaaggaaaagtttagttgcttaatagcccaataggctctatgttctaactcaacgggtaagtggcatgccttcccataaacaagtctatagggagacattccaatgggcgttttgtatgcagtacgatatgcccataatgcatcaatgagtcttagggaccaatctttcctagtggggttgacagttttctctaagatgtgcttaatctccctatttgatatttcaacttggccactagtttgtgg

SEQ ID NO: 347882 - DNA, 849 bp, Cannabis indica
attagaattgggcttattcaatgaataataattatttatttaattgttaaattactctcctaagctttgagttcaaaggtcaaacttgagcaaaactaactccaaacaccaaaaccagctactagaagctgaaactaactcaaatgaacctacaattcgaactacacaaaaattaaaccctaacaacccctaatttccaaaatcataaactcaaccaaatcttaaaattcaagaactaagagatagagatgctagagcttaccttggcttgatttcccttgaattccttactgaaaacactagaaatcaacaacaatttccccatgttctaggctagttcgaagagagagggaagggaagagaaggtttgttcactttggcttattttctctttatttttcctaaaatgaaaataagattaattgaattaaccttgttgaatatggaaactaggtgtcaacacctaaggcagccaccactcaccccttgacaaaattaccaaaatgcccccataacctataacttgggcatttttaagactaggggtaaaatggtcaaaacccataaccccgctcaacctcggtattttattttctccaaaatatatcccactaagaaataaggttctagacttacccatgtgatcaaactcgttgtaaagaccgcttagtttaatttggaaattagcagataattagggtttaattatgaaaattatttattaatatttaaataattatttatgttgatttatttgaattcagaatgcatttttgtgtcatatagtgaaatttcataattttgcattttcggtgtccggcaacatagaatgcggtgtatggctcagta

SEQ ID NO: 347883 - DNA, 672 bp, Cannabis indica
aataacataatttcttatcaggaaaatatcccaatacacaagtttcatgaaacaaataaaacacaccactgaatctagattacctcatgatctaaaacacccatacgagcagtgtgctcatgaaagaccttgggtggcatacccttagtaagggggtctgcgatcatggaatttgtacctaagtgttatatacaaatctgtccactttgtaccctttcttttacaacgaggaacttgatgtcaatgtgttttgacttcgtcaagctcatgttgttattggaataaaatacagttgacttattgtcacaatacaaattaagtggtctttcaattccatccacaatgccagtgacaaagtttctcaggcatataccatggttcgatgcctcataacatgcaacaaattctactgccatggtggatgaagctatgagagtttgttttgcactcctccatgatatagctccactacctaacaaatatacgtagccaaaagtggatctcctactatcttggcatctcgcaaagtcggagtcaaatatccaatgagctcaaagtgatctgacctcctatatgtgagtatgtactctctcgttctctttcaatatctcataacctttttggctgctttccaatgatcaattcttggattgcttaagtatctgcctaaca

SEQ ID NO: 347884 - DNA, 770 bp, Cannabis indica
cccactcaaaccaccaatcatttacaaaattatcactttgttcatctaacgtctatgccacaagcatcgcctcttactctgaatcaaaataataataagtattaatgtattgattttatcaagtaagaaagcattagtaatgaaattgtacaagttaaataaaatttgtacctctgttgtcctgggcaaatcttttacctcaagaagttgaattgtcttatgcttcttttgttccattttttggtaactgttgtggagtttctgttttgtagactctagtttagtttcaaggtcaatattttgttgtttcatgcatattatatgcttcttttgctccatttgtttcctttttgtggactctagttttgtctcatggtcaacactttgctgtttcatgcatattataatcataaagtaagaacattaatggaacaacttataatttttaattctatggctaataaatataaatatatgtaccttttcgaatttattttgcttaggcacacaatcagaaagtttgagagggttttgttttacttgcaaggaatttctttttggagtaatctttcacctcagaaagtaagattgattggtgtttctttttttcaattttttgataactgtcatggagttttcgttttgtagactctagttttgcttcaagattaacactttgttgctgtttgtgcatattataattatagagtaagaacatcaatatatatatatatatataaaaaaaaaaatataaatgcaataaattataa

SEQ ID NO: 347885 - DNA, 629 bp, Cannabis indica
aatcgagtgcaaaaatgacaacttcaggcagctagcggtaatccagagcggtcgaacacgaacctaattctataaaaaagtaaaaccaaacattcaattaatacctataaaaatttcaaaattttatcacatattcattaccctacactaacttacacatatacacacacatacacatacacttatacacacacatacacacacatatacatatatatttacatacatatatacatatatacatacatacacatatatgcatacatatttacatacatacatatgtatatatacatataccaatatacacatacaaatacatgcatacatatatatacacaccaacacccacacccacacccacacccacacccacacccacatacacatacacataaatacatacacatatacacatacacacatacacacatacatacatatacacacatatatatacacatccacatccacatccacacacacatacacatacacatacatacacatatatatacataatccaacatatatacacatacatacatgtatttatacatacacatacatttatacccacattaaaaaaaattaaaattaaaaaaattaaaaataacttaaataaattg

SEQ ID NO: 347886 - DNA, 1008 bp, Cannabis indica
ctgctacagaaatgaatcaagtgctagagtgttggaatatcttttaccaagatctagatttactaacaagtatgtttttaacatcataatgtgaatttctaaaacgatgaaaataaacacataaaaggtatgagaaaccttacattggttgcagcggaattaactgactccttccgctcagatctctaacatttgtaacctttttgtcgcagagtatcaccaagatttgagcccgaaactcctttagttgtttaaattcttcacagtcttacacactatgattgaggacaaacttgctatgtgtgggcttgcactcaatcactaaatgctgaattttgatttgttaagaaggctataggatttcgaaaattaaaaggaaaaagaagaagaagaagtgtcaaactcactagttgtcagatataatgaaagctaggtcaagatatttgcattagttggataatgagacctttattttatttttataccaattcacttagggttaggattgaattatttggaataaaaaaatgattaaaatggaaaaaaggacacctaatggctggccatgaagagggcccatcactagttagatttttgccacttttctcaactatttatatatctgtcacaaatactacttttttcaatttcaatcctataaatgccaaaactatttatttaataattaaataattatcaaataaaattgtcatttataatatttattaattagactccacaaagtctcttaattaataaataaatcctaaaatcctatttcttgacaagcaagtcatatcttagtaaaaattcataaactagacgtagtctaattttaaaataataattgattaattaaactcaattaactgagtcttacaagcagtttgtttcaactagtatggggaccatgggcctatataaccgagcttccaataagaagatctagaattaccaagtaaattctctaacttattaattcctccttgcaccactacagatttggaa

SEQ ID NO: 347887 - DNA, 698 bp, Cannabis indica
tagaaagaaataccttgtttctttgcttgaaacttagggcattggggtttgcagtggcccttttcattgaaatagaagaattttccttttggctttccatcgggattaacaacctttttctttttaactgttttcacagcttgaacaggcttcttgctattattccacttcttcttgttgttgggttttgaagtagaggcaatgtttgcctcagccttagccgcaccattagcagtcccagaattaggagctttagctcctcctttctgtggtcctccaatcaaattttcaaatgtctgaaggttgttgattaactcatgaaagtcaagctccaacttattcatgacataatttgaagtgaagggcagaaaggttggagtcagactgttcaagatcaaactcacttgagttgtctgatctataacagctccatgattctcagcatcctggaagtaactagtcatctggagaaggtgatcacacacactctgatgaggtttaatcagtgcattaatgaaattcttagtcgcttcaaagcaagcttgaatcgataccatccccaattgttcaattaactggttcatgatttctgcagccgtgagagtgttttcaaaccttgttttcaaggtgtcaaccatgctatacaacataaagtatcgagctttgttgtggtcattctgccaatgctcgaacttttc

SEQ ID NO: 347888 - DNA, 984 bp, Cannabis indica
taatggaactatattattatatagtatacctatgttgtctttttaagtgtgttctgataggttggcgcggtatagtcacaaccaaatatttcgggccgaaccgggttcgggcccgaaatgcaatttgggattaagtgttggcatgttattttatatttgataatctgaaattagcttggatattaaatgggtatgaaatgacaatattgtccttggaagtgtgtatgcatgttaattggccctaggggcattttggtcattttacctctaattactatgtttgacaaattgaattttgaggaaaacaaaatggaattttctagtgttatcccctatctcacccgacccctctctctctctctctctcactcaaaccctctttgcattcaatcttgatttttgaaagaaaagcttgatcttggcttgctttgaagcttagttgttgttgaatcttgagcttgcttttgaattgggaatttgaggtaattttctttgatttaaactttgaatccttgctgaattttatggttgtaaaagcatggaaaagtggttttgatcttgtaaatgcatgtttgtgttcttgagttgatttgagcatgttattgtataaatctttgtttgtatgatgcttagaattttaattaagctttagctgggattttggaagtgatttttagcttgaaccaatgtgtttttaaggttgttgctgctggaattgtttgaattgagtgagttgaagctcaagttcatgagcttgaagattgcttagttaaaacatgattttgtgatatatatgcaatctggttttggggggttttatgttggaattggtgtatgagatgtgtttaattgagtatctattaattgctagcaactctatttgttaatttgtggatttgatcaagatttgggatgaattgaaagtgtttaggttgctgaatttggtgaaattcgtggttggtttctgggttttcaacccaggtg

SEQ ID NO: 347889 - DNA, 556 bp, Cannabis indica
agatctaaaatcaacggttagaataaaagttccttatcggtagggaacttttgctaggtcctaccataacattaccctatatatatatttacatgttctttaaaggaaaaaaattgactttttttttatgtatttatataggattaatattattttacactctgtcttttacaaaaattatcaattaatttttctgttttattaaatgacaaaatacatcctatattttctaaaattgtataaatagcaccctgaactgatttttttatcaaataaaacttaataataatttgatgaaactggttacattttgagtatcgtgttagaaattgtcctaaagttggtcttattaaaaaataaaattattaaaaattgagctgagggtcatatttttactattttggaaaatatagggtgtattttattatttaaccaaatagaaagtccaattgacaatttttataaaacataaggtccaaaatagtatttaccctatataattgttgtgataaatccaacacgcaagtatacgtatcgttttaacaagtaatactca

SEQ ID NO: 347890 - DNA, 594 bp, Cannabis indica
ttttttctcaaataaaataaaaacctataacaatatttgaaggttgttattattgttacaaaagtaaaactctataattgtgaccttcatatttattagtgattgcattctcaaaagtaaaaacatatttacaagcaatgatgttcatctttagtagtgattggattgggatgagaactttgcagcattagaaacgaattgttcagaaatgatgttaaatttctatacttcactgtttcacatgaatcttgttttactaccttaatataagcaattatttcttcattttcaagaaattcataaaattctatgaaaattctatcatatttaactataaaataacaattataaaaaatctattagtaacaaaatatacaaataataatgtaaataactaaaccaaatttaatattacacatcataaaatgaaaaaaaaaaaggcttgaaatttttgtattgaggacttgtatatttaatctaatggtttttgtattgaggattattacagtaggtattgagtaaaatatcaatcaatagggataataatttataacctttgatttaatctaatggttcaaattaattcttgaaaac

SEQ ID NO: 347891 - DNA, 661 bp, Cannabis indica
tttaactataccatccaatggttcagatgatgatcaaattaattgattggcccagatttaatcgtcaggtatcttatctttaaattttggaaagagtaaaattttgaatatgatttaactataccatccaatggttgagatgatgatcaaataaatctagtgacccaaattcatttgtcaagtatttttacttccaattttgggaagagtaaaattttggattttatttgactataccctccaatggttgagatggtgatcaaataaatccagcggcccaaatttatttgtcaattatctttatttaaatttttgagaagagtaaaattttggatttgatttgactataccatccaatggttgagatgatgatgaaataaatccagtggcccaaatgtatttatcaagtatctttacttcaaattttgggaagagtaaaattttggatttgatttgactatacaatccaatagttgagatggttatcaaataaatctagtggcccaaatttatttgtcaggtatcttatcttaaaattttggatttgatttgactatagcatccaatggttgagatggtgatcaaattaatccagtggcccatataaaattgctagatttcttatctttaagatttaaaaaatgaagataagattgtacac

SEQ ID NO: 347892 - DNA, 696 bp, Cannabis indica
gtcacctcaaaaggaagagttactagattacaaggacatagaagacaatttgcaaaagcaattgggaggcaaatttttgaagtacatccaagtctggagaataatgatggggatcaaagtgaagaaaaaacttctgaggatggggcaacatagaatgcatggcaaacaggtatacatcaagacatacaactagatgtagcaagtctagaactttggagattaacaagagcacaaaagccaaatcccaaatataccaatgttattacagctttgatccaagcaacaactcacacattcaatcaaagaaagaaataacttaagagggaaagggggttcggttttgaagaaggacaaacccagaaatttcagcaacaaattcaaataaaaagtaagaaaagcttcctcaaatccaaacaagaactaagcccaaatcttcaaaactaagcttacttcctcaagcaatcaccacaaaatacaaactagaaaaaaaataagttttagagagagggaaggggttcggctgctagggctggaataatgaagaaattaaaatcccattttgcttaatatttctcttttaatgaatcataaaccaaaatgcacaattaccacattgcacttagggtcaaattctcatattcaagcatacaagggcaaaaatataattctcacatttcatacataaataataaattt

SEQ ID NO: 347893 - DNA, 1191 bp, Cannabis indica
gacccaacacgcattgtcccaccatgtgtgtttttgacccctgatattattcattcataatcaaaaagtgaaatgaagagatcagatcagatgatttcagcatttaagaaaaatgcttttaataacttccatgcagagcatcagaattctggttatgaatgatgaacataacattagtaataatgtaaacaaaaatacaagtgagcatgttctaattagtcacctctttagctgttgcatcctctaaatcagtggctgcaacccaatccacaaaaaccttctttcgtaggccaacagatatatttcttgtgtgtgtaaggcaattattgctaaaataaacaaaaaagatgatgctaaaacattgaaacaaacatttgaaggttcagaacttggaagatggcttcatgagccttctgatcctaattcatgagtagaacaaaataaaaccatcatctgaagttgcacatggtacatggtacataagaagaaattagaaagaaagaaaaaaaaacccactaacccttaggagtagaggaatatgccaaatgtttgaaatgtcatacagagtatgatgttatctttctgtaacaaaatcaaatacaaagtattaattaatatttcaagtgatttgaaacaacagtataaaaaagttctttttttttgttttttgttgactcactgggacatggtaatactgagataacttcatcttgacattctcatcatgaagaaaatagtcgcccttaccgaacaatataggttcaaaggcagccattatcttgaaagaaatttcaggatgattttgatcagacgataaaacttccccaggattcatttgtctcatcaatccacaagtttcatagcttctcatcccaggagacatgatgtattcaagatcctggaaaattgtttttttaaaagtaagtgagatttcatgtggctgattaaaacaatgtagtgataatcaatgcagaacagttcatttcaatgtttattttaaactaccatgactgggatgtctgcatcaacttcgggtccatgtagaaaggaacgcaacaacttccatgctgatggagatctttgccatctacggagtcaaaagagctaccttgatccgatcgatccaattttctagtataataagaggcgatggaaaataattttaccatcgacgattccaatgataaagca

SEQ ID NO: 347894 - DNA, 1511 bp, Cannabis indica
taaactgaaagttacagatgttgaaatcccaaaaaaaacatttacaaaatattattacaagttctctcctttcggccggcctaagcggcaaaacagagtttcaaaaacacaacactggtagaccccaacccgcttggtctgatatggcccgtacatgtacattctttgtctagctccagcactcatggatgatcagcaatagtcttaccctttcctgcacagtagaccacccgtgagccaagcccagcaagacagtataaaacatatcaataatatgctcatcatataatataaacaacaatgccattcaaatttgtctgtgtgacacagacctgcatgttgcgctcacatgcctatttatgtctacgtggcgtagacctacgtgtcgcgctcacacgtctaaatacaataaggccttagaacagttcatctcggttcttgttaccgagtccaacctgattatgccttgaacgcataacccttaatctcaacatatatatttatcacataattaatggtgccactgcactatttgtctatttgctatagacctgcgtgttacgctcacacgcctatatatgtctatgtggcatagacctacgtgttgctctcacacgtctatatatgtctatgtggcatagacctacgtgttacgctcacacgtctatttacaataaggccttagtaaggtttatctcggttataattaccgagtctaacctggttatgccttgctcgcataaccctattcatatatatttacgtaatccatacattacgttctttcagtggtttatcctgataatatataccaggtccaaccaagttatgtcttatacacataactcttgatatatatacatacattccatatacactataacatataaaatcttagggtaataaccctaacttgcataccaaatagtctctcatataacatattattgcatgctcaaaataacacttatagagattaataaccctaattcatgctttcacttgattagcaatattattgtacatcattgctttcttaccttcacataaattctagggtaataaccctagaccgcattactatcaaactcaaggtactaatttaccgagtctaacttaattatgccttgtgcgcataattctttattacaatatatttagcatggcatagcatttacacattaataattactagggtaataaccctaggccattaaaccgctcactttagggtaataaccctaatctcggtttctaatttatcaccaatataatattcaatataagcaccaccgtgcatatctctacgtgcaactactgtcttacctgttgtcccgcaatagaagagattccaaatccccgggtgctcctgactaggtgccggtaatcctagtcacaataccgggatttacacaaatagggttaatccctaaatccacttccacaaaatataaaattggcattcaaatcacagataatcacatagagctcaaaaagagctttccaacggt

SEQ ID NO: 347895 - DNA, 647 bp, Cannabis indica
gcgagagaggagggcgattgtgcggaggcgtgggtggggttttggagggttaagattttcgttttagggtgtgagaaatagagaagaaataggtgggcaagtggtaggggtgtgcataaagtcatctaatccaattacaaccgaccgatccaatcccaactgatccaatagaatcagatatccaatcataattagatcagatcagatgtaaattttgaaaatccaatcggatcggttgttggatgggacatccgatccaatggataaccgaccaaaccgatacaattatcatccaatggtcatctaattatatttatatatttttaaaatatatttataattttatatatttattatattttatttaaaaatgtatattaactgatttaatacacatttaatacaaagagataaaaaaaaaaaccttagatctaaaatattataatttttatctttctaacgctaataaaattgtcaatgcgtattgaatagattttatttttagtggttttattatgaaattataaaaattaggttggattaaattaatgtttattatttatgttggattataaagttttaaattatgttttttttatatatattttttttttatttttaatgaaattagcttaaatggtagctaa

SEQ ID NO: 347896 - DNA, 942 bp, Cannabis indica
aaaaaaaacaaaaaacaaaaacccactaaagggtgactgcacaacatcttaagttatgatcttgatctctaatgttagcggtacttttttggtacaagtttaatggcatgagtgtcgaacctctttaccatatggacaagctctgataaccaaaatcaagattagttagttaatgtgtcttgggtctgttatttctgttaagacacttgtaatcattttaccaattatgttataactaattgtcttgtattgtttcagctcttttgagctatataaatatcaataaagtcccttgtatgggataagctttgcttctcaatttttctctctgttctgtttgtttcatggtattagagcctttgaccttcgtcaatggcttcatcaggcgacaactcgtctcctgcaagtacctctgatcctgctgcaccctctgctactgcttggaatcccttttctcattacctgacgtcctctctcacgatcaagcttgatcaaaacaacttcctggcatggaagtctcaagttttacccacggttattggtcacgagcttgatgaaatcctgctcactgacttgtctccaccaagacacctggttaatggtgatccgaacccatcctttcaacaatggcgcaagaaagattagcttctcctttcttggatccgatcttcaatgacggaaggtgttcttggaacagtggcaagctacactacttcgaatgcagtctggaaagcccttgaacaaaaaatttcgagtcaatcaaaggctagattactactactcaaaagccaactctccaatgcacacaaaggtaaccaatctatctctgactatattgataaactcaaagttgtatgcgattctcttgctgttgctggccactctgtctcggatttagatctggttcttcatctattaaatggtcttggacctgagtttgat

SEQ ID NO: 347897 - DNA, 660 bp, Cannabis indica
tgtttttctccaaaaaaaaaaaataaataatcacacttattttatactctttagttaatccatttaattgagtcatatttacttaatgagatttatttaatggatttaagaattttattaattttctcaatacattttaattttatcttctaactttaaattaaatttttttgatttaaaattattaattttaaatcatacccatatatataagtttggttgaaatagaacccataaaatatatgatggaatccttatttttaacccttagatgttaatataatggttgataatggctgactaggcttaattcacttttttaactttttaaacttttagaattgtaatctagtagtaatctgctgacatgaacttttatttaatatttatttaaaaaattaaaaattaaactaataaaaattcattcctaattattttttcattctctttccattctttacctattcattctcattctatattcattttttggtacattaaatgcagatctcaaaaatattaatataattaggggtatgcagaaagctattcaatccaatttcaactgaccgatccaatcccaatcgattcaatagaattggatatccaatcataattggatcgaatcggatgtaaattttaaaaatctaatcggattgg

SEQ ID NO: 347898 - DNA, 635 bp, Cannabis indica
gtaatagcctaatcctcgttacttgtattgacttaagatcaaggagaaagattccttttcttatagcccttacaaaagtatctttgaatatataattcttagatgcttttcgaccgatctcttgcccagtgaatatgcatcactatttatagggctaataagcttggggaggaagagtttcccctctcgttacaatacttatcaacagaaagattgtgggatcaatgttgaatgcaaggatcatgggattgaggctgaatacactgatagcgggatcgtgtgtatgccatatccacgtaaattgatccctgagttatagggattgtgatgatgactcatgatgcataagttgaattcgctaagtgttggtcgctctgcgcggatggctgaatacttttccctgggcatgccagttaggcatcctgctcggattatgcttccaaaacagatgtaccaagtagactccacgtgtcaccattcatgtgatgccacgtcagagtgcaaaaattgggataacatttgcccccaagtctgtacgggacttctgaagttgcgtgtagactttatccgagccgcttttgcttttggatggggacacgtgtcgagtgagaccatccgagactcgatgtgaggct

SEQ ID NO: 347899 - DNA, 793 bp, Cannabis indica
cccgaacccaaactcagaccaggactagaactctgacccgaactcaaacccaaactcgaactcagacccagctcgggacccgacaccaaaaatggaaccaaaatgcgacccaagattgggatccgtatctagacccaaggcttggacaaaacacgtagttggtgtctggatttgggaccgaactcttgacctgaaccttgacaaggacccgaaccaacacccggaccttaacccaatcccaaacccaaaagtggacccgcacccgtaccttgtgacccaaaattggaaccaaaaccggaagttgaccgggacagaactaggactgggacttggaatcataattgaaattgaccctagatccagaaccgtaacttaacaaggtcccagactccaaatatgacctagacccgaatgggaagtcggaccgggatcccaacccaaacctggactctggactcgaacccgaacctgaactcagacccaaacatggaaccagactagcgacacagaaccagggtcgggactgagaaccacaccccagtctcaatcccaaacccaaactcagaaattggaccaaggacctgaaccagaaccagaccaagacctgtgacagtgatcgagatcttgactcgggattcgggtaacggggccttgaacagaccagtagtcggtgtctagatctaggactcagacttggaccagaacctagacgaagaaccaaacctgaacccaaacctagacctgggacccaaaataagaacctaaacaagaatcgccgaaccaagaccctaga

SEQ ID NO: 347900 - DNA, 790 bp, Cannabis indica
agcggctatattgcctagtttatatataaatgtagaaaaattccttattcatacatgaggctatgacttgtactatacagagaattaatgtcacttaaccatgaataaaacagtcagtaacatattaaagtttaagaatctttaatcaatggtcgctagtacggttcactaattcctgttattcggtgtaagtaatctcgatttagattaccgtttaccataacgatttaattcatatcataataatgatcaatagtagatcaacttgaatcatgagtaatcatgaactcatgttcatgctattagtttctttgattcactcgttaaagtttctaagagaagaggattcttacaacttttattttgagaatctaataatgtggatgactgagaacatgatcaacaatgatgaaatcttgactttcttaacggatcaaatgttggttctctttatgtgttaattcttaaactaaaaaattacgcgcgaatttagattagatctaaattatactttcactagagaattaacggtgctaaaagataaaaaagtaattaggagggtaaaacggtagattgaccaaaactaattacaaaccaacactaggagggttaatcactgattgattatatcaatggacactgcagtaaaactcagtaaatataattctataattactaatagttcaatttcatatttatagtggagtaatcatggaattagtaaataagattatttgattgatgagattcaataaataaatctagtttatttgagcttaggattataggt

SEQ ID NO: 347901 - DNA, 805 bp, Cannabis indica
aaccttaccactacgacgaggagctgtgactttctgaagaagaaaattggtggtagttttctcgattgtatcaacttgcattggttcaaccaagggagtgggatcatcctctatttgactagaagatgctagaacattagttggagttatacttgaaagcatttcctccaatactactttactttgcggcttgaagttcttaatatagtcatcttaaggaatgtggcatttgtagaaacaaatactttattatcattgtgactataaaatagaccacccctagtctctttagaatttctgacaaacatgcaaatctcagttcgagcttctagtttgccttctttttttctgaagacataagcagggtacccccagattctataatagtgtaaacaaggtatacgtcaattccatagttctataggtttcttagggactaatttaaatggaatgacatttagaatataattttctatctaaatatcatatccccagaaaggacgttgacaaagttatatagcgtagtatagacctaaccatttctaaaagtgtacaatttcttctctctgcaactccattttgttgtggagtgccaggggtagtatattgtgattcaattccaagttcaattaaatgttctttgaactggatatccatatactctccacccctatcagctcgcaagatctttaatattttacctaactggttttgagccaaagcatggaattattttacctaactggttttgagccaaagcatggaattcttaaaacttctcaaacgtttcagatttcttttgcat

SEQ ID NO: 347902 - DNA, 357 bp, Cannabis indica
tcaaacgtttcagatttcttttgcatcaagtaaagaaaactatatctagagtaatcgttaatgaaaatgacaaagtactcataacctcctcttgattttatatttagaggtccacaaacatctgaatgtactaaccctagaggttctgtggcatgctctccctttgcagcgaaagaacactcagtcattttatattctaggcaagactcacaaactggtaattcacccaaggtggcatttttcaatggatcaccttaggttgacctgtgaagtctatcatagcctatatgaccaagtaataaatgccacataattgaatgccattacgagaaatagtggaaatagaactcaaaaaat

SEQ ID NO: 347903 - DNA, 1179 bp, Cannabis indica
tagcaagaacaaacaaacactccgcctgagaaacacaattgaaaactgaaaaaaccaaataacaagctaacttttaattaaaagtaatcacaagtaccaaacacaactccccttggaaaaagggtccagagctgagaaacaagaaattaaaaacaaactattactcaccctttttgtttatctaagggccaaagaaaaaaaacatgaaaacatgaaaatatgtccaacaaaaaaaataagaatgaaagagaacttatgccccatagagcttgatcaatgaggatagcttcttggacatctcttgttgaacctcctccatggaagcaagatgattattcacctgttgaacctcatgattgacctcctagacatctgtaggagcataactggaacttgcactagcagcagcaacagtagtgccagctttaggacgcttgggaaaggctccatcaatatgctccgagggttggaagatggtgccagtgagtggaggctcaagtgtctcatgagagtaggccacatctttttgagaggacaaattttatagataaagttaggaaacacaagcttatgagtacgctttttacctctctgaaatgaagcaatctggtccaagattgaagaaggcagatcaatggatgcccccgaggtgatacaaaagaggaaggatgccaaatcttgagataccatagttttattggaattgggaagccaatcgctaagtgcaaacctcatgagagatgcatgaacataagtagatgtgtaattcgaagactctgcccagattttcattcaacccgtgcaccagtgagttcagtgagcatcaaatgacgatccatagacatgatagcattggacacaccttcaggaagttgcaaagccacagcaatgtccttgacagtaaaagaaaaccaatgccctcgaacatagactttaccaaaaaacttcagagttctcatcaagcaaatcatcagtcaaattggcatagaattttttgacaatactttcgacatacccttcaaaaccagtgagagtattttcccattgatggtattgaacaaacttaacaataccatatactctatgagcatgaaaatcataattcctctcactttcaaacttttaggtagcataaagattccaatcccgttgattatcatggtaataaaatctagaatt

SEQ ID NO: 347904 - DNA, 419 bp, Cannabis indica
ctggtaaaattaattccaacagcgcataccaggaataacacttttgaaagcttaagatctgacgagcagaggttgtctgggatttatagtcactacggtggataccacccaacctgtgacatttggacctaaaaatacaatattggtatgcgagttccttgacgtctttccagaagatttactgagatttccacctactcgagagattgaatttgtaattgaaatagttctgggagcagaaccaatatcaaaagcaccataacggatgacaccagtggagttaaaagaattaaagatccaattacaggagttactgaatctgggatttattagaccgagctgctctccttggggtgctccggtattgtttgtaaagaagaaagtgttggaaatttatattaccaggatcttagatctac

SEQ ID NO: 347905 - DNA, 572 bp, Cannabis indica
atattgaaatgagttttatttacagcataaaacccaacataaatgtatgataaaaaaagtttacaattcaaacttggcaccacatgagtcgtgtcattagatcagtcaattggcacgcaaatatttgtggtgcctgttgcttgttttaggcacgaaagctgcattagtaggcactaatttggtcgtgcctatattccttttttcttgtagtgatataattcatcattgtattgcctacagttgtatgatggctggttgtttatctataaaaccaatttctaaacatttgtgttttgggttattgcttcatcgtatgatggttggttggtaatccataaaaccaatttttgaacatttatgttttgtgatactgcttcattcttagatatttgttgagcaatcatttagaatcttgtctcatctatagttgtgatgcaaagtggagactcgctaactgcattctgtttccttctgagttcaaagtagaacaacagtaagttgtcatttattattttgattgatggtgacctcgagtataactggtaatgtatttctattagagtgttgcattt

SEQ ID NO: 347906 - DNA, 844 bp, Cannabis indica
aaataggaagcaagaaattaattaattaatgatgattaaaagttaggggtttcgatttcaattgtatctatcgattatggtttaacatgattcaattcctattaccaaattctatgcaatagcaagtttactcaagtaatttatagtcttttcagatatataaatctcaattacatgcaaattttctaatctcgtgataaattaaacatgtaaaagacattaaacacaaaaactctataagctatccaaattatataggtactcttgtcctatatattaacttggttctatttcactatagcataattgacactcccttctcagattttgtatcaaaatcataaacaataattaaaagtaattaagtacaaatgaaatagaatacatagaaattgaggggaaattaaatcacattataaccaaaaattaatgtcaaacaatatccatctaaaccctaatgaactgtttagctattcagttcatcgtagcaatttcacacataattcagaatagaagaagaaaatagaaaagaaaagaatgctgaaaatcttgttgagaaagccttcactattaactttgctctctaaaattcgtactccttaattgcttgccgaaaactattgaagtccacttcttttatagccataaaaagataaaaaagatacaaaaaaaatgctgaaaattcctattatgcttggaattagatggggcgggccgcaacataggaagtttcgtgtttgcaagtatacacgtcttcaggatgcattgacacgagcctaggcatgggatttccatgcctaggcatgactcccttttttatgggcagcagtgagcatttatttga

SEQ ID NO: 347907 - DNA, 876 bp, Cannabis indica
gcacctggtaatctgtaggcgttaggctatccgcacatatagcgtccaggcgttgattgattccttctcgttcctttaatgtatcgtacctcttcacttttatatattcgatatataagagtgtggtatttaccaagtgggccatcgggccctaaaatgagacaaaaaagtcttttgcctttggtaattaattcatcgtccgaaccttttgagtagggttcgattctttcatttttctgagacgttagccagcaaacctttcgggtttgtgcgcccgattgaatcggaatggtgcctaagcgaggcattggccatatttgcgatgtgctaatgggtaaaaataattgagcactatcgcgagcttgccatatacttggtattttagtatgcaaaaaataagtgtttgagcttgcctctttgagagtacataagcataattgtgaacttgtcaaataattttgcaaaaaatgagcacatgtaaggctcgccaatttgcaaatagaaatacaatagcaagtttgctaaacaataacgcaaaaatgagcactatattaggctcgcctatttgcaattataaataagtgcaataataattttgttaagaaattatgcgagaacgagcatacattgggctcaccagtttcgcaattataataaaacttgactttgatgtgaattttctttcttctgggatcttttatgttgctttgaacagtgttgttgatgatctcttgattttgattttggttgatctctgagtgtcggggctgagattgctcacattttttctgattaaacagaggttgaatctgtgtatacttggttcatcgcgtcatgattttcctccaaaaatcatagaaatattataaaatatcg

SEQ ID NO: 347908 - DNA, 723 bp, Cannabis indica
tagaaaggagaaggttcttcggagcaagatcattgcctttgtcaaagtgctctggagaaatagtaaggttgagtaagccacttgggagttggagtctgacatgaggactcaacatccagagctattcaggttagatttcgagggtgaaatcctattaacggggggataattgtaatgacgtctttagtaatttggatttgtaaaggcaattagcactaatttctgaaatttttataattatttatgaatttaattaattatgggccccattattagaaatggacattagagttataatttctcaattccaaagattttataaaactctaggcgtattatttgaattatatgtgaaatatgttatttttataatttttgctcatcgacagcagaaaatgtgatggatgactagtttgatcacattggtaagtttagaaccttatttcttagtgggatatatattggagaaaataaaatactgaggttgagcggggttttgaaatttgacaattttacctctagtcttgagaaatacctaagttttaacctaaaggggcattttagtcattttttaaatggagggttaggtggcttattcaaagcttgacagctgccattttggtggctgaataatgcttaatgttaagcacttttggaattaatgagttaaagaagaaagaaatcaaaattagagaaaaacacttctcttctctctctctctct

SEQ ID NO: 347909 - DNA, 844 bp, Cannabis indica
gaaagttaaaatttttgttttaaaaattttatttttaaaaaacaaaaatgcgttactgtaactacttttgtttttcaattttaaaacagaaaacaaagtgtgttttgtaaagtttattttcatttttattttttgcttttatttaagtcgggtctaggtccggggttggattcgagttcgcgtcaaaagctgggttcagcgccagggccgtggggaggggatttggatccagatctgatcggagtccaaaatattaattaagaaaaaaaactgtttaaaaaaatattaaaagtgattttttttttttttaaaaaaaattttgatttctccacaactattaacaagactgcaaaaaaaaaacacagtaatttaaaaaacaccgtagcgtgctagacaacataaagagtcgagctttattgttggcaattttccaatgctcgtgtctgtcttattgcctaatgttgaccgaggttttcagcaaccacttaaataatgtataagaagagctgtagaaagtttaatgcatgagatttttatgtggttggagcattaatgagccttagtccacgagtcttttgtattaatgcgagtatttattacagagaatattgttggtggatttttctcctgttttctctctttgattccttaaaaccaaattgttcgacccattttgaatctgtttgtggggtatttatagtgttttatctggggtgatccctaggaatggatcacttatctttctgtgttggcttcataagggcacatattcctagcagatacaaaataagaaatacatgacctatatcgtaggtatcttaggagttaggtggatataatcttt

SEQ ID NO: 347910 - DNA, 510 bp, Cannabis indica
agagaaatttatttatttatttttattttttaaaattaaaataataatttggaccaataatattttgacacgtggcaattttaaaaaaataaacggagcagttaacattaggactaacggacaaataaaaatcatgagcttgaggactattaccgctattcttcaaggttggggacttatctgtatcaaactgaactttttgaggaattttgccgcaaatttcccactataaaatagaaagtttttacacataatcagaatattaaaattcttcttaactttttatttgattttaagatttttaatatttgccatattattacatttttatgtatacatactaataccatatatatgtatggaatacttcttaatgggtgttacctattaatgggtaataaataaatttaactataaatattaattttaaaaatattaaaccattagattttggtctgatagtgaataataaaagaaaaatttgaatttctatgcttaatttaactactt

SEQ ID NO: 347911 - DNA, 903 bp, Cannabis indica
aacaactaattcgcctcgtcaatattttttatgtatagcgagatggatgccttgctatatattgtctgtggttgatttgagtaacctcacttattctttttaagtaaacgagtcttgtccttggatctatgtattccgaaataggttgatgtctcgtcaatataggcattaatagtttagtatcattgtctcgcctaacactatacagtcagcgagttatgaatgtactctattaattatatatttaatgagttattcctttttgcattaaatcatataaggttattataccaagtggttcatattccactaattgacacgtgtcaccttctaaagtgtagccgaattttgggtataacagccaaaatacgttgatatgcttgcattagtcaccagatgaacattaaactcacaagccaatgaagaggaagaagaggtacaatgtgagaacacgtttcatactcgttgtcatgtgaaagacaaggtatgtagtgtgatcattgatgggggtagctgtactaacgttgcaagttcatccatggttgagaagttgtgacttccaacgcttaaacatccacgtccttacaagttgcaatggttgaatgatagtggtgaagtgagagttaccaaacaggtttttgtatctttctgaattggcaaatatgaggataaggtattgtgcgatgtggttctaatgcaagttgcacacctccttctaggaagaccttggcaatttgataggccagtccagcatgacgacttcaccaacaagtattcattcatgtttcgtcagtgaacagtcactctagctcctttgacaccaaaacaagtctatgaagaccaagtgagattgaaaaatttgagtgatcaaaagaatttaagtgataaaaagaaattgagtga

SEQ ID NO: 347912 - DNA, 1159 bp, Cannabis indica
tgctcgtcacttggggggcacccatacctgtacaaagcatttggtaaaacaatcacaattgcacgacaattatagatagagaatgaaattcattaaagataacaaaagcatatgataccgcgattaaaagctgtcgggtcagcctgttgtctgaaaaatgaaaaataattccaagtttaaagactgcttggccggtcatgatgtcttagaaaagaccttatggccgaattagatatataaaaaataaaaagataaagagagaagtgtttaaacagctagagtcctaggctcttggttcgggtcttctgggccagaggagctggaggatctattgtttgaacggaaggtacatcagcagcttgggcggaggtagaagcagccacctcggtttcaccataaaccacttgggaagcgcaaaactcaaggtacatgtcctttgcgtcacccaagtagtcaaagttggcctgaggattagccgtccaaaagccatagaagagctcaagaccgactgtctctagagcattaaccttctctttcagccttgccacctcagctgaaagctcctcctccttagacttcttatcctcctccacccgacgaagaaccactcaaagtgaagtcctctcatcctgaagactattcacttcaacagataaggtctcgatggtctcttcaagacagttaaaaacctcgagatccttagtcagctcagctatcttcttcttggcagtaaagagcttcttgttggcttcacccagctccatccaaacagctccaagttctaccctggcgtcgtcagcatccttcttggccaagtccacctccgccctcatggtgttggacagagccgtgttcttagaagtgtcagagttagcccgggagtaagtgtaagccaacttcagaccggcctccccaaagaaaaactttagcatttgaactaagtacagaagattaaagggaaagtgtcaagaaagacttaccctaatgaattccttctaaactctgcccatcagcagctccaaagaagagtcattgtcagcaccagctagttgctcacaaacctcaggtactagctggttcatattgtgggcaagcatctctttgcccttcttggcctctggaagcaccgggaaaggtggagtaggggcccgcacctgtt

SEQ ID NO: 347913 - DNA, 941 bp, Cannabis indica
gacctcacttgcgtgagatactacttgattgcgtacacttgcgtaataaacataaggctcgtaacaactaacttatagtaaaatgacaattttgccctttttcctcctcaggaagaaaacttataattctaggggtaatttggtctaaaatcataatcccaataaatcctgacatactagatgtctactcatcttgtcccgctaattctaaggtactataccatctctaattgattctaatggccaaattgttgcattccactattaccgggcataaaacatgcaattcataaaaattcacatataacatatataatgcacctagcattcaaatatatctctgtaattatgaaaatattttcctaaggcctatttctagcaataagccctaaattctactaagaggcacataatcatgaattaatatttaaatctatctaataattcccatgatttaactatgcagtcattacatctgtagtgttcatggaaaatctgtagtgttcatggaaattctagtcgtggctggaacatggacatcaagatctgcagtcagaggatcttgatggaaacttgatgatgcagatggtgtagctagagttctcctgttaaccatttgatcagatatgatatcaactcactctcaatgaaagcaccaaactattgaccttagatttgcccaaccgatagcggagtcgtattcaatattgatgccagccacatgttacacaacaagaacaaaaaagtaaaggaacacatgattttacaaaggttcaacccccttagttagcgggtaatgacctactctccttttagttgtattgatatcgagagataatactattcagatcactataggtgggatctgagatagctctcttaatgttacaatgtaggaatcaaagatggaaaatctcaagttaagagagaagtaatggtgg

SEQ ID NO: 347914 - DNA, 667 bp, Cannabis indica
aacacttatccaaggtgtaagaatacatatcgctgattatcatgtcagtctaaatccattaaactgacaaatcagggaataaactttcgaacatattgtttatttatttttgacaatgatctatttttagaagtaacttgtatccgcttttcatatataaccttgtaagactcagccagtgactcctcacagatttcaaattcatcagagtcaaaattttctttttcaatgttattattcaaacataccaatctttctttcacctgtgaatcacaaacaaacttagaaaaactgaggttagtgcagcatttttagagatatcttcatcactatcagtttcatcgtcacttcatgtgacattaaaacttttcttattctttttcagtgtatttgcacatttagattgaatatgtccaaaaccttcacattctctgtattgaattctcttttggttgttagtcattgaatgttttgaaaagtattacctttggagaattttggaaaattctttttgttaacttatctttttcatgtatttctgaaagtttttagttaaaacatccatctcatctatcttcatcatcatctgaaatttctttttcagcaacattaaagcaatactctacctttatcagcaatggacctaggtttgtccttctacttgatt

SEQ ID NO: 347915 - DNA, 889 bp, Cannabis indica
tgtcgcaaatggctgggtgtatctcagtatctcaaggagcatataaccgcatatatgaccattagaatattgtgatacatccaccatttgaaagacttagccaatgttctcacaaccagatttatagaatacaaaatcctaaagatctaagcgacaatcagaagtaatcgagtctctcaagcatgcgagtattcgaggtgttcgtccgaatacccgagtgtaatcaaaacatgaagcagtgcctattcaagcattttttatacagtacacggttatgccaattttaggtcattttttctgaaattacccagtttcttacctaaaaaacgtagcctcatacatattccctacaaacatttattcctaaactctctcatacatgtcaaaaccctgaaaacaatgttccctttcaaacagaaaacgaaatgcagcaaatttttgaaaactaacctttacttctggtaatttgttcccacgaattgccctcgacagcactggagaatcgagaaaaaacccagaattgccctcgacagcactggagaatcgagaaaaaacccacaaagaaaagcgaaaatctgggcaatttatggaagtttttgatggtttttctgaaagagagggaagaagggagttaagggagttaaggaaaatgagggaaaatggggatttttgattcgaatcagagggtttaaatacccaaatccctcattaattgggatcacgacacgtggcaattggaatgcctaaagtcacccaatccgacggccaaagatggccacacctacaacgaaaccgaagagttttgtgacgtggcaccataaatgcaataaaagtaatgattatagccgtcatttttcgaaaccctcaaagggacaaccaaaggtcacct

SEQ ID NO: 347916 - DNA, 610 bp, Cannabis indica
actacatgacataaaaatgcatctctgaattcaataaataacagtataataaattatttaaatagctataaataatttcataattaaacgtaattaactgctaatttccaaattaaactaagcggtctttacataatatttatgatttgtttaacaatacacacttaattaaacatataaagtttgaatttactaagttaatcattgtttaatttaaaagtcaattgtatcttataatgtttaactaatattgatctttacttgcttatgctaaacccaaacccattaatgtcgcactatttttgagttagtgtgtgataaattagtactactacaaatatcagaattcgtgacggttctaaaaacgatttttttctatttcccacatgcacacctatttcttttccatttcccataccctaaaacgataatcttaactctctaaaactccacccacgcctccgcaccattgcccatctctgtgtcatcttcctccctctcttgatctctctttcttcttgtctctctcatcgatcgatctccacctcctccagtcggtctcccgctctctctttctctctctccaagctcggtataagtacatttattt

SEQ ID NO: 347917 - DNA, 554 bp, Cannabis indica
aaggcttaaaaatggcgaagtatttagagaaagttccgaagaacttggaaagatttaattactttaaaatcaaacaaattccaagagaacaaaactccaacgccgatgccttagcaaagctggcctcgcagaaggacctggatgaactaaatctggttctggaagatatgctgagtgagcaaagtatatgtgagactgaagacatcgagatgataaatagctctccaacatggttgacgcctattatcaactatttactcaacgggcaacttccaaatgacaaaaacgaggtgcaaaaactattgtatacagttccttgctacaaaatgatcgaaggcaaactatataaaagagggtattcaatgcccctacttcggtgtgttcttcccgcagaagcaaatgaaatcattagagaaattcatgaaggcttttgtggggatcatgcgggttggcaaagtttgtctaaaaagatcattagacaaggatattactggccaacgatcaataaggacacacatgagtttgacaaaaaatgtgataagtgttagagattt

SEQ ID NO: 347918 - DNA, 926 bp, Cannabis indica
tgaagggtttcttcatgtggtgtgtcaacattctctctgttgccatccatgaaaaaaattattttttgtatgtaaggagggttttcttctgagcttttttcacgaagactgtcaataaaaataccaaattgttaacgccaattttcattaactatatttgcgcctaatagtgatagatttgcacaaaaaataaaagcagaaaaagaacgatatgaacacaaaggcttttacgtagttttctagttaaaattctgcatagtccacaagtcaatcttattagatttctgatacaactctcaaaccttttttctctaatgattttttttcgtcctttttcagtgtaacttgcctctatttataattacatagtaaggcagttaattacatagttgactgatatcttacaacaattattgtggggtttgattacataccacgtaaaaaaatgtggttaatattcaaaaatcacacagctgtgataggtccgcttttactgggtcaaggtaaacgtgtattaaatatgttgtaaactgtaacattctgggatgtctcgctgggaacacagtaacaatagccttggtagcgagctagaaattttctcatgtctttccgaggttgatgttgtaagcctcgttgtccctgcgcttaaagatataatgctccatctgaaatcccagttccaggggacaaggtggacctcagcagtcaacatcatttgtaagtcagcttctatctaagagagctaactcgacggagctgtgaaccccattgaaagatgtctgaagctgattaataaaggcaccataggcgcgccttcctatagtgagatgggtgcctcgctattaattgtttggttttatccgactgttacatttagtctgtataaggcgtattatacactaagtgtcttaccagtcaccatgtct

SEQ ID NO: 347919 - DNA, 592 bp, Cannabis indica
atttaaaaagagattattaatatttaaaagattgtttaattttttggatttaattattatatttatttgttaacgggagattaaacctaatcgttaaatttaacagaatattcttttattttgaagtatattctgttaaaccaagaaatgccgttagataggcacttttaatatataaagatataattaaaaacaaattgataatatgaaattatgaataggagaaataaatagtttcaatgaatttaattatattttatgtatttatttatgtatataaatgtataagaagaaagatttatgtttattgattttcattatgtgtatatcaaatgataaaataattaatggtgtgaataatgaaaaccaaaatctgctacattattattaaatggtaaataattattataaataattaatatttatacgtgtattaatattatattgatagtgaattttttattattctttaggttaatgtaaatcatgtgctaaatttaagtgaagaataaatgtatattgggcaattcactcacaaaagtaagtacattttaataaaatataatataaaagtgcttttgattaaaaaata

SEQ ID NO: 347920 - DNA, 1076 bp, Cannabis indica
cattaacaaattcatatgttttgtacttaaatagaattcatacattatatatataatcataaaataaatcatgtgaaccatgtaacataaaatgttgtttctgatctttattaataagtaaatctgattatattgaaatgggttttatgtaggctatcactagtgtcatccaaataaagatgggctggaattttaaaattctcccactaagataaggtattgttatactatgtccaagaactttattggtatcaatttctattactacagtaacatgttaattggaacaaattacaggatcaagaataagttctatttgtttgctaatttgttcagtatattatatccatgtctaatcaaaatatgtgtttcatagagatattgttgtgtattgagtatagtctagagttcaaatttaaaagtgtttgaacttcatatatcaataacttctttcacccctaagtattatagagatactgtggagttatgaatataatctagagttcaatagatataaaagatctttgaactgcatacattgtttcttaacttcttccacccctatcagatcaaaagatctttttattaaataaaatcttaatcattgcttaagaaataataattattcataaatattaaatttaaattctaagtgtttatgtggtattatctctttttttttatgaatccgaaattgtattagctcaagaacaattgattacacccaaatagcacccttaaagggcctataataaagaactagctatatattgtaaatgtatttacaaattttgaaacaattgtgtgtctatatttgagactttcttcggccaaaacatctcaattcttagcttcaaattagctttcaactcattgaacaaggcagtagatgattgctcttctttggtccatagcaccttgttcctcaatccccaaatgctatataccagaccggctatagtagtagtaaaaaccaggcgcctaaattttgactccttagatctccctagccatttgatgatgttagggaggcttgtatgcattgttctccaccctaaccacttcttgacttcctg

SEQ ID NO: 347921 - DNA, 841 bp, Cannabis indica
taactagccagctggaactccttcctagggaagagctagttatctagaagactggacccagagaggacatgatagtcatacaagaactcccttctggactcgactatcatttcacaagacacctttcgggatcgataacaacgagagagcaactttccagaaatgacgtttgcggagatcttttcatttggaggaactgtaccacaatacacataatttatatatatgttatatatattatatatctcatacatgtatacatataaacatgttataaatttaaatttcatattatatatcattatatataaaatataataaaagtatatgatcacatatatatgccacatataaatatatagaaaattactatcatataaaatattaaatcacataatatacaccatcatgttcacccatgaatgacttcacacaaaatatattaaccttgtcttcttaaaatcttgatttatctcctcttctattaaaaatgataagcttttaattgttagagattttattacaatgaaagaaaataggatatattacaactcaaatgtaaaatataatacaaaaacaatataagagattgattaaatatatgttacaatacatatatacactatatattgtgtatacatataagaaaggtataagaaagattacaacacatgtaatataaaatatatatatatataattgagagaaaaatatatatatatatactcactctcaatattgagtttagattagtaggaatcaccatgacatgaacaaagtattatcacttttgtccaaaagcttatttctcactatctctaagcactaagggaactctcta

SEQ ID NO: 347922 - DNA, 797 bp, Cannabis indica
tattattattattattaaattgaatgtacatatgaaaaagatactagtattgtttgttctaaattatatgggaaagaaaaattctaacgagggatacaataatattttattttaaatataaatttttaaataaatatgtacctacttatttattatttcaatttaagaaaatatttaaattgtgatcataaatatatacacatattatataattaaagatatctttctaagtaataatgataaaaaaatcaagttatataaaaagagaaatatcgcacgcgtactgaagagagaaatatcacaggcgtattggagagagaagatattgcgtattggctgggacgtcgataagcttctgttcggtttagtcggccggcgtcaccaatcaacgacggccagtcgtctgagagtggtttcaacaacaatcgtctttagtcgtctgtgaggagttcaagagcaatcgtctgagagtagttcggttcggctcaacgacgttctccgtttcaaatttttgttttcatttattaatttactgttattagtttaattccaattaatgttcttatggggttagaattataaggagttcattccttaataaattttaatgctgtgatcgtatttatgtattgaaactaatttagtttttcccattagtcttgtcttttgacatgattctttaatttttctttttagttcttcccattagtcttgtctgctctttagtcttttccttttattttttttttgttggagtcttgtcttttggcatgggttgtgtagttcagaattatcat

SEQ ID NO: 347923 - DNA, 665 bp, Cannabis indica
ttttgtttactacaattttaaaccgtcgggaatactagatttttcccgacagttttaaatagttacttaacttttttagcgacggtccccgaagaaaaatcgtttttaggaccgtcacgaattctgatatttgtagtagtgacagttcaaaccacgttacactatatattataaagttactaatttttataatatgatttttaattttttttatattaaaaacaaatatatatatataatatatgtatatgatacattatttttttgagataatttaatataatgatttagtgactagtattatggtatgatgttaaaactttaataagattttttttgtttgtactgttaaaactttatagattgatttttaaatttttattataatattcgataataatggtagtgtaaactgctcaaactgtactgcgctacactgtatttttgtagtgtgatttttgcaattttaagatcttgcggttatgggtaaaaatcggtcggttatggtcgatttttacaattttataaccgaccggtcggttacggtttttttttttttttacgttaaaccgtaaccgaccgtttagtaaatataactgtataaaaccgaccgtatagttttggtcggtttttggtttggtcgagttttggtacggtttttggtc

SEQ ID NO: 347924 - DNA, 1007 bp, Cannabis indica
ggtgatcacttgttaataggcttagcatctgtgtgtaaagtctaggtgaagaaaaagtgtgggcttttctagttaactgaagcctttgatgagcaggcccagtccaacgtaggggaggaagacttagttgatagtattgcactatcgaattggagtaactgctgtggatcaaattgaggtaattgctatggatcaatcaggtacacatacctaattattatatattattattgtgttctatgttatatacaaatagatcttgggtttattattaatttttctaacatgtggtatcagattgcctattgtatatgatttagaacctataattagtatacaattaatatgtatatgttaattttcttcaattacatattaatttcgctattattttatgttgaattttttgtttttcaatcttaaaagtttaggggttttattcctcattaaattctctttcttttgatatattatttgcataaaattgttgagtaaattaagagaatttcaagattaaaattttagggttgttgtattttttaatgataaaattatatttggattttttgattatgattataattgactgaaattgattatgcataaatgattgtacattgttttctaatacaactacctatttccattaacgatttagtccaaaacccgtaggtttcaagattttattttttggtttgaaattttcggattcaatttcttgatctaccattattttggatgttttatcccaaattgaatccttaggtagattagatttacaaaaccgatccaaacccctcaatttgccgtcgttttcgtcgagtttctggccgttttctttcgtcccgacccgaatggagagaaccgggtcgcgcgacccggtttcagacccgcccaaggttgaagatgaagtcctgccagcgaagcccactctcggcagcggcgcgtgggggcgcgtgcgctgccgtccgacgtcgttttttgacgattcttttttccagcgttat

SEQ ID NO: 347925 - DNA, 1008 bp, Cannabis indica
tggtgccttttacaactggggcactctgggtaagtgtattgagtctcagaattaccttgacgaccacctcgaccctggttcccccggaacctcttattctgacccgagccaccggttgcagtggaggccttccttttctgatccatggccaaacctctaccacccctgctaaagcctgatgcagaaagggtaggagcctcgccaaccactggagtcctagcagacttagtcatgcacccaactgcgccctcagctcgcagtgccttttcaaccttttcagcataggtggttttgtcgtcgatagtaatcattaggtcatgtctaatcttcacattcaatccatccaaatacttttccgttttactaaaatcaattggcactatacccgaggccaacctcgccaaccggtcaaactgtgtcgtatactctgtcacactcatattctctttctgagtcaggtgggttaattcttttcttttggcacttctgactgcttcattataatatttcgcattgaaaagttcctggaacttttcccaagtcatcgaagtgacgtcatgtatcatggacaccatgtcccaccagactaaagcatcctccttacactggcaagtggcacacaccactctatcattttcggtgacgcccatgaagttcagaatttttgtaatcactgttagccactgctcggctttcataacgtccggacctcccagaaaaattggaggtgcttgcttgcggaacctttcatacagaggttccatcatattcactgcaatcactggttcagcctagacaacaggggctggtgccattggaatttctggaattggcactacaggagcaccctgctatcttagctgccgaattacttcctcttgatcattagttttagtttgcatttctgcaaacctattttcctaattttgggcttcctgagtaacttgggcggcttgggctgcctgtggcgggttcgcatcaccccgtccacgtgccctgcccctagga

SEQ ID NO: 347926 - DNA, 1254 bp, Cannabis indica
ggttacttgacataggggtttatttggcctagtgtgtcaccctggggagctccggcattgtttgtcaagaagaaagatgggtctttgagaatgtgcatcgactatcgaaagttgaataagctaacagtcaagaataaatatcctttacctaggatcgatgatcttttttatcaactttaggggatgacggtcttttcaaagattgatctccgatcaggctatcatcagttgaaaatctgagaggaggacattccaaagacggctttctgtactaggtatggacattatgaatttctggttatgtcgtttggactaaccaatgctcttgcggcattcatggacattatgaatagggcattcatgggcgtctaatcataattcgggatatatgtatgttatatgatttaagcttttcttagtgagtctgtcgactcacagtgctatgtttatgtgtaggtaaaggcaaggctaaggccgaggaaccgtgaggacgagcaaatgaagattgtacatgtcggggcggttaggcttggagcgtacgatcctcgggacatcagggcttttgttgttagtcgctgggcgacaaatattttgtaaatgaatagcaaacttttgtaaagtattttgtaaccggatcccgaaatattttgtatgtaatattataagcttttaattaaataagcaaattttaattaatcacgattttcattaacctcgttggttagcaacgagctgcacagtatgtttaaaatcacgttaacacgccaatgctagttagggtgttacatccgccacatccttgaagtatttatgcaagggaatcaacgctccttgctgaccatgggcacctgaccaggcgcacatccccttgtcagtgtttgtggcacgattgttgtgggcgggaatgtagcagtgcagctcgcccaggtatccaccctggtcaagagtttgaaggcgcgcctccgtaatcttggacggaggacttacccaccttgtgcccaaggcacccttccttctacgaggaaccaccgcggtaacctcctcactgacgtagtccacgccctcgaccaggacatctccattagcatcgactggctcctcagcctcgttgtactcaccgtaatttgggggttcaacctctacctcttcctccgtctcggagggactgccaggatgtacatcgtccagctcctcgatctcctggacctcagcatccccctccatgatccttctccatctggacggccgaatcct

SEQ ID NO: 347927 - DNA, 680 bp, Cannabis indica
aacaataaaaaataatatacaaataacaaaaaaaaaaaaccaacaacaaaataacaagagtataacatataaaaatatattaaaagaccgtattttatgtaaataaaatctaaaaaaccgtaaaattattgaaaatttcgttcaatttatatttttgtaattttttttgttgcttttgtgtgttttttttttttaaattatctctaaaaaaatatgggaataatagtataaaataattggttaccttaagagcactcccattagcttctctattatttcctttaaaataactcactaaaatctcactttctttattttacctcacacatttcactactacaaatatcaaaattcgcgacggtcctaaaaacgatttttttcggagactgtcgctaaaaaaattaagtaactatttaaaaccgtcgggaatactaaaaaatcgtagtaaacaaaataggcgatgttttttttttaataaaatacgaatttttatgagagccttatacccgatgaattaggagagccttataccctaaatcgtcgcctatactatacctgacggttttaaaccgtcgggtataagggctcattaaaaaatcctcatctacttctcaccgcattttccaggtgcccacctatttttttttttctattttccacatgcccacctattttttttt

SEQ ID NO: 347928 - DNA, 1145 bp, Cannabis indica
ggttgaacctgacccgactacaccggtttttaggtggttggttttttagcaacgggtcggggcgggttgtcgggtttttcgggtgtgcgggtccaaatgtgcacccctaccaactcactctcaggagttggccccaggatcggccagcctggccagcacaagggcttgggcggccaaggattgcattgtagggccccaaggacactctagcacgtggacaacaaagatgggctgcgaattaggcccgaaaagcccaacaaactgactgaagaatatctagaatcaagggcatattggtctcttgtaaatatctaactatctatacaatttccaagggatttgaatagtaaacttaggatttaaggcgtcctatataatggccttaacctctgactgaaaacataagttgcctaagccgcctctaagctaaaaacctcaaactctctaactgtcagactctctctcttcctcattctctcacatgcctagcctaggctgtctgacacttgggccctgccagatatcaattcatatattgtcatcctaagggtactatagcgatctggatagtaattccctcggtataatacaactaagaggggagtaggtcattacccgctatcacaaggggttgaacctctataataaatcatgttgtctattgctttttcactgttatttgtacacacgcgtcgcaagcatcagatctatacaaccctgctgtcggttgatctctttttgaggtcaacagtttggtgctttcattgagagcgtggatatcgtgatctgatcaaatgtcatggtgaacacaagaggaactcctgtcgcactatctgcatctttgggtcttccttaagatccacagattgcagatccaaacactcgagttccagtcacaattggaatccccatgaatactacagatgtggtgaatcctgtcaccacaataagtctgaccaccttagttggccaacctgatgcgagcatcttggttgatccaagtggcaggcccgtgcctccaggagtagatccaccattagcgcctcccactgtaggaaggacccaggggctgttggaattattttaccaggatcttagatctacttgcaagtatgttgattattaacctaaatatgaacttctaa

SEQ ID NO: 347929 - DNA, 582 bp, Cannabis indica
ctctttactcaagagttatcacttcactatcaagaaaaaaaaaaaaaaagtattttgtgcacttttaaataaataaattagggtttaatttcttattttagaaaattctaaaaaataacctatataatatagtaaaaaatggcaccataatttttaaataaaactaaaaataccttatgatgttttgataattttaatttattatttacgtgttcactaaaaatcgatatctatatctacatatataaattgtctgataattttttatataattttttagagtttttttttatgtaaatttattattttttaataaataatttttaaaagtatttatatttgaaattattttattatataattttgttgttaattaatatttatatatgtgatatatactagatgagagttacgtggcgaactacgtaaatattagttttatataagttctaatggtttttgtttaagaattcagtaactaagcaacggcaacaacaatggtagataaatttatttaagtttttcatatttgtaaagattataaatctaaactttaattttcttgatttgagattttgaatt

SEQ ID NO: 347930 - DNA, 631 bp, Cannabis indica
atatatattagtaaacacacccttatatttctatagtattaaatataataataacatgtatcctagaaccatcttttttaaatgtaaatgtataaatatggtggtagattttttaatcacaaaaataaaagtaatattttattacttttgaaaacaaaaatgtattttataatcatttttgcttttcaattttaaaataaaaaaacaaaagttcgctatgtaaaatttattttatattcatttgatgattttatttaaattgggtacgagttgggatttgggtccagggtcgggatccaggttcggattctaaagtctagattggagtcagaatctaaaatattgattaaaataaaatttgtttataaaaaaatctaaaagtgactaattttgattctcaattgaaaaattgaaacgtgaaaataattttataaaacatgattttagaaaatattttttttctaatgtaaaaaataaaaaattgattaaaaaagtgttactaaatgcatcctatattaaaataaaaataactcttgttaggaatttgaactttttgattatctttattaattataaatatatgttatgactaactaaatatataacatatatagttttgggattatttcac

SEQ ID NO: 347931 - DNA, 969 bp, Cannabis indica
ttcccaagatgtaaatatccgctagaatcattggttagcttccacgaacaacttgaagaatataaataatacaactaagctgaacctaaacatatcaggattaagatccatagacctaagatcaactagtgatattgactcagaaagatataatagtaagtttatgatatcttatccaaggtcaatatcggtccaatccaatgcatactccatacatctgatactggtaaactttaccaataccctagaaaggacataacacttatttaaggtgtaagtataccttatcgccaattatcatgtcagtctaaatccagtgaactgacaaatcgtgggacttaatcttttgaacatataatcatgtgtttacccaaatttctacgtcaatgacgtgtcaagagtggcaacacgtggcacaaaaatatcgggactaaattaatgaagtatatgtaaagtcatgaccattgagatgaccatcgacgatgaaaggttagtctaagggtatacccctaccccctgcaccctcatggtagaagtcatgcattttatcatagatataatgacattctcaaaggtatatggggacatccacaatacaccataactacagacaatgggaaagtagggtcccggggggtcacccaacgatggtggttgtcaccaccctaaagttgggtcccgaggggtcacccaatgatggtggttgtcacacccctcaagttgggtcccggaggggtcacccaatgatgatggttgtcacccccctcaacaagggtcccgagggtgtttcacccaaacatgggcttcatccccaaaggtggttgacgaccatgtcacacccataagcgaccctctgttaggttttatgccctaaataaaactccatttcaatgtaatctattttattcaacattaataaagaaacagaagtatttttcattcatttgtgtatgttttggttcactttat

SEQ ID NO: 347932 - DNA, 550 bp, Cannabis indica
aggtgccaattagttatacaaaaattccattcaatatcaatacgtttacacattgaattacaataactaaacttattaacgtaaacatcaataaatgaatagcagttactaaattcagtaatgtatgcgcccttttaacatgcgagttgactgttcatattataacgttaagctcgtgagcctaacacttaatagcgtttacgacgtctgcgttcttatgtagtcgcctttgtggacatcgtatgacgagctgacagaacctagacatgcgagtctatatcggcttatcaaggctattgggtcatcgggaccaactcgcattataaagaatcgatctttatgcttacacaggaatatggagaggatactcgcacatatcctgatatatgcgagttagatccattctcctatcccgcataatacgagttaaagttatgcgatcagacttgggtcatactcacagtatctcgctgactttatcttgggcgaggtttaaacttcgaggagtctcttatagacgtctcagctttcattggaaaatctgagtaca

SEQ ID NO: 347933 - DNA, 498 bp, Cannabis indica
ctaacaatcaaaaattcagtagatacaactagattcacaactgaaaagattacctcaagtctcaagctaggattgagcataaatacaccaagaatccaagctcaatcaagtcaaaatcaagtaatttcttcccaaaatcaactttgaaaaattaaagagggttagagagagagagaggaggggtcgggtgagaggcagattaaaccagtaatttttcttttccttattcttacaaaaattcatttaatcaaatgtaaatcaataaaggtcaaaagaccaaaatgcccctagggccaattcacacacaaccaaacatacaagggtaaacttgtcatttcacactcattcatttccaaataaaattcagatttcacattatcaaataaaatgccaattaattcaattcaaattgtatttctggcccgaacccggtttgacccgaaatacccggttctgactataccgcgccaacctgtcagaacacacctgaaaagacaa

SEQ ID NO: 347934 - DNA, 1067 bp, Cannabis indica
tcgtggaagtccagatagccaacaagatggtggcccgaaccaagatagataatggagcctcttccaacatcctattcaagacagcatattaaaagatgggactccaactcaaagatttaaccctctttctccagcccgtgtattggtttctctagacaaggagtcgcacctctagggaaaattttcctacccctcattgttgggcaagctccgacaagcataactgttatggcataatttttggtattggatgttccaccagcctttaacgtcatgctaggccaacaagctttgtatgatttaaaggctattacgtcgatatttcattcatgcctgaagtttccaacaaagaatggggtagggtgtctaagaggaaaccagtaagttgctcgggaatgttataacctttccatagcgaaggctaaaaaggaagtatcctctagccagagttcagacaaggggaaaaacatttataaatagggaacttcccaaggcggggatgaagatgtggattggggacccaagcaacaatgttggaccagtggaagaactggaagagattaagatcaacccagttattctggccagaaagcttaaaattggcaaaggtttgttgctcgaagtaaaattagcaatgataaaatttctgagagaaaacctagacatgtttgcctggtcacatgaggatatggttagaattgatccttctgtaatttcgcacatcttaaatattgatcctaacttttgaccagttcaacaaaagtgaagactctttaacaaggagcaagctctagccctgaaggaagaagtagaaaagctacacaataataatttcataattgaagctttctacccagctggggttgaaaatcccgtactggtacccaagccaaacaagaaatgactagtttgtattgatttcaccgacctcaatacggtgtgccccaaagactatttttcacttccaagaatcgatcagcttgtggacgcaacagccggatacgaaatattgagcttcatggacgcctattcggggtacaatcaaatcaaaatgcatccaccagacc

SEQ ID NO: 347935 - DNA, 456 bp, Cannabis indica
aaagaatgagagaaagagatccaagttcagatattgataagtaaaataatttccaacaagggacccctcctaagttgactactatgacttgggactacactcccgggatgttttctttcttgtcacgtgttaaacattgatgtccacatcaccaggatcaatttttgggcaaacaagaattgattctatttaatttatgtctcagtatttttggaactaattccttcttaattttttaattagaaacaatttctaagttattgtgtgttattagtttttactcattttgttgtggaacggttctgttttaatttatgcatcaatatttttggaaaggctaattagtaattttttcccctaaactttgacatgtagtaaatcgtgccccctgaacttttatggccgttaaaaattccccccaaactattgagattgttaaatttaaggacttttgtc

SEQ ID NO: 347936 - DNA, 793 bp, Cannabis indica
aacgccgagttccaaaataccggacaccggaaatgcagaatatgcaagctactgaataacataaataacagtacaataaattatttaaatagctataaataatttcctggttaatcataaacaactgataatttccaaatcaactaagcgggctttacagactataagtcttaattgtaagcgacaagtaatataatacaaatgtaatatagtaaaataaataaagagatagagtttttaaagaggttcagccccgagcagttcggtaatagcctactcccctttatttgtattgacttaagaacaaagaaggcagtgattcctctcttagagctcttacaatgatactagatatgttttttcgaccctttgcccagtgaaagtacatcactatttatagggctataagctttgagggaaaagttttccttctgtttacaatgtctataattggtaagattacacattaaatacagaatacaatgactaagggatttggacagcttgtcttatccttgtgatacgatcccaaagttataaggattgcttatgtgattcacgatgcaagtgttgaagtggctaagtgttggcatgttgttcggactgcgcacttgcacagcaaggaaggctccatccgtgcagatatatgcggtgttatgtttggcatatcgcttttgagcaggtgttaggttatttttaatattaatttcagattaatttagtatatttttaatttagttttaatcgtgtttggagcaatttcacgcttgttatcttttatttttgcagattt

SEQ ID NO: 347937 - DNA, 506 bp, Cannabis indica
aaaaaaaaaatccttttaacgggaggataattgtaataaccgcatgattagattatggattagtaaggtaattagatataattattaataatttatgtttgtgtatgattgtatttgtaaagactgcttatctttaatttagaaattagcagataaatagggtttaattatgaaacttgcatattagttatgaattatcatttaacagagatttatttgaatttagaatgcatttatatgtcatatattaaatttcatatttttgcatgttttgtacccgacaacattggaacgcgacgtttggctattagaatcacattttagtatttttagtatagcggggcaatatagttagacattgggaatgttaggaatagtcaagattttaaaaatgaccaaattacccctaagtggttttgtgactttttggttaagtggaaggcaagatggtcattttgcctaattgatttcttgtcctttagtggactttagtagaatatgttatt

SEQ ID NO: 347938 - DNA, 440 bp, Cannabis indica
aattttaattttttatgaattagttatgattttttgaatttggatgaaatatctgaaatcggatgcacacgtgtgcgcgcgcgggtaccaggcaccgcttggacagcgagcctcttcaaacacgagctgaccgagaattttcagacatagccctgtctgaagggatgctcacgccgagcttcctcgatcatcagaggctgcacgcatactcctgtctcgcccagcctccttcattcgtgcgctcaggggtatgcattgcatacccctctgaatgcatacccctgtgcaccaattttgttttcatcatatcttttgattcaaaaattgtttttcatttgaaataaaattcaaattttggtagaattttgtgtagaatctgaatttttcaattaaaaatccaattgttagaataaaattaatttttattaaatttttttaat

SEQ ID NO: 347939 - DNA, 537 bp, Cannabis indica
ttgatagtattgcactatcaaattgcaataattattatggatcaatcaggtatgcatatacttaactatcatatattgttattgtgttctatattatatacaaatagatcttgggtttattgttaatttatctaacatgtattatcagattgccttttgtatatgatttaggacctataatttgtatatgttaattgttaatagttacatattatttttgtaataaataaatgataaaattttcattattgaatcttaaaacgttagggattttgtttatccttaaattctcgttttgttgatatattatatgtatgaaatcattgagtacattattagaattttaagtttaaagtattagggttttattattatattatgaaattatattttgtggttttttattttattgtttttgatctaaaattgattatcaatatctcattatcaattgtttatgaatgttcctgcatgatttctttcgtatttcggtcgagattggtatcacaatcaatttttttatgttcttcaaatttt

SEQ ID NO: 347940 - DNA, 826 bp, Cannabis indica
catacttacctaatttgtatgctccggattcgagaacttcgaccacttgatatggtccttcccagttaggtccaagtacacctgccgcactgtctttggtgtttaggaatacccttctcaggaccatatcccccacgaagaatttccgagccttcacttgtttattgaaatatcgagctactttttgttgatgggccatcaaattcaagtttgcagtggctcgtctttcttcgatttcatcgagtgattccgctaggagtacgtgattggtatcttgattgtacataaatcttctgtgggaaggtggctcgagttctacaggcagcatagcttcatatccgtacgccattgaaaatggtgtctatccgattgtcgttttctcagttttctgatatgaccatagcacttcaggaagctcttttggccaatttcctttgcaatcctcaagttttttcttcagtgtatccttcaaggtcttgttgactacttcaacttgaccattcgcttgaggatgggctactgacgagaaacttttgatgataccatggtttgcacaaaagtcagtgaaggattggttgtcgaactgcttgccattgtctgaaactatcttgtacgggagtctgaactggcagattatgttcttcacaataaagtcttgaactttctttgatgtaatggttgcaagtggttcggcttctgtccacttagtgaagtaatcaaccgctaccactgcatactgcactcctcctttacctttgggtaactgtccgatcaggtcaattccccaaatggaaaagggccatggactctgcatctgagttaactc

SEQ ID NO: 347941 - DNA, 691 bp, Cannabis indica
gtttgtcattccatgctctaggggtctgtttcggaccatatagagccttatgaagtttgcaaacatgggtagtggttgactcatgtatactgtctcttgaagagttccatttaaaaaggcattaggcacatcaagttgcctaatttcccactaagatgagatggcaagagtaagaacaaatcttactgtgacaggcttaacaaaaggtctaaaagtatcttcaaaatcgattcttggcttttgaagatacccttaagctactagccttgatttcaacctgtcaagggtaccattatcattgagcttaactctatgaacccatttatttctaattaaatgcatgtgtggttcataaggaacaagggtccaagttccctatgaaataagagccttgaattcagtgttcatagtgttgagattttatgccctaaataaaaatcatttcaatataatcttatttgctatcaatagagattagaagtcatttaagtttacatgttattttcatgattatgttttaacatacaatttctgataaatccagaacatatagttattcacaattacagtgatgtcatcatagtggaaagcaattgtgattatatgcttcagtttaagtctcatgatttatcaagcactagatttacacttatgtgataatcagcgataaagtttacttacacttgaataa

SEQ ID NO: 347942 - DNA, 1163 bp, Cannabis indica
gaaaaaaatagttagacaaaaaatgtagagagtttttgatttattgtttttaataatttctattaaaggaataaaacatataataccttttatataatgaaggatattttaggtattaaaaagtaaaaaatgacatttgctttattatttataaaaagggacattaactatctatagagttagaaataaggccatttacttacatttatcctcttaaatcctattataagggattttttcaatattatacttaaaattgattttatttacaaaaatattttcaacaaatttatttgcacaaatacgaaaaaacaaggaaagatataattataaatagtattttttatatctctcaattttttttttatttttattaattaaataaatattatttaattattatttttaactttaaaattatttaataatttcttttattgaataatacttggaaaaaagatacattttttatattttatttacagtttaataaattttaaaattatttaataattttttattgagaatatattagtggaccactaatatgttgacaggtgtcaacttagtctattttaatgtaatttgacgaattgataatgagaaaagtagcgtaaatgtaactttaggtatttaatccgctaaaaaaaacatgtggtatataagtgtaaaaaaaataaaatttaaaatattaagtatttatgccgtaaatactctatgtttgaataacatttaacagaaaagtagtgacggaagtaacggaaatgtaacttaaggtatttaatccgtcgaaaaaaaaacatgtcgtatttaagtgtataaaaccgaaacgtatggtatttatgccgcaaatatccctaattataattgcaaaatttttatatttttatggatatacttttttgttatataggttaatgttacgtgtaatgcacttataattgatttcttttaattagattcaattaggtgattttaagagaaataataaagtaatgtatttttttttaaatttttcgaaatggagtttgagatttaaatttttttaagttctatatacaatagtgtgtcatttgtaatgtgattatatatattttttttaattaaggggaaacgaatctgataatacatatattgtaattattctattcttaatcagaact

SEQ ID NO: 347943 - DNA, 582 bp, Cannabis indica
atgtacgaatctactcctatttgttggcacccgacagacttttttagtctactttttcatttagtagtgtgtattatagttatctaagacatcctgtaaaattttaaaaaatttagaaaactttaatacgccaaaaataatacacttctttaaaagtgacacactaatatactcctactggttttggcattcgggagacttgtttagtcttttttttatggtcgtgtacatcatagttatttaatacatcctgcaaaattttgaaaaatttaaaaaaatttaacacgccgaaaataaaatttaaactttctgtcgcgtgactcttttatttaaagggatacattgttaattaatatgatattatttttttatcttattaaaaaattaatataataataaagaatattttttagttgtaatttttagtgttgtggttagagtggaaatactttttgacgccaaatttggtgacagtgtaacactaaatttggtgttcccttagagatgctcttacttctgaaatcactctaatggtataacactcttcaaaaaatctaaaattatgatctcacacattattat

SEQ ID NO: 347944 - DNA, 635 bp, Cannabis indica
ggtcagcatgcacatactctaagactgcgccttcgtgttgtgagtagctgctgtaaacttgatcttgtgttgcttgccataaagacaagtctcacagaatggtaatgcacatgtctgaagcttttcaatgactcccttctgtgcaattccctcatacctcgaccacaggtacagtttcaacctcaaatacatacaacccatgtactttcttttctttcatcacaattgaaccttttgtgatccgtaggctcccattcaaggacttatagccataaccttcattttccaacgttcgaagtgatatcagagtcctcctcaattctggaatatgcctcacattatgtagaatcttcactttaccattgaattgccttatagccaccttaccaattccaacaaccctacaagaaacatcactacccattagtactctacaaccattattggtttctttataatcaaagaagggttctaggttggaacacatatgataagtgcatcctaaatcaaggatccactctttattgttaatattttttgaaatagaaaataatccccatctgaacttccatctgatccactgctctcaaccacaactgtagagtcttttctttgatttccatgatcattagatt

SEQ ID NO: 347945 - DNA, 552 bp, Cannabis indica
gtggtgttctagaactggagtagagctatagatcacatcgatctatcagacttgaaccagtatatatcttggtattaattttcttatcttctgccttaattattttatagttttccttactttgttaatccctatttttctcagtttgttattcatgatttcttaatcttgtcattgttaattgtttgattgttttaatttagttgttttgattctgaactattagtcatattttcccacaaattagtgtcaggtaatcaatcaagaacgcaaaatcaagattcgttcccctgtaattcccaaagaaactttgaatgtcatctgttgacttcgcttttagccaacgacaatgagtctttttaataagcgataaacgatatgtcgtaatgacaatatatataagaaagcaataataagacacatgaattttatagaggttcagcccgagcagttcggtaatagcctaatcctcgttatttgtattgacttaagaacaaggaagaagttttcttttcttatagctcttacaacagtatctctgaatatataatt

SEQ ID NO: 347946 - DNA, 543 bp, Cannabis indica
tacatttgggctatctcaaataagtaggagagcttatggcttagatgggttcacaatgtatatattaaaaataaagattggtgggactactcttcttcaatacactctagctggtattggaagaagatggtagctctcaaagatcagctcagaagttcgatggatcctactgtttttcagaagcagaagtacaccatctcagtaggttatgacttgctactatcccccataactcgaaaacactggtgcaaggaagtttggtcaagactcaacacccccaaacacaatattatagcttggttggccatgcttaataggctgaaaacacaggacagattgttgcgatttggtgttcagcttactggtgtttgctgcttgtgtaatatgcagatggaaacatgtcagcacttattttttgaatgctcagttgctggccagtgtttgctggaaacacacaaattataatttcataatataattttataaaccctaaaactttaaagttaaaattctcttaatatacacaatgatttcatgcatata

SEQ ID NO: 347947 - DNA, 844 bp, Cannabis indica
aaaaaaataaatagtttagaaaattaaagtatcagaaactagtttcacttatagctagttaaaaatttcacacaacgaaatcagattcttaagaaaaaacaaaacttaaagcttaattacgtataataacaaactaatctcaaatatgtgaaccttcggaacaaaaatcataacaaaacataaaataataaataaagaagataattaaaatcaattcttcagttaaccatattaaaaaaaaatacacgccgagacaaaaaaatttaataactcgcaaatataattaagataacgtacaatgcacaacaaaaatctaaaaacaaaatataagtttgaaaatatgtttcgaacttagaaacaaaataataaaaaaaatacttaaaataaaatatatacaataacatcataaaatagaataaccccatcacaaaactattaaaactaggaatgtaaacggggcgggacgggtgcggggattgctcccccacccccatacccgcttcttaaattcacccccatacctgctccaatacccgtttaaattaaagcgggggcggggcgggaattacccgacgggagaaggattcccatcgggtacccattacatatatatttttgaaaaaaaaatgatgtctcaaagagaattaaaaaaaaaaaatcatcataaaaacttagtaaaacaatatacttaagtggaatagtgtgtatagtaaaaaaaaagaagtataatcaataaaaagcctaaagcatgaagctattttaattgtagtagttatgattttaaaacttaagtatatacatatatcatatcggggcgggttcggggcggggtatctattctccc

SEQ ID NO: 347948 - DNA, 895 bp, Cannabis indica
tatatatgtgtatgtgtattatgcatgttgttattgtgattcatatactactaatactagtacggtagtggtactaagtgcattggtacagtatataatgtttaaagggtacgatacggtgttaccaatactagtacagtttagtacatagtgcaagtgctacaacactcagtagaactcggggtacgattcagccctaccaacactaatacgagatgagtacttagtgcatgtggtacagaggtcgtacttctattaagaacattcttgatcatctatttagccttgtggataggtgtatgggggcctaaatacaagtcggtaatatattatatgttatatacttttcttaccaagtctgttgactcaaagatattgttttcatgcgtatgtaagggaaaggctaaggctgaacagcagtgagtccaaagctcggggatgattgtacatgtcaagatggtgcgatctggagagttcagtctcggaacgactttggcttcattttgtagtcactgtgcaacatgtttgtaaagtttattttgaaaatgaatataagtttaaagtgggatcccaactttttgtatgggtatatgtatatatttataaaagtttaaagataaatcaaaagtttcaatttttcacgtttttcgagaaaaccatttgattagcgaaggtgtgcactgtaatttgaaagtcattgtagcgtgcctaagcattagtgtgttacaccacttctgcgttgtataaaggaaagtgaagcgcagtaagtgttatctgaaatacacaaaggaaaatgtgggaaccatgtagggggttattcgatgtcgagatgttttcaaataaggatagcactggcctagtttggagaagatgcaacggcattcacaaaaaaaaa

SEQ ID NO: 347949 - DNA, 636 bp, Cannabis indica
gaaaatataccccaaaaatttaaggagttgtgaatagagagaaaatatcgcgtagagaaaagaaggaaatatcgcatattaatttattaatttactataattaagttaattccaattagtatttttatggggctagaattataaggagtacattccttaattaatttttatgctgtgatagtgtttatgtgttgaaactaatttagtttttcttattagtcttgtcttttgacatggttctttagttttttccttttagtttttcccattagtcttgtcttttgacatgattctttagtcttttcgttttagtttttctgcttcgagtcttgtcttttggcatgggttgtgtagctcggaatcatcatggtgctatggtagaagcattcaagaagggaaagattggatacgttcaacccgaaattgctgagataataggcattaaagaagccttgagttggattgcaactcattcgtgggatagagtcatgttggaaacaaatagcttggtgtgtgtcaaagcgatccagtgcggtatttttatgccttcacagtttggtcttattgctcaatatgttcgaaatttgcttttggctttattttttgttgatttgtgttttgtaaaacgatccgcaa

SEQ ID NO: 347950 - DNA, 497 bp, Cannabis indica
aaaaaatcggaagttaattctatgaaatagcatgaaaaatcgaagaaaaacgaaaaaactttgagctctacggacggtatgcaaagcacaccatccaggcgcacatacttgggcgcacaaagtgtgctgccagtagccagccgcacgcacaagtgtgtgtcaccaccccgattttttcaaattttcaaaaaatcataactaattcaaataaaatcgaaattgagttttgtaaaaaaggaaattggttaaatttttccaaaatacccaataaaaataattccagaaacgaaaatcaataatttttttttatcaaatttcacaagcatcaatcaatcatcacataacacacaaatcaacatgaaaccatccaaagcaacatatatcattgttttaattcatatttcatgaacgtaaatcattaccatggctctggtgccagttgttggaaatattttacgaggatcaagatttactaccatgtatgtttcattaacatc

SEQ ID NO: 347951 - DNA, 591 bp, Cannabis indica
tttgctttcttgctccttggctgttttacttgtttttattttggtggtagagctagattagtgcatgtctttctgttgtggcctgtctttttataatgtccacactttatttgttcctttgactctccttttgatctcattcttcttctcctaggtctccctgcttgcttttttgtgtctggtggtagaactaacatttccaagcacttaggcagtgtccattcactttcatttggtaatgggtttgctgttgtgtcatatgttgctttcattttgtctattttgtagtagtctgcaacatagtcataaactcgcagtcctcttttcgagaatacaactattgcatgagcacatgggatttcatcttgctggaaccggttacattcacatgttttgtccagtaaattgacaatgaattttcctttctctagcatattcacttggtggagtattgttgtaactggtataacttgttattttaaactgaaaaaattagtttataatcggttattttatactattattgaatctctctaatatatattttctatatatatatatatttatgtttagtgtgttacctcatatttt

SEQ ID NO: 347952 - DNA, 727 bp, Cannabis indica
tatataatatatatatatatgctctttttgactcggtcaaactgagatatcacaaaacaaatagaaaatgctttagaattagtacaaaaaaaatgcttgcttttaaattgagaataacaaaacaaatagaagcacaacaacaaaaacaatacctcagaacaatgaaacacataagagggatggaatgtcaaaaacaaatataacgaaaaattcattgaaacgtctttagagggattgatttcagtcaatttgaattttttaaaatccataaaccatatcaggcgtgtatttttgaccaagagttaaataacaccatcagtttatattgtatttaactagttatggtggggagagagaatccacaacaaaacaaaaacaagcgagattcattttattccaacaataatataatgataaaagaatgaaagaaaaagctaagtgcaccaaaactataaatgtcagacaaaggacgctaaaaaaaaaactaggagccaagaggtcacaccaaaacttgatgaaaagataaataaatacaaatatttgacaaacaaataaaagcacaacaacaaaacaatatctcaatataatgaaatctataagagggatgagaatgccaaaaacaaaaataaaaaagaaaaccacaatataaccaacacaaaaacaatttatattcaaaaaaatcaacaaagaactaacacaacaactatacactatatctattaaaaaa

SEQ ID NO: 347953 - DNA, 580 bp, Cannabis indica
tatgtattaacttatattaaaaagttttaaagcagctgatgcgcttttgttgttggagcatgtcgtgtataattaacattaactacatatctaataaaaaattaactacatataataaaaaaaatattttattttaatttttaaaataatatataaaattcttacacaactaaataaagtttacacgtttttccaaacaatcatattccccgtaaagaaattattttgaataccatctactaaaaaaaagcccttttactatatagcattagttaattaaacaaaaaccataaataataggaaggttaatcaaatcttcttgacaaaaaatctattcacattttttcgaggaaataaaaacatcataaaaatcaaacgaagcataatacgaaggaaattagcattaactaccaaccccatcatcataataactattgaaaaaagcaggcatccacttccggattctcagccttattatgtggctgaacaaattctgagctgccgtaaacaaacatcggattatgatactccgtataacccaatcccgatcttgaacccgaacccgaacccgaacccgaat

SEQ ID NO: 347954 - DNA, 731 bp, Cannabis indica
tgtagtgatgcatataggaattagaaataaaataaccgaaaaacgaaaaaataaaaatacagaacagacacggaccgaaaactaaaaatttaacgtgtttatatatatacgtatataatgtatatattgcataaacaattactaaatatataaaatagagtattataatcattattatccaataaaacaataaaacgtatatataatgtataatatatatatcaacatatatacacatatatatatcgaaaaatatatatagtaacgtatataatatatatataaatgtataaacaaaatatatatataagaattctggaaacatatcaagtatatatataatatatatgatagaatgaatagttaaatgaaaatatatatatatataaaaatatatataaaccaaccgaatataaatatatatatatgaacactgtatatatatatataaaactcaaactcaatcaaggcagatattaaaccgttctgatgccaactgttaaactatattatatagtatatgaaatatagcatatatatacgatatgtaatgcggaaaatactataaacatatcgataatatatatacaagatcaaaacacctctagttattgatctttgagcttcaatccctgcgatagcttcagtattggagttcggtctttctcactctctcaactctctttagatgaaaatttgctgaataatcagaatgagtgaggagctcgggg

SEQ ID NO: 347955 - DNA, 534 bp, Cannabis indica
tttattatttttttcatcatctttgtttaatttagtttatgtattggatgtgttatgttatgatttttgactgttagtgaaaacaggtttctgtaggaactggtttctggtctttgtttatgtctatatttctgtgttattttctgtaggaaaccagtttctatatttatgttaaaaatattgtttcaattaatttatggttcaggcatactctcaggatatatcggatgatggtggtgggttacagttgtccgttcatactattcaagctgaggtacaagctttttcacatttatgttttgcattgtttgaatgttattgtttgttctaaatattttttttcttcaagtttgtaggaggaaaatgacactttgaaatttgaaaatatgtttatcgatcctgattttcttaagagtgtggttgatagcactgttaagagtgttttgaagaaagatgatgtttcatttcatgatgatagcgataagttgagtttggtttgtacgatgaatcgtatttgtctccggagattcaaaa

SEQ ID NO: 347956 - DNA, 1168 bp, Cannabis indica
ggacaaacctttgacatggtgggaccccgtgtcaaaatttaaaattaagtataaataggaaaagaaaaataattataccacacactaattaaaatcttttaccaactatcattactaaaagctactacatatgagtttgatcgacaacaatttctaaactgattgatcattttgatagtttgactcagcacaaataatcttaattataatgcaattgttgatcttttgagatacccagggtgacaattcgattattgaatatgtgtgaaaaatttcttactattaaaattttttctaaactattacatttggatgatatattaatactttatcgcacatcttattttactattcacgacaattacaaaatttgaagaaatatatttcatacatgaattgtcccataataacaagatcaattaatattctatcatagagaattaaaatctcaaattaaaaataaattataaaaatcccagaccgtggcacaccccaaatgcttgggggataaatgttatccgtgttttcttaattgtgacacgtggacttcaatcaacaaaggctaaggagtcattagccggaccaacttccttcgttgatgctccgggaaagtaaagccacaaactttgcgggaagaggttccgtgaagaggagttccctgattgctaacaacacggaagggatctgtgaaacaaagtctccctcacctccaagaaccaacaccatgcactaccacgaagagtagaaattttcccaaaaagacatttcgagaatgcctcaatcgcgggtacgccttcggctcgtacaagctttgtccacgcatgttaggctacgaacctagtgaccaggctttttcatgtacgatgtcagagattctctcccacgacacactattgtgcaaagcatgcatgtcctcgtgtacctgcccaaaaaatccaacgactagggataaggggaattcaaataagagaagccctgaagtgacatgcgttcaaggcccaacttgtttaatcagtacgatccgacacccttaaatgccatatgggaaaaacgccacctaccaacacaacgaccatatcttgcgccaatgaagatccatccaaggtagcgtatacacgaggattggcctataaataccccaaaaaaatgttggatatttattttacca

SEQ ID NO: 347957 - DNA, 699 bp, Cannabis indica
aacctactttactacggataaatatttaagatatttaaactcaaataaataaagaattttaaagttttagtgatcatatatttttccaataacactagctacttttgcagttcttcaatcaacatcaagaacctgatgcctaaaaaataaatttaaaatatgcatcaattgtttattgacatgtttaattgagactaatcaattttcacaaattctataaaatattacataaatatctaattaaataataatataccgagaatgaggagatcgcattacaatttaaaatacacgataataatagaacttttcaaacacactacatatatatataataaataaacatatataaaaaaaaattataaattacaacacatgatactttacatataacactaatacattaacttaaactaaatcatataatatagtttacctaaactatattaaaattaataacctaattaatttttacaataacaaattaaatctttggagtttagccagatggtatcttggaccaccatgttgatagaaaatacactactacaaaataggctattcccaacggtttagaagagggtcaattattagaaccgttggaaaaggtaagtggatgtttttcccatcggtttagcactgtagcaaaaaaaactgttgggatagttattgccaacggtgaataaccgttggcaatac

SEQ ID NO: 347958 - DNA, 711 bp, Cannabis indica
gaaattctacctacgcgtaatggcttgtttagacggaatatcgcctttagtacttcttgtcagctatgtggttttggaggagagtcgaatactcatgcaattttttggtgtccctttttacaaggcatttggaatcttttggaattctcatttctgcatgaagtaaaaaaatagattaatttcaagaatgttttactttatgcttctgaagtggtgggaagagatgcttttgcaaaattaattatgtgttcatgggcaatatggacagaaagaaataagattactcatggccaacaaataagacaaccacaaaatgtagttgagtggataattagttattatgattcgatcatttcaatgaaggatgaccccaaaaagagtctccaaactaatggaatagaggagctttggctgaaacttctagatgtgtccaagaagagagtttacactctaaacttatggtggatgcagcgatattgagcaccacgagcttagttagattaggtactgttatattgtcagaagataatatagtccatgctgcgttaagcaaatccctcaaatgttagtcatagggggtacattaaaaatattattcgttgcttattttattattttgtttattttcaaaggaaactttttgatatcctaagttatgggagtattgtaggtcttattttgttgttactagattacatatcaatttttttt

SEQ ID NO: 347959 - DNA, 580 bp, Cannabis indica
cgttaagcaaatccctcaaatgttagtcatagggggtacattaaaaatattattcgttgcttattttattattttgtttattttcaaaggaaactttttgatatcctaagttatgggagtattgtaggtcttattttgttgttactagattacatatcaatttttttttaggttttgattagcttgataattttctaataaatttttttctggttttcggaggtttttttaggtggaatttcagtgttacatgttgaaactttagccttgttggttggactcaattaggctcatatgtgtggtcttccaattcatgcagtttattcgaattcgttagctttggtgacgaccatcaacaacgggaagatgtatttcaacgagttaagaacgctgtttgaaaattaactttattgtctaaattttcaggagcagttttgtcccatgtgcctcgctctaagaatttagcggcccatagcttggcaaagcatgctctttagacgatgagctatcttggttcgaggagatttcagcgccggtagcgaactgcgtcataaattcatgagtgattctaatcactttg

SEQ ID NO: 347960 - DNA, 953 bp, Cannabis indica
tttatttaggtccaattaccattgggcttattcaatgaataacaattgtttaattaaggttaaattcctctctttttggcctcgtgtgagagttaagggcgcaatagtagtgggtacgacatactgaacccaaccctccctcacatgaataaccctaactatgaaggcccatttgccttacttgaataattttaataggttaatgatactagtttaacctaataaaattaattagcaacataattaatttttaaaatatatgaaatttatttttcatcagattattttgaaattaatttaagaaaaacacaattagtttaatgaaattagttccaaataaactatatgtattttctgacatttaattaaataattaaagaagttataactaattagatttgtctagacacttaattattttaattttcatacaaaatacattaaagttgaaaattaatttttcaaattgattttggatcaacttaaattagaatatatatttttttaaaattaataattaagtagatttttctaagaaattagttattcaaatattctttaaaaatatatttaagttaaatttttttagttttagattaacttaaattgagatattttttcaaattaaggtgattagttcaacatacttaatttgttatttaattaaatttttgaaagttatttaagttaaagatttagttattttagaataacttaaattagatattttcatgtatttgttttattatattttaaataattttgaaattatatttttatataaatatttttgaaatttaaattgaaaattaaactgaagttggaaattaattttttaattaattttagacctaactaaattaactaatttttattattaaagtatatagattaaaatgaatgattaattaaattacataatttttagaattaattagcattttccccctaaa

SEQ ID NO: 347961 - DNA, 661 bp, Cannabis indica
gtaaaatatttccaacatttatactggctcggggttgctttttgatatgctttcttttttgcttgtgtattctaccacaaagtctgctagggcttggcctttgattgttgttcagggttgaaagttatttcgtactgactcaactctaccgcccacttgagtaaacgttcagaagcatatggcatttgcagtatttgtcgtagtggctggtcggtatatacccgaacaggataagctttcaagtaaggcctcaacttcattgttgctaaaatgagcgagtaggcaagtttttctatcaatggatatcggccctctgcctcaatgagtcttttactgatgtaatagactgggtattgtacgttgtttttttttttttgatcagcacggcactcacggtatgttccgtgatagctaagtatattcccagttcctcaccgtccaaaggttttgaaagtacgagagatttagcaagttgtgcctttagctcttggaaagctttttcacactcttctgtccactcgaactacttatttcctcgcaggatgttgaagaatgggacacacttgtctattgattttgaaatgagtctgctgagtgcggcgatccgaccagttatgctttgcacttctttggttttttgttggcgagttcatatccaaga

SEQ ID NO: 347962 - DNA, 780 bp, Cannabis indica
tcactgcttcaattaaaccttccagaggtataagccagggggatcctttatctccatatctctttcttctttgtgctgaagggctatcttcccttctctgtgctcatcaatcttctggttctcttaaggggatatctatttctaggagggctccttctatttctcatcttctatttgctgatgatagccttattttttgttctgctgatagggattcttgtagctctcttaggaatatttttcatctttattctatagcttctgggcaagttattaattttgctaaatcttccatattattctctcctaatactccccaagacattagaagccttttctttgctacttttgatctagaggataggccttttattagtaagtacttaggtttgccccaatgtcttgctaggtctaaatatcattcctttgccttccttaaggatagagttctgtctgtacttactaattggtcaggtaaatggttttccaaggctggtaaagagattctccttaaggctgttattcaagcaattccagcttatgctatggcttgtttcaggcttcctgttaaattgtgtaaaggaattgaagctgcgatggctagattctggtggggatcttctggtaataacaataaaatacattggaaatcttggaaaaagctttgtcagtctaaatgtgtaggggggttaggttttcgttctttaattcattttaatcaggctatgcttgcaaagcaggcttggaaaattttaaaacaacctaactctttgttgtgtc

SEQ ID NO: 347963 - DNA, 635 bp, Cannabis indica
taatttaaaatatgttaaatgtcaaaatatttgatcttataattaaataatatataaatattaaataaattaacaaatttctaaatttgaccataatttaaaaaataaaataatcaatttttaaatttaaacctcaaaatatcataaaataataatattctattaaaaataaatattgtaaatttaaaaaatgatatttaagtttaaatatattaaaaaataatattttattttaattttggggtttgaaaactggaaaaatccgaaattgggaaaaaatcccacaaaaatcagatttttgggtgaaaaaatcgttgctgcccaggagggctgcacgtgcagccccaggaggctgctaatgggctcggacgcgcgcgtaggaaggggtgacgccaaggaaactcggcatctgcagcctccctgactgagaaacctcggtcagctgcaggggggacgcgcacgggacgtgtttgaaggaaagttgcacgccgagttcagacagtgggctgttcgagcacgtgcgcgtgcgaatccttcttgtctgaaggtctgtgcgggtggatgcacccatctcgaccttgattcaacccgaaacttcccaaattcatacctttttcaatttttatcgaaattga

SEQ ID NO: 347964 - DNA, 635 bp, Cannabis indica
acgtacgacaagaaggcccttgatgtcggggagttggtcacgacatagcactgtcggaaggccaagctgatcctggagcatcggtcggtggatgactacaatctttccaaagtcatctgcccgaatgtgagagctttggccgtagagaaggtgctccggggtgaaatcattgccatggcggaggacaagtaccagaagtacctcttcaagagggaacaggagctggcttacattaaggcccaggcgatcgccagaagggcccttcgtattggagctccgttggagcggaggacccccaagcctaagcccgtggtcccggtacaaaatattggtgctcctgatgccagcacttcaggttctggtaagtcccctttaacaatacattatgttcctcccgtccgtgagtataccagccttaggcctatagggttcgatgaacgtctccgtaggtttaggatgccttccacccggtgggggaatcatgccaaggagtattatttctcccacttaggccattacttaggtctgtcccggatgggttctggacctccggcgccgattcccttggaccattcaacccatttatcctctagttggttccttcccttggacaactttctcggggatgatgaagc

SEQ ID NO: 347965 - DNA, 553 bp, Cannabis indica
acattcttcaattcttccttatttttgtacaacttgccaagatatatctcccctgaaggcataccactaagagatgttgtatacacattattttcctctatgtcttcccttgtccacataagaggtttgaatttagtagaaacttcgaattcagatacaggagtactattagatggacctggccgactgctactagttcctagtgtttcgagattctcactacgggggtgtcttctttgttgctctacttggttgcttggagttagttccatcctcaggggaggtacatctgtagccacatcatcatccacgcccaaatcaaccacaggatcattattgtaaaagggagcatcgaactcatctgattgatcgaattcgatatccactctctcatcatctatattagtgccaagttgctcattcaaaccaacccccagatcagtttctgggacaaaggtatcaacaacacttctaggggttacatttcggggagtatgcttgtaataaccaaaagtattttgttattatcctctactatgttgttattattatt

SEQ ID NO: 347966 - DNA, 183 bp, Cannabis indica
cggatgtatggaggatacattgggctgggacctatattgatcttggtaaagatattataaagcctactttttggttagggtgatacgtacattttgggaacatgatagtacaattgagtgggagcgctaaacatagatatagaatctatagctttctatcttgacatagatgtgaaatgatat

SEQ ID NO: 347967 - DNA, 787 bp, Cannabis indica
tttgatacttccctttaactttccacacttagctccatatgccaaagtttttttgatgtgcaggccagtctgaagttggcctacacttacccctgggctatgtctgtggcttccaagaatgcggctctgtttgacaccttaagcgcagaggcagaatttgccaagaaggaagttgaagaagccagggcggaagctagagctgttcggtttgagttgggcgaggccaacaagaagctgttcgctgctgagaagaagatctccgtgctgacaaaggatctcgaggctcttatctactgaggtaaacagtcttcacgatgagaggacttctctgcgagcagttcttcttcggatgaaggaggagaatgatgccaaggagggggagctttcgaccgaggtgtacacgttgaaggagaaggtcaatgccttggagacagccagtctcgagctcttctttgattttttgaaggctaatcaccgggccaactttgactacttgggcgaagctaaggacatgtaccttgagtactgagcggcccaagtggcttatggtgggaacgaggcagctgcttcaaccttcggccaagctgcttcaacctccagtcatgctgctgatgcttctcctgttcaaacaatagatctcctgctccaatttgcccagaagaaacgaaccaagagcctgggcctctagatgtttaaactcttctttttatctcttttttctatacatatatcttattcggccttagggccttttctaagacatcatgaccggccaagcggtctttaa

SEQ ID NO: 347968 - DNA, 1158 bp, Cannabis indica
acatctcgcattcttcttgttgataacatggtttctcctgagggtaattccgtcacaataccacatctaagtaggtcacatggcttatctatactatcaattaccctagtagctatataagaatgagtagctccagaatcaaagagaacattacaaggcaatccgtaaatagaaacctgacctgagacaacagtgttgcttgtggccgcttctcctctggtgagagcaaacactcgagcaggagcggcttggttctccttcttttgtccctttgggcaatttttcttcagatggcctggctgcccgcaattgtagcacacccctgacttcatcttacactccccaagatgtttcctattgcatgtggggcaaattgggaattctacataggaccttttcaccccattgttgttattttggaccactgctttcccctttttatcacgatcattaccgtgatttccctcgtgttttctcttattctcttgatttcctccattgtttcttcgggcttcccacttagcagcattctccttctttatatcattttcgagtaactcagcttcgagagctttttctaacacctcagcataaactgtgttggtccccaccatgattttcacatcttttttaatcatggggttcatccccttcaagaactttttgactcgaagggcctcggttggtacgatctcttgtgcaaactttgccagacggtcaaattgcttagcatactctgtgtaacaccctaactaatttaggcatattacgtgatttttaaacgtactgtgcagctcgttgctaatcaacgaggtttatggaaaaatgtgattaattaaaatttttgctttttcattaacttataaaccattttgcaaaaagtcacgggatcccgatttataaaatatttacaaacgttttcactgttcaacttttacatcaaaacacagtcgtctaacgacaattacaaaatctcagccgtactgtcccgaggatcgtacgctccaggcctaaccgccccgacatgtacaatcccataagctcgctcacggtccatcagcaactgccttgcctttacctacacatgcaacgtaaactgtgagtcgacagactcagtaagaaaagcataataatatcatacataaaactgactgccgt

SEQ ID NO: 347969 - DNA, 963 bp, Cannabis indica
tatatatatacttaaacgtttttataataataataatataatattaataataatataataatattaataaaaaactttattatttataattatcttatcatttcttagccattaaaaaatctatatttttagggcgcttagtcaaattccacatactcctaattatctcaatacctatactatcaacttatcatcccgatcgagtctccaaggtcgccaaactagaaaatatttttattacaccggtaactcatatgacatttacatataccatataaatctccataatttataaattatgcttattttatccacttatagcaaatttaaaatttatgttgaaatagattagtaggatcataatcccacatattatctaattaacccataatataattacaaaccttatttatttactattaggcttatcgagatattacaaccatcccctccttattagaatttcgtcctcaaaatttacctgaataatttgcgaatacaactcttgcatctacaactttaattcccaagtcgcttcctcataaaataaatttttttacagttcaacatcatcataactcaaaatacgtgtcagaatagactcatactttctcaatatagaaatgtgaaagatattatgcacctcgtacaatgcgagtggtaaaactaatcgataggctacctggcctatccgctcaattatctaaaaatgatcgatttatctaaggcttaatcttctattctttccaaatctacgcaccgttttcataggtgctacccaaagaaatgctaagtctctcatttgaaatttaatatccatactctttaaatcagcgtagcttttctgtataatcagtaaagcgagtatatatattgaactcactctatggttttataagtttcttggaactttttaggtccatcgtgttattttatcacttgtgttactctagtgaacatgtg

SEQ ID NO: 347970 - DNA, 519 bp, Cannabis indica
tctgcgaatacatgtactgcggtcgaatgggtggagaaattttgtattgtttatgttactttgtttgttttgtattgttatatttgttttgtttgttactttagttacttttaaaatttttgggaatgtccaattacagctgttatgctactgaaatttcggtagaattagaataaattttactaaaaaaacataaaatttaaaggaaaagtacataatctaaatggctagttaattacttgctagttgtaagatattaggtgacataacacatttatataaacttttcaattataaatgacaaaccaaacaaatgaatggattcattttaggaaagtcattccaattctaccaatattctaatcaactaaacactatcctagttagttaattacaacttttataacttatacaacttaataataagaaccaaacttaaacaagaaaatttagtaatatataaattaatatgaattaattgtgagaaacctagttagttacattgtgtaattagtaact

SEQ ID NO: 347971 - DNA, 792 bp, Cannabis indica
tgagcgtaacacgtaggtctatgccacatagacataaataggcgtgtgagcgtaacacgcaggtctgtgtcatacagacaaatatgaaatggcattattatttatgtgatgagttatatatgattaacgatatattttactgtcttgctgggcttggctcacgggtgctctactgtgcaggaaagggtaaatctatctctgatcagccatgagtatgggagttgggcgatgtatgtacatgttcgtgccacactagaccaagcgggttggggtctaccagtgttgaaacttttgtaactctattttgccgcttaggtcggttaaggagaaaagacttgtaatattttgtaaaataatttttgggatcccgaaatatgtaacttttgtttgtaaggttaaaattattacaagtttattttcattccgttttcgtttaaagtttaatttccgcgcttattttaaaaccaattccgtttaggggattaggatttcttaatcatattgggtagcgtgcctaaatcttagggcgttccattgatattcatgctatattgtatcacacgaaatcaagagagaaatagagagaaaatttcgaattccttgtgagagagaagtgcccacacacagcatacagtacctcaatcatagtttggaagactgtgaaggatcacatccaactgaaggacattcgggctcagatcttgattatactctgctacagacaggaatcaagggttaaagatctgagtggaaggagacacttaattctgctgccatcactgtaagatttct

SEQ ID NO: 347972 - DNA, 789 bp, Cannabis indica
gcgttgtctctctttgtttctatacttgttgttttgtcttgttgtctttctccatggcagaacaaatcatctctttagttgcaagacagtgcaatactcatgcacttcaggttatgcaaatccctcatgacccttggattgtggattctggtgcttctgatcatatgacaggtgatagatcactattttcttttctaagtaagtgctctcatgaaaagactgttcgcatagctgatgttccaaagcttgattgcaatttactttctgtaagcaaattgagtagtgatcttaattgtgaagttaagtttgctgctaagttttgtgtttttcaggatgtggaatcggggaagatgattggctatgctgagttcagtaagggcttgtatctgctaaaaatcgacaaccccatgtttaaccatggaaatcgttgttgtttctcccaaggtcaatctctttcctcagtaaatcagtctaataaaatcagtactatcatgttatggcattaccgtctaggtcatccaaattttgtatatcttaaacacttattcccatccctatttgtcaatataaatcctcagtctctcaagtgtgatatttgtcaattttctaagcactctcgccactctttcattccaagaccttatcaaccctctcacccattctcactcattcatggtgatatatggggaccatccaaaattcaaaatatcagtggagcacgttggtttttattactagttgatgatcacagccgcctaagttggacattcctcatgaaagaaaaatctg

SEQ ID NO: 347973 - DNA, 543 bp, Cannabis indica
tgaggctctacacggatcgttgatatcttattctggatgtgccagcgggggatcctgctcagtccattcttcccgagcagatgctccaagtggactccacgtgtcaccattttcgtgatgccacgtcagagtgcaaaatttgggataacagaaagatataacgataagtttaggatatcttatctaagatcaatatcggtcccttccaatgtatactccatacatcggatactggtaaactttgctaatgccctaaataaaactctatttcaatgtaatctttatcatttgaatatcattaaagagacataagtattttcatcacttatttaatgtgtcatttggttcatgttatcatttatatgtttatttgatttataaattcatccaaaccattatcacattaatattctaatttattgtgtcgttagcacagtggaaagtaatcaagattgtgtgattaaatatacattctagatttatcagtacacagtgcaattgagttggagcgctaaacatagatatagaatctatagattctat

SEQ ID NO: 347974 - DNA, 516 bp, Cannabis indica
ccaatccatccccaaaataacatcaaaatcctccaaattcaattctatcagatcaactgataactctcttccttccacaaatattggaagggatcgaacccacctgctggagataactaactccctagtaggcagcaaggttccgaaacctctagaaagcacatcactaggtctattcaacttctcaaatattctacttgaaatataagaatgcgttgcaccagaatcaattagaacagtcaataaagtaccagcaacagaaagctgacctgtcacagtggaaggaccagcatcagcctcaacttgagtcagggcaaacactcgagcaggagcgggtgtatcattcttcttttgctctagtcgtagcagctgtggacaatttctcttcatgtgacccaccaccccacagtggaaacagcccctggcttgacactcgccctggtggcgccttctacatctcagacattcaggaaaagtccgccagttttcgttcccaccaggacggaaaccttggtt

SEQ ID NO: 347975 - DNA, 507 bp, Cannabis indica
aaccatgcaacataaaatgttatttctaatctttattaataagtaaatttgattatattgaaatgagttttatttcaggcacaaaacctaacaaacaacgcataatgcacaacaataatcgaaaccaaaatataagtgtgaaaacaaaatcacaaaaaaattaccaagaaactggtttattcatcaagaaattggcttcttgatgaagaaaagaaactagtttcttggtgatttttccggtaatttttccggcaacaatgtgaattttgacgaatttcttagagtttactgtcagtactgaaaatgtcaccggagtagctgtcgatgtattagtcgtcagagttgctaccaacgccagaaaaaagtcgtcagaatttccattatcgtcgaaaaatcacaggaacaatcactaagaaactggtttcttcatcaagtaactggtttcttcatcaagaaactagtttcttggtaatttttccagcgactatgccaattctgataactttt

SEQ ID NO: 347976 - DNA, 898 bp, Cannabis indica
taaacacaattatgcatctatcctgtagtccttaaacacccgattcattagatccatgaatggcgctggggcattagtgagtccaaaagacatcacagggatttaatagtgtccataccgagtacagaatgcagtttttgggatatcttcctttggaattctcagctgatgatagcctgatcgaagatcgatcatggaaaatactgtcttccccttcagttggtcaaacagatcatcaattcgaggtaaaggatacttgttcttgatggtgagcttgttcagctcccgctaataaatacacattcgcagggtttcgtcttccttctttacaaataataccggagcaccccaaggtgagtagctcaggctaatgaatcccatattcaataattcttgcaatcgtatcttcaattctttgaattctgctggagccattcgatacggtgctttagatactggatccaatctcggaaccaattcaataacaaattcaatctcccgtgtaggtggcaatctcggtaaatcttctagaaagacatccagaaactcgcattccaatcttgtattctcaggccctgatgtcacaggttggctggtatccactgtagtgactatgaatcccagacaacatctgctcatcaagtccttagctttcaatagtgttattcttggtattcgtgcccccgaatcttacccacgaacaccgctgggtagcactatcaggctctaacaccaccatctcacgtttacagtcaatcgtcactccatacttagacaggaaatccatccccaggattatatcaaagtcagatagttgaaactaattcagattggcggtcaactcacaaccgtcaatccagaaagacaaagaccgtatccacctagtggacactataag

SEQ ID NO: 347977 - DNA, 1053 bp, Cannabis indica
gactcatgaggccgagggccgaaatccgttgatagaaaaaactcgcctactacctcattctagcaacaaggaagttgaggccttatttccaagctcatcctgttcgggtatataccgacaacccactacgacaaataccgcaaaagccagatgcttctggacggttactcaagtgggcgatagagttgggtcagtacgaaatcactttccaaccccgaacagcaatcaaaggccaagccttggcagactttgtggtagaatgcacaggcaaaaaagaaagcatacgagaaagcaaccacgagcaagcaccaataccttagccaagccacaatgaggacaaacagacctggaaactacatgtggatgggtcagctacaaatcaactatctggtgcagggactgccctcgtcacgcctgaggagcaacacctacacactgcagtcaagttggaattcaaagcatctaacaacgaggtcgagtacgaagctctaatcgctggactaagactagcccgagagatgaaggccgaacacattgaaatctgcagtgattgacagctggtggtaaatcatgtatctagagaatacaaagcttggggaggatagatgatagcatatctgagcaaaatacatgatcttcttgcacaattcaaaagctacggtctcagacaaattccaagagaagaaaatacaactacagacgcgttagctcgattggcaagcagcaatgtgagggacaaggcaaacctggttcccatccagttcctcaaagaacctagcatcactggcacagaagaaatcaaaatgattgacacatccccaaactggatgacgccaatagcagcctatctcaactctggggaactccaagataaccaaaatgaagctcggaagatgagaaggaaagctgcgcgatatatcatagtagagggagtcatgtacagaagaggattctcaatgccactactcagatgtgttactcaagacacagctgcacaactcctatatgaagttcacgatggactcgtgtggaaatcacgccgccggacagagc

SEQ ID NO: 347978 - DNA, 740 bp, Cannabis indica
ggtaatgcttttgtctttgaatcatgtgttttagagaatgacaaatccatatggattgttgattctggatctactaaccatgtttgttcttcattgcagctgcttgaaacttgggaaaatctgcacccagaagagttgaagcttaaagttggaaatggcgagttagtatcggtcaaagccaaaggaaaagcccgcctcaagtttcaaaagagatttttacttttagaaaatgttttatttattccaaactttagtagaaacttgattagtgtttcatgtttacaaacacatctttataaattgaatttttcgagtactatttgcacaatttctcgtaatggatttcaattatgtgttgctcacatggaacaagggctttatgttttgagaccggatatacaaatcgcactaaacaatgaacttttcaatgttgctagacctagaaaccttaaaagaaaagagattgataatgatgaacaaacttatctatggcatttacgtttaggtcacataggctatgatagacttaataggctaaccaaagacggtccattgaaaaatgtcgtcttaggtgaattacatgtatgcgagtcttgcctagaaggaaaaatgaccaaacgttctttctctgcaaagggaaagcgtgccaaacaaccccttgggttagtacattcagatgtctgtggaccccttaatgttaaagccagaggtggttatgagtattttgtcactttcattga

SEQ ID NO: 347979 - DNA, 720 bp, Cannabis indica
tgatctggacctagactgtaatcaggacccgaacccaaactcagacacggactcgaactccgacccgaactcaaaccaaaactcgaactctaaatcgcaaatggaactagagccgaactaggactaggaccaagaccaggagcaggatctaaacccaaacccgagcctagattaaaaccaagaataagacctaaacccgaaccgagactaggacttgaacccgaaccttgatcgggacccaaacccacacaataaccgggagctggacccagaatgaggatagggacctggggaacagaactaggacatggaccttttacccgacaaagacccaaacttgaacctagtacccagctcgtgacctggcaccaaaaatggaaccagactcggacgcgagattgggatccggatctggacccagagcttagacaaaacctgtagtcggtgtttggatttgggacccagcctgagacccgaaccctaacgaggaccagaacccacacccggacctgaacacagtcccaattccaaaattttacccgaacccgtaccctgtgaccctaaattggaaccaaaaaatgaagttgaccgggactggaactaggacatggactttgaatcataactgaaattggacctagatccaaaaccgtaaccagaccaggacccggactccaaatctaatgtagacccgaattgggagccggacccggatccaaa

SEQ ID NO: 347980 - DNA, 1720 bp, Cannabis indica
ggtaaaatatttccaacaagatggtcatctcgcattcttgtattctgagccggtttgacttttatacttagccttcttattgcaagctgaggtatgtgttactcttctctggtgcctcgctattatcccttagcgacatatgatttctccttaatactctaagtatcagttcatacattgactcctcacctaagactttacagacagctggttacaaatatactctagtacttacacaattaatgagttattccataaaagatacggcactgattcacattccctttttcttgacatgtgtcctccattcgaatttcgggtataacaattgccccttaaaaagttatttttagtaaaaagagctttttaatagttacggagggcatttttgccaaaatcctttcttggaaaggacgcctccttcgattctggcggttgtatggttttgaagatcattatgaatcgcctattcatattttgcacgattccttgcctttagatttctcaatatttagctttcttgctactgaactttgtgtataaaaagactgctcatgcttgtcatttttcacaagtcctctggctctttagtgaaatccattttcagaatggattacttccttcttgtcaaaatgtctcttctgagttcagaagtttttcctttcagactcataatacccagatgcaccaaccattcgccattagttcccacagacttcaaacctcaatcggagccagaaataatggattccagggttgaggagcttccgaccaatccaaaccaggggaatcccgtgacttgccatggccgatcctcataagtgttcccagagggtattaatcttgtgagcgatcacaaagatcctcctcaggctgatgaagaatttcagaggaagattggcatggtttcaggaggatctaggaaggaagttggcgtggtttctatcagagaaaccaaccaacttaagaccctatcttgtgctaagagatctttgcgtcaacgactcttcagtgttgagagatttctagaggctgggaaatagatctcgagttcaggaaatgggatcttctgatgatgaggggaatgaggcctgtgtagagaccaagactctctacgtgtagccggtctttctcaagctatgtgtagtcggtcttttttcgagctacgtgtagacggtcttttacaagctatatgaagatggtctttctcgagttcatcggcttcccctctcataagcttaggagaatgacataatggtttgtccctagtggcatttctgtaaagacaagtttatatcaagccttaggtttttcttagcttaaatgccttgtactgttttttttcgaacttaatacaattgtatttacttgcgttattattcacaatataaacaactatattttgatcgaatatacaacaattttgggtttgtccattgctcgttatcttcttatttaagtagttagtaatctaccaaactttatgaattttgagcaattgtcaattctgtctcgcaattgtagttataatctgccttaagcaaacttaaatatactttaaggattttatcactttgtatatttttaatttggtcgcatgaatagttatattatctatccgttttctaggtttaagtactttatcaaggcgtcatgatgcctcgttcagtactttcctagctcgcgagaaccgttagtattcagttttgtacgcaagtta

SEQ ID NO: 347981 - DNA, 821 bp, Cannabis indica
ctgataggataatctacaatgtagtttacttgaagctaaggcacaagaagcttcaacttcttcttctccttcgtgcaagcctagaaccagctaaccttggggaattttcttaagcaaatccttcttttcaagatgccttttaactccaagttaatctagaggtgttttgaggtaagttccttactctttggattgaaaactttaggttttgagttggttttaatgtagggttttgcatttctgtggctgtagggattagactaagattggggtgtatttagggtaggtctttgagtatgttggagattgttttaagtggtttttatggatgcttgaattgagtttggtttgataaagccaaagttgagttttcttcacttcaacgtgtgattttgattcaatgattgaattgttgtgttttgaagcttgggatatgttgtattatggttattatactgttctgtgaaatttgggaacaattggttaggtttggagcaagttttgggactttgaagacctgaaattttcgagtttctgctgtagtgaattggaattccggatggtacagggctgtaccaacctgaattccagatggtcaatttttcaggaatcgacgatttttcgtattttagccataacttttcactcgagtgtccattttagacattctatataccatttcgaagcttatgaagagctctatagtatgagacatatattagagccaaaatatgcattttattttagggtgttttcaccataagattcggtagaaaaccctaggttatttatgcggggtttagacagtgttttggaataga

SEQ ID NO: 347982 - DNA, 937 bp, Cannabis indica
tactactaacaaaaaaaaaaaaaaaacgtaaattaatcttctattagtaatttcctaataataattttttttattgcgatagagagttctaagggttctaacacaatttgtgtacagtaaatttgtacgcaaattgtgttaaaatcttcataaaattagccttactttatgaaagaaaagagaaacttgactgataatgccaattccaatatagagattagagagagttttagacctatctagacctatctggtattgaatttagcttttagttggtgtgtataataagagtgtaatgggtcaggtcggatctgatccgactatgatcctacctgatccagatcatataaggatctgcttcgccccgtcccgctagatcagatactcggatcgaatcgaatcagatccgacccgacttattcagatctgatctgatccgacccgactctttttttaagagttttaatattaacttataatttcatatccattttaattttaattttgtattagtattatttaatacaatactatgtttagtattgacatgtattaatagattgtgtaaagataatatattttcaataaactctaccccaacactaactacgggtcgggtccgggtctaagtttgggtctgagtttgggtttgggtcccgctctgggtccaggtttgggtctcgggtttgggtcctagtcccgatcctggatccagtcctggtcttgggtcgcgggtcccgagtctcggttcgaatttgggtctgggtctcgggtccaggtccgggtcaaggttcgggtctgggtctcggtcccgatcccggtcttggtcccaatttgggaccgagtccaggtctccaaggcatccaagtcttgaattaagtttttttttaaaaaaataaattgaaatccggtcagatcagattcgatccaaaaaaaa

SEQ ID NO: 347983 - DNA, 1026 bp, Cannabis indica
tgatattgtgaaattcctctctatatgtctactcctctagggatactggattctttacttttcggcaactacttttatgttatttaggaagcaacactagtagttaatttattattggtacaacaccaaaaactgtatagaactttccatagactgaataagtatccttcctgtaattatgacattcagtctcactagtggagttagagattttggaccgttttacacttctccaaaatcattgctccaccaccagagtaatcaccatctcgtcagtaaactttctagcaatgacgcaagtttaacctaatttggtgtagtctaagtgtattgaaacaccacccttatcgactaacacatagttcctcttcttgatcttgattgtctttcaatgttcttttgttggattaatccgatacctactcatttctcccactcaacagcaggtttctggtctaatgcatactagagcatacacaagacctctcactgttgatgcttagggaattctttcatgacttttatcttttctggagtagttgacacttttccttatataaataaaatctatgtctaggagcaaaagacttcctatagatagccattggaagaaaaaatgttctagcatcttactaaagtaagttgcttgcactagagtaaataaattaccaggcataccacaaaccacaggttttgataaaatcaaacctttaataataggttcaggaagttttgttaagtccattaaatagacttattttcaaaatttcccttcttgtccttgtaatagaaaaacttttagttactccatatgaatggtttttaaccatagttctcttggctttgcttcttagttccttattctgactatcaattacttgtttaaactaacaatggatttttaattacaagtgtcttagtcataacagggtgagttccttgaaaccctcccagtatgacaaggtacggtgacttttatctaggaacattaatggtattatcctcatcagttgtatcaagacaaca

SEQ ID NO: 347984 - DNA, 535 bp, Cannabis indica
aggctaggtctgtgttcggttctaggtgtgggtccgggtcctggtcaaggtcctagtcttgttctagggtcctggttcgacgattcttgtttaggttctaattttgggtaccaggtctaggtctgggttcgggtttggctcttcatctgggttctagtcctagtctaagtcctagatctagataatgattactggtctgttctggccccgttactcgaatcccgagtcaaacctggatcactgtcacgggtctcgatcttgttctgattcaggtcccatttttgaatttgggttcgagatcgagactgggtgcggttctaggtcccgaccctggttctgtgtcctagtgtgcttccatgtttgggtctgagtttaggttcgggttcgcgtcccgagtctaggtttgggttgggatccaggtccgactcccaattcaagtctaggtatgatttggagtccacgtccagatccggttacggatcttgatctaggtcgaattttagttattattccaagtccaagtcctagttccagt

SEQ ID NO: 347985 - DNA, 723 bp, Cannabis indica
gaacccaaatatcctctcctgtagatcttgttagtcaaagacttctgttgaaattgttcttcaagcttcttccaaatcttggcaggagtttcttctttatcaaccaatctgataattgcatcaaaaagattgaaaattatgatcccattagctgtttccaacagctcttcttgctgtatctttgaagtgttttctggccattaatagggtcttcaagaaccctaagtagtttctgttgagccaatagggatcttatctttctcctccaaatcctgtaatcaccagatccatcaaaacgatcaatgtcaactttgatattactcatattaataaaatcaaaattaaactgagttgagttttgagaaattgattgaatatcctgaataggatcaatcagtggaatttccacaacttttccactatccacaaaagcttgttgtgattcttcttcttcttccagcctttgtcaatcttcttaattcctttcttgagttgaatgatgctcgaaccagagctctgataccactgtaggatttttttacttgactttccaagaatgcccctacaccaactcaagagttaatcaaaacgacagggacaaaattgtcctagaaaagtcaatatgcagaattaacaaaacgaccaagaaccaaagttgtttatccctgcacgacaaatcgtttaaccaaaacgatttgtcgttcttccttgaataaaaccaag

SEQ ID NO: 347986 - DNA, 673 bp, Cannabis indica
ataacatatcatataactttcgacctataactaggcgcccatacacctatttacaaggcttaacagatgagtaagaacgttctcactagctgtgcaattgaccatgatagcacccactatcagcacaatgatcgcactctgggaccggcactatggtcgtaccgctatgatagcatcaatatcatccaagagtacaattggccatgatatcactcttaacatatactgtgcccgtactgccgaactgacacaattgttgcgccactatgatagcgccaattaatactctctggggtgaatatcactcttaaccagtacgatgcctgtactgccgaaccgacacaatggttgtgccgctatgatatcacccaaaacatatacaatcatacatacaacaggcatatatctcatatcacacgcaatatacagttcttacctgatttccgaactcaagtgtgctggcctacctgaacggaaattctctcgctagatggatgccctaatcaaattaattgtagcacaaatgagtgactcgctaaattactttctggggatttaaatttaaactaaaagttcccctatcgataaataacatgccaataccttaaatctctcaaaaatgggaaaaaactagggttccaaaaactccccaaccgccagaccggttcccaac

SEQ ID NO: 347987 - DNA, 643 bp, Cannabis indica
tcgcttatcaaaaagactcattgtcgttggctaaaagcgaagtcaacacgtatgataggggctcagatacagtatccattgattgaaaagttagttttttgcctcctaatggctttaagaaagttaagaccctacttccaggctcaccccatcaaggtattaacaaaccattcactttggcaactcatacaaaagccggaagcgtgcgaaagactcctcaagtcggccatggagttaagccaattcgacatacactacatactgcgtacttctataaaaggacaagtgctagccgacttcataacagaatgcaacgaagcagaagctattgcaaacgtaccaataccacaaatcctagcatggaaagtgttcgtggacggagcatcaaacggaaatggatccagagctgggatagctatgatatcttcgaacgggctttgactccaggcgactctgcgttttgaattccggtcttctaacaatgaagctgaatatgaagcactgattggtgggctgaaattagcaggaaccgtgggagccacgagagtagaagtctttagcgattcgcaactggtggtaaaccaagtctcgaaagagtataacacgcatggagaaaaaatggttgcgtatgtagcaattgtcc

SEQ ID NO: 347988 - DNA, 807 bp, Cannabis indica
tttcagcctcaccatataaagccatcactgaaaagagcaataggaattaatgaaaaaagtaaacaagtaatttgcttcgattgctcaattttcgaggttctacagtgtataaagagaaaaacaaagaaatagaattgagaaattgattttgctaatgcttaccttatataagtagttttctatttgatgggattagcaatagtggttataaggtgagagtgaatatgactgggttttagattttttttaaaaaataattagcagtccttaaacttttcacttttctgttaaagtatgtttcggttaagaattaatatacatatattttttaataattagtatgtttctgttaaacttttcacttttctgttaaagtatctttcggttaagaattaatatttttaattttaaatattaatacaaaattttattctcttttattgaaaaaaaattaattttaaaatttataatattttatttaattaaaatcaaaaagaaatttatttatatttataaatccatatctaaaaaaataaagaaaaaataattaaaaataataaattatttttaaaaaaataaactcaagcttgttcggttgttcttataaaatttagattttacaaaaattaaaattttattatatatattatttttatatctaaataatttttttataataaataaataattttttaaatcacttaattagttttaaaattttagtttcgtctttaatttttttaattattcaaaatgacttttttttagggtaaaaaaacaaaaaaataacaaaaaggaaaaaaaatt

SEQ ID NO: 347989 - DNA, 670 bp, Cannabis indica
atatgtgatggaatatatgaagaaagtcaacttactagtagatcaggaagcaaaaaactaaatgaaccaccaattatgggacaggataaaaaagttttagggtggtcaagatagcagttaaggtgagaataagaaattgtgaccttatcctgagtgttcaagatgttaaaaggcgccatttgaaccattgtagagccatatcttgttttattgtggggtagtgggtcatttgaaaagaacctacccgtagttaagaaagactgatgttaaaggagaaaagtgtatgggtactgcccaagtgctggttatgactcaaggggacttaggtaccggtccttcgaccgactcaaattagaatttatgggaaatattataattgttattttaatatatattggtattaagcattgtactctcaattggggggaacatcaaaagatctaacggactgtgcctgtgtgttatttagtggtagttcatctgacagggtaaaaaattgacaatatgagttaaatttgttggtaatcctaagtggaatataggacatgactagtaaatggaggtatcaatctaattaattcaaataacaaaatcttttgtttaaaagtgatgtagcgttagtgttatagtgagatttctctcacctagaaactcgagaccagactcctat

SEQ ID NO: 347990 - DNA, 1080 bp, Cannabis indica
ggactttgcgactttgtgttgactatagaaagttgaatcagatgacaattaaaaacaaatatcctctaccgaggattgatgaactatttgatcaacttggtggttcaaagttcttttcaaagattgatttgaggtcaggctaccatcaactgaggattagggaagaagatatccctaagactgctttcaggacacggtatggacactttgagtttttggtaatgccatttgggttaacgaatgcacctgatgcatttatggatcttatgaatagagtctttagacctttcttagataagtctgtggtcgtattcattgatgatatcttggtgtattctaagacaagtgaggatcatgctaaacacttgacaatagtattacagacattgagagatcatcagttatatgctgagaaggataagtgtgaatttaggatgactgaagtcaaattcttgggccatgtaatttctgaagatggtatcaccattgatcctgcaaagatagactctattctactgtggaaaagaccaaagaatgtcactgaagttcgaagttttcttgggttggcaggctactatcgtcactttgtggagaatttctctcggattgctatgcctttgacaaagttaacaagaaaagaagtaaagtttatatgggatgatagttgtgaagaagcttttagagaattgaaggaaagattaacttcgacgcctgttctcactgttcctaatagtgaggaaccatatgtggtattcactgatgcttcaggtactgcattaggaggtgtcctcatgcaaaacggcaaggtagttgtctatgcttctcgacaattaaaaccacatgagaagaattaccctacgcatgacctagaacttactgcgttaatctttgtcttaaaaatttggagatgttatttttatggcgtaaagttcgagttatactcagatcgtaggagcttgaagtatcattttactcaaagggacttgaacttgaggcaaagaagatgggttgagtagatggaggactatgatttcactgtgtagtaccatcctgggaaagctaatgtagtagctgatgcac

SEQ ID NO: 347991 - DNA, 656 bp, Cannabis indica
atccaaattaaaatgactaatctacccctcccttaaagcttaagttataacttaacttaagggtgttttggtcattttaactcaacatttgtacttcccgacattttaacctaatctgatataattccaattcaattcatcttttattgtcgtgacatttctgaccttcctgtcaagttccacagtttcccggcccaaaatattttattcaaattatggtatctacgatacccacatattccaatacaatctccgtaattaataaattacgctttattattcattaattcatatttccctaatcaactcatcattagtttaagtaggattataatcctactctaatacccacataattacatatttaataaaatatgaatacaattctcgggatattacaattatcccctccttatagaaatttcgtcctcgaaatttactcaaacaatccgggatacggctcctgccattgcgacttcaactcccacatcacctactgattattcctcatatgacaagtctgtttgaaattcaatattcttccaactctgcgtatggatcgcttctaccttatacttttgaaacatcgaagtatatattataaacatcagataaaacaaggggtatggctagctaataagctacccgacttaccc

SEQ ID NO: 347992 - DNA, 505 bp, Cannabis indica
cacctacccttgctaagtagaataaactgaagctactttctgttttctacactaaccgagttcttcgactaaagtaagtcgcccatttccaatccaatgaggaaagaactgactacatgtcatcatcaccaagaactcatctagccaagcctaaaacacaactcaagcttatgccaacgaatcaaaatcgttagcatatgtacacattcttgtcagttcaccttttgcacctgaataatatcctctcagctgcttcacaaaaaagtgatgcctgatatgcttcattccaattattcacatatttgtcttccatcaatcccatttctaatatattctatgttctaaaagatgatcttttgaatgaaactatcttgatatgttttccaaataaacaatcattcatcacataggtcaaataagttacctttctttaaaaagaatgatttatcttttgctggagttgcagtccctttttcactcatattactgagccatctatcaaatg

SEQ ID NO: 347993 - DNA, 756 bp, Cannabis indica
tgttcaaaccgtctatttcacactcgtctataataaaaaagtcaagtgtgcaacagacttgttaaatcttatttttaaacgagttaaatttttttaaatttctcaaaattttacagaataacttaaataactacaatgtatacgattataataaaaaaaatcatactaattttttttagatactgaaacaagtaaatgtgtattagtgcatccttttcaagaactgcattgtagatttttttttaaaaaaataatagaatatatacttttatttgtaattatgattttggagagttttgcctcttatttttttttattttattttatcttttttgtaaaaaaaaattcctccaattgaactacattaataattataaatgcgatttcagttatatttcgtttattttttttaaacagattgttgatgtagccacaatctatatatatagttatactagatagatgttacgtgtcaagttacgtatgttaattttattttagtttttagtttttttaatatcataattttaaaattaataatattcaatgtaatgataatcattgaaatttgaaagcataatagtgatataaataaaaataaaaattactattatgcttagtaattaaaaaaaaaattattgttcgttctaaatttatcttcggaattaatgaaaatgctcatttggttaaactatcaaaacattcaaatttaatttaaaataatatttaaaatttaactaattctaaatatcaaaa

SEQ ID NO: 347994 - DNA, 520 bp, Cannabis indica
ggcgttggtgatttgcaacttagttctttttcctcaagtagatccaaggacaatattaaaagttcctggtttcttcttgagtataaaactctcttctatgagtcggtatattcagttcaataggcagcattgctttcgagccaattgctagcgagaaaggagtgtgtctcgtggctgttttctcggtagttctgtaggcccagagcacctgaagtagcttgtcaacgcctctgcctttagcagcgtctaacttcttcttgatagtatcctttagagttttattaatagcttacacttgtccatttgcgtgaggcctggatattgacgagaagattttgataattttattcctctcgtagaattcagtgaacaagtcgccatcaaattgggttccattatcggattctatgttcatgggaattccaaaactacagataatgttctcgaagacaatgtcaaggactttcttgtaggttatggagacgaggggcccagcctccgtccatttagttaagaagtc

SEQ ID NO: 347995 - DNA, 600 bp, Cannabis indica
gaatattaaatgctctaatagaacaaacataggttttgatgtaaaacgagagtattttcatagcctatgtgacaattagattctgtgtttaatgcaagttacatgttaatttatttcagagatgcaagtagataacatatgatttaggatcttaatgatctgagaagagttaatgttacttacttttataatctgtcatcacttaaagggaagaacatacatcaataatttacattaacaattaggtaactgaaataacaagattcatattcataagcattcatccatagttaactacattgttattctgtttttattttactgcctttaatttaattcttgttaaatattattctcaattttatcaaataaaaacatatctagcttagtggtactcaataccaattccatgttggttgacctcacatgtgtgagtaaaactacaatagattacgtacacttacgtatacaataaaaatataacaacattgggtgtgactgctagagagagaaaggaagagtggaaagggtttgattttgagaaagaaatttagttttaggggttttgttagatttagggctgctaatgaaaataaaaat

SEQ ID NO: 347996 - DNA, 706 bp, Cannabis indica
ataaaatgagtttagagagtgaattttttacgtaatttaggcgttaatgaattttagtttacgagttacttgtattaatgttgaatgttacgataatggcagaaagcttagagtatttgacagtatttttgcttaatctttcattctcccatccctttttaccatggaaatagtgctcctatttataggaaaaatcctatgggccttactgatgaagggccctctcctgaagataaccctaaaggtagtatctttaaggttttttttgggataagttgaggaatacctcttttttatattcattaatcaaatataccctcatatttcattaaaatataccctcttttgtgagtgggttgcccaatataccctcaccctccacttaagtctagcacctaattttcattaacttaaggggtataatggggacatcatctataaaaagtgggtatatctcaaaatatagaaataaaggtgataattaaaacatgtaaagtaaagtgggtatacaatgtagttttctcatttctttccttgttttgaggggggttttttttccttgttggccttgaatccaagcccaagttgagtggtaggtgtatgtggacaagacttgttcactgatggtgacatgcgagggtatgagctgcccatgagagcatgagaaaaactgtatgttagagaagtagtggagaaattcccacga

SEQ ID NO: 347997 - DNA, 1369 bp, Cannabis indica
acgatttccataaacctcgttggttatcagcgagctgcacagtacgtttaaaaatcacgtaatacgcctatgctagttagggcgttacagtatagaagaagcttttcaatgccatttttgaggtgtgtcatgaaagaagctaaacttctcatggtttaggtacatcagggctttcgtggaaaccatgcttgggggcaaagcctttcaaagaagatattgagataagggaaatattaaccaacaataatagaagactcaatggactgtgtcaaaaagtgttacaagtgccaaatattctcaaatgaactgaagagtatgtaaaatccctagccatttgttttctggggaatcgacctcataggttcacaacctaaggagaaaggcagagttcaatatgcagtagtggcagtagattaatttaccaaatcggtcgaggtagagcccttagccattattgttgggttctctgccctaaataaaattcatttcaatataatcagatttattaattaataaaagataaaaaatcattttatgttgcatggttcacatgatttatttcatgattatatatctaatgtataaattctattaagtccataacacatatttattcatgattatagtgttgtcaacacagtggaatataatcatgattatatgtttaaaggtttaagtcccatgatttgtcagtacattggcattatactcacatgataattagcgataaggtatacttacaccttggataagtgttatgtccttcacaggacattggcaaagtatgccagtgtcggatgtatagagtatacattggattagatagatgttgatcttagataagatatcataagcttaccgttatacctttctaactcaatatcactgtttgatcttagttatataaatcttaatcgtgagatggttagattcaatcttaattgtattatttatgttcttaaagttatttgttaatgtctagtcggctgaacactacatcttggaaacatgatagtgtaattgagtgggaccgctaataatagatatgaaatctatagcttctataagtatttagaagtgaaacaatgattttcttagagcttggcttaatagagataaatgattgagatctcatttcaataattatattaatttactaaaatatcatttataggtagctaagtgttttatggattaaatacattgaagggtagaccagtaaatttgtcccaatttgatgtagatcatctatagacatcaccctattgaagatcgtataaaaggaaggctatggtctcttcatccaaactaatgcctccaaagctaaaaacctagatgagacctcttccttcttctttcttcttcaatt

SEQ ID NO: 347998 - DNA, 799 bp, Cannabis indica
cgttttagaagttcaatattaggttgttaaatcaacatacttgtgagtagatctaagatcctggtaaaatatatttccaacaatatcaccatggaccttgtggttggattacctagaaccacgggattgcacgattcaatttgggttgaggtagactgattcacaaagtctgcacattttctactagtaaaaataacctttactgtggatcagtatgcaaatttatatgtgaaagagatagtgaggttacatggtgctccaaagtctattatatcagatcgagatctgaagtttacttcaaagttctagcagagtcttcagcgggctatgggtaccaaactaaaattcaatacaactttgcatccttagacaaatggacaatctgaaagaacaatacaaatactggaagacatgttacgagccttaatggattttgaaggctcttggagtaggtacctgccactaatagaattttggtacaataataattacaaaagtacaatagggatggctccctatgagttgttgtatggcaggaagtgcagatctgctattcactgggatgaaatgggagaaagcatatacttaggtccaaaatcagtgcaacagactagtgaagacatagaacagattaaagtcagttggcttgcctctcagagtaggcataagagtgatgcatatctgaaacgtagaaatgtagaatttcatgtaggagatcatgtattccaacggtgtctccaaagaagggagtcagacatttcggcaaaagagccaagttatgccctaggtttacaggacc

SEQ ID NO: 347999 - DNA, 581 bp, Cannabis indica
tatgccctaggtttacaggaccttttgagattctcgagaaggttggactagtggcatatcgtctaactttgcctccagctctttcagtagttcacaatgtgttccatgtctccatgttaggaaagtacgttttagatcctggtcatgtgctaagttatgagaatcttgagctttaaccagacctatcatacgaggaataacatgttcagatcttggaaaaaaaaaaaaaagagataaagttcttcggaacaagaccatggcattggtcaaggtgctctagagaagcagtaaggtggaggaagccacctgggagttagagtctgacatgagggctcagtatccataaatgttcaggttagatttcgaggacgaaatccttttaatgggaggataattgtaaagaccgcttaactttaacttggaaattagcagataattagcattaattattgatatttttatattatgcatgaatatattatgttgtgggtaccatttttagaaatgggcattagagttaaaatttctcaattttagaaattgtattaaactctagaggtattatttaagttatttatgca

SEQ ID NO: 348000 - DNA, 767 bp, Cannabis indica
aaaataatttccaacaacaacgttactgcccgcttacccgttttaatggtccgtgaagtaattgagccaagaatggcggaagaagaccagttggatccccgtgtgggatccgaaaaaattgtagaacccttggaggatgtcgaggaagtgtcggtatgtgacctcgaccccaccaaggtcctccggctaggaaaaagtctgaagccgaaggaaaaagaaaaaaataataaagacgctaaaggctgccacggatgtttttgcgtggtgtcaagaggacatgaccggcataagcccccacgtcataacccacgtccttaacgtcgacccggacataccaccggttcaacagaaaagacgccccctcgactcggtgaaggtagaagccctagagaaagaggtagacaaattactaactagtggcatgatccgggacgtatattacccagagtggctggctaatccggtgctggtaccgaaaccaaacgggacatggcgggtttgtatagatttcaccgatttaaacaaagcctacccaaaggactgttttcctttgccaagaatcgaccagatggtggatgccacctccaaattcaagttattgtccttcatggacgcatacgccgggtacaacgagatcaagatgcacatcgcggatcaagagtgcactagcttcaggaccgataaggcggtatactactacctggtcatgcctttcggactaaagaatgctggtgcaacttatcgcagaatggtgaaccggatgttta

SEQ ID NO: 348001 - DNA, 881 bp, Cannabis indica
attatattgaaatgatttttatttagggcataaaacccaacagggaaatctttcggggagtcatcccgaaaagtgtatgagtgaggacgaaatatgctagaaagattcatattaggatgtagaatcgataatcgttccagagattatcaagaggaatggatgtgttaataagtagatattgacaaggtattgagaggagtatatagtagtggatggggaataagaagtactcaaattgaatatctatcaaaaataaatacttaacttattactaagttaattcagtagatcaacttaggagatctcgtagaaggagtagaaagacataattatgaattatgtactatgggatctgatgattttcaccgagtagtaagggtttgacatacagagttaatatgttgtctatcagtgtagataatttatactataaatgagaatacagaattcatacgaagaaataatctaatcttgtgaaattccaaggttgatatctttggctatgatgttaagaattaaagaaggttattgagaaccatggatgttaaagcgaaaatagtatgatgttttattcttgaaaggtgggtaacctgagaagatcaatggaatattagaaacatgttgtgagcatatttaataaaggatagattatcttagaataatctcttccctgatgaggtttttatttaaaagtgataattaaatgtaccacaggttaggtaccttaataagtgtggtacaagagaaatattagatacctgtttactgaggtaattaggctaggtagcctatcagctagccttaactcctgcgttgtccggagtatataatgtgtttcatgtctccatgctgagaaaatatgtatcagactggacccatat

SEQ ID NO: 348002 - DNA, 633 bp, Cannabis indica
ctaaggttaacacgcgtcatcctttacagtgccagtcggatttcaggtataatagaagcaaaataccattccagactaacaaaaacatttaatgatttttttatcaataatttatgcattttaaatattatattattttcattcctattcccattccctgaacattgaacactgaaccctaaacccaaaacccctaaacccctaaaccctcaaacccttaaaccgtaaaacactaaaccctaaatcctaaacgccaaaacccgaaccccaaaccctaaccccaacaccctaaaccctaacccctgaacacagacccttaggtggcattttattaaagttaatgaaatggaatggatagaaataattttcattccattcttttgtttagtatctttttacagtcttggaatgtaatccaaatagaatgccctttccaccattttggtggaatgaatattctatttcgaaatggaaggaacaacaaatatcatgtaacatgagaaaaaatttaatgatttttatcaaattttttatgcattttaaatttttattttactcaattctcattcccattcccctaaaccctaaaccctgaaccctgaacccctgaacccctcgatcccaaacccctac

SEQ ID NO: 348003 - DNA, 680 bp, Cannabis indica
ttttgttttattttattacttaaaaatgttgttgttttaattatttaaaatttttagttgcattatattataatgatgatatgtttatggagtattaaatttaaataaaaggtgatatttaatttttacgtatttttcttcatatttttatattaatattaaagtttaggtttgtaattggatatcaaattaaaaaatcgatctaatccaattagtaattgaatttaattggatcgaatgataatttttacaatccaattactaattagactggattggatgaggaaaaaaaagttgaattgaataggatactcacccctaatgtgagtattatttaaatagtttgcatttaaaaattattataaatatttagtaataaaaaaagaatgcactaaattaagaaggaaagaaaaacaatgcatttagcaatcttcgaagatcgaaaatgtcaaaatgaagcggagtaacatggggatgagatcttctgacaattctgaatggcaacccacgtgtgatattcacgtgttaattttatggttctcaaaggcactaaagggcagattggcacaattgtgcttgaataacagttaggggtgttcatccgattcaatccgtacttttttggtcaaacaacatccaatccgcactaagtgtggctttcatattttggatccaatcca

SEQ ID NO: 348004 - DNA, 732 bp, Cannabis indica
aacaaaaaatggtgtcttatgtaattattcctaaatatatcatattagtggcatttactttttatgtcatattatcataaccttaataactttctcatatatttgaaaatagcccaaattaaaatacgtaatatgtatagggccgactctataggtataaaatatgagctactacacagggctcaaaaaaataaaaggatccaatatatatttttctttaacgcaaagttttttttatgaattcaactttttaaggaacaaacaacttgtggttagtcactcacataaaaaaaaattattattgctatttaatattattttttcacactttttatattctttttttttttttaagttgtattagaaataataataatttaataaaagtttgaattttaagatatgtttttataaaatataatataatataatatttttctagtggaaagtgattcaaagatagtgatcaacactctcaacggcttgtatccctcgtgggaaattgaaaactactctttattttataaaagaatcgttcattctttcattacttgtttattttgttttacgattagatcgtataattttatggcccataacgtgactaattgggctgttacatagtagttgtattgatgttgttactactcttaaaaacatttgttataagagataattttataaatacacaaaaacaacaaaaaaattacaaaaatacggtttcacagaatt

SEQ ID NO: 348005 - DNA, 986 bp, Cannabis indica
ttactttaaccaatgctctagaaagaacatagcacttatccaaggtggaagtaaactatggtgtagattgtcatattagttaaaccctgtgtactgataaatctaggaatatatattcaatcacataatcttgattactttccactgtgctgacgacacaataaacaagaacatcaatgcgaaaagggtttggatgaatttataaatcaaataaaaaagtaaatgataacatgaaccaaatgacacacaaatgagtgaaaaaatacttctgtttctttattgatatttaaagaataaagattacattgaaatagagttttatttagggcataaaacccaacattatcatcattgcattcaaggttcaaacccgagtccaaagacatataatattgttggcaatattttaccaggatatagatttactaacaagtatattgaattaacatcgtaaatatgaattctctaaaataatgaaaattaataaagaagggtttaagaaaatctttcattgattggagcggaatataatcactcctttcattcaagatctctagcccttgattcctttctgtaacagagcattattcagatctgaatctgaatctgtttctctcttttggatttggttacaaccgtcttactcactatgattgagtacttgacttgctacgtgtgggcatggcactcattcactatgggtttcgaatgtgaagaagaaagaaggaggtttgaaatcactaaggaaggaactctctcatctaatagttgtctgacatagaaaattaagtttgatttgattgaaggcaacaagtggatgagtgagagcatcatgttcaatttatagtgtttcaactagggctgagggctgaattatatggattaaaaaagaataaaaaattaggcataatcacttctaggtcgtacactcaatggaccagtttctagttagaattttgccactttttcaaccatttattcttctt

SEQ ID NO: 348006 - DNA, 945 bp, Cannabis indica
gaatcatgactcttggaagtatttcttgcagaagttaaaggaagcgattggggaggttgaaaacttagtgtttgtatcggataggcatcaaagcattgaacatgctgtcgaggttattttccccgaagcatgccactgtgcatgctacaaacatatttctatgaatgtcacccacaagttcaagactgatgtatgtaacacgcaaatatggttggccgcttacgcatggtcgaagagggaatgtgatagacatttgcaggtgctccgacagatggatcctcccatcgctgcttatgttgacaatataggattagaaaaatgggctcgtccttattgtctaggagacaggtacaacatcatgacaaacaacgctgcagaaagccttaacaacgtgactgaagaattccgggcatatccaataactactctagttgagttcataaggttcacactacaaaattggtttgctaaccgtctcgagaaggcaagtaagtgtgttacccctttggcaactcattttgaggaagatttgataaagcaacacgaggatggtagacgtagaagtgtcctacgtaacggtgcacaattgtttaatgttggaagaggtgctgacggttctgactttgaaaaaggcggagatgtgaacttagttgagagaacatgcacttgcggcatgttccaattgttgaaaattccttgtccccatgcatgtgccgcagcgcttactcagaatgtcagtgtctacgctctgtcatccccctattacacaaaggagacgtggaagaatacttacgatgcaacaattaatgttgtgggcgaggaggatgaatgtgcttccagaacacatgcagaacatgagaatcggtgtaccagtggagaagaaacctgtaggtcgtccaagaaagagcaatgcaggaagactacggactaaccgatttccatcga

SEQ ID NO: 348007 - DNA, 394 bp, Cannabis indica
cagcaatccgcaccagtatgtataaaccttccatttcctcaaagatttcgaaaacagcagcaagatgggaaattcaagaagtttttagatgtgttgaagcagctccatatcaatattcccttggtggaagcattggagcaaatgccgaactatgtcaagttcttaaaagacattttgacgaagaaaaggaggttgggggagtttgaaactgtagctctcaccgaaggatgcagtgccatgttaaaaagtaagattccaccgaagttgaaggatccgggtagttttacaatcccttgttctattgggggacgggatgttggaagagccttatgtgatttgggtgcaagcatcaacctcacgcctatgtcgatctctaagaagttgggtattggtg

SEQ ID NO: 348008 - DNA, 527 bp, Cannabis indica
atttttaaatctctccccccaaactaaatatgacattgtccccaatgtatacaataaaatgcagagagaagagacttacctgagaccctctcagaatgggttgggttgtggcagctgatcatatgggtaaaaccgaggaggttgcgccacataattcgggtcatcaatcccgatgttcattctgttgaagagaaagttaagttgctgaacttgtctctcatcatggatactcctctgcaccatgtagttttgcatgtggttgttctgctgaattatataactgagttgtgcatgagtgtattgcatcgttggatcgataggcccaagaaattgtggaggctgctccttttcttcttcaacactaggctctcattgccgcctacgtccttgcagtgcatcaggtgaaggctggccataaggatgtggctcttttagcctgttgacaaatgtgatgtccatcttgcgaagtggcaacaccgtgttgtcatactccaattggggaaattcatatgccccgcagagttttg

SEQ ID NO: 348009 - DNA, 837 bp, Cannabis indica
tcgcattcgtgcagatgactttgaagaggttgaagtcatccaccgactggttccccgatattagcttggcctttcgacagttctctgtcgtgaccaactccccaacatcgagggccttcttatcatacgtggagaaggtcttggctcgctgaagaaatacttgggtaggcgcggtcctcatgtagggagggatcctaacccactccgtgagaagctccgggcagtccatggcctggaaaccggaggagaagaagaagcggtgacggtattccttcccgtgcttctgatggttgaaagtgactgggccctcattcaaaggatgggcccgaaggccataaaagtcgtctttaaatttatccccctttttggggatggaaacaagttcataaaaatacaaaatctctgccggactgggcgagccccagctttgggcagcataaaaaataaaaaggcctgaaagcaggcgttaggcttggggaattagttggtacgacgcaaggccaacaaaaacgagaaaatttataaaatagtcctggagaggaagcatggccccggacatcaggtgggtctggctccaagctccgaagcccccataattatggttgggtgtctcctcatcacgaggcagccggtgataggtcccgaagaccgaaggcttgatgcctggcaccaccacgatcttctccagctggtgagcgcaggtcaatgtggagtggagctctgctgcctcccacccgttggcacgggacttgtaattttcctgggccacagggccctgcatgacctcctccagggtggccagacatacttcccctttcttggaagatttggaaccgg

SEQ ID NO: 348010 - DNA, 501 bp, Cannabis indica
aactcaaatttaattttctataaatatatatatatcagaattcgaaacccaatgtattataaaaaatacatttttgaaattccacattaaaataaaataaaataaaacttaaaaaataattctaatttatgttgttctaaaattaaataaattaattttcaacataagtataattttcttatttaattaaatatcttaagaaaaatatcaaatatttaagtgtcttgaataaatcaacttaaatgttaattttctatttaattaaatatatttagaaaaataccaaaattctacctagaaaatatctatctatataattcataaactaattacttattttttaattaaaatataatatattttagtctataatataccctacatcacctatgtcgtgggattattatgcaaatttactagtagacctagtgtagaacattgacacgctattgagatggtcatgagatacctcaaaagaaccttgaaccttaaattacatta

SEQ ID NO: 348011 - DNA, 636 bp, Cannabis indica
aagactgttttccactaccaaggatcgatcagctcgtggatgatacaggagggcatgaaatattaagcttcatggatgcttattcaggctacaatcaaatcaaaatgcatccaccagaccaagaacatacaagtttccgaacatatattggtctatattgctacaaagtattgtcgttcagtctaaaaaacgctagagctacataccaaagattgataaacaaaatgtttaaataccagatcagacaaaatctggaagtgtacgtggatgacatgctcgtcaaatctaggaaggctgggggcacatagacgacctggacgaatgcttcaaggtcctcagaaagtaaaatatgaaactaaatccctcaaagtgttcctttagagtcagctcaggaaagtttctgggcttcatcgtcaatgtctgaggaattgaagccaatctagagaagattcaagccctcctggatatgaagtcgccaattaaaaccaaggaagtgcaaagttttactggtcgaatcgccgcactcagcagatttgtttcgaaatcaacagataagtgtgtcccattcttcaatatcttgcgaggaaacaagcagttcaagtggacggaggaatgggaaaaagctttccaagagct

SEQ ID NO: 348012 - DNA, 645 bp, Cannabis indica
taacgaaaatccgcgttaacaataacgacaaaaaaaaaaaaaatccccactcatatcgataatctatcgaaaacacgttgataattaatcaataataactaaattccaagcttttttttaaaacttgaactatcgataacttatcgagaacatattgaaaaactgtcgataaatgtcttccctgaccttaagacatttggatcgagaatgtatcgataaagcatcgagaaaattacgcacacactgaatactcaagaaaactagatctcacgatttcaacgaagaatacatcaaaactaaataaataaaaacaacactacataaatctactgaaaatagagtatacttttataattattttaaaaaaatattttataaaacacttacccattaagtcacgagctctgacctccgaactttgtggtgggacgttttgggtctttgacgggcttccatggatgaccggagaccgaggatgcttccatgacagacatttgggcatccacagaggaccgggcgagttgagggcggcgagatctttgggcggatgagagggatctagaggaagaaatagagggaggaaggtggtggctccttttgaatgggatgatgagagagatgtagagagagaaaaataagtttttt

SEQ ID NO: 348013 - DNA, 567 bp, Cannabis indica
ttgctcggctttcatgacatcaatcaggacctcccagaaaaactggaggtgcttgcttgtggaacctttcatacaggggttccatacgattcactaccaccactagttcggcttggacagcaggggcaggtgccactggaatttccggagcaggcattgcaggagcaccctgctgacgtaaccgttgaatctcattatcctgttcctcaattcgggcttgcattgctgcaaacctattttcccaatttcgggcatcctgagcatcttgggtagcttgggcaacatgtggcgagttaacatcaccccggccacgtgccctgcccctgagacctctacctcggccacggacatttgggggattctgagctccctgaccagcattagatccaaccgaattgccctggcttttggtatttcgcctggcgtccatactaatctgaacagcctgcgtaaccaagagctagcatggtcagattgattaaggagaaacttactaataccgcttaattggaaattaaaacatacgcctattttactatcatgctactaacatgcttcctaacaggc

SEQ ID NO: 348014 - DNA, 578 bp, Cannabis indica
ccatccatcaccttaggtcaactacgcagagtctttgagagtttcaaggaaaaagatgacgtgtacaagttgtggttgccctattggtgacaggtgcactcattgggacagaagagaagaatgtcgttccaccattttctattagaatggctaacgaccttgacttcttctacaagtacccgtggggaagactttgttcaacatggtcaaagaaacttggagtagagactttgtagaaaagaagaagaatatgtccaggaagattgaaaagggaacgtctcaaaagagtcaaagtacttggcctatggctatactacaacattgcagtattgggcttatgagtccatcttggacttgggtgacaaatttgtgataaaaaacttgcatcactttcccagaatggtcgcctaggagagtaatgttgggtttaatgccctaaataaaactcatttcaatataatcagatttacttattaataaagatcagaaataatatttaatgttgcatggttcacatgatttatttcatgattatatatacataatgtatgaattctatttaagtccataacatatga

SEQ ID NO: 348015 - DNA, 686 bp, Cannabis indica
tttagattattcccatatttgttcttgctatttctttatgcaattctgtgctaattatcatcttcttaatgctcgatcaccattatttagtatagagattttaggttttacacttgagagactaatctaaaattgaacttagaatagaatgacataggaaaagtttgagattgagagattctattaattctatgagtttcatttaaaaagaatcatattgctttatgagtgtttaattgattaacattgaatatcgatatcttattagttaatttaagttaaatttatcatttctccagagaggttaatatattatattatgattgttgaaactataaattataggataaattgggataatcgataaattgagattcatagtttgaaataagtaaatcaatgctctaaattttttctttttgattaaaaatcattgtttgtctatttatttttctatttatcttattatgtgattcttaggtatatttgcttggtgttatctaattaaagtataaaattaaatagtataataattagtaaaatttaagaatcaattcctatgggtttgacaacctttattattaaaactttactataacaacgttgtacggttgcagcaaaaattatgtatcaagtttttggcgccattgttagggattgaaaattcttaaattattgctaatatt

SEQ ID NO: 348016 - DNA, 888 bp, Cannabis indica
aaattattaatttttttcttatcatacattataatggtctttttttccattttaaaatggaatagtcattccaccaaaactcattccattagaatgacattctaacactttaatatgcaaccaaataaatgaatggaatgaagattgtttccttttctttccatcttatttcattaccttcaaccaaatgccacattaatgtttctttgcgttttattaaatgatcagcaaattgagtagcacatgtcgttgctagacactttcgatttctttctggttgcagcatttttgaacataatgtttaggctgatctacaagccttattgtattcagaatgctaatatgtcaataaaattgatattttattttctaaataaaaaaaaactcaccaaaactctatttttttttattttatctcaagtttttacattacactatacatcagcttctttattttttctttatattcatttaaatatcactatatatataaaatacacaataacaaaatatgaataaaatattatgttaattccatttttggcatatttaattgataaaaatattttattatttattgtatatttcggctggtgtgtttaatttagttaccatattttgtgtatttaaatttggaagaaaagttgtctagctttcctatttatggaaattgaggtaaaaatggtaagtttgattacacaatttattcttatctaaccaactatatattctaatcttgtgtgagtttcccattttcttaaatcagatttcttgaagagaaaaccggagctaaacttttctataaaaggaaagttgtacttactgcccacgattctgtaggtacagaaatagaaattcctaggctgattgaagaattattttagggaa

SEQ ID NO: 348017 - DNA, 787 bp, Cannabis indica
gttaacaccccacatgaggaagcatcccatcagtctggaaaagagcccatgggctccagaagatctacaaatccgcagtccagaaggaccacccattccaagagggctcaacctgagggtggccccagtgctcagatcacacgttcctggagaactcaacctgatgtcgatcctagtacgcggacaacgcgctcgaggagaactcagcgtgggaatggtcaaaaccccggggtgagggataaagagctcaatcatggaggtacccaatctgtggaagaaagaacttatgaaatggaaagtcgtcccctgagatgccgtttggaagaggcgtagcgtagaaacgctgagttagaacatgaagtagcctcggccagggcggcacaagggacgaacgctcaaaatcaacctgaacctagagtgagaagactatgaggcagacctcgtggttcactagctaggagacaggaaaagacgcgggaagaacaactcggggaaaatgagacaccccctgagaatcaggatgaacagccaaatgggagacaacatgaaaatgatgaacgagaaatccctcatgaaaatgaggaggatcttgggactcaaacggggggaatggaggtcacctgctagaaatcaccaatgttctttccaaacccatagagcgaggacttattggaaattattttaccaggatcttagatctactcacaagtatgttgattaacaccctaaatatgaactttcgaaaacgatgaaataaacacatataaattttaggaaaccttacatt

SEQ ID NO: 348018 - DNA, 728 bp, Cannabis indica
tagtagaggttcacactagtaggggttcacaaaagggcagcaatcatcatcacaaaggaaggtcaaattcaaagggttctaaataccctaatgggtgttatcattgtggaaagctagggcatttcaagagagaatggtacttttacaagagaagcaatgggaaacaaaattcagatcatcaagaggaatcaaacaaatcaaacaagactaagaatgactatcaaaatgcaaacctaagtgatggttatgatagtggagatgtctatgtggctgcatcatcttttaaagatgattggattattgattcgggttgcacttttcacatgactaacaataagtcttattttttttattacaggaaatctagaggaggcaaaatcattcatgggaatgaccaaacatgcaacattgaaggttcaggttctattaactttaaaatgtttgatggcattattagaaccttaactaatcttagatatgttcctaatttatctagaaacttaatttctattagtgtacttgatgatcttggtgttgttagcaaaattgaggcaggtacaatcaaattgacaaaggggtcaatgactatcatcaaagaacacaaaaatggtggtctatactacttgcaaggaagccccgtagcttgctgtcacaacaccaaggagcatgttataaaagacactaaagttgtcctatggcataaaaggttgggacacattagtgaaaga

SEQ ID NO: 348019 - DNA, 1124 bp, Cannabis indica
ggccttatttccaagctcatcctgttcgggtatacactgaccagccattacgccaaatactgcaaaagcagatgcctctggacggctacttaagtgggcggtagagttgggccagtatgaaatcacatttaaaccccgaacagcaatcaaaggccaagccttagcagactttgtggtagaatgcacaggcaagaaagaaagcataccagaaagcaaccccgagccggtacaaacactacagccaaataacaatggagataagccgacctagaaactacatgtagatgggttggctacagatcaactatctggtgcaggaattgcccttgtcacgcctgggggcaacacctgcacttcgtaaccaagtttggatccaaagcatctaacaacgaagccgagtacgaagctctaatttctgggttaagactagcccaggagatgaaggtcgaacatattgaaacctggagtgattcacagctggtggtaaatcatgtctccggagaatacgaggctcggggagaaaagatgatagcatatctaagcaaaatatatgatctgctcgcacaattcaaaagctacggtctcagaaaaattctaagagaagaaaatacaactgcagacgtgttagctcgatgggcaagcagcaatataagtgacaaggcgaacttggttactgtccagttcctcgaagagcctagcaacagtggcacggaagaaatcgaaatgattgatacttccccaaactggatgacaccaatagcagcctacctcgactctgggaaactcccagataatcggaatgaagctcggaaaatgagaaggaaagcttcacggtatatatcatagtagagggaattatgtacagaagaggattcttgatgccactaatcagatgtgttactcaagaagaagttgcacggctcctatctgaagttcacgattgattctgtggaaatcatgccaccgggcaaagcttatccaagaaaattctaaggcaaggttacttctggccaacgatgattgaagattcaaaagcctatgttaagaagtgtgacaaatgccagagattttcaaagataccacgagctccacccaacgagttaacacagatgcaaagtccgtgg

SEQ ID NO: 348020 - DNA, 513 bp, Cannabis indica
tatgatttatatgaaaaattatttatagatatctaaatagttattatgctgttattttagaattcagaatgcattttttatgtcatatagtgaaatttcataattttgcatttccggtgcccgataacatggaactcgttgtttggctcagtagaatcacatcttagcatgtcagtatattgggatagtttattagacattaggaatgtcgggattggtcgggaattcagagttttcccaaaataccctttttagtgcttttaactctttagtatgggcaaggcattttggtctttttgccttatgagttttgtctttagtgaagatttaatatttagttttaaatctgattttctaagtttaatttggctgaaataaggaaatgaaattattttgtcactttttacaaaactagaaaaaaatcaagaagagcaaaaaaattttttctctcaaactctctctatttcggcccctctttgagcagcaagattcttggtgtttctttggtatttc

SEQ ID NO: 348021 - DNA, 772 bp, Cannabis indica
gtaatgggttttatttagggcacaaaacccaacaacctcaacactagggaactcccacataattagaatgaagctcgaaagatgagaaggaaggatacacggtatgtcatggtagagggaattatgtaaaaaagaagattctctatgtcgttgctcatatgcgttactcaagaagaagttgcacgactcctatatgaggtgcatgacggattctgtggaaatcatgtagtcaggtagagtttgtctaagaaaattctaaggcaaggttatttctggccgaaaatgattgaagattcaaaggcctatgttaagaaatgtgacaaatgccggagattttcaaagatacctcgagctccgcccaacgagttaactcagatacaaagtctgtggcccttttcaatttggggaattgacctgatcggacaattacccaaagacaaaggaggagtgcagtatgcagtggtagcgttggattacttcacaaagtggacggaagctgaaccactcgcaactattacgtcaaagaaagttcaagactttattttgaagaacataatctgccagttcggattgccgtacaaaatagtttcggataatgggaagcagttcgacagccaatccttcactgagttttgtgcgaaccatggtatcatcaaaagttcctctgcagtggcacatcctcaagcgaatggtcaagctgaagcagtcatcaagaccttgaaggatacactaaagaaaagactcaaagatgccaaaggaaattggctggaag

SEQ ID NO: 348022 - DNA, 887 bp, Cannabis indica
ccttcgacaaaaccttctcctcttatatctattttcttcgattttcaatccaaaacttagcgatctaagctccggtagtagcaggatagcaaatctttgaaaagggaaagcttaaggtatggtttaatttcgttttaagtttaaaaacaattggtttcgtataggggttttgtgaattagaatagttatgaaggttctgaccttatagaattgttctcgggtagtcatgggactagttccgatattttcttgttgaatttgaagtgattttgagttagaaatcgagtttggaactttttaaagcttagtccgaacgttaatggcgtttttcatttaaggggtcgatttttatttctgttacgtaaggatggtaatatttatggtatatatgcgccctgtgaagtttggagtgatttggataagttttggtagtgtttcggtgagtgcgaaaattgggattttcgagttttatagtttttagaaatttctaagagatcagaaatcgtatttttgtcataacttttgactcgggtgtccgttttggacattctatataccgtttcgaagcttgcgacgagctctacaatatggtgtatgttttagagacaaaatataagttttattttagtgtatttatagcacagagtttggtagaaaaccctagattgtcttatgtgaatgttaagcagtgttttaggataaatatttatcggtttaccgttattgtgacatagggccgagatcatcggggatagttctccacttggattggccgaaatgtatgaacctggattaaaggtaagagaagtatattgtactgcatagtacgttatatgtaatacaattattattgcaatgaattgattactattgagatatagttaata

SEQ ID NO: 348023 - DNA, 724 bp, Cannabis indica
tgagtatacgtgtcctctaaacaggggtctggtctcgagtttttaagtgagagaaatctcactataacacacctattcctctggatcattcagcttatctatcttccagctggtttctcccctcggacaactttcttggggatgacgaagccagtattatagtataagactttgctagggctaaattagatagttagggtaggactagttttacttctatatttttgtgtgcatattctcacgtggtcacttctgacacttgatttgtttgtctttttgaagcagccaggccaatggaggagctcttgctgattcttgcctagacctatagtccagactctgctcttcctccgacgcctgatcagatggtgaccctggggagatcttcttctagcatccccttaggccaaatcgtcttgattgacgaagacggggaggtcgaggaggaagaggaaggcaagattctggcccccttggaccgaaagcacaagggcaaaatggtggaggcggagtcttctaaaaagccctagagagttgatactccgaccgtcagctccgactcggggattccatctgaagcagaggaatactctatgcctcccgacatcgtccttacgcccattcccgcaaatgaggagagacagcaactccagattgccaagcataattatgctatggctgagtatacgaaggggaacactgaggtggaggctttgaaaaaggt

SEQ ID NO: 348024 - DNA, 1223 bp, Cannabis indica
tcattgttatttagtactttatgatatacatgatgtttgtgcttcacctgcttttcttgttgagtctttgtgactcacgagtgctttattataatgcctcaatgcttaggcacgctacattgattttttaattacagtgcacacctttgctaatcaaagggttttctcgaatatcatgacaaatttaaacttttgatttaactttaagcttttataaatatatattatacaaaaaagttgggatccttcttttaaaacttatatttattttcaaaataaaattttcaaacatgtcgcacagcgactacaaaatgaatcccaagtcatcccgagagcaaactctccaggttgcaccattttgacatgtgcaatcatccccgagctttgaactcactgttgttcaaccttactctttcctttacttacacataaaaataatatttgtgagtcaacagactaagtaagaaaagtatataacatagaatatattactgacttgtatttaggcgcccatacacctatccacaaggctaaatagatgatcaagaacgttcttaataaaaagtatgacatctgtaccacatgcactaagtactcgtctcgtactagtgttggtacggctgaaccgtaccccgagtactagtgagtgttgtaccacatgcactacgtacttttaaccatactaatgttggcaacaccggatcgtaccctttgaacatgatatgctatactaatgcactcactaccactactatactagtgttagtagcatacaaatcatacaacgcaacatgcaatttacatacatacacacatatatatatatatacatattctatgctagtcttaccttgtttctgaattcaagtgtgccggttgatctgaatagaaaatcacgcattgaatggagaccctatctcacaatcacataaatgggtaaacaacttactcaaaccttctccaatcaataaatagaatggcaataccctaaatatcgagaaaacatcaaaactaaggctctagaagcttgccaaaccagtaatttgaatttccaaatggcaagctggttcttagggccatgcttggagaaatagttaaccgactctctggaaaaaaccctaaaaacttcaaatctcattcaaatttctcccaaattcaaccaaactttccagaatacctataataacaccaataaactatttccaagcaataatagaagcaaa

SEQ ID NO: 348025 - DNA, 589 bp, Cannabis indica
tctgaccttaaaatttttaaaaataaaataaaataatcaaatttaaaaataagataaaaaattaagcaaaaaagatagatatttacctaatttcaagttcaaattacactaatatcacaaattaattttaaaaaatccaattaatttaattctgataattagaattgaaataggaatagtaaatatctaaatacaaaaactacacaaaaaatcggaagttaattccatgaaatagcatgaaaaatcgaagaaaacgaaaaaatttgtaagtagtaattgcatactgttcgcgcgcgctcgtgagggtgtctggccgtggtttctcggcgctggaggttggaagcagccattccgcacgcgcaccaggttgattttagacaaggagcccatgtctgaccgagaaaactcagacacaagcctatccgaagcccacgcgcctgaggaatgaggctatctgctcgcgtgtgtggggtgatgccaccctcatatttttcgattttcaaaaaattcatatctaattcaaataaaatcgaaattgagttctgttaaaaaatgaattgcttaattttttccaaactatctaataaaa

SEQ ID NO: 348026 - DNA, 1009 bp, Cannabis indica
agttgaatgagctcattctcttgatgagctcgctcggtctggccagcaccagatttcttcttcttcctcgtcacggacttaggagtaaagtccttgggatagagcccgtacctcacaaagttatcttcagaggttaactggataatattccagtcttcccccggaagccgggcaagtttttgagctctatccctaagagcaagagtgaggggagggcggtgatatgtcgaactctgctagaactgagtgcgagttatgcccgtgccatccaccatgaagtactcatcagcaaagcacccaatctttctgatggccatatcgtccgtgcccgtcaaccaattgaagcccggttgagagaagtagaagtaccccgacctgcctttctgaggggtggacttcaaatcaaagtaccaagcaacctcgtggggagagggcataccccatttctgggaagcatagaggacgaagagggcagataaatacttaatgcccttaagagtgagctgggccgggcgaaggccgaagaagtccgccacatccttgaagtattgatgcaaaggcatcaacgctccttgctaaccatggacacccgaccaggcgcacatccccttttcagggtttgtggcgcgattgttgtgggcaggaatgtagcagtccagctcgccctggtatctgccctggtcaagagttcgaaggcgcgcctccgtaatcttggacgaagggcttacccacctggcgcccaaggcaccctgccctctatgaggaaccgccacagcaagctcctcactgatgtagtccacgccctcaacaaggacgtctctgtcagcattgactggctcctcagcctcgttgtattggaattattttactaggatcttagatctactcacaagtatgttgattaacaacctaaatatgaacttctaaaacgaatataaataaacacatataaagtatgagaaatcttacattgaatgcagcagaataatatgtcttcttccactcagat

SEQ ID NO: 348027 - DNA, 1386 bp, Cannabis indica
tacttgtgagtaaatctaagatcctggtaaaataatttctacagccgaaaatcccaagggcaggagggcctaccataacattcaacgacgaagatgctgtcaaaatcagatttccacacaacgacccgttggtcatggaggtccagatagccattatgatggtagccagaactatgatagataatggagcctcttccaacgtcttattcaagaccacatatgaaaagatggggctccatctcaaagatctaatcccctgtcttcggcccgtatatggtttctcaagccaaggagtggcacctctagggaaaatttgcctacccctcactgttgggcaagctctgacgagcataactataatggcacaattcctggtattagacgttccatcagcctttaacgtcatgataggctgactagtgttatatgacttaaaagttgttatgtcgatattccattcatgcctaaagtttcgaacaaagtatggggtagggtgtctaaggggaaaccagtagattgctggagaatgttataaccttgtcgtggccaaggctaaaaaggaagtatcctctagccaaagcatagaaaagggaaaaaatattcctaagtaggaatgttcccaaggcggggatgaaggtgtggattctcaacttggggacccaagcagcaatgttggacctgtggaagaacgggaagagatcgagatcgatccaaatatcccggtcgggaaactaaaaattggaaaaggttcgttgctcgaagtaaaatcagcgttgataaaatttctgtgagcaaatctggaagttttttcctggtcacatgaggatattgtcggaattgatccttcttataatttcacatgtcctaaatattgatcctaacttccggctagttcaacaaaagcgaaggctattggataaagagcgagcactaacgctgaaggaagaggtagaaaagctacgcaataataatttcatgattgaagctttctacccggcttgggttgctaatcctgtactagtacccaagccaaacaaaaaatggagagtttgtattgattttacacacctcaataaagcatacccaaaggactgttttccactaccaagaatcgatcagcttgtggacgcaacagtggggtacaatcaaattaaattgcatccaccagaccaagaacatacaagtttcagaacagatatgggtctatattgctacaaagtcatgccatttggtctcaaaaatgctggagccacataccaaagattggtaaataagatttttaaagactagatccggaaaaacatggaagtatatgtggatgacatgctcgtcaaatccaggaaggctggggggcacatagatcacctggacgaatgcttcaaagtc

SEQ ID NO: 348028 - DNA, 1134 bp, Cannabis indica
caggcacgagtgaaatattgatgtgacagcttttaagtcatacaaggctggtcggccaagcattacgttaaaggctgaaggaacatccaatattaagaattgtgccatgatagttatgctcgtcggagcttgtacaacagtaaggggtagccagatttgtcctagaggtgcaactccttgaccggagaaaccatagacaggctggaggcatggagttagatccttgagttggagtcccatcttttcgtaagcagccttgaacaaaatgtttgaagaagctccattatcgatcatggttctggccaccattttattggcaatctggacatccacgaccagcgggtcgttgtgcgaaaatctaattttgagagcgtcttcatcgttgaaagttatggttggctctcttgctcgtggaactttaggctttcgttcttccacggctaggatgacttcttcttgctcatgctgtgctgtcagggcatacctctcctgagctttgcccaaatctctatcaatgtacgggcctccaataattacttgtaagtgtccatctactggtggaggtagaaaatcttgcttgttctgaccttggttggtcttgacatacttctacaagtgaggattgtttttctttattagaaattcaatttcccgcttcagattataacattcgttagtgtcgtggccatagtctccgtggaaccaacaaaacttcgtcatgtcccttttgttggtatgtttcttcatgggcccgggcttcttatacgagatcaacgactgagttgccatatttagactctctatatcttcagtcagaatagtgaatgcagtgtatttggcatgatactccggggtagtctgtccagatttatcggtgaactttcctttcttcccgtttccttgcttgtggttgttgcttgaacgcttgccacttgagcttgaattattggaatagttgggaagttgggcggatattccagtggaaggagccttcattttgcccggctttttttcaccttctgctcgtagaatggcttcttcgagcttgatgaagccttcggctcggtcaaggaaatcactcattgagtctacaggcccgttcttccttatatctttccaaagttcaccgaggac

SEQ ID NO: 348029 - DNA, 726 bp, Cannabis indica
gcgtcgatataagatgcggctaaaccctctgaactgggtctttggagtttgttccgggaaattccttagattcatggtaaaccagcgaggaatagaagccaaccccgcgaagatcagggcgttggtggaaatgccatcaccaactaagccaaaataggtccaaagcctcacaggtaaggtcactgccttaaatcgctttatatcgcgatcttctgataagtgcaaagagttttttcagattttaaaaggcaataagaagttccaatggaccgaaaaatgagaggaggcctttaaagccttaaaaacgcattaggggcaaccttcaatcttatcaaagcccatgaccggcgaagtcctatccatctatttagaagtgttagaatacacgattaattctgtactaatacgcgaggatcaagaacgaaaatacccggtgtattatgtcagtaaacgattactggatgctgagacccgctatccccaaatggaaaaactagcgttcgccttggtaatatcgttgagaaaattgcgaccttatttctaggctcacagtatcaaggtcttgacaaactaccccttgaggaaagtttaagcaaaaccagagacatcagggaggttgttgaaatgggcgatggagttaagccaattcgacatcaagtataaaccaagaactgcgatcaaggggcaagccttggcagattttatccttgaattccccagcaccga

SEQ ID NO: 348030 - DNA, 576 bp, Cannabis indica
tgttgctggtaagtagtttatctttatcatcatcaccattaattttaattattttttaacgtatggtgttaaattattttttacgtgttacgtgtacgttttgtaaatttttttttttatcattttttaattattattaactagaatattctacaactagaaatggtaggattaccaaccaagagtcgatacgacacgtgtctcttatggcattaaacacaacaatataaaacgtaaattacaattaaaaatttaatgacgtgaacagataattattaaactgaaaattttgaaaactaacagttactgtatgtgtggtatcgaggaaaggaaagtaaatagaatagatttttttggaagatgtcatagaaatgacagtatattttcttaatagttgtttggtatgtaagagagaaagaaattaaatgagttatacattcctatatttacctatgtatacaaatacaattataaaacttttcctttctcttttcttcccatttttagagaggaagaaatttggtaggttccacttaaaaaatttcctcttattattattattattagtagtattat

SEQ ID NO: 348031 - DNA, 572 bp, Cannabis indica
tttttttttttttttgttaatgacaaagtataaatacaaggcgagtacaaactataaaatgcgagtactactgataatagaattttaagctttcgccattccaagcccatggaatcgcagtaccatcgagttctgcgagtcggtacgtagcgtcaccaatcttttctgcgatgagatatggtccctccaaattatccccgaagaccccatgtgttgggttcttggtatttggcaatactcgacgaaggactaagtctcctgttcgcaggactcttgccttgaccttggaattgaaatatcttgcggttcatcgctggcaagccgcatttttcaagtatgcctgatcgcgcttttcttccataaggtcgaggtagagcgactgtttttcttcgttttgtgaaatgttgaaaacgtctctttgtaaggaacctgccccaatctcgactggtaccatggcctcgcatccataggaaagcgagaaaggagtctcaccagtcgtggatcgaggagttgtgttgtatgaccatagaacttgcggaagctcatctagccatgtccccttacgttcttcg

SEQ ID NO: 348032 - DNA, 1194 bp, Cannabis indica
agtgtgcatgttagttaagcctgttagattacattagatatgtatgttggctgttgtactatccgacagtatcacatcagtacgtctagagtatgactagcgtaacaagtataggctgatattatggttgatagtaccgtactacttgacagtatcacatcagcatgattggagtatgactagcgtactgagtataggctaatatgatggtcaatagtactgttatacgaacattctagactcagcaccgtgtgggtcacggggataggattatgattgggggtatgggcatcggatcataatccgggttattgctatgttattgtttatgcttttcttactgagtatgttgactcacagttgctatttccatgtgtaggtaagggccaggctaaggctgaggagccgtgagagcgagcaaatgaatattgtacatgtcagggcggttaggcctagagcgtacgatctttgggacatcagggcttttgctgtttggtcgctaggcgacaaatcttttgtatatgaatagcaaaatttagtaaatgtattttgtaaacgggatcccgggattatataaatgtattactttatgttttaaattaaagaagcaaattttaattattcacgattttcaataacctcgttgattagcaacgagctgcacaatacgttaaaaatcacgctaacatgcctatattagttagggtgttacaatttggtatcagagccgccaggttatcttcggaagatcgtcacgacatgtacaatcatcatcaactctcggtcaacaactcttatttttctgtgttgtttgactttggggccactcattcctatgtggcggccataattttttttaatgaattggatagactacatgatagttacgaaacagggtttggaaccctactgcctggtagagagttagtcatctctaaaaggtggattaggtctatgccgattagaatagaggatagagagttaagtgttgacttaatagaaatgaatttagcagattttgatattatactgggaatggatttcttgtccaagtactcagccagtattgattgtaagaggaagatggtaattgtaacgcccttacttacgtaaaataagatgccataaataaattggcgttaagatactaatgttgcctttattaaaaaataatacttttcaaaacatgggtac

SEQ ID NO: 348033 - DNA, 561 bp, Cannabis indica
agaacatcatccatgcttacaagtatgaaacatttggccttatttttttggattgaatctaggcatcatatttatcctgaatattttttggggcattggcagcgagctccttaggacgctcctcagttaggaaaaaattgtgattctcacaaaccaacattaaattcagattcaatttccattaataaaagttatcaccattcatttttttcaagtgctagtaaagtagtaaggggatttggcatatagacatgacagaaataaataaagtaataacataatgattatgcatgaataataaatatcattttagaattactgtaaacgtgatgcatgagcgcatacaagtaaaatacataaaaaaatttaagttattccacgataaaattctttgacaattgatcgttgccttagggtcggtatcgagtcaatttcattgagcctatgagacaattctcatctttattattttaaaacttaaatatctcgtattttcctatcaaaatataatgtaccgctttttttaccaagttaacaactaaccactatgaagcttagttg

SEQ ID NO: 348034 - DNA, 888 bp, Cannabis indica
tcccactacgacaaggtactgtgaatttctatctaagaacactaatggtattgacctcatcggttgtactaagacaatagagccagtgggaccatcttatatagaataagatgataaaacacttttgtaattaagaataaaaaatatctcctctactttgctactttgattttagatttagtcattttcttagaaaattagtatttgttggaacaaacactttcttattaaccataagatggtccacccttaatcactttagaatagctatcaaatatgcaaaccctagttaacagttctagctttacttaaggtcatgatcaggacatccatgaatctagtaatgattttcaccaagtacacaaccattctatcaatctaaaattttcctatcactagggtatttccctagaaggacttaggcaactactagtaactaatcatagaccttatactatcatcaatatgtaaatcaaatttttggggaggtaagtttgaatacaatttgaaaattcaacttaatgatctttgaactgcatatctaccaaatatttctccacccctatcagttcgcaagatctttaaccacataccttaatggttttccaccatgctagaaattcatgaaatttctcaaatatttcaaatttatttacgtaaggtaaaatctagaatgatcgttttaagaatgtaatggtaactcatatccacccctgaatgtacattcatatttgaatataaatgctcttattttcaagtggatataggcatgttttctctttgtagagaatgatattgtcaaaaccactatgaacaagatgcaaatgccataaatatataagaatgttgttatggtcttttgatgacttaggtctagttactataaag

SEQ ID NO: 348035 - DNA, 493 bp, Cannabis indica
agttctcataaagagcaatggacaatggaaaaaagaacataattatttcaagagaatgtggcaatactcgaaaatacttgaaaacaacacagcaacaacagaatcatacacattggaacaccaattagaagaaggaggagagtcagaaacaagagaatttgaaaacgaaaaatttgacatagttgactatgagaacctggttgctgaaaaaatggtagaaaaacttgaaaacaacagtaaaaaactagatccagaattcgacatcaacaacgcgaatctaataacagacaaacatcacccagaagtagaaaaaagtcaagcatacaagaacaaggaaactctgaagaatttcctcagctactacgcacaaccaaagcggaggaaaaacacccactggaggaaggagtatagccaatattacttcaatcaaagtttcttaacccatgatatgtataaaagttgtataattgtaaacatctatttttaaaacaaa

SEQ ID NO: 348036 - DNA, 530 bp, Cannabis indica
gacctagatgaatgcttcaaaatcctaataaaataaaacatgaaactcaatcccttaaagtgcttctttagagtcagctcaggtaagtttcttggttttatgattaattctcggggtatcgaagccaatccagagaaaattcaagcccttctggatatgaaaatgccaacaaaaactaaaaaagtccaaagcttaaccggtcggatagccgcactcagtggtttagtttcaaaatcaacagaaaagtgtgttcctttcttcaacatcctctaaggtaacaagaaattttaatggacagaagaatgcaaaaacgccttttaacaattaaaaagacaacttacaaagcctcccgtactctcaaaacccctggacggagaagaattcggaatatacttagctattacagaatacactgtaagtgtcgtgctgattagagaagaaaagaacatccaacatctactctactatataagcgaaagactcgttgaagtcgaaggacgatatccgttgatagaaaagcttacttactg

SEQ ID NO: 348037 - DNA, 516 bp, Cannabis indica
agattctaattctttgtttcatttctcaattttatgctaaacaaaagaaattacctttcatttctgttgcctcaaatttttcccaaaatatgtggccacggctgcgtatgacacgtgaataaaaaggaacacttcatgcgagaactagctgagtcatacatatacagaaaagtgtgctccagggagtgagcccctagagaagtacataaagtatgtccttaccctccgggagctagaaatataacaaaccatcttcgggtataaggagaatctgttcgaacagtcacttcatatttaatgcagcatgcggaaaacgtcttggaacatccataagataacatgtcagatagcgtaagcctcatttacgacgattacacgataatcaaaggggctagtgatggctctattatgaagaatcacatcaatcaaggaaggataaatattagtctcacctaatccctatgatacctgttaggttatttttagtattaattttagattaagtttagtatattt

SEQ ID NO: 348038 - DNA, 771 bp, Cannabis indica
tttgttacatgttttgtgtatttgtctccctacattatatgtattaaagggtatatatatttttgtggagatatgctcttctagggatgctataaatagggggttcaaaatatggtggccccttccaattggatatatatctactaattattttcactgaggatttacttgattgtttgtgattagatttaaatttattttgctatttgggtttcaattttacaaggagctttttgtttaattaaaaatgcttacctttacctttgagtaattattcttaaatcatcaagatttcttcaagcgtaatacaaatttattaaattaaaatcactaattcaatatttacttttaatttgtaatcctattattcattaattggatatatgtaaataattttaaacaataactaataatattttttttcaattatttatggtattatatttaataaagtagaaagtacctaatataatacgtagtatacgtgcacgtaacttttttttatatatatatatttatatatatatatactagatgagagttacgtggcgtgccacgtaaatattagttttatgtaagtttttgatttgagattttgaattgttctgatttatttgtttatgaatttattgaaatacttgaatatttatttgtgaattgttctgatttattcatacttgaatatttatattgatgatggttaatgaaattaatctgtagctttatatttctaagaaaaaaaaatgtatttttaatatcgagtttaaattt

SEQ ID NO: 348039 - DNA, 1116 bp, Cannabis indica
acaagtggaagttgttaacaaaaccttaaaggatgttatcgagaagaagttagaccctgccaaaggcaggtgggtcgacgagctacctcaagtactctgggctcacagaactacctagaagacgtcaacgggacacactcctttctcgctagcatttggttcggaagcaatgctgcctgttcaagtgaacatatcgactcacagaagagagttttataatcaagaaaaaaactaggaacttttaaaattgtccttggatctacttgatgaaaaacgatttgagtggtaaatcaccaacgcagcatatcaacatcgagtaacaagatatttgaacaaaagagtcaagaaaagactattcaatgttggagacttggtgctaaggcgagtatttgcaaatacagagatgcatctgcaggagtgttcaacccgaactgggagggtccatatgtcatcgaagtagtaattggaactggagtttacaaattggctcgactcaatggctcgctaacaaagaactactagaacgtggaccatttgcgaccctactaccaataaataaatgatgtaactaacattgctaatgttaaattttaacttcagttatgaataaagagaatcatttctatcatttaagtaattacaaaattttactctttaaaattacttaaggggcatttatgtatgattaaccagaattcatctggaaatacaaggtacaatgcaaacccaccatttcaaaaattaaaaaaaaaaattaaatttaaaggttctcgactaaacctctttgacgacagaggggtcgaactgttataacttcctgaccaaacctttttgatgagagatgggtcgaattcttataacatcttgatcaaacttttttgacgaagaagggatcaaacaactattatttttgattaaaacctatctaacgggaaagaaactcaaaagttataaatgagatataactcataactcgcgtataaagctgaatattaacggtttgtgcgagctaggaaagtagctaaacgagacatcaagacgtcttgataaattacttgcacctaaaaaatggatagataacctaactataccatacgagcaaatctaaaatataca

SEQ ID NO: 348040 - DNA, 691 bp, Cannabis indica
gacacgtgtcaatctcgttgaatgtgaactaacagatataataataattatatcattaaatacaaaatgcaataactcattaaatatggaattaataaagtatattcataactttctgacgtacagtcgtaggcaagacgaggatacactaactatcaattcatgtattgacgagaaaccatcttgcctcagaaagcataatcccgatggagccacagacaatgtatagcgagacatccacctcgctacatatatggaagtatcgacaaggcgaatcggctgttggaacacttaccagatagttcacgttataatgactaagtgcaatagcttgagaacatagaggacatgattgtccagtttgcaaggccttatggtgaaagagcagttgttaagtttgcatagtacactagtgctcatgccattgccggaatacatataaaccaagtcattcatctatgtacaaagcgagatgcctctagcgaggtgcttctatcccacgtccgtgtcaactacttcaaagataagaataacaagcagttatgcgaattcttagctatacacgtgttaaaatgggacgtggtcaaagtccacgtttcattaaaacagttatttatttcaaatttaaatgtaaataactattgggttttatgccctaaataaaactccatttcaatgtaatctattttat

SEQ ID NO: 348041 - DNA, 1085 bp, Cannabis indica
tttgattatgcatgactgaaccgctatgtaataaacatatttcgttaacgtgtcgtttaccatgaaagatttattcaaatcacaatgatgatcattagtagatcagtcggaatcttgagtatacataaactaactttttatgttcattgagtctttgattcttaaagtttctcagagaagatgaatcttacaacttctattttgggagcttaataacatgagtgccaaggaacatgttatacaatagtagaatccaagctttcctaacggctcgaatattagttctcttatagtattatttttgggagtactaacaggtggatccaaatctataataaattatagattaactgttcacattgaattaatagtacataaagattcaagagataattagaaggataaaactgtaatttttattaactctaattatgaactaataattggagggacaactgcttatattgattatatcaatagactagaagtaacaaatttgtaatataattctatattattaaagagtgcaattcaatatttatagtagagtaataatgggattaataaactaggttattctattcatgagatcgataataatcaagtgtttattggagcttcaaaagatagatctagagtccctgagtgagctttatataacactatacaggagaaagttttatttgatgtgtagatttgagtgagaattaatttgtatgagaaataaattcttgagggaaaaatagtaatttataaattattattttaaaaatgacaattatgaattgtataataaatagtatttaattatttattttattagataaagctatattaattaggtaaatataatattatttttaaataatattaaagagagaaatatattgttgacgctaaaaagtagccaacatcagctcgctagattggtgagatgattaataagtttacgtaaataatttagagagacatacaaaatttatagttgttcactccccatgttgcgatggtaatgaggctatgttacgtcgacttttatttctcacaagaattacaaaaaaggctaagtgtttaagctctagttt

SEQ ID NO: 348042 - DNA, 467 bp, Cannabis indica
attaaaagtattattatttattttattactagctatattttaattgtttttcgaaatgggggctgagcggtgagggccttaggcggccgcctccttcgtcttagctcagggtggccctgaatataattataattattaataatttgatcaattggcttcagaaatcctcaatgtttgtgttgacaattggttcaaaaatcctcaatgtttgtattaaatcaagtgtagtagatgatgaatattattctgtattgaaaaaagaacaaatattatgtcatatatatatatatatactagaagaaagttacgtgcaaggcacgtatatttagttttatgttatgtgttctataatttaattaacaaagattcaataaataatcatataatttaaaataatttaaaaactaattttaattagtgtgtggggttatttaaaaatcaatagtgaaaagttaaatttaaaattt

SEQ ID NO: 348043 - DNA, 829 bp, Cannabis indica
  modified_base (42)..(42): a, c, t, g, unknown or other
tttgtatctatgatcagcgactccactcaattgaactactanagttccaaatctatatgtcacgagagatctatgttcgactttaacgaatagaataaagaacacaaatttataatacaactgaaactagaaccttaataatcacaggattaaaataatttgatctaagatcaactaggtgatattgaattgaatagatatacggtagttatcatatcagttcaagttcaatatcggtccttccgatgcatactccatacatccaacccaagcttactttatccaataccctggaaagtacatatcacttatcaaaggtgcaagtaaactatgttgtagattatcatatcagttaaaccctgtgtactaataaatcataagaatacatttaatcacaaaatcttgattactttccactatgttgacaacacaataaacaagaatatcagtgtgataatgatttggatgaatttataaatcaaataagtaaataaatgatcacatgaaccaaataacacattaaacaagtaaagaacttaaatctatttctttattgataattcaatagaaaagattacattgaaatagagttttatttagggcacaaagcccaccaaactcccacttgcactaacataaaacaatcagtacatttcaatttatcttagtctgtgcttttcaaatatagtaacagtcaaaacattggtgattggatcagctatgttatcttccgtgtccacattttccacccatacgtcccctcttgccacatattctctgatgatgtggtatttcctctctatgtgtgtgcttctcttgtggcttcgag

SEQ ID NO: 348044 - DNA, 571 bp, Cannabis indica
ctaaaaacccaataaaatatgttatttttcacacacaaacaaaaaatacactgaactaactaaatttcttttagaaaaatatgtcacttttgtttttttttcttaggtttcttatttattttttttttttgagtttttacaccacagactgaaattttctaatttttttactttttttacggtagggcggaattttttttacaaaatattgtgtaagttatatactattgtttcgggattgttttttagttgttctactgttgttttaattgttctgttttgttattttacggttattttatgaaaagatagtatttttataaaaaaatcccgtgtggtagtaaaattgtaaacttttgcctaaagtccagtatttttgtaaaaatattctttttttggagtgttttcttcctatatatttgtataccattttttattaaacaaaaatgtagtaaatagtagtgatatttttgcaaaggtagttttattgtatgtatatatttttaattatttaaatttaatatttttatacgtatgtatttaaaaaaatatatatgcaaggttacaaaaa

SEQ ID NO: 348045 - DNA, 916 bp, Cannabis indica
ctcgactggcaagcagtaatgtaagtgataaagcgaacttggttcctatccagttcctcaaaaagcctaccattattggcacggaagagatcgaaatggttgatacttccccaaacaggatgatgtcaatagcagcctacctcaacacaggggaactaccagataattaaaatgaagctcgaaagatgagaaggaaggctgcacggtatatcatagtagaaggaattatgtacagacgagggttctccatgtcgttgcttagatgtgttacccaagaagaagctgcacgacttctatttaaagtgcacaatggattttgtggaaatcacgctgctgggtagagtttatctaagaaaattctaaggtagggttatttctgcccgacaatgattgaagattaaaaggcctatgttaaaaaatgtgacaaatgccatagatttttgaagatacctcaagctctgcccaacgagttatcttatatgcaaagttcgtgaccttttgccatttggggaattgacctgatcggacaaattacccaaaggcaaaggtggagtgcagtatgcagtggttgcggttgattacatcactaagtggatggaagccgaaccactggtaaccattacatctaaagaagttcaagacttttttgtgaagaacataatttgtcggttcggattaccatatataatagtttcggataattgaaaatagtttgaaagccagtccttcaccgatttttgtgcgaaccatggtatcatcaaaagtttctccgcagtggcgcatccccaagcaaatgatcaagttgaagcagtcaacaagccctgaaggatacactaaagaaaagactcgaggatgctaaaggaaactggccggaggagcttcctgaagttctatgtattggaattattttaccagg

SEQ ID NO: 348046 - DNA, 1073 bp, Cannabis indica
ctaattctatccagaatggaatataacagtgtagaattttctttagttgaatgactttccagtaatttcgaaattacaaagttatgtatcttcactgatggagcttaaattattatagatggacttttacatcctactagaataattcctccaccccaagagtaaccaccatctcagatcctttatgagttggtgtagatataaggatttcaaatgtatacatctctatcatctaacgtataggtcactttcagaaatctttcttgactgtcttttaatgttgcttgtttgattacatcttagatggctctcacttaacagtaggagtccggttaagttcatacatagaagtacatttaacctcttactattgtttccagggatatcttgttgtgacatactgtcttatagattaagtcatcaacataacattctagtattaacattaatgtaaaatacttgcttaagattaagtaatcattagagataccataaaacatttcatgaggattaggaattttttgcctaagtcattcgaatagactatgcaaaaaaaattctactatcttattctcaaagttctcacatgtaatttgtctccatatgaatggttagatttactttctcagttgtattttaaagttcctatcacaagtatcatccaaatgaagatgggtttagaattttaaaattctcccactcaaataaggtactgtgattatttgtccaagaaccttttattggtatcaattgctattacaacagtaatatattaattggaacataaattaagatcaagaaaaaagttccaaattgcttaggaattaaaacaattaattcaaaaataataataataaaatttcgagtttcatcttcattcttggactatctccacccatctgtccaaccatccgactcaactccctaggattgcaatccaagtttaagcagctggagctgaaataagaagagaaacaaacatggttagtaggtcaagaattaataacccaaggggataataattctctaaaactcatgagtttataacatagaaagaaataccttgtttcttt

SEQ ID NO: 348047 - DNA, 561 bp, Cannabis indica
ggcataaaacccaacaaccatatcttctgctaactacgattaaatttgaaccatgctagctacctacccaggaccctttttgctcaggacatcagccactatattggctttcccaggatggtaaaggatctcacaattgtaatctttaacaaactctaaccaacgcctctgtctcatattcaaatctttctgggtacagaaatatttgagacttttatggtcggtataaatttcacatctctctccatagagataatgccaccaaatctttaaagcaaacactattgcgacaagttcaaggtcatgaattgggtatcgctgttcataatctttcaactgacgggaggcataggcaataacccgatcagcttgcatcagaatacagccgagaccctgtctggatgcatcacaataaaccacgcacttctctctgtcagaaggcagagctaacactggagctgtaattaacctctgcttcagctcctgaaaacttgattcacacttatctgtccatacaaaacgctgattctttttggtgagctcgattaaaggtgttgaaat

SEQ ID NO: 348048 - DNA, 604 bp, Cannabis indica
attgctgctgctctcctttgtcctttagaagctttcatatcacagtctctagctaaaacgaatggatatatgcctgctcatgagtgctcacatgacatcaaggtggatgctatcagctcaaactttgacgattcaaattcatctgggacttcccaaactcacccagtagattttgttgaaaatggttgtgattattcacgtttggcattgaggtaacatatattacagctgagttcagtttcttttgggtttttttttttgtttttttttttttttttttttgttattggaaaagagacaagggtcacatgtcttagactaccctctcacaagtttaatagggaccctcacttatggcagaggaaaaccgtggttacataatagataaaataaattaaagcatagaaaacgctcataacacttacagaacaaaccctagacagtaaaaatatctgaaaccctgaagtttctttgcttttgttacattgtatgatctgctaagttggattgtttccacacacacacacacacacacacacacatgttctggcaagaagaatattactactaaataaatattatgatagggttagatcgagttagg

SEQ ID NO: 348049 - DNA, 822 bp, Cannabis indica
aaacacttagaatcttagactatcaggtgaatagtatcttgaaacagcaattgattaaagtaaaatttaatttagtgatcatctaaatgagattaaaataataatcatggcattgaatataaaagaatagaaataattcgatataatagaaactaaaaattaacattcattattgaaattaaaaattcatgtcttgggctttgaaataatcattaactaaaaagaaactactctaaattagatattataataaatattataataaaaagtaagagtttaaggagaagaaaaagaacaatgatgtagaacaattgatgtcgcaatctccgtcttcttcttactctctctctaaatttctctctcaaattcgttgttcaaaggtactaaaattcgaaccctaaaagcctatatataacccctaaaaatatctcagtttaaaaaaagaagataaattcaaaatttggcaaaattcccgtcctcaccgcggccacaacttcatgctgaaaaaattctattgcgcgttcagattagtattttggtcacaacttcatcaatacaacttggaattggacgattcaagatgttccagaaatctgagaacgaaatctacaactttcatgtttagctccaagtccagttctacttccaaagtcgttaaacatttacgttcagttttatcaaactaagctcgccgacttctactattttttaccaaaatgtgcaaaaatccctccaaaagactacaaatgcatgattagcctttaaaatagcctaacaaattataatcacactaatcaataatttaaagaatcaatttaagaa

SEQ ID NO: 348050 - DNA, 550 bp, Cannabis indica
aagttaaaaagcaaagtgcaaagtgcaaagaaacatgaagcttcttccaaccatgatagacttcattgggcatgtggtacataatcaatctaataaataaataaataacatgttgctgtaaaaaataaatcaataagtttaaatttagagagcaatgaaatgttgaaagtagtgacacataaaaggtcaactcaattgaagttggccctaagattatatatatagtttccaattgttacaaaactacaagcctacaacgcattaatattcaaatgttagagagtaattttatttctcaacataataaatgacagatgcaactgccataccaactgagaataaaaaatatatttatatatttattacataggtaagaatattttaacctgaaattattaagcttaatactaaatagtcaattttctagacataacaaaatcatgtttttcctcaccttatgaagtggaaagcttgaaattcctacttgaacaataatatcgctggaaacagagataggcctgcaaaaacatctaaaattaagaaactgatt

SEQ ID NO: 348051 - DNA, 497 bp, Cannabis indica
gattacgattacaggtgtgtcggtacaacctggatgggaacgaactgctcggcgatgtacaggatcttaaaccataataaccaacaacacttgataagtgacacgctaaatcacttcccggggacttaaactagaaacgtaaaagtttccctatcgataaaaagcatggaaataccctaatcaacacaaaaatgggaagaactagggttcccaatttttccccaaccgccggttcctacaaccggaattccgattctgggaaaattcctggaagccccaaccgggtcgaccggttgctactggcttccctgaaccgcaatttcggttcagtgcaggaactttgaaaaattcaattctcattcaattcaaacccaaacctcatgaaaccttccagacctgttctaaataccccaaagaacaatcccaaagcatcaaaacaacccagaatgcacagaatcaaaaaatcaccatgtgagctccaagctttaagttcaaaa

SEQ ID NO: 348052 - DNA, 718 bp, Cannabis indica
atacgtcccctcgtactccttgtaaatccatttgcatctcaaaatacttgagataggaagaggatcttctctcccagtatacatcttccacgttggcattttgaacttgtgaggcagtggccagagattgatctctggtgagaagggagttccgcgagcacggtctaactcaagatcattattacgttgtccagccatgccatgaaacatattcttcaactcgtcaagctgggcatgtacggctggactgacttgctcggcattttagtcggtttggattacgtcagcgtctttctgagtggggatttgagtatgggctctgggttgcacgatcgttgtagtattctactcgtctgttccccttcttctgtttagatcgtttcttaggtcatgggttgttcccaaactatcgaacacaaaagatcctggctgccttagcgattgattcacttggttgacaggtggaataataccattattttggttggatctgttaggtatggcttctcctaatgaattcccagacaaggtctgcccacctacctcttggcccacgagtggaactcgcaaccggggattggacggctgaccattagttatctgggaggtattcatcgtcgggtcatcctccgtttctcccagggaaagaacgtccacgtttgctgacctacagtcttgtaggctcttcgtatcagcacggtagcttgccgactatgat

SEQ ID NO: 348053 - DNA, 942 bp, Cannabis indica
cattgctgcttgggtccccaagtcgaggatccacaacttcatcctcgccttggaaagttccctacttgggaatgttttttcccttgtttaggctctggctggaggatacttccttcttagccttggccactgcaaggttataacattcccaagcagattgctggtttcctcttagacaccctacaccattctttgttgggaacttcaagcacgagtgaaatattgatgtgatagcttttaagtcatacagggctggtcggccaagcattacgttaaaagctaaaggaacatccaatattaataactgtgccatgatagttatgctcgtcggagcttgtccaacagtgaggggtagccgaatttgtcttagaggtgcaactccttgaccagagaaaccatagacaggcttgaggcatggagttagattcttgagttggagtcccattttttcgtaagcagtcttcaacaagatgtttgaagaagctccattgtcgatcatggttctggccaccattttattggctatctggacttccacgaccagcgggtcgttgtgcagaaatttaactttgactgtttcttcattgttaaatgatatggttggctctcctgttcgtagaactttgggcctcctttcttccacgacgaggataatctctttttgttcatgttgcattgttcaggcatacctctcccgagctttgcccgaatctccagtaatgtgcgggcctccaataattacttggaagtgtccatctactggtggaggtagcaaatcttggttgttctgaccttggtcggtcttgacatacttctgcaggtgtggattgtttttccttattaggaatttaatttcctgcttcaagttgttgcattcgttagtgttgtggccgtagtctctatggaaccgacaaaactttgtcatgtcccttttgttggtat

SEQ ID NO: 348054 - DNA, 667 bp, Cannabis indica
ttcagcaaaaacgaagattgctggataaagaacgagcagtagccctgaaagacgaagttgaaaagctgcgcaacaacaacttcatcattgaagccttttacccggcttgggttgcgaaccccgtactcgtgcctaagccgaacaagaaatggcgagtctgtattgacttcacagacctcaacaaagcgtgccctaaagactgtttcccacttccaagaatcgatcagctcgtcgatgcaacagccgggcacgaaatattaagcttcatggatgcttattcgggctacaatcaaatcaagatgcatccgccagaccaagaacatacaagtttccggacagatatgggtctctactgctacaaagtcatgccatttggtcttaaaaatgccggagctacataccaaagattggtcaacaaaatgtttaaagatcagatcggcagaaatatggaagtgtacgtggatgatatgctcgtcaaatccagaaaggctggggggcacatagacgacctggacgaatgtttcaaagtcctcagaaaatacaacatgaaactaaatcccctaaaatgctccttcggagtcagctcgggaaagtttctaggcttcatcgtcaatgctcgaggaattgaagccaatccggaaaaaatccaagccctcctggatatgaa

SEQ ID NO: 348055 - DNA, 839 bp, Cannabis indica
cagatatcgaggaaatccttgaatatcctatccatcagatccataaaagctgcgggagcattggttagttcaaaagacataacaaaaaatttcataatgcccatacctggtgcagaaagccatctttggaatgtcctcctctcggattctcaactgatgatagctcgatcggagatcaatctttgagaagactattttcccccaaagctgatcaaaaagatcatcgatcctaggtaaaggattcttgttcttcacagccagtttattcaattctcggtagtcaatgcagatacgcaaagatccatctttcttcttgacaaataatatgggagctccccagggtgacacactaggtcgtgaaaatcctaggtcaagcaacccctgtagctgaatttttaattctttaagttctgttggagccattctgtaaggtgccttagtaaccgattttgttccaggtgctagatcgatagtataatcaatttctctctgcagtggtaaacttagaagttcattaggaaaaacatctaaaaatttctgaaccaccctgatgtgttctggccgaactgtctcaggccatgtggtatccaataccacggccagaaaccctagacatccatcttgtaacaattctctagctattaatactgaaatcactagaatctcgaatctctgaaccgatcccacaaaaacaaacagttcctcaccttctggttggaagattaccatttttcttttataatcaatattggctgagtacttggataagaaatccattccatgtataatatcgaagtccgctaaacccatttctattaagtcagcactcaactccctat

SEQ ID NO: 348056 - DNA, 711 bp, Cannabis indica
aggcaaataattgctttagtggccgaccacttaatgagcctcactagttacgattttaaaactttatttaaatcatttatcttttttttaataataataccatattttccaattccaatcctataaatgttaaaactatttatttaataattataattaattattaaataaaatttacttttatcttaattattaattagaccttacaaagtgtctcacttaataaataaatctgaaaacctcttttcttcacaattaagtcattgcttagtgaaaattcacaaataagacatagtctaattctagaattataactgattaatttaaactaattaactgagtctacaagaactaaattctctaacatattaattagaactagaatttacaagtaaattctctaacttattaatttctccttgcgccactatagattcggaattgtactctcaattatataaaattctctatatgtaccaagatatagatacgatatgaattatccatcgttttaatccaaagagtcaaaaatcttctatagatgatctacatcgaataaggataaatttaccgttctacccttcaatatattttatccttaaaatacttagctacctataaatgatatttcagtaaactaatataattactaaaatgaggcctcaatcatttatctatattaagccaagcttgaaggaaattattgattca

SEQ ID NO: 348057 - DNA, 540 bp, Cannabis indica
tattgtactctggtagctattgttataggagaattcaatcaagggcaagtacttactccatgatccttcaaagttcatgacacaggctcgcagtaaatcttccagtatctaaattgttctttctgactgaccatcagtctgagggttcaaggctgtgctaaacttcagcttagtacccatagtcttttgaaggctcacccaaaacttagatgtaaactttggatccctgtctaaaagaatagatttaggagctccatggagacgaactatctcttttgcatacagttcagcgtactgatccactgaatatgtaactttcactggcaggaagtgagctgattttttaaatttatccactatgacccatactgaatcatgcattcccgtggttctaggcaatccagttacaaaatccattgcaatgtcctcccacttcgactcaggaaggaccaaaggttgcaataaccctgctggcctttgatgttcagctttgatttgttggcaggttaagcatttggacacgtagtccaccacatctct

SEQ ID NO: 348058 - DNA, 804 bp, Cannabis indica
aaataaaaatctaaaaaaaaaaaaaaaaaaaagatgatcagaccaggtgatgattccaatgcctacatcgcgattcgccgagtgtaaagagatgaaggtagagcaacaaagagtttagtcagagaacttgagaaaatggtaagggaatggttttgtaaaataaataggcaatagaaatcttgataaaacggtatggtatgggaaaggttttattaaagaaaatgccaattaaatgtaatttaaaatttgaagttacgaaaactgtaaaggcaaaggttttgtaaaaaagagaaatcaaaatttaaagctaattaaatgagaagaataaaatcaaaaactcatataagctaaaaaattaagaaaaagaagattaggaaaaaaaactcatataagctgccacataggaatcctttgtgcattcctttattatatatattattgatattgatatagatggtactacctatatattttaattaaataagtaataaattcctataactaattttttttaatggtgttggacacattaataaatttttataaaaatattacattttaggtaaaaatttataattttattctcacacaattttttttataaaataatattttttttataaaacaaccgtaaaataacaaaataaaacaattaaaacaatagtggaacaacttaaaaacaactgtagaacaacagttaaaacttaacacgtactactacaaatatcagaattcgcgacagtcctaaaaacgattttttttaggggaccgtcgttaaaaaattaagtaattatttaaaaccgt

SEQ ID NO: 348059 - DNA, 866 bp, Cannabis indica
agaagattcacaagttccactgaaactatttctaggcacaaaaccaacgtactagtctcctgaactcattattacaaaacaaacataggaatatcacttcatatgctcaagaaaaattcctaagcgattccactctcataatttatcaataaggatcgatcaacacatatatacctaattaaaactaacacccgtcgcaatactcccactgagcatacaataacttgacatctttaaattcaaatgtgatttcaagatttatcaatttgagggctagtctaattttctaataggagatcgatatggcaaaacacattatagtctcatctgataactaggcagtagaggttttaggattgcttaaagctaaagaaaaaatatcttagagcagtgccactatgtgaaaacaaggattatgcaatctgttcgttttcttagctttctcaatgatatctcaacaaaacgatcatgtcatgctaaagtcgttataataaaacatatgactcttacgctagtaaggacaataacttcaaatatcataaccaaattcagctaattcactaccgattgggtagaaaagattgtgtggttcatgatatctaatgtgtttccttcatcatctaagcatcctaactaacaattaaaatcatcgacaggatgattaaactgcatgtatggatcttagtattaattgtgattagtacgggaagaaaatatcaacatgaattacaattttcgatacttgacatgtgaaaacttacgacaggtaaatataacacattcaatgaacaattttaatctcataattatcaaataaagccattgcgcattttcaaaaaaaatttaacattgacaataatttcata

SEQ ID NO: 348060 - DNA, 1008 bp, Cannabis indica
acataacccattttatcacccttcgttgttaagtaaactccagagcaaaaagagatttcctggcttcaaagttgccgaagtgccttcagacgattgctggtttgcttaaactcagtcattcgaatctttgagtaagtttttgatttcctttatgcttttctttgcatgtttacgctttgaatgcatctatgctgtagaaagaatgcttaggaaaccctagggttagaaacttctgcgactcttctttaccatgtcttcatgtgggctttcacctgtagagcttattttcgaacggtattgcgtccgcctttcatcttgcttattctaagcgtcatgaacttttctgccctaactcaagaaaactttctgacttcttgagttttgacttttctttaaacatagtcgttttttaacctgttgcgtactcctggtcgacatatttgcttgtctctcgtttgatactttgtccaacactcatcttgtgtgttgtcttttatagatgaacccaggtgagtcttgggaactctggcatcagatcgaccaggatttgcttcaacttctgcacgaggttcatccttgtcttcgtgctagtcctccttctagcaaaggaaactcttctaacgttgtaccaagccataggatgatggctcctacaaagaaaaccacgcgtctggccgacgcttttgatcttcaagtggctcggcttgccactctgcccgacgccgaacagaattcgaccgtcccgatggaagaggaccgttagggggacgctgaggtccaggaggttgaggagctgaacgaggtgcgtccgggcagtccttccgaggcagagggagaggaagaggttgaacccccttacttcagggagtacaacaaggttggccagccagtcgatgctgacggagacatcctggttgagggcgtggactacgtcagtaaggagcttgctgaggcggttcctcataggaggcagggtgccttgggtgccacgtgggtaagtcctccgtc

SEQ ID NO: 348061 - DNA, 977 bp, Cannabis indica
gtgtttgcaaatacccaccttagcaccaagtctccaacattgaatagtcttttcttgacttttttgttaaaatatcttgtaactcagtgttgatacgctgtattggtgacttgcgactgagattgtttttcaccgagtagatccacggataactttaaaagttcttgattttcttcttgattataaaactctcttctgtgagtcgatatgttcacttcaataggtagcattgcttccaagctgaaagctagcgagaagggagtgtgtcccgttgatgtcttcctggtagttctgtgggcccaaagtacttgtggtagctcgtcgacccacctgcctttggcagtatctaacttcttcttgatagtatccttcaagatttttttaatagcctccacttgtccattcgcctgaggcctagatattgaagaaaagctcttaattattttgttcctctcatagaactcagtgaacaagtcgccatcaaattaggttccgttatcaaatactatcttcatgggaattccaaactgacagacactattcttgacaacaaagtcgaggacttttttgtaggttatggaaacaagaggcttgacctatatccatttagtgaagaactcaactgctaccactgtgtacttggctcgtcctcgtcctgtaggtaatgccccaattagatctatcccccatatagcaaatgggtaaggcgaggtcatcatcccgagttccgttggcggcacgcgaggtttatgtgaaaacctctgacacttatcacactttgtgacaaactcatgggtgtcctgattgatcgtcggccaataatatccttgtctaatgatctttttagataggctctggcaacctgcattatccctgcaatagccttcatgaatttctctaatgatctcgtttggttctctagggaatacacactgaagtagaggcatcgaataacctcttctttatagtttgccttc

SEQ ID NO: 348062 - DNA, 782 bp, Cannabis indica
atgtgatgttttctgtagtttatataggtttaaattgaatggattaaagcaggtttgatgcatgttagttagatttaaccaagtttgagtttttgaactcaaagcttggagctttgatggtgaattgagtttatagttgctgtagttgcttaagttgttagatgttgtttacagagggttaattatgagttattatgttgatctatgctcgattttgttgttgttttgctgtttgagcaagctttggagttttgaactcaagcttggctcattaatggtggtttttgattttgtgcatgctgggtttttttattgctttggaactgttatttggggtatttagagcaggtctggaagtttgaattggtttggggttgagttatggaattttgaaaaattcctgcactgaaccagaatttcggttcagggaggcgattaggaagcggtcgaccggttggggcgaggaaccggtctaccggttgggacaattttgggaaccctagtttcccacatttgtgtggtgtagaggatattgccatgctttttatcgatagggaaacttttagtttctattttaagtccccggtaagtgatttagcgtgtcacttatcagtgttgtgattattatggtttaagagcctgtaattcgccgagcagttcgttccactcaggttgactgacacacctgaattcagaattgaggtaagattgtataatgttatgcatatgtttatacatgtttagcgtacatgtcagttgccatcagattaacatattagata

SEQ ID NO: 348063 - DNA, 840 bp, Cannabis indica
caaacccaatatcaacaatatttttcacaacacacaattattaccacccaaaatctataacaaataaatcaaattccttaaagattgtaggaattgatacttacaaacccaaagaagctttactccacctccattattgaatgttcttgaaagcttgaggttgaagatgaagacaatggtattttcggatttgcggtattatgagtgatatttggggtggtttttgatggtatgtgtagattgatgagtgaaattggatttttgaatggattgggtttgggagattgaagaaaagatgaaaggattgaagatttaggaaggaaaattttgaaattgttgaatgggaggggctagggtcggctgagaagaaaagagatttgaatttttggtgtagggttgaatgggggaaaaaattgggattttatagacaaagtcatgagctagtcgcgacttggcacaaggctagtcgcgactagcttaaattcgaaatttaggctgtctctggaaaaagggcaagtcgcgactagggtcgcgacttggaaaaagggtcgcgacttctgggagttaaaaatttcctcgtttctgtaaagtcctaggtcgcgaccagggtcgcgacccaggaacctggtggtcgcgaccactgggctcctggtccgaaaaataattttttttttcacgtttttcacgattcagctggaaaaaataatgtctggtacttagctaaaaattgaaaatactaaaaatactaaagcataaactaaaaacataatcaaaaagtctgaaaaattaaagaaaacacttgggttgcctcccaagagcgctatctttatcgtcatatag

SEQ ID NO: 348064 - DNA, 601 bp, Cannabis indica
ttaaacaacatacttgttagtagatctaagatcctggtaaaataaattccaacaaaacatgctaagaaatgtagaactactgatgacacatatatgaaagtaatttaaattaaacaaatattggacaaagcaatattttatatgaaactgacatgtgtatcaatgttggaatatgaaccagtttaaatcacgctttattaaatgcacttaaatgactcgtctgaggagagacatgagtaataactattgattgatgaaaccagcaagataaacaagttcatttcgagataaacagaatacacaatgaaagttgttcagaacgagtagacaatgagtttacagctcattgatcaacatacttgtgagtgtgagcttacagctcattgatccacatactcgtgagtaggagcttacaactcattaatctacatactcgtaagtaggagcttgcagctcattgatccacatactcgtgagcagggctgtctctagtcgtttagaggccttgggcgagcttcaaaataaaggcccttcttttacaataattatttactaaaaaaaatctcaaattgaataaaaaaataacaaattttacaaatca

SEQ ID NO: 348065 - DNA, 516 bp, Cannabis indica
aatgaacatgaagtataagggtcaaggaaatgtaagggagtacattatgaaaatgcatcatattgtctcaagactaaggacacttaagattgagcttttggatgatgtacttgtactcatagttttgttaacacttcctccataatttaacgaattcaaaattagttacaactgtcaaaaggagaaatagactctcaacgagctcatttctcattgtgtgcaagaggaagaaaggttgaaaaaggacaaaactaaaagtgctcacttgtccactacccctaaggataagggcaagaaaagggaatttgagagtaaaactgctaatggtcctgttcaaaagaaacaacaacaggattctaagggttgtttcttttgtcatcaacctcgacatgtgaagaaagattgtgccaaatatcatgcatggcatgtaaagaaaggtattattcttacttggtctgttctgaggttaatttagtttcagtaccttgaaacacttggtggatagattctggtgct

SEQ ID NO: 348066 - DNA, 548 bp, Cannabis indica
atttaatttaaatttaatttattatctttttttttttgtaggaattgaaattattatggtattttgaagtgaagaaatggagtaaaaataatattttaaaaaaataataataaaggaaaggatcagaattcagaccttggagaggcccactcgcgcgtagcccagctcctcaatccgggccgtctgtgcgcaaatccaaggcccaaacagggcgcgtgaagcggctgatctcttcctgcccagcatgccagagtcagccacgcgtgggacccgccagcaaccttctctctctagtagcctcacatgctcgccacttgtctgcctctcgttcaatccgagctccagcagcctccccatgtgcgccaagtgtcgtctcctccttcaatccgctattttcaaattgtcttgaaatgcaatttcaaaatacattataattttatattcatttggctcattttttttatttatctcagccaataaattgcacattgtatattttactattctacccttttaatatctcacctacctcatttatgctagaaatt

SEQ ID NO: 348067 - DNA, 1195 bp, Cannabis indica
ccgattccttgggcccgatgaggtcgatgggcccgatggcccgatggctctgtccgatggggcccgattccttgggcccgatgggcccgacaggtccgattctttgggcccgatgggtccattttacgtttagggaaaagatgggaagagaggagttgatgtaattgggggagggtattttgggaaaaataataaagttgtcatatattaaaaatattggtaagtataagtgtaggaaacaaattttaagataatgtaagcatagaaattcaaatttcccttactaaattgttttttcttcattaaaaattaaaatttgtatttatttgaaaattattagttttagtttagtggttaagctagcttatggattcatggcatttaaatgttcaaatctcaacttgtgcaattttatttttaatttttaaaatttattttttgaaaaagatatttctaaaatttaaattcctattaataaaatttgtatttagtaccttaaccaatgaagccaactattttattgttacttttttactttaagttatatttaataatataaaaaatataattttttatccatttttgttatacccaaaattcggcgagaggacacgtgtcaagataaagggaatgtgaatcgatgtcattgctttttatggaataactcattaattacacaagtatcagagtatatttgtaatacgctgactgtaaggtcttaggcgaggaatcaatgtacaaactggcacttagtatattagcaagaaactatataccgctaaatgcaaacagcaagacaccaaagaaagcgacccgtatcaatcatggaggtgcttagcgtacaatgaacaaactaagtgtaaaagtcggatcggctctagaacaagcaagcgaggtgaccatctcgctacttcatcacgttagcgtcagcaaggcttacaatcctggtgagccagaagagagcattcaagtgagcctcgaagaattctttgaggataagaaccgtgatcaacaccagacatacattgtcgaccttgaacagaagaatggccccagctcgctattgggatcaatgtaaccaagtttctgtcgagacatctccagatacaacagctaaagatgtgtttaatacacgattattttgacccagtaaaagcgggaaaatcacagctatacgattttcaaattataaacc

SEQ ID NO: 348068 - DNA, 744 bp, Cannabis indica
ttaagcgattaatctctcctggaagtgattgtagaagtgatagtagtttctcctctttctcggttggttggggtgagttcgggcaatatggtgggtattggtgacttcaaccctgaagtgatggatcccaataccagtcgtaatcaaaatctgctatattattcaacagatttattacatcatagcctttcattaatagatgcgctctagttacctctgctccataatcaacccaacttcttatttcatcatcaagtctattataaaagagccacgtaaaacatacacgtgagaaagtgctttaacatctctctccaagctctttaaatctcttccaagcataatagaatgactcattgtgttgttgggcaaaattctcaaggtataatatctggatttatcttgtagtcaaactcatcagtaaaacattactaaaataaaaaaaataaaactaaattagtactaaaaaatattttgtaacgacaaaattaatactaaaattgagaagtactaaaatagaaaagaaaaacaaaattcgaataaaatttaatttttaataatattaactaacaatccttggcaacggcgccaaaaacctattctgcttaggattagaagaggaggtgagttttctgttgcgtcgactgatagtattttggccataactctcgatattgcttgaaattggacgattcaagatgtttcgaaaagataaaagagagatctagaatttttatgttttga

SEQ ID NO: 348069 - DNA, 879 bp, Cannabis indica
ttttaaaaaatcttaaataaatatcaagaaaaagaacaatggaaatatgtttttatttatttatgttttataattaaataattattatttagtttatttttcagttttaaaattatttaataaaaaatttattaaaagtggataattaattaataaatacttgttagtttaatcaaatttaataagatttaataaatctgtaattaaatactgcaacgaaaatgtaataaatagtattaaatccatccaaaaaaaaacatatattactcattaaaaaaaataagtaatatataaatgtataaaatattaaaaaaaataaaatattcatgacacttcctaaatcaaattaatataaagacaaatattgccaatttctatgtactacaactcatccactacaagacttacaaaatgtaagccctataatttagattcacaaatcacaataagtactaattagctagggtgtttagtattaaatatatttcaatatagggttatttgcggcaaaaccccctaaagtagggaggtttttgcaactaacccccaattctaaaatttttgcggtaaaactccctaaactcaagttctgttagcagttagccatttccgtccatttttggctgttaactgccatggtggaatgtccacgtgtacacagtgtacacgtggcacaattttattggtccacgtaaataaatatttaaaaaaataaaaaaattaattatttttaaaaataaaaaaatttttctttttctttaaaaattaaaaaattagaaatttaaaaaataattttaaaaaaataaaaataaaaaaaaccctaattccttctttctcttcttctctctcgttctctttctctctgagccctacccgccg

SEQ ID NO: 348070 - DNA, 421 bp, Cannabis indica
ttttcgcccttttttgagattgtttgccattatttatggttgcatagtggcagttattaattacaaagctgaccaaaatatgattacagtcattttccataaaattgcgggatctgattacataatacaaaatgtaaatgcggtgtatgattttgaaaattatacagctgtgattttcacgctttactaggtcaagaatatcgtgtattgaccacgtctttaattattgaatctagagatgtctcaacggaaacttgattgtagttatcctaatggcgagctggaaccattcttctttccgacgtcgagaagatttgtcttacgtcgatcgcgggtatacagaaatcttctgtcttgctagggttatgagttttgcttccattagttggatgaaactataggtagtttgttgggttttgtg

SEQ ID NO: 348071 - DNA, 566 bp, Cannabis indica
atagtcttaagtaaataatcagtataggaatgtatgtttaagagatttggaagttttagaggtacaattaagaagttaagatatgttttggcgaactaaaaagaagtgcaagatacagggcataaatatggctggaataatcaatggtatgataagtatgaagttatgtgatacctcatatagttagtattatagaagaagtgatcattgaacagaactataaatttatcaagattacagatttgaccactatcgtaaagtatcacaaaagtagacaaaagttattgtgtaaaactagctaatctcataattaagtcgacttgattgaaagagtattggaggaccaggaactagaggagagattagcaaataagatacaatgaagtggtaaaagaatcaagagactacaataggaattaaagtctatgctatccgggaaataaagacaagtgcaacgagcatactactaaatgagttatatccaataccgattggtggcttaatggatcattaaaattatataaaaggaattttaaagggcacaagtgattattttcctgcgtcat

SEQ ID NO: 348072 - DNA, 573 bp, Cannabis indica
atggtctatttgggaacttagaaataaaaagcttttcaggaatattcattcagatgctgcagaattagtgcaatgggccagtagctatttgcttcaatacagggatgcacaggctaggaaaattgatgctgtacgagcttgccacttgcgcacaaccatagcggtaactcaagccaaggaaggatcttacaaattgtacacagattcagccattaatgacaagaaccataagattgggcttggagcagtggttaaggattagaatgaacaggtgatagctggagtttctttggctttgtcagctaaggttccacccatcatggtggaggctatggctctaagattgggtctaagctggtcctgcagtgtaagaatcccactttctactatgtttacagattcttaggagctggccaacaagattcatagtcacaagaaggagctttctgcccttgcggatgtcatagtggatattaagaattccttgtcacatttcctagacgtttctgtttgctatactccaagagataacaatacccatgcacatcatatggcaaaggaagctttagggct

SEQ ID NO: 348073 - DNA, 1242 bp, Cannabis indica
agaagactaggaatggaatgtcttctttttcctgtgattttgaaattattattagtgcaaggcaacgattttgaaactgttttgattttgttattgataatgttagtattgtagactaacatttttgacactattttttataacaaaaaaaaaattatatttatgaaatagaatagaaacttacttctatttccttttctttgttcaagccttgtatttccagttctgaaccctgtttttgtcattttttgttttattgctgttattaaactataataaaactgaaatgaaactattaagaaatgtttaaatttatttcagaaactaaccatttgtcgaagtgttttctcttttctctactctccaaaataaattcttgtaaaaattgaattaaactactatgaaatgatgatgcaactgtaaatcaacttgaaaaaacatggtacttaactccaattaacatagttgtgatacctgtgcttttcattagttttatttgaatcagatcaattttcaactattataaaactaatttgtaactacttacataaatcttaccttgtataactgctatttgttggtacccgttaactgaaattcttgcataatttataaactattataaaacgataatgcaactataagacaaccacaaaaaataaaaaacgaacttatatgtaacatgtcgttccttaattagaattagatcttgttattgtgctttaaaaagctgaattgcccattgtaaaccaggaatcaaccagaatgcaactgtatataacgtagatttagtatttaaaaaaatttcatatcataccttgttttggattcgagggggagctgaagatttgtttaatacagatctacattgtatgaatctagattttcgattttagagggagttgttttgaacgattaaaaccgaaatcaaatgtttaatttcagtttcgtcccagtttttctgattttttttcgtaattttctgtttagatcattgcagttcttcttttccagttaaattttgccggaattgatgattgtattacccttgttttggtttcattctggttgtgttactgatttgaacgatggaggtatgttcatcttcttcgttcattccgtgcgacttaaggtatagaccaggtggtatttttgtaattttttgattctgggccgtataaatgttgaatgggcctgtccatagtaattttgtttcccttttttgtattatcctgttttttt

SEQ ID NO: 348074 - DNA, 965 bp, Cannabis indica
aataaagtaccatattattttgtgtattttctactttttattgactcctcaccacaccatttttttttaaatataaagtgattttattctataacgtttaatcattataatagattttaaggcagaggagcatcaagctcaccacaccattttttattaatcatttggatggaatttcttagattctactcggaaatttccattattattattattattattaacaaaaatatatattatattttttatttaaatttcagataaaattattatatagattttaacaaattttgacattagattttataatttttgttttcattttttttatgtgtgaacttgtgttaattatagattaaatataattcaagataatttatttaggttttttttttccaacaaaaaaaatatttgtagtttgaattttctatgttaatacttttagttttttttttcttttgtaaaagagtagattaaacatatataaataaaaataaaacataaagttgagagaatcagattcaaaattaggtatactaagtaacaaataaatatataattatatcaattatgttctctaataattatgtattatttttcataaaaaaaattattatgttgtctaacatgtttatttacaataaggccttagaacggttgatctcagttctagttatcgattctaaccaaattatgcattgaatgcataatttttcaaatcaatatataaagcatgacatagcatttaaagatcaataatcactagggtaataatcataggccctataatcgctcactttagggtaataaccttaatccagttcttaattaatcacaattataatattcaacatgagtgccaccgtgctaaactctacgtgctaactactgtcttacctgttgtcccgagtacgtagagattccaaatctctgggtgctcctgaccaattaccggtagtcttagt

SEQ ID NO: 348075 - DNA, 1255 bp, Cannabis indica
aattatatggattaaaaaaattataaaataacaacaaaattaaccctatagtggtcgaccatatagatgggctccactagttataattctgctattttttcaaccatttatcttttatttcataaataccatattttctaattttaatcctataaatgccaaacctatttatttaataattataattaattatcaaattaaattgtcatttaacttatttattaattagactttagaaagtctcttaatatacaaataaaccctaaatcctcttttcttcataattaagtcattgcttactgaaaattcataaataagacatagtctaataattttagaattataattgattaattaaaaccaattaattgagtcttacaaccagtattgtctcaactagtgtgggaaccatgggcctatacaattaagcttccaataagtacctctagaaattatcaaataaattttctaacttattaattcctccttgcgccactatagattcaaagttactctcttagttatatagaacgctctacatgttctacaatatagatacgctatgaattatccattgttataattttaataatcaatgatccgctatagatgatttacatcgagaagggatagatttaccattacacccttcaatatattttatccttaaaacacttagctacctataaatggtattttaataaagtaatataattacttcaatgagtactccaccatttatctctattaaactaagctcgaaagaaactatcattttacttctatttccagatagaagctatagattccgtatctatgattagcggtcccactcaattgaaataccatgtccttatctatatgtcacgagaagatccattggtcaactataatcaacaaattgaagaacataaataatacaactgaactagaacctaaccatactactacaaattaggcctttagtgacactatatagtgacactcataaaagtgtgtgtcagtaaaaaattaagagtgatttttagtgacacacagcattagactctaaatgttcggtgtttattacgcggaatgtgtgtcactaaaaatatggagtgtcactaaaaataaaacccaaaatataaaaaaacctgacactatatccctacagtgacgcgcaaaaaacgagtgcaataggtttcagtgacacgtgtggagtgtcactaaaaactgcctttccagtcagcttcattagtgacacgcattgaagtgt

SEQ ID NO: 348076 - DNA, 968 bp, Cannabis indica
ataaaaagcatggcaatacccaaaataacataaaaaccagaaaatctagggttcctgaaaatctcccaaccggcagaccggttgcccaaccggaattccggttctgggaattttcagaacaccttccggaattctggatgcacaaccggaattccggttcctcgcagactaaattcaaaaattcataactcaatcaaatcgaaaccaaagcatatcaaatcttccagacctgttctagatacccctaagaacaaatccaaagcattaaaaccgagcttcaaccacagaaactcatttcaccattggaggttcaagattgagttctaaaactcaaaacttgacaaaccctccaaacagccactaaaacaagtataactcaacctatttcaacataataaaactccaaaaaaacacctttaaacagcagcaacaacttcatcccttttctttgaaaactataattttgagctaaaaactaccaagcttgaatcaaagcaaacaacatgcatcaaactagctctaatctactcaaaataacaagattaaacctctgaaacaacaacaaaattacagcaacaaaagcaacctaaactaagcatgcaaaccatcaaattcttccaaaattccaagaaaataaagaaaagaagctagaacaaggtttacctctactagaattactttaaacttgctggaaaacacttgaatcacaaaggaaaatccacctccttgctgcccaaggagggccgaatagacaggaaaagagagagagctttttttcacaatttttctaactttttgaaactttgaaaaaatgaaaataatgaactttaattactcacatcagctaataaaacataatataacatccattttccacttactaagtccactaaaggacaaaacataaatggggcaaaatgaccattttgcccctcctcacttaaaataacataaagggcactaaaggg

SEQ ID NO: 348077 - DNA, 1673 bp, Cannabis indica
aaatagttacttaatttttttaagcgacggtccccgaaaaaaattgtttttaggaccgtcacgaattctaatatttctagtagtgatatcagacaactttcgatacaaggcaccatatatcttcaatcgcaaggtcatcacattgagggtttcttccacacatcgcgctcctaaacctttggctctgataccacttattgggccccgctcttctaccttgtcgggtcgttacctcactttgactctcatattagtatgatattttctgctttgggcctaagccctcacggttttatttttggacatcttcccaaaaggtctcatactaatggagaaagtggaacacttatatccaagacaactcttatctatttttccaatgtgagacttgggtcgatagcccaacaatatctatctcttcattggtgggtcagccacccactaacactctagatatgtcctctacacggtctttggactttggtacttcatactatatgtctctgcattctacatcatttatttcaatgagtcctacttcatctttgatggtactccctttccattagatggcatttgttctattattaattttaatttgttgcttcccaatgtttaccgtattccaaatattttattgaattttgtactgtgattttagttaattaataaatatcattttcttttacttgtcacgtgtagaatccatagtctcataagttgattaggattgaccattggtgggatgattgcatgttttgggtgagttaagattaccaatatttctagctcctagagtcaatttgtcttcttttcatttgtgtccttcatcttctaactttttatttgaaattctcaccttggtcatgttgcacacagtctcgtttaaaatttttaattcaaaagaagccttcaaaattttgcatgttgatgatattttttcatttagtagtttgtaaaaatttttctttttcctatcaataaatgtggtccactctgatgtgtagggacactatcctattgtaacagaagagaattctcgatattatgtttccttaattgatgatcaaactcttttttcttgagtttatcttatgaagcattgttatgatttccatggtattgatgatcattttgagcctatgtaaaaactcaacatgttgttgttaataaatatttaggtttgatcaagttggtgagtatacaattaataaatgtggttcacttgctttagatggagttgtgcatgtatcaaacttattgtatcaataatcctgaaaaaaatgtgtggttgaaagaaggtttagacaaattattgaaacttctcattttctttgttagcatcttctattcctaggtaattttggggcaaggcagtattgcagtttatctaattatatgatcccatcgaacataggtttgtctctttttgaaaatctatatagttgtattcttgtaagatttctatgtttatagtgctgcggttgcagccatggtgtatgctgtctggaaaatgaggaatgccgttctatggcagggtgtgcaagtcgacaccaatcgaatgattgaagaggtgaaatggagtctaaggactcgggtacagaatttcctcccgaagaaactctcaagtgtagatagagagtggttttttgctctatagataacatagaaat

SEQ ID NO: 348078 - DNA, 678 bp, Cannabis indica
aacatacttgtgagtagatctaagatcctggtaaaataaattccaaaatcatgctcctccgaatcctgagtactcaacttcttcatctgcaactgtgaaccacgttcaagaggttcattggcagccacctcatgcggctggtttcaaactcaacattgacgctgctgttaactcagcaacaaaaaagctgggtgtaggagccattgttcgggaccattatggacatgtcatagctgcactttctaagccaacacaaggttgttttcgttctgacgaaatggaagcaaaagcgctatttcatagccttaattgggtgttgcagcaacaacttcatatcaccaatatagagaccgatgctcttagagtttttcatgctctaactaccacatccactgatctgtctagtttctctgatttaatattagatgttcgttgtcttttattcttttttccttgacgcacatatttctcatgttaagagaaacgctaaccatgctgcacatggtttagctaagcatgctttagggttggatcaagacgtttgttggctaggggaaattccctatcctatttcctctattgttgtaaatgactgttgatttataatcattgagaccttttctcaaaaaaaaaaaaaaaaaagttaacagtcacttgttctacttcctccaaatgtac

SEQ ID NO: 348079 - DNA, 626 bp, Cannabis indica
gtcaatattgctagttgtgcaatttaagtatcgggtcccatatagtttaatataataattttttatagagtatcgctagccaattgcaagtcgacacatttagaaggtgctaggcaccactggtgcccaatagcaatgctcatctatatatatacaaaataaatatatcaggcagtgacgtggcactctataatattttttaataagtattatttattttctttttaattcttttttttctttaatttttttaatactttcataaatattatttaattaataaattaatataaaatatattcattttctctcaattagtttatgttgtcgagcaaatttcaacaacaccagttttgtgcgagtattcaagggctacttggatactaaaaaatagatatgcgagtactcccttagaatagcgagtactcaaagaatatagtgtataacatacgcgagtattgtgaatagtataaaatagacacagaaaaatatagtggttcggcaggagcttcgggcttggcctgcctaatccactgttgaaaagagtactctagctctgtttctttattcagatcagccccatttgaatggagggggaaacctctacttataggtagtaggcatcg

SEQ ID NO: 348080 - DNA, 500 bp, Cannabis indica
acttattaatttcttattgaatccacttttagaacttggaattgcactctcagtcatatataacgctctatatgttccacgatatagatacgctattaattatctattattataatcctaatttgatcaatgatcctctaatagtaacaacaaaaccctaaactaacaattcatgcaaaatttcttggttaaagcttaagaaaactaaagagcgagttgctagagactttaccttgacttgggtacacttaaagctgctggaaatcacaagaatttgatgaaaaaaattagaaccctaactggttctatggtgttcgaaggagagagagaatttggagagaaaatgagtttctcatgaatttttcttaattttgtaaaatgagtaaaacaaaatgatttttattaattaatatcaatccaatattcaacatactaaatcaactaaggcccactaaaggacaaaaagctaaagaggaaaaatgactattttgcccttccca

SEQ ID NO: 348081 - DNA, 686 bp, Cannabis indica
tgttaggaagcatgttagtagcctcatagctgaataggcgaatgtttttaatttccaaataagcggcactagtaagttattcttgatcgcgatctgaccagacttgctcttggttacgctggctgttctagtagtgtggacgccagacgaaacaccaagagtcagggtaacttggtcggattcagtggcggtcagggagtttgtattcccctaaatgatgtggccgaagcagaggccttagaagcatggcacgaggacggggtgatgttaacccgccacaggttacccaagctgcccatgattatgaaaaccggtttgtagcgatgcaagccaggatcaatgagcaagatgaaagatttgtcggttgaggcagcagggtgctcctgcagtgcctgctccagaaataccagtggcacctgcccctgctgtgcatgccgaacctgtagttgcactgaaccgaatggaacccctatatgaaaggctccgtaagcaagcacctctagttttcctgggaggtcctgatgttatgaaagacgagcagtggctatcagtgattaccagaattctgaattttatgggcgtcaccagtaatgacagagtggcttgtgccacattcaagttctaagaagacgctctagtatggtgggacatggtatccctgatccaagatgttactacgatgacct

SEQ ID NO: 348082 - DNA, 568 bp, Cannabis indica
aatcatcgttctaggaaagagcccatgggctccagaaggtcttctaacacacgatccagatggaccacccgttcaaggaggactcaacctaagggtggccccagcacacagaccacacgttgccagaggacccaacccgacgttggtccgagtgcgcggacaacacgctcgaggagaactcagcctggaagtggcctgaaccttggggcaagggatgaagaactccatcgtggaggtgcccagtcaatgggaaaaggtacttatgaaatagaaaactactgcctgagatgccttctagaagaggcgtagcgtcagaacgttgaattagagtgtcatgcagcctcgaccagggtgtcataggggacgaatgctcaaaatcaacttgaaccatgagtgagaagaccacgaggcaggcctcatggctcacgaaccaggagacaggaaaatgcccgggaagaacagcctaggaaaaatgagatactcccggaaaatcagaacaaacagcctgataggaggcaaccggaaactaatgaacgagatttactaacaagtatgtttcattaacatc

SEQ ID NO: 348083 - DNA, 812 bp, Cannabis indica
aaaaatccatttacaccatctattaccctattttctctctaaatttatttattgaaagaaattaaaaacaaaaacttaaaagaggtataaaaggaatatgttagattagaaaccctaaaattcctctcttcccgatctctatctctctctcccctgtttggtgcggcgctactctccgatctctttttccctcttctagccatgctccggccatcaacaatcctcaagctctagcccaactccgaagcccttaacctctttctcatcccctgttccgtcttttatgaatgccctgttatttcatcaagcccttgtcatttttcttgtttttagttcttagaaggtgtcgacaatgattgggcattgtatttattcagtaggttgatgaattagtttgtcttttgtgtatttataaatgttcctataagagataatagcacaccttacaggggatttttctagcgcagtggttgtgacttgtgaaccaaaattttgatatgataatataagcaatttatttattatacgattttttggttcagattcttaaaaaaagacagttgctagttgaaggtgattatcttgttctgcagtgtatcttatcgttgagaaagttttggcgtacgacgagaagagcagaggtctcgacgtacggccagagttgtcaccggcggccatttgcaggcctcgacgaacggcggccatccctttggcacatccgatttaagctttctgggtttgatattgggcagtgcatttgtagttttttttttttatatagatttagaaattttagttttgatttaaattgt

SEQ ID NO: 348084 - DNA, 576 bp, Cannabis indica
ttctaaatattggggtccacaattaaataaattcgtaaacaattataaaataacagaaattagtgctaactgcctttactaacccaaattactaacgcggtcattacaattatccccccgttaaaaggatttcgtcttcgaaatctaacctgaatagctctggatgttgagtcctcatatcagactccaactccaaggtggcttcttccaccttactgttcctccagagcactttaactagagcaatagtcttgttccgaagaaccttttcttttctatccagaatctgtacatggtgctctccataagataagtctgattgaagttcaagagcttcataactcaagatatgagtcgggtctgacacgtatttcctcaacatagatttgtgaaatacgtcatgaacagctgacaacactggtggtaaggctagccgatacgctacctgtccgaccttctcaagtatttggaatggcccaatgaacctagggctcaacttgcccttcttcccgaagctcctaataccctttattggtgaaacccgctggaaaacatgttcccctgcctgaaatgtga

SEQ ID NO: 348085 - DNA, 571 bp, Cannabis indica
catgattatatacatataatgtatgaattctatttaagtccagaacatatgaatttcttaatgattttagtattgtcagaacagtggaatataatcttgattttattaattacggagattttattacaatatgtgggtattgtggataccatttttgaaataaaatatcttcgggttcggcgatagtgggaatttggcggaatggttggatatgtcatgataatgaattatggattagaatgggaattttattggactagtttaaaattctaagttttcggttttgtggatatgttagaaatgaccaaatacccctatgttatgttttggcttaagtgtttattgatggtaaaatggtaattttgttaagttttatgctttattttatttaatgctttagttttatcctaaggtgaagttacattttattaagctaatatattaaacttataaaagaaagtttagagtgaatagaagtaaatcaaacctatctctctctctctctctcttctcttttcggctcaagaacccagcagaaaaccagggacaagcttagctcacttcatcaatt

SEQ ID NO: 348086 - DNA, 611 bp, Cannabis indica
gtagccaattattgaagatcaagccataatcttttccttccttcttcatcattaaaagcgtaaacaaatgtggcatagaatcgagtcttgttatccaccgttgagacttcaagatgaataaattgactagaacactttataatgtttacagtaaaacttgttcgcctccaacttacaattattttccctcctaaatgacaagcattattggaggtgaaacaccatccttgaagttgaaatacattagagtataaggcaccaagtatttgtgtgttttctacatatctaaatcaagcatctggggtcatcggagatcggtctcggctggacccccattgattttgcaagaagaggaagagataaagaaaggaagaaggagtgggtgggtgtgggtgtgggttctgcaagagagtaagaaaggggtaaatcaaaagaaaaaaaaaaaggaagaaagaagaaaaaaaaacgaagaaaaaaaaagcaagaaaaagaaaaagaaaaacataataaatttttttttaattttttaaatattataattatttttaaaactaatattacgtcgaacattaaaaattagccacgtgtacaagtgtagtacacgtgtacga

SEQ ID NO: 348087 - DNA, 558 bp, Cannabis indica
gggagtgcctcctcttcccaatgaatgaaatagtaagttggaatgttcgacgggtcaacaaccagcacaaacaacaaatagtgaaatagttcctagcaggccaaagtgttggtttggttggacttctcaaaactagagttaaggttgccaagcttggaaccttatactcaaatgtttttcaaggatgttgctttacttccaataatgtttggcattcgggagggcgaataatcgtaagttggaagccaacaagctataatatcaacattctaaagtgttctagccaacttattcaccttaaagtttcaacggttgataacaaagctcacttttatgttacattcatctatccttttaatgatgaagagagaaggaagaaactatgggttgatctacaagaattggagatgagcgaggcttggattgtcatgggtgtttcaatgacatcttggcaaaagatgaaaggattaggaagcgagtgaggtatgttccttccactgattttattgattatgtggctaattgtcgactggatgatgttaatgttggaaattattt

SEQ ID NO: 348088 - DNA, 1147 bp, Cannabis indica
tttttaaggggcaattgttgtacccaaaattcgtttggtacttcagaggatgacacgtctaaaccttgggggatacgaatcaacaaatataaaggaaattatatttaaaatatatcaaaaggaataactcattaaatgcggagttaatagagcatatctataactcgctgactatatagtctctagcgagacaaagatgtataaactattgattcacgtattgacaagaaacaatttcgcatcagaggacataatcgtaaggatgacatcgatgatacatagcgagtcatcaacctctctatgtgtaaaaaggtattgacgaggcgaataggctgttagaacaagagactgggaataacagttccgcacccaaccagggcattcataatacgattgtttcatctggaaccaatgcccagacgactataggagatgccactgaattacaaaatctccgtgatgctgttggactcatgcagaatcataagaacaccttgcatcatgatcaggacgaactgcgtgctgcagtaaatcttgcattcgacgaataaaggtgcatgtttgctgaatggagggatggagagatggaggcattaagggctcaccatgaagagatcgaaaattgtagtcgacaggctaccgtgctgatacaaaaagcctatcaaactgtaggtcagcagtcaccgaatgtcattcccctgggtggaacagacgaagatccaacgatgaatacttcccacactacaaatggtcagcccccaatccccagtcacgattttcgctcgtgggcccagcagtaggcgagcagaccttatctagtaattcattaggagaagttatacctgatggtttcaaccagattaatggtgccattccactcgtcaaccaagtgaatcaatcgctaaggcaaccatgcacttatgtgttcgaaaggttgggagcaacccatgacctaaggaatgatctgaacagaaggaggggagtagacgaacaaaatattacgacgaacaaaaggttgggagcccgtactcaaattcccgctcagaaagatgctgacgtaattcaaattgaccataatgccgagcaagttagcccacccgtacaagctcagcttgacaaactgaaaaatatgttccacggcatggct

SEQ ID NO: 348089 - DNA, 580 bp, Cannabis indica
attctgttaaaccaagaatgttaaaccaagaaataccgttagatatgcacttttaatatataaagatatatattgattgacagtttatttttttcatattagattgtaactttagatgctttcttatatattcatgaaaatttcaagtgtctaatatatactactaataattgattataacatttattaattaattttattaaaaacaaataatgtcaataaaaaaattaattacaaattctattaattcagttacaatataaatttatttattattattaagagctatcatagtattaatgataataaaatttagtgacaatctttcaacttacaaatgtttactactatatatatgagctctcatataaatatatttgctctgttgtaaattatgtttttgttagtgctttatatatatgtacttttctttcattcttttttagctttgttgtagcagatgttaattaatgtactcatttctctatgtatatcatgcgtatatgtattttcttttttagcttttaacattttttaattttccatagatttttcttttggttcttattggaacacaaat

SEQ ID NO: 348090 - DNA, 1209 bp, Cannabis indica
gagatctctcccaatcacatatcaaaaagtcaaaggtcccatcaaatatggtagagatgtgattgcgttggaggatgttcttgccacactcaaatcgaaggattttgaattacaattggaaaaataatccaaggaggaagaagtgtatttggaaagagagagatcccccaagaaagtaagttcaaaaagtaaacaccatcactctcaatcaagatcgaagtccagagagaaggaaactcgaaagtgttacttttgtggaaagtctggtaacttgcaaatattttgcaagaagttcaaggagcacaagacttcaacaacaatcacaataaagataggaaggacaaccaacatcatcaccataagaaggattcaactggagtcacggaagatagtgacgactgctcaatggatgaagaattattctccatctcagaatcctcaatgagcagggagtggattcttaactctggatgcatgtatcacatgtgtccaagtcgagaaacattttttgatcatagatcaattgatagaggtaaatttctaatagtaaatgatcattcatgtagggtcattggaactggaaaggttaccatcaaacagtatgatggtggatttaaagtattgatgaacgtaaggaactttctagagttaagataaaacttcatattactgggtgcacttaaagatgagggttatagatacaagtccatgcaaagaatcttgagaagtaccaaagatttcctgatagtgatgaaaggggaaaagattaatggtttatatgttgtccaaggagaaactgttctagcaggagaggcgaatttggtaaaagggctagaatcgaatatgtagttgtcgcatcatagacttgggcatatcagttaacatgaccttaaagaaatgcacaaataaggtataattgaaaatttaaattcttatgccttaccatttttgtgaagcttgtgttttagggaaataacataagttgaaattcactccagcaaggcatataactaagaagagacttgaatatgtgcatgctaatctttgggggccatacaaagtgtcgactcactctggtaagcaatattttctttctatagttgatgattatagtaggtgtgtttggacctatctgctagcaactaagaatgagtgccaggaacaatttagaatttggaaaatttaggtggaaaaccaaaccgatctaaa

SEQ ID NO: 348091 - DNA, 1437 bp, Cannabis indica
gctctgataccatgttgagatcatggggttccatctcaaaaaccattggcaatgagtggagtagcccatgttcttatatatggctcacttctctaccatttattccatgtgggacaatgtccacaatattccccctcaagatgatggctattttttgctcatcaatcttgaaccctatcagagtggacatggttactatctgtataggtgcggatcggatatgatcacttgcccgcaagggatatggctctgataccatgttagaatttgaggaataagatgaatgaggttccatcccaaaaccaattggcaatgggaggagtagccctttcatcttatatatcacaatttatttccacacattagcaatgtgggactaactcttaatacaccctcctcacgtttgggcctggaaagtgtgggtataacgaacgacctttaagagaccacagggccgaacgtgacatttgaaagaatcccacaaggccaaatatcgggaaatttgtgggtgtacacgtcgggaaatttgtggattttgaaacaggtcaaagaccccaacactggaaattggcacacattggccgaaaggtcccaaatggaggttaaaggggagacagcggaagtatctgtttggaccggcgacactttggctcacaacggatcacaaacggctttttggaccggtggcaatttgggctcacaacggatcacaagtggctttgataccatgttagaatttgaggataagatgaatgaggttccatcccaaaaccaattggcaatgggaggagtagcccattcttcttatatattctattatctttccacacattggcaatgtgggactctctaacaggttggggttgggatggggtggggtgggttgagccgagagtgtgttgagagagaggaagagagaggctgatgagattagggatttcaaatgtgaggggtatttttgagaaattaggaatgtggtcatatataaccaattttaataactatgcatttatggataaaattttagagtattgtaagtatagaatttcaaatttttgtggtatcatattatgctcaaatcttttgtttttttattctaatgtgctaagtcattttgcaacatcatgtcatgtccaacacgtaccgatattttatttctttgtattgtacatctcaggtttgtatttatttcgtgttatgctaaaaaaaaattggatccgtatttatagttttagtatgcacaattcaattttttttttaaatagtaataacttaattggaacaacaataacactacacaataaattaaaatatatattttcttatttatcaaatataattacttctttgaattataagtaattaatttattatatattttgaaatattataatgtgccatcaataaatataacttttttttttttactatttattc

SEQ ID NO: 348092 - DNA, 796 bp, Cannabis indica
atctgcactgagaacacatctcagccgactagtgcttgggttccccgaaccagggtaatctcatctactaattctcaagagtttcgtattacaatctccaattctctctaaaggaatctaatacaaactttacagcaattagtaatgaattaccaacaacaatcaagaatcctgattgttagtgcacaatcccttgtgcagcaactgagttcttcttcgacatttcttcaacctgaaatcccttcagatttgatgacgaagttgacactgaactcccttcagttagaactcagcaagtccaggctctgatcttttcgccattgatgaccatcttcaagctatacaatcagacctgtagatacaacaacaagaatagcaacatacgacactaactcccacgatgacaactgaattaacaaactatacgattttatggataaattgtttacagaatgaaaccgactatatataccacaaaacagtccacctggcactaactaacactaacaataaccgacttaacaaaacgctagtgcagatataacagacaaaaacttcagacacgactagacattgtacataactaaactgtcacaaaataacgacacttacattctcccccttgacaggttatgttcaatgactcaaaaaaaactaaagaccacaaaagaaacagccatcacagaattaatgcatcaaacataaatgtctttaggaatgtaaacagagcaaccataaatcaaaacgaatacaaatatctccccttccattgaatatgagctgcttgatcctgttc

SEQ ID NO: 348093 - DNA, 485 bp, Cannabis indica
gcataaaacccaacataatatacgaccatactcgaaggcatcttgccattgagtgacttctgggaagatatcaaaaggatttcaacgaacaacatgaaagagttcctcaagcgagcggatggtttcataaagttggaaaaagccgttcgacaagcccagacaataggacagaccaatgttgaacatacacagggcgtcatacagccccaagtcctgtctgacatgccaaccaacacaagaaatatctgtcagccctccaataataaaaataatgaaggtaaatgccacaacgatgactctggctaaaataatggcaaaaaagggaagttcaatgatcccttacgccatgaaatcaaagagagaatggagagaagtgatgagtccatatttatcttataaatatgattaatttatttattaatattcttaaattgattctttaaattattgattagtgtgattttaatttgttaggttattttaaa

SEQ ID NO: 348094 - DNA, 712 bp, Cannabis indica
ttatttttccttcgatttttattttccttttgttttttcctaatttcctcaaaatgagtaaactaaaggctgaaaataaatcaaatggacaacttccattctctcatgcaaccaccaaagcctccactaaaaattactaaaataccccttaatcttaaacttaggcattttaaagtcttcaggtaaaatggtcaaaatctataacccgctcaaattcagtattctacttttctccaacatatatcccactaagaaaaaggttctagacttacccatgtgctaaaaatagacatccatcgcattttccgttgtcgtcgagcaaaaattgtaaaaatagcataattcaaatataatacaaataatacatgttgagtttaataaaatctccagaattgagaaattataactctaatgctcatttctaataatgggacccacaattaattaaattcacaaataaccataaaaatatcaataattagtgttaattgcctttactaatccatattataaaatgcagtcattacataaacacttaactttgctcattttttctggcattattataggttggtcgaccatagtgactgttgcgtgaagttggccggccaatgctgtgtctttgaggggctagccggccttggtagctttgtggaagggctggccgactagtgttgaaacaccctaactaacataggcgtattacgtgatt

SEQ ID NO: 348095 - DNA, 695 bp, Cannabis indica
aaaatccaaagtaaaaatactcatccatggctgctgccatttgtttacaagttaacaagttttaatatctaagtaaaagaaacaagaaaagagaaagagaaagaaaacaattaagagagggtaaaagaaaaatcaaacactaaaacttggacctccttttctcttcctcatctactgtactttttctgcatttacttttcttccaaaaaatgcagcagctccttcattacgtgatcaagatgtgataatggtgtgcttagctttttttctcctttagttgttgggtccttagggtacaaaatcacaccctaaaattagaagcccaatcttttttgcactttggcccactaggttcagtcccctttttacaaagcttccagctggtctcatttttagtgacaaatacactcctgctgatgtggacaagtaaatttcgtgtttccacgtcactgccagaatgctgaattcgcttcagcaatctgccccaatttcaacttttgttctcacgtcttccttgcttccttctctttttcctaccaatttaatccttcctttttcaacaacaaacaagcacaattaattagaaaaacacaccgaacaatatcaatttttacaagacttaaaaattagtttactaaatagaaaatgaaactaaaactaactaaaattaagcaaacaaacacattttcactact

SEQ ID NO: 348096 - DNA, 932 bp, Cannabis indica
taatatatgtataatacacatattttttcaatatcaataggacttttatatataataggcaacacaagaaagtgattagtgtagtgtaatttaaaaagtttgacttcaacgtgtgtgagagtaaaaacaaaagcaatgtgtgagggtaaggacaaaagaaataggcttgtaatatatattaaatttgtgagggcaaattagtcatcaattatcacatcaacaagccatatttataatagtaagataatttgtgagggcaaattggtcatcaattatcacatcaacaagccatatttataatagtaagatataattagataaaaaattataataataaagacaaaataaattgtttgtcataaaattagatgataagggtaaaatagtcaagttgtcataaaattagatgataaggataaaataatccaaatttaatctagatactaataagagatttttaatatagtaatagaaaagtcagagtctttgttgatttgttttgttttgcttttttatctttattagtgtaattttataaagttgttaggggtaaaattggtatactaatataagtaattagaaaagtcaaaatctttgtcaatttgttttgttttgctttttatcttgtaattttacaaagttgttaggggtaaaattggtatactaatatagacatcattactacacttttataatagcaataaaataagggtaaatggcggcaaaacccccaatactttcgttttagtttcattaaacccccacaacccaaatttctgcgggtaaacccccaaaaccaggaaactgttagcaatttaacacttccgtccaaatttagctgttaactgccaggttagattgtccacgtggacacaataaacacgtggcacaattttattggtccacgtaaataattatttaaaaaaaataaa

SEQ ID NO: 348097 - DNA, 690 bp, Cannabis indica
tattattgttattatgttttttcatcatatatggaaatctaaataataaaaatataagggaagaatcgcattaatatttgcaatttctactttacttcatattttccgtcagtttataaccgtcattttaagtagtggattttgttacttatagtctgactaaagtctttcccaacagttataaaatgtcatttaaagtggcttttcgccacagttataaactgtcatttaaagagatgttttccatcagttactacccgttggaagtctttcccaacagttatcaaccgtcatttaaagtgacttttcccaacattttttaaccgtcatttaaagtaactttttgccacagttataaaccgtcatttaaagttccgcatttttatgacacccacatagccaacggttttaggaaccgttgggaaatagtataaaagacagttataaaccgttgggaatagcccattttgtagtagtgatagttatgcagccaaggcggactcgtaggggtacccgcgagctagctgggctcggggctgccggtgagggtgagaaccctttaccaccacctaattgggaagagttatatgctgctatgcaagaaactattcggcagcagggtgagcaaatcagagaattaagagagcagcgagctcagcctgctctaaatcttaatcctgatcctccggc

SEQ ID NO: 348098 - DNA, 703 bp, Cannabis indica
accatcgtactagtgtaggtagggtatgaaccgcaccttaagtactgttaagtgttgtaccacatagaccttgtaccttcccgtactagtgctggtaacatcgtgatgtactcttcagacatcatacacttttccaatgcactctgtaccgctaccgtacaagtgttggtagtgtatgaatcacaacaagcatgcatatacattaacacatagatacattcacatactcatatcacacattatatataattcttacctcctttacagattcaagtgtgttggccgacctgaacggaaagtctcgtgctggatgtatgccctaatcacatattaaaaccaggtaaattacatttttgaatccctaattcgggaaactcgagtctacaacctaaggctctgctatactatttagggattacattaacctaggaaacagggacacacccagctaagacactgaaaaggatgagaattgagaaaactggtttctcggggaacctgccaaaactaattaaccggttttataggtactggtaaaccggttaaccagttttttccattcctccccaaaaaaacctccaatttgctcaaaacttgtctaattgcctccgaactttctagagtacctaaatagggtatacacaacatattccaaccagaaaatcccaaaaaaactcattgaatcaaattttgccattaaaga

SEQ ID NO: 348099 - DNA, 639 bp, Cannabis indica
ggagaagtcaaaacttttaaagctagactaattgcaaagggttatacctaaagagaaggtgtggactatgaggatacttttagtccagtcatcatgcgcaaatccatcagaatacttctctccatagctggcactttcaattatgaaatttggcaaatggatctcaagacagcttccttaacaaaattcttgatgagacaatctatatggagcaaccaaaaggttataaacttccaggacaggaagagaaagtttggaagctcaataggtccatttatagaatcaagcatgcttctcgttcttagaaaaaaaaggtttcatgaaaaaattaaaacctactactttcaccaaaatgaaaatgaaccttgtgtttaccaactcaaggataatcaagtggtagtaatcctggtcctttatgttgatgaaattttgattactggtaacaatataaaaaaaaaatgattgacattaaggaatggcttaacactcaatttgagataaaagctttgggtgaagctagttatgttcttggtattcaaatcattagaaaccggtagaacagatcactttctctctcgcaagcagcttacattgataaggtgctagagcgattcttaatgagcaacaccaaaggggtag

SEQ ID NO: 348100 - DNA, 505 bp, Cannabis indica
ataactaatcagattgtaaagggttttatttagggcacaaaacccaacagcaggcatcggtgatactgatggtattaactcagccgtcgtcactgtgcgatcttgcaacgtaagtgttcgatcaacttcgtgatgtagtgaaaaggcaggggaagtagccgttggcaatggatctggcccttgcatcagcaccagcaccaaagtgatgagctggatagagttgttatatttgatgaccctttgtgagttattcgccatagtcgcattgggtcttcgtttcttggcccgaccccaacaccttttacaccttatcgtgtctgtcataccccattggacagcaggggacttcgatttgaggagaccggtggttagccaattccttaagtagttggccagccaaattttagcttctattagcgtgcacaggcactatgagcatttgaagaccatacgcgttcatcacttgtactttctttgactgaataggggtgtgggtgtccatttt

SEQ ID NO: 348101 - DNA, 1132 bp, Cannabis indica
ctgtatatttatttatttaggcaactggaaatatttttgtaatattgttagttttattggataaaactaaaaataaatcccatttctttataaaaaaaaaaaattatgtttgttaaatttgtttaattagtaatttcccccactttgacatgtacaaaatcgtgccctgtgaacttttttggccgttagaaattcccgtgaactattgagattgttaaatttaaggacttttgtctaatttcattcaattttactgtttcagtaattgtttatgtactaaatcatgctcctcagactttgatatctaccaaatcatgccctcaacctttgatatgtattaaaccataccccttgaacttttatccatgttagatttttttttactaaaattagacaaaagttcttaaatttaataatcttaataatttgagaaaatttttaacagccaaaaaagttaagagaagacgatttagtacatgtgttcgggaaaaaattactaattagttatttttttattattaattgttttaccccaagcgcggagccccagatcctacattcttttctctctcttcgatctctcgcgcgacctagcagagaaaaaacaacagctgcttcccctcggcggttccaggcggcgtctcttcacctaagcccatcacagttcctcttccaccatagctacattattatatctttttctcaaattcacacaaatttaaaccctaaaattccctgtcttcttccactcccggtgggtgctctggtcaaccacttcgccggttctatacacttccgcgctatcaggtatcttatatggaagtttcttttccgtttctacatatgttttgattcaaattttttgaaatgcagtactgagtctgaaaatgaaatcatttatagaaacgatgaagtacttttgattactactgagagcataaggctgagcgacatggaggaagccattaatgtcgagaagctttgagccgagtttcttaaagtttttcgcagcagacgatctaccgaaggtaacttcaaaattccctgtagactcgattttttttttattttatctcagttgttttgtaacattgctttggctcatatatttttctttaagtttacttccatg

SEQ ID NO: 348102 - DNA, 590 bp, Cannabis indica
gtcatcctcaattaaatgcacatactctgactgtgtcttctttgatttgacgagggctttgcctttattccagaaagacgccacttcgactatatcaaagtcgtcatcctcaaaggtcttatgtgcataaccttcatcttcaacagattttgtagcagatagtgaaggcgtagttactgattccaccacattttcctcggattgaccaacaacattagtcttcgaacggacaggggacttcaacggggactcctccacagcctggctgcactccgccttcttccccacttccccagcagcatcctcctccaactctcggtcaataccacttacaccttctcatttgtccataaatttcaaaaaaaaaatgatctcaactgagactttaactcattggagaagtactccttcaactcattgatagagctgacaaagtggtcactgctctttcttcgttctgagtcggagtagcagttgggcagtattacgggattcaaagtgagcgttatctgttaaacataacaaagtaaacaaatttaatttttcaatcccaaaataattaatatcaactaaaatcacattaccacatt

SEQ ID NO: 348103 - DNA, 847 bp, Cannabis indica
catcgttcacttctaaattcctatagaagctatagattccatatctatgttagctctcccactcaattatactatcatgttcccaaaatgtatgtatcaccctgaccgaaaagtaggcttaactaacatatcaaagaacatgtataataagaacgatggatattcacagcgtatcaatatcttggtacatatagagcgttctatataattaagagtacaattctgaatctatagtggcgcaaggaggaattaatgagtgttctacttattggaagcttgattatataggcccatggtctgcacactaattgagataatacttcttgcagactcagttaattggttttaattaatcaattataattctaaaattagactatgtcttatttctgaattttcactaagtaagggcttaattgtgaagaaaagaggttttgggttatttattaactaagagactttgttaagtttaatgaatatataagataaatggaaattttatttgataattaattataattaataaataaatagttttgacatcttataggatagaaattaaaaaatatggcattattgaacaaaaagataagttgttgaaataaagtggcaaaattgtaagtactaaggcccacatgtgtggccggcgatttagaatatttttgctcattattttttcttttttaatccatataattaaatcataaaccctagttgaaatgctataaaaggaacatgatgctctcattctcatacaacctatctaaacctagttttctaactctgtcagataactagtagatgagagactcctttcatagtgatttcgaatccttattattgttct

SEQ ID NO: 348104 - DNA, 1375 bp, Cannabis indica
agggcacaaaacccaacatagtaaccctagctcagatatttttctatcttcaaaaaatcataattaattcataaaaaatcaaaattgagttatttaaaagcctaaatttattactttttcatctaatttttagaaaaaaatactttgaaaacaaagcaaaaaatatttatcatcataaaattgtgatttccatacaatcatcaaatatgcacataaaccaacatgaacacatccaaatcaacacaaacattgttttaaatccatatttcatgaaagtaaatcattaccatggctctgaggcaagttgttggggattatcttaccaggatctagatttactaccatgtatgttgtttaacattctaaacatgaatttctaaaacaatagaatttaaacacatataaagttcaaggaaccttacattagttgcagcggaattaaatgactccttccacttagatctctaacccttttttctttctgtcgctgagtttaatcaagatctgagctcgacgctccttcaattgattggattcttcatagccttacacactataattgagtatcaacttgctatgcgtgggcatgtactctatcactataaggggttcaaatatttaagagagaaagagagaaggatttgaaaatagagagagaaagagaaggctcaattttcactaaaagtcttaagtgcatccattgtcaattttgagtccatcactatctatttataagaatccttctaggtttaggtttgaattatttggcattaaaaaattgataaataaatggtaaaataagaatttgtggtcggccataggatgtaggaccaccacttgcaattttgccatttttcaactatttatcctatttttcacaaatgccatattttcaaattcaaccacttaaatgccaaaactatttattgaataattaaaataattatcaaataaaattgtcatttaatatatttattaatcaaacttaatgaagtatcttaattaacaaataaatcctagaatctcttttcttcacaatttagccctagcttagtgaaaattcataaataagacataatctaattttagaattataaatgactaattaaaatcaattaaatgagtcttacaggcagtactgtctgaactagtatggggaccttgggcctatataaccaagcttccaataagcagatttagaatttaccaagtaaattctctaacttattaattcctccttgcaccactatagattttgaattgcattctcaattataatgaaacgctctatatgtttcacgatatagatacactataaaaatctaaccatcgttctaatcccaataaatcaaagatcctctatagatgattaaca

SEQ ID NO: 348105 - DNA, 985 bp, Cannabis indica
tagatgatgaaatcttcttgtccttctcctcttttctcttcctttttcttcttttttctctctttcttgctttgtacgaacagaggttctatggcagaaattgttcttctcctattttttttgatggaggttgtcttgtacaaaagaaggtctttatttgtaccctttacccaaaataaatcctacacatggcatggatctagtctctccaagtatttgctccaaccaccattcctagaatgccacgccatccccaaaattgccacctcatttaatgaagagacacctcgtcttttgttcatgtactttaacaatcagatatcgctacatttgatgcagcaaaaagttcatagaatttcagcaaaattaacaacttgaataacttgctcttttcttgccattttataaacaaaatttgttaatttcttactaatagcttcaaaatacacatataagcataaaatactaaaaatttcacaaattaaaaaacaaaataactgaaatgaaacacaaattacataaaaaataagcttaaaataatatcaaataactctttacgcaagagttatcggtcatgcactagttgaaaagaaaaagaagaggtcgggagagtagtatggttcttaagttggatatgagtaaggattataacagggtggattgaggttatctctgtgtaattttgcttcaaatgggattcacggggagatgggttgatttgattcttactcgtgtcacttaagtttctgatactattgtacacggtggtagagagatgatgcctatctttccaactgatggcttctaaaaaggagattcattgtctccatatttatttataatatgcgtcgagggtctttcctcattgattcgagtctatgaatctcagatgtagattagaggaatcaaagtttgtaggtaagatcctattatctctcatatgtttttttttacttatgatagttatatctttgtaaagctttcc

SEQ ID NO: 348106 - DNA, 536 bp, Cannabis indica
ggtaaaatatttccaacattactgccatagcaaaagataaattttataattgatctagcacctggggcataacctgtttctaaggcaccgtacaggatggctatagcagaacttaaggagttaaaaatacaactttagggaatgctagatttagggcttacccaacccagtgcatcgccctgggaagctttggctttgttgtgaaaaagaaggatggatctctttggatgtgtattgattatcgagaactaaataagctgacaagcaagaacaagtatccattgcccaggattgatgatttatttgaccagcttcagggtaagaccgtgttctccaagattgacttactttccgattatcatcagctgagaattagagatgaagacattttgaagatagcctttcagaccaggtatggacattacgagttctttgtaatgtcattcagattgacaaatgctccagctgcttttatggatctcatgaatagagtgttcaaggattttctcgataactgtgttatagtgtttatcgat

SEQ ID NO: 348107 - DNA, 488 bp, Cannabis indica
atatatataaaaaaaaacattcatataaaagtaagttaaagaaagcataccttatatttctgatacaatcctaacaaccaagtttaagagaaactaaaatcaaatattatcctaattctaccaaaatttcggcagcataacggttataattgaacatttccaaaaaattcaaacctattaataacaacaaaacacaattcaaaacaatataaaataatcacaacaacatttagcaatataaaagtttaccacccatccgactgcagtatatgtattcacagaacctacttcactacggatgaatatttaagatattcaaactctactaagcattcataattaatttataataaaagtaagtaaatgtatacctcgagctacctagaaaccgatcaataccaaataagtcaaatccttacaaattgacctcataacctacaacataaagaaatactacaaaattaccaatttctttatttagctactta

SEQ ID NO: 348108 - DNA, 439 bp, Cannabis indica
atgtttaatttattaaattataagattaagaatataatattaggaatatctaaattttaaattcaagatattatattatattatcttattagatatttaactaatttaaattatttaaataaactgataatttgaaaattagttaggtatttgaatttaagttagaatttaggtgatttgttagattttgaattttttttaaatattccctaactacctaaattttaaattctacttaagatatattttaaatattttaattttttaaaatagaaatatcttaacctactttccagttatctgctacatgtttgtttaattatttatttatttattcaattttttttacaaacctattatttatttgatctaaattgctatgattaacttgttgacagatccaattatctgattttaatcatagtccaattgtcaatag

SEQ ID NO: 348109 - DNA, 1188 bp, Cannabis indica
aaattatcacaattattataatctaattaattataagataataatactataaattattaaaaactccatagattaaaatattattttgcatatagtaataaatattacattaactggagaaaaaatattacattcatgaaatcactaagtttttttacaagagtattcgtatagttactaggagaaaaaatattacattcatgaaatcacttaatttttaaaattttctgaataattaaataacaaaaatatagttcttgattttccagtttacgtaccacacgtgttgaaaaaacttcaaatctattttcgacatcgtaaactattcaaaaatttacaggaataatgttataactataacgaataccgccaataaatttatttgaaaaaaatattctggcatatattttcgagaatggaggttaactaagagattgtcataggaggttcacggtagcattcctcttgtataatattttaaaaaattatgtaaaaatttattaattttttactaaattataattaaaaataataatttatggtattcacatttaatctacacacagtaaattaaaattttattttatcgatacaaatatatataactattaacaaaataatagaaaaaaatataaaatttacataaatatgacattaaatttgtcactaaatataatatttttttaaccaaactaaatatatgggtatataaatagaaaatgccataaaaatcattagaaacaaatcaatttcctttcatagtctacacttggtaataactaggagtgttcgtagtgcagatggtgcggttttttattatttttttaaaacaaccaacacatgcagttttttcaatttttcatactgcacctgcactgcgaaactaaaaaattgcggaaacagtaaaataataccccaagcaaacacaaaacccactaaaaatattagagtagaaggggaaaaaaaaatagagaaataaaaaccctaaaatgcaaatacaaaataaactaaagaaaaagataaaatcagttggactagaaacaaaaacatgaaatatgggtttgatattagatttacaaaaacgtggcatatcaaataccataaaaaactttttttttggaacaaaaatgatgaaaactacaactcaggattctatacttgacagcatgtttttgttggaaattattt

SEQ ID NO: 348110 - DNA, 661 bp, Cannabis indica
tttataatttggcccctcaacaaattataaattaacttatggtatctacacattatttccatgacaatttaatacccttttgatacgcataacataattggtcacttaattttttatcacactttataatagcatatacattatacatatgtgcccacaatagaatttaatccaacaattaatttggtatagaaatttaaatagtgtggtgtttataaaaaaaaaaatagtagagtgtacttattaaaaattaaattaataaactaaataaagatgtgaaggtatttattttagtcatttcacaaaaggtgaaatatatagttctaattatggggtgtttatataattttgtggggtataaatataacttttctactttatttatgtatattgtatatatattaaaaaataattgttaatgcagattttcgttaactaaatttgagcatcacgataataattccacacagaaaaaataaaaggtatagaaaaataatgtatgaacacagggatttttacgtggttttgcagttaaaattctgcatagtccacgagtcaatcttattcagatttcttattgtgttactttttttagggcctctcttgtataagattttttcgtcacttttttgagcttgtctgtcactatttataattacat

SEQ ID NO: 348111 - DNA, 1303 bp, Cannabis indica
atgcatgttatatgaatcatgaaatcatcaacttttaaattcaatccaattcaaagtcctttgattgccggatgtgattaataaagggaaatttaatttctacatcacaaatgttaaacactccttaatatataattaacaaaattaaatttaaaataattttttaaaaaccactcttattaatttatatatatataaaaaaaattattattttatattaatttttataattattttaattttatttttttatatttttttttaaattatgtatatttttttttttctaataaaattttacagaattttttattttaattttttgctataatatttgaaatataatttaattttgttcgataagtatatcttttaagaatataaattgaaagaaaaaaaaactaatataattaaaaatatatatatgtaaaataaatatctttaaaatgagattcatttatatacttttggggagtaaataaaactccccttaaatatatggaaaaatttaaatgaatttaaagagcagaaattttcacttctatggttatttttttcttttctttctttttgtataatttacaaaattattactttattttgaaaaaattattttatgaaaacaaaattaaaaaatatggaaaaaaaaatatttctaattgttagatattagatgtatattagctgtaaaagaattagatatttagtagatatttagtagatatttagtctcctaactttgtatataaatatgtattattctatgaaatcaacacacaattcgaatcactattttctacatggtatcagagcattgtgattcaaaattcgaaattcgaaattagggttctgaaaaaaaaaaaaagtttagggttgtttttttcgaaaatcctatttggagtgaacatcttttctcaccgcccacataggaggactgcccagctgccgatctacgaacccccgaagtccggtcgccagattcctcgcgcgtggggctcacgcgccgcctgaagcttctgcgcgtggggctcacgcgccggcgcgtggaggcgcgtgtacggcgccttcgcggcgttctgttgccgattcttcacttgggttcttctaagcccactcgcatctgttctaggttgtaattcggtatttgtttgtcttcttcgtgtttgggtgttcattcgtttggtgttcttttgttctttttctctgtcctttgtgtttgctttttgagattatggcagagataagattgattcaaaatcagttgtgttctgatgtgtcccgtgatgtctaaaatcacggatca

SEQ ID NO: 348112 - DNA, 856 bp, Cannabis indica
aataattttcataaataatcatgattaactgctaatttccaaattaactaagcgggctttacatagctagccaatgtctgaataagagagttatggtgatgcgggaaaacggtgaagtagattctgaagatgaagaagagcttgctaatatgccaccattggaagatacatctataaaagaagaagagtatgggccaaaatacggtgacatgcttgaactagtcaccagacgagcattaaactcgcaagcaaaagaagagaaagaacaggtacagcgtgagaacatttttcatactcattgtcatgtgaaagacacggtatgtagtgtgatcattgatgggggtagttgtactaatgttgctagttcatccatggttgagaagctgggacatccaacgcttaaacatccacatccttacaagttgcaatggttgaatgttagtggtgaagtgagagttaccaaacaagttttggtatctttccgaattggcaaatatgaggatgaggtattgtgcgatgtggtcccaatgcaagttggacaccttcttctaggaaggccttggcaatttgatcgacgagtccaacatgatgggttcaccaacaagtactcattcatgttccgtcaacgaacagtcactctagctcctttgacaccaaaacaagtctatgaagaccaagtgagattgaaaaaattgagtgatcaaaagaatttgagtgataaaaagaacttgagtgaggaaaagaatgagaaaaaagagagccaaaaagagaaaaaaatcgaacccagtgagagagaaaacaaaataatttgtatgcaaaaaaaaagtgagattacacgagcttggcgtacaaaaca

SEQ ID NO: 348113 - DNA, 510 bp, Cannabis indica
atatgccaaaaataaaattaacacttatgttgaaaataatttagttattttttttagacatttattgaaattgttctataaaataaacttatgtagaatattatatattaaataataaagcactttttagtaacccatgaaattagttgatatattgaattttgtttaagtgtaaaatttggtatgttgaattaattattttaggatttttaaggtactattgttttcttttatgttattttagaaacttgtgaaaagtgttttataaaattaaaatatgatttagtaatatttaaatatgaaataattatatatgtatataatagtaactaattaaattagttggtatataaaattttgttatagttaaaaaattgtttttttagtaaattaagtagaaaagaaactaaaatgttacttttaattttagttatcttttccgataatggtaaaaaaaaaatatatgcttctcatatgttaaaacgatcttcttgaaaaatagataatgat

SEQ ID NO: 348114 - DNA, 568 bp, Cannabis indica
tatttacattaataggtaaaacaaacaaattagtcatagaggggaattaaaaaaaatatgctaaccgtgtcatttataataacaaagaagaaaatcctaacaacaccttcaattaaaagctataccaataaactaccagcggtaaagcatcaaaggagtctgaaaatctagacttacaactattggatgaacaaatcatatctatcaatgactatcatccaaaaatctttcaataataattaagtaatgacaacatgattattcaaacttgaataaaaggaattagaataatcaaccatcactactaaaaaattgggctatctcgacaccccaatctcggcggttgttcatgtaactgccgagattggtatctatctcgacgattttttataataaccgtcaagaatggtgatattttttaaaaaataaataaaaatatattcttaggggaccaatgtcagcagttcacccgtgaaccgtcgagactggattgtgatatataaaatagagaaaattgtgcaagaaaataaagatgaaacttcaagcctgaattcgactatgttctgtt

SEQ ID NO: 348115 - DNA, 518 bp, Cannabis indica
ttggaaaataagtggaagtttttcccatcagtttagcattgtagtaaaaatactgttgggatagttattgccaacggtgaataaccgttggcaatactaaatagattttgtttaaagaaaaaatagtttatcccaacgttttttaactgttgggaatagtaagtatacgcaacggtttagaactgtagagaatagttactataaccaacacttattaactgttggaaaagaagtctttcccaacggttataaaccgtcatttaagatgacttttctcaacatttcttaaccgtcatttaaagtaactttttgccacagttataaaccgtcttttaaagttccgcattttatgacacccacatagccaacggttttagaaaccgttgggaaattatataaaagacagttataaaccgttgggaatagctctttttgtagtagtgtactttcactactacaaatataagaattcacgacggtcctaaaaacgatttttttcaaggaccgtcgctaaaaaa

SEQ ID NO: 348116 - DNA, 628 bp, Cannabis indica
aatcttcatttgcttcgatagagacaatagtgtaatttttaccatgttcaagcttatacatatcatcatcttcaacaaaatgtacataaccaaaagaaaagaaaggaaaaaaagagtaaaatagtagtgttatctatttcacttcctcaatgaaaagtgagataagaaaatctttacttcattttgttgtgaggatgagcttggctcctgaaccacttcctcacttacatccttctcaactttatagttattctcttgtgtttcacttgctgcagctggtccattgttgggagatggtgtgccttcaagttcatatagtagtcgttttcgacattagacatcctcagagaacatagtattcatcaactgtgcttaatccctactttgtaatgattacttgaagcttagttcccaccattaatattatcttcaatttgtgaaattaccatattgatcatcatcaatgaatttatattaccataagtcgggttttaaacaaggaataaattaattataatatgattaatcatagcatctgtactaattgttcgtgcatttgtatcgtacttacaattaaatgtagaaatagcagccacaattaaaagtagtcctattagaaaagaacaat

SEQ ID NO: 348117 - DNA, 829 bp, Cannabis indica
aaataaaagtggatgacgtcggatacttcccactgaacgcccgccttatcctataatacaatcagacccaaaagaatagcccacacattagggagtaactgggcaggagcaagcgaataatgtataagaaactccttaatgagtctaggaatgggtaacctcagcctaatcttcgactcaaaccagtatgagtgtaggcatagccactcattatgagaggaatccgccctctcatgttgtttaggaagcctaacttcgacccccgacagaaaaccacacaacaaaaccaaggaatcgagttcacgctgggtgaggaccgacggacaactcgacctaacatccaaataggaactacccagggcatgttttttcttttttgccttcttcaacggaggaatcgctagagtaaccccctcagacggggctgcttggccactaacacccgcctcgcctccagaacgagaacggggaataacagagacgctgcccagacactcaacttctgggtcgtcggggacttcaacattctcagtctccataggaggagtatcagagactaacaacgattcgacgaatccaggagcaatactcgaggaaagagaatcagaaaccgaaggagagacacctggacaatccgcatttgacattataccacagctaaaacgacaaccggaatccgaagcctacccaaaaagaaaaagaagggggagaggggctaaccctaagaagaaaactgcccttacaatctaatcataacggggaaatgccaggactaaatagtggaagtagagaaaacgggccagaggaccgggatgatatcccagaggcc

SEQ ID NO: 348118 - DNA, 1384 bp, Cannabis indica
ttaattactactgctagtatacgtatatggtattattacaagtaaggaaaatatgtacgtatattgtattttctaacaagatattattattgataaaaatgcataacgtggagttgggtggatataagatgattcagagtcaagacaactttggtttggattttgtaaactatcatttggtaaccaattaccaacttcattctcaaaagaggtgggaaccccctcttgtgcttacaaagtataacctaaaataaaaagagattagacatataagaaaagatgcgctctttacttgtctaagaatgccgtatagaaaactgagataaaacaagaagcttaaggatgtattacatgtagaccaagttgaaaaatggttactaataaatcattcttacaaaaaaataaaaaaaataaattagatattagttgaggagtatatcatgcataacaacaacaataataataataaacaggccacatataaagtaaaattgtaatttactctttaatttcgcccgtacaaaccttgttattttcttaaacaggccacataggtctagatttttgatcattgggtttagaacagaaacatgtagtatcagttacttccaaattttcatttaataaatttaaaacagagtttgtaacggacgaaattagagggaaattacagttctacagacattgggtatttatgccgttaaaaataaacattaaatttatgtcgtttacaaacttaaaactttgagtacttatgctgttatttaccctttaaaaaatacccaaaaagtaaaataaagactaaaacataaaaataacatgttacacttgcctctttctaatgcccacatcccacatccaacaccccctaaatgtttcattagaggcccttatccaaatccaaattgaaagaccaaaattttccttgttgaagtggggcccttttatactcttctctgtttccatgcaaagccaaacaacctccctccctggtttcgtcataaacagcatatctaacaagcaaccatggcgatatctgctctgagcgtttccacaccaaaaatctatacccatcacagcattaacgccatagctgcctcgaaaaggcccaattcattttgttcatccaaacctaacgtaaatgccgctacgaagctttcttggtattccaatttcgcgcttgggacgaagaaatgggttttcgatgttggaattgggattttagcagcctcggttgttgccatttcacctttggacgccgaagccacaaggattgagtactacgccactgtggcagatcctccatgcgacttcaatttcgctaattctggacttggttactgtgaagttcaaccgggcactggtgtggaagctccttatgggg

SEQ ID NO: 348119 - DNA, 1031 bp, Cannabis indica
ctcccccagatggtgctttttacaactggagcactctgggtaagtgtatcgggttttggtgccactctggcgattgcctcgactctggttcccccggaacctcttgttctgacccgagccactggttgcagtagatgccttccttttttgatctatggccgagccactacctcccctgctaaaacctgatgtaggaggggtaggagccccgccaacaaccggagtcccacaagactctaccatacatcccactacgccctcagctcgtagtgccttatccaccatttcagcataggtggtactatcttcaatagtgatcatcaagtcatgtctgatcttcgtatttaagccatccagatacttttctttcttactgaagtggatggcacaattcctgatgccagcctcgctaaacggtcaaattgagttgtatactcagtaacactcatgttttctttctgaattagttgggtgatttcttttctcttagcacttctgactgcttcgttgtaatacttagcattgaatagttcctgaaacttttcccaggtcattgtcgtaacattgtgaatcatggacaccatgtcccaccaaaccagtgcctcttcttgaaattgaaaagtggcacaagccaccctatcactaccgatgacgcccataaaattcaagattcttttaatcactgttagccattgcttggctttcatgacatcaggacctcccagaaaaactggaggtgcttgcttgcagaacctttcatacaggggttccatcagattcactaccaccactagttcggcctggacagcaagggcaggtgccactgggatttctggagcaggcactgcaggagcaccctattatctcaaccgtagaatctcatcatcttgttcattaatcttggcttgcatcgctccaaacctatttgcccaattttgggcatcctgagaagcttgggcagcctgtgtcgggtaaacatcaccccggccacatgccctgcccgtgggacctctacctcggccacggatatt

SEQ ID NO: 348120 - DNA, 1335 bp, Cannabis indica
cctggtcgacatatttgcccgttgtaacgttcgatatcccgatcaaacacccatcttgtgtgttgtcttttgtagatgaacccgggtgagttttggagaagcaaacaccaaattgactaggatttactttaactcttgcacgaggatcatcctcgtctttcttctagtccaacttcttcgagtgacaggcattcttccttaaatcttttgtccagccatcggatgatggctcgtaccaaaaagacaatgcgtagggtcgacacatccgaccaacaagtggccaagcatgtaaccttacctagcaccgaacaagatccgaccatccaagaggagaaggatcatgaaggggacgctgaggtccaagagattgaggagcaagacgatgtccgtcctagcagtccctccgaggaggaggaagaggaggaggttgcacccccgaactatgggggatacaatgaggtcgggagccagttgatgctgatggcgacgtcctagttgagggcgttgactacgctattgaggaacttactgctgtggttcctcatagaaggcaaggtactttgggtgccaggtgggtgagccctccgtccaaggttactgaggtgcacctgcaggatctcgatcaggatggctacctgggctaattggactgttacattctcacccacaataatcgggccacaaatcctgaaaagggaatgtgcgcctggtcgggtaatcatgcccagcaaggggcattgttgcctttgcacccgtactttaggaatctggtagaattcttccacctctgtctgacccaatttactgccaagggcattaagtatttgtttgccctcttcgttctctatgcctcccagagatgggatatgccctctccccatgaggtaagctggttttttatttgaagtctacccttaagcaaggcaaatcggggtacttctatttctttcaaccagacttcaagtggttgacaggcactagggataaggccattagcaagattgagttttttgttgacgagtacttcatggtggaaggcatgggcaccacccatactcagttctagcagatccccatatatcactgccctcccttcactcttgctcttcgagatagagctcaaaggcttgctcaacttccggtggatgatcgaaatatcattcagttgacctccgaggacaactttgtgaagtacgggctttatccaaaggattttattcctaagccagtgaaggagaggaagaggaaattgttggattttgtgccctaaataaaacccatttaaatataatcagatttacttattaataaagatcagaaataacattttatgtt

SEQ ID NO: 348121 - DNA, 635 bp, Cannabis indica
tttcctggtgacatggacatcaatgtttgacatgtggcatgaagaatgacatcaaagagttgagtagacccgagtcatagcagtcgacctacgaggggaccttagccatgcgcccaggttgatttcgagatctgcaggatggaagttcaaacttcaataacttgaatccaactcactatcttttagtattatataccatgaagacatagagcaacctaatccaagatccgggagctaaaattacatgaacctacaacttaaaagccagcttgggcacctaagatttcacccagcgcgcaagttgacatcctcaactaaggtttcaatttttgggaccgtcttagtgcaaaaggatcaaaacatgcattaggacatcaaatagacataccatggacatatttgaggcatctgaattagaatcagaggaagttgatttttgagcacctgaggccccaagcacccagcgcccaggttgacaatctgtcaatctgggctccttccaagtatttgatcgaagatctggctttttcatcttcttcgtcttcatcaaaaatagggaaatataggtcctttaaaaggaaaaacaacacttcctgggtacaaaaaatagggctagcgcctaggttgacacctgg

SEQ ID NO: 348122 - DNA, 670 bp, Cannabis indica
aaggagctcagtttcccctgaatgttaggggccaaggtacaggtcccaaggccagggctcttggtcggggtgatgttaacccgccacaggctgcctaagccaatcaggaagcctagaattgggaagttaggtttgctgaaatgcaagccagaatagaggagcatgataatgagattcagagatagagacagcagggtgctcatgcagtgcctgtgccagaagttcctgtggcacccacccctgctgctcaggcccagatagtagtagcggcaaactgaatgggacccctgtatgaaaggttccgcgagcagatacctccggtttctctgggaggtccggacgtcatggaagccgagcagtggctatcaggaattacgagaatattgaattttatgagtgtgacggaatacactacgcagtttgatcggttggtgaggttggcctcgggatttgtgccaaccgattttagtaagaaagaaaaatatcttgatggacttaatgtgaagatcaagtatgaccttatgatcactaccgacgacaagatcacctgtgctgagatggtggagaaagcactgcgagctgagggcgcagttggatgtatgttggagtcagttaggactccagtgagtggcggggctcctacccctcctgcatcaggtttcagcagggg

SEQ ID NO: 348123 - DNA, 588 bp, Cannabis indica
actataactacattacgttacgtttaacgttttttatttttttttttttttttttgcaaaatcatatagctaggctgctgaataataagtagctctcttattagattgatatatagagtaaatatttcagactctgtattaaaagttataaattggactatttattttgttaaatgataaaatgaaatttaatttaatttctaaaatggtaaacatgtataccttgggcttaatttttcgatttttttcttattaatataactaatttgaagataatgaaaatgtaagtacagttttatcataacacatttagatcgaattattattaaattttattttgataaaaaattagtttaaagtcctatttgtactattttgaaaaatacaaactccattttattatttaacaaaacaaaaaatctaattaataactgttagagattttattacaatggaaaaaaatcaagatattacaactctattgtaatacaatacaaggaccaacaaagagattaaataaattttagaacaacataatatacaatatatatacactatatatgttatatatatataagaaatgtagaa

SEQ ID NO: 348124 - DNA, 530 bp, Cannabis indica
tttgcccaactcacgaaaatttcgaacttctgagtttttacttttcgttaaatatttttattctttaatatattgagtagtcctggttggcatatttgcctgtttaatattcgatatcccaaccaaacactcagctcgcgtgttgtcttttgtagatgaaccttggtgagttttggggaagcgaacaccaaatcgaccaggacctgcttcaacttttgcacgaggatcatcctcgtctttgctctagtctgccctcttcaagcgacgaacattttgatttaactttcctgtccagccaaagaatgatggctcgtattaaacaaacaatgcgtaaagccaacgcatccgatcctcacgtggcccagcatgccaccatgcccaacgtcgaacagtatccacccgtgcaggaggagggagatcatgaaggggacgctgaggtccaggagatagaggagctgggcgaggtctgtcttggtagtccctccgacgaggaagaagaggaggaggttgcacccccaaactttagggga

SEQ ID NO: 348125 - DNA, 790 bp, Cannabis indica
gcggttgtgggtgggtttcgtggctagttggaggcaacagagagagatcggcggtggtggtggtttcgtggggtttcggggttaggtgcggttgggatgaagaaatgagaaaatagttttaaactgtcgagtacaagagtattagatattcgatagttttacttaaaatcgtcgcctatttttataacgagtgaatacttaatttttttcaacagtttaaaacagtcattcatatttattagcgacggttctcgaaaaaaatcgtttcaaaaaccgacggagaataccctttttgtattagtgtaattacctaaatgatattttatacatgcataaagctgatttgataagattttatcaatctataaagagtgttttcagagagtaaataaaaaaaaaaaactttatttacaaacaattgagtttgtaacaaatcaattctaccttgatgatctttttagtttaattattaagacttaaactgcatatttatacagaaccttaatagaatatacaaatcatcattacacaaattacaaactaagtaattatatccaatcaaacatccaagtattcctttctcatgcaaagcaaactatgatacagaacaaaatacacagtaaatatcaggaataaagcaatttgtttaacaattaagtaacattaatttggaacaaaggaagaaccccaagtgatagtttcctaatattaaaaactacaatataaaagagcacaatcttagtgacaaattataatcaagtaagtatcattttctttgtaattctaattg

SEQ ID NO: 348126 - DNA, 943 bp, Cannabis indica
aatttcaatgagcatggaatctgctcccctcttcatgtcaatcaatagagcaggtcttttaaaagggtcagccttctggaatgtaatatgtcttgatggaagtattggggtataaaagtattcttgatggtaaaggttgtagttgctcttggtcacattttctatgtatggactaaattgatggaagtggtaaaatcctttctctttttgagttggacttcttttcaagtcacaaaggaagttaattttgtgggagttgggacagaccaatttcttaggtgggagaagatgaaaaaggtggagaagattctatagtcatttagatttatttggttgggaaagactccaaaaaaattctctatcgatataaaccacaagtgtaaaggcaagtaagcacccgcatttatgtgaaatcaatgggaatcattgggacacccaaattgtggtttcctaaaaatagtttccaaaagaagatagttatatattatcaattgaacttgatgtacaaagatggtgctgaatacaagagatcttaacttgaaagcccgatctcttgggtcatcactttcaatggcagccttaagaagctcagctacaatcactttcctaccatgcgccttgtctaagttcttagatttgggaatatttagcttgtctctaatgaactgagccacatgtggatcatattcatcaagaattcttttgcttctcttcttctaaggcatggcgacttcaaaactcagttacttacaactcaagaaaggtcttttctgttagcccaagatatgtttccaagaggggggtgaattagaaatttaaactaatttcgataaattaaaacttttaacacaaaattatgtaattagtcacttaatcaaataaaagcaagtaatatggcaagcaatatattatgacaaatgatcaaacttgtaaagtaaagagt

SEQ ID NO: 348127 - DNA, 493 bp, Cannabis indica
tttaataaaatataactagaaaacacttcaagcaaacagaaaataactatctagattttcactaaataatctctttattttctaattaaaatataatatattttagtctatttattttaattaatcattaatgaaaaaaatttaattgatttaagttaatctaaaattaattaaaataattaattttcaactttactctatttttcaaaaaaaaaaattcaaaattatctgcatttaaataatgcaattttgaatttattcaaaagaaaatgattaataacataaaataaaatatattttgaaaattattcaaatttaagttgttctgaaattaaaatttccaacttaaaatgatattctatttaattaaatattttgaaaataataatatttaagtgtcaagaataaaatcaacttaaatatttaatttttaatttaattaaatgtattaaatataattaaagaatcaagtataaaataaacttaattatta

SEQ ID NO: 348128 - DNA, 568 bp, Cannabis indica
accatgggtaatgcatggtcaaatccctaggtgatgtagggcttttatgtggaatgtccttattgtcttttgactgacgtgactcttcacagtgtagccgtcaatagacttaaatgatcattacttcgcaggtgcaaattgggggttgtgccgtcagactttattgcgtgtagcagattcaatgcgaaatgactcctcaggggaagcttgacacctcgtggagatgcttttatgttacttaggcttccaggagcatagggggctccgtatgccttctccaggaggcacgtcctggatgctatcttctttcataaagacttagcaaataatttaagtattaagatgttttgatccacgtgtccctgtccggttggtccacgtatattgggcaaaatcgggggcaacatttaccccccaagccttgtttatttgaaaaataaaacaaggcttgttcaagtgcctccggttgactcctcggtttcctggcacgtgctttgggcgcgtgaaggtgcatttaatgatcaccattaatgcagtgattcactttttgcagacgtcgattcgtttc

SEQ ID NO: 348129 - DNA, 999 bp, Cannabis indica
gaaaaataattccaagtttaaagaccgcttggccttatggctggacaaatctagaaaagaaagataaaaagagaagtattcagatggctggagtctcaggctccttgtacgggtcttttgggcctgtaggagttggaggatctgttgtcgaggaaaattttgattacctggtcgatgtcaacgttatgaacggaagtagaagtggttgcctcggactctccataggccatctgggaagcacaatactcgagatacatgtctttggcatcgcctaggtaatcaaaatttgcgtgaggactagccttccaaaagtcatagaaaatctcgagatcggttgtctctaaggcattcaccttcccttggagcctctctacttcagcgttaagctcctcctccttcgacttcttctcttcttccaacctgcggaaaagagttcgaagaaccaccctttcttcctgaaggtcggtcacttctttggacaaggaggtcatgggagcctcaagttggtcagaagcctctaaatctttggttcgctcgggcaccttcttctcaacagcaagaagctttttgttgatttcacccagttccattcgaacggctccgagttgaaccctggcttcatcagcatccttcatggccaagtccccttccgccctcatggtgttggacatggcagtgttcttggaagcagcagacttagctcgagaataagtgtaagccatcttgagaccagtctgcacagagaaaaaacgtttgaatctgagccaagtaaagaaggattaaaggaaattgtcaagaaagactcaccgtcgtaaactccttcaggactcctcccatcaacaactccagggaatgctcgttgtcagctccggcaagctgctcattcatctcagagaccgaccgattcatgtaatgggtgaacatctctttgcctctcttagtctctggatgcagtgatggaggtggggtaggagcctggatctgctcagatccactttt

SEQ ID NO: 348130 - DNA, 506 bp, Cannabis indica
aataatatatgcatgtgtatgttagcccaggtggcttggcttctgcaaactcatcacttttggatctctcctaatttttatttttattttttttattattttctttttattgcaaggggcaaactagattgagtatggattacatatttgtagagatactagtgtactttactttatatatttataatttttgatgatgtcattcttcttcctcctccattttctttctctgttacatgtcattcttcttcctcctccattttcctctgttcttcaacctccatagcccacgatcacccagtcgaagcccttacccacattttttctcaacctcccatctatgccactatctccattttgttcgataatctctgtaagttcttcctcccccattgtgttctcttcttctataaatgaccaccactagaagtggttcgaagtccccatttccagctaaaaaaaattctaaaattcaaagaaacctcctaaaaattcatataaagttg

SEQ ID NO: 348131 - DNA, 514 bp, Cannabis indica
aaaacagtttgtccaaacaattccttctgatcgggggttaaaatagcaatgattttaaacgagcaagtagaagtcacccgtcactactacaagaaaaggcattttatcccggttttttatactttttatcccggttttcgctaaaataaaaactgggatgtatgctagtgggataaaaggtatttaaaaaagccgggataaaaggggtatttttatcccagtttttcatgaaaaccgggataaaagtaccccttttatctcgattttttgagaaaagtgggattaaattgtacttttatccacttttataaaaaaactggataaatgtaaaattgggatcaaaagtcttattttttaatacatacatattctgcctatattatatatattaatactatctatataatatatatatattgttggaaattattttaccaggatcttagatctactcacaagtatgtttattaacatcctaaatatgaactttctaaaacgataaattaaacacata

SEQ ID NO: 348132 - DNA, 862 bp, Cannabis indica
cacctgcgaggaatcaccagcgtacttcccaaacccatatagagagggctcatacaaaccccagcgggggaaatatgacaaaccacactcatgggggaagaacaaagcgtgaagaagcaagtggcacctcagggcgttcaaggacccacagtcgatcaactcgaagaggagagagtgctcaacaagctaatgatcgagaaagcatgggaatcagtaaatccgcgagtcactcgaggacaagatccttgagcaggacgaggtccatgagtaggacacagtctatgagtaaaatgaggtctgctagcaattacaccctgtcagatctgcgagatcacttgaatcgaaaaaaaccttatcttcgccaacaaattggtccaaagcaggaggatcctatccaattgcgaatagacgagttggaggataagttcaggagatatcaagtaggggaaatagggagacaatctggatacgactcagatgaagaacttgagtcgaaccatccagatattctgaatactccttttcccctgggatttaaaaaccctcatgtctcatcgtatgatggaaccaccgatccggtctcgcatttgaataactttaacacaataatgcgagctagtaatgtgacaaacaatttacgttgtattttgtttcccatctcgttagttggagcaacaagcagctggttcaacaaatttactcatcatttcacaactttttaggaatagctatctaaggacttcaagaaacattgcaggtcgcaagggatagacgacccgaggtgtcctcgttaaccaacataaagcaacagccaggagagacacttaaggcgtacttaagtcattttagcacgactgctaca

SEQ ID NO: 348133 - DNA, 1093 bp, Cannabis indica
tattgctttatgagtgcttattttattaacatttaagagagatatagtgttagttaatttaagttaaatccatcatccctcgaaagaggttaataggttacattagaattctcgaaactacaaattataggataaattgggataattgataaattaatatatattcatagtttgaaatagggaaatcaatgctctaggtttttactttctggttaaaaattgttgcttgtgtatttatttttctatttacttgattatttaattctcaactataatttactttgtgttatctaattaaagtataaaattaaaaagtataataattagtaaaatttaataactaatccttgtgggttcgacaacctttttagtattaaaactttattataacaacgttgtacgcttgcaataaaaatagtgtatcatcttattatcctttgcaaaggtaatactacttctctgagtgtagttcaattttatggattttgtgcttccacttgcctatatactaattatacaaaattcttaattatctttggtggaagcaagaattgttgagagtctctagcatgaatgaaggttcctttcccctgaattacgtgggtgtgcttctgaggccaacaaaatggaaagctagggattatgaaggtatctattaatgcagattctcgttaaccaaatttgagcctcacgaatatgattcaacacagaaaaactataaaaatatgaacaccaaattttaaggggtttggagttaaaattctgcatagtccacgagtcaatcttattcagatttctgagtatgttttttagggcctctcgcgtaggagtcctttttttcctccttttttgatcttatctgccactatttataattgcatagtggcagttaattacaaagctgaccaaaatgtaaatacaatcattatcccttaaattgtgggatttgattacaaaatgtaaacgcggtacatgattttgaaagccatacagctgtgattttcccgcttatactgggtcagaagtatcgtgtattaaacacgtctttaattgttgattctggagatatatcgacagaaacttgattatagtg

SEQ ID NO: 348134 - DNA, 725 bp, Cannabis indica
ttaggccggctgaaagaaaaagaacttgtaataatattttgtaaatatttttgggatcccaatatctgtaacttttagattgtaaagtttgaaatattacaagtctatttccattcctattgttattaaagtttgaattctgcgctaattttattagtaatcctatttaggggattagggtttcataagtatcttgggtagcgtgcctagttatttagggcgttacacgagccctcaaggagttgtaccaacatccttggccagctaagagaagcctataggccggccagggtgagcctataggctggccgggatttgtgcacaagttggccgaccaagaagtgacttccggactaagggagcttccgttcgaccaagggaacttggcctctaaaactatcatgcgaattaaaataccaaaaagattagaatctaacgtgataattaaaaagtttctaaaagcttaaaaagcttgaaacttatcaatggtaggttcaaagaagagatgtcaaagaaaagaagatgaggcatatatggagagagagaagattaaagatctaaaagcatgtcatgcacaaagccaacacttggctagacaaggtcgctcgatagaggctattacaagcaagacaagacttggaaagtctctatatgaccagatgttcaaacaaggacttaggggaaaatattatcctaaattttatccacctgacgtggcatgtcca

SEQ ID NO: 348135 - DNA, 2045 bp, Cannabis indica
tttagttggaggaaactttgcaaaaataagagctctagtgggataggttttcggagtttgagggagtataacctgtctttgttgggtaagcaaggttggcggttacttctgcattaggattctcttgtgggtcagatatataaggctcgatactttcctaactgttcattcttggaggccgagttgggtggaaatccgagctttatatggcgcagtgtcttggagtcacaaacgctgctttaagatggtacccgtaggagaattggaccgggttcatctactgaggtgcttaacacaccttggcttttgtctgagactaacccgtgtgtggtatctaatcatccgggactggccaactgtaaagtgtcttaactcatgaagccaaatagtagacaatgggattcggagcttattgaggatttgtttgattcccgtgatgttgagctcataaaacaggtgcctttgagtgatagtcttaggagtgatagttggtattggaacaaggatccaactgtttttttcacggtcaaaagctcatataatcacttacagacggtcaatggtagttggaattcatccatggaggatgatgtctggaaaatgctgtggaagattaaagctcctcctaaggttttacatttttcttggaaagctctttcgggttgtttgcctacgcgtactcaacttcatagtaaacatgttccggtggctttacactgtgtgttgtgaaactatggggacgagtcaatttttcatgtgttggttcaatgctcctttgctcattcatgttggctccgatcggcgttaggtgttggtgattttgcagcatccaatttttttgactggtttatggaggtgttgggcgtcggcaataaggggttgattgaagaagctgtcatggttgcctgggcaatttggaatgctcggaatgatatgctttggaatggtaaaagttgtagtgctgctgatgttgtttggctggctcgtactactcttcgacaatggacgtgtgcccagtctaagcggctggattcaggttccctggcttccaatcgcactgacacaagagaacactggtccaaaccggctgctagacagataaaaattaatgtggatggggcggtttttgaagacacaaatgagatcggcactggttttgtagcgcgcgaccatgatggtcgaataattgaggcgttttcaactatttcttctgtcagttgccgacccgagattgcagaaattctaagtgtcaaagaggcacttagttggataaagaggcataataagtcgaatgtcattttagagacagattgcatcttagtagttcaagctattcttagttcggtagctatgccttctatttttggtattttcgttaaagattgtcaatttatcgtatcttctttaactaatgtttctattggtcatgttaaacggtctgctaacaaagccgcacactatacgacacgtgatgcttgttattggtcaggtcgtcgttttactgagagtgatgctcccattgctcttaaggcctttgtattagcgaatgtttctgtctaataaaaattattttcattcaaaaaaaaaaaataatataattaactaataaatttattataaagtatgattaattaagtgagttaacgtctaattcaaatttaaattaagattttatataaaaaaaatatataatctaattttgttgatatttttaaattaaatttaattttttaaaactattttcataaaaaaataattaattagttgatgtaacagtgttagctttaactgttaacattaatagaaaaataaagaaaatacccttaaaccaacaatttcgttagataatcacatacaatataataaaagaatatatatatatatatataaatatatacatgtgtcatgttctcttctttttttttttatttttttttcttcaatttattatattttattcgttattttgtaattttaattctcttaattttaatttttaagtatttattaataatactacttagaaatttttaagtattgtagtg

SEQ ID NO: 348136 - DNA, 1031 bp, Cannabis indica
agatcctggtaaaataaattccaacattgagagtcactgtaacacaccagattcttgactttaaacacattagcaattttcaagccaactatcaaggctcatattccgcctcgttgtttgaagtgtcaaattggaatcttaaaggcatagtgaaacttaaagctttttggcgagattagtatcacccctgcaccgagccatgttcattagatgctccatccacatacaacttccaagtgtctgtgtcttgctagattagtggattttcatctagaattatcccttctatcaggaaatctaccaaggattggcccttgatggatgtccttgggtgataagttatgtcgaactaccccaattcaatagactattttaacaatcttcaagaagcatctgtttttgacaaaacttgtctcaagggttgatcagttaacacctttatcggatgttcctggaagtaaggccttaatttgcgagatgcatgaattaggcatagggaaagttgttttagatgtggatatctcgattcttcccccagtaaccttttactaacacagtaaattggttgctggtgcttcccctcttctctcactaatgttgcactaatcgcattctctgagatagacaagtagataagtaaagtttctccagttattggtttagccaaaattggaagagttgatagatgtttctttatgtttgcgaaggcttcctcgcactcgtctatccatttaatctttttgttgcctcgcaacacattgcagaatggtaggaactttatcagttgatttcgagatgatattgttaagagctgacattcatcctgttaaggcctatacttccttcagttacgttggtgacaacatttctatcagagccttaattttctctaaattttcctcaatgcccatcatgttgaatatgaattcgagaaattttcctttggagacttcaaaggaacacttctttgggttgagtttcatattgtactttttcagtatttcaaagcactccgcgaggtcttttgtgtg

SEQ ID NO: 348137 - DNA, 540 bp, Cannabis indica
gaaaatgaaaggcccggggaaccctgccaaaaccggctagccggtttttgtggccctggccggtttgtaccaggtttcccaaaacctttcattcaatgctcaattctccaccaaatgcaatgaaaccttccagagtacctaattagggcataaacaataaattccagccagtatttcacagaacaaaccattaaaaatcaagttgccattaaagctcaaagctttgaactcaaagctcaaagttgcaaaaaatcaacatcaaacactaaaaccagctgctaagagttaaaatcaactcaaaggaatcctaaaattcgaaccctaaacctatcttaacctaacagccatcattactcaaaaacacaagcccaaactaagtaaaaagcttaaaaacacatattcaagagttctagggttttaccttgcttaaaaatcacaacacccttgcttaaaattcagcaaattccagcttgaatggtgaagttccccttggtttttgccccagccgaaagagaaaagagagaaagagagagttctttt

SEQ ID NO: 348138 - DNA, 648 bp, Cannabis indica
ttggcagcaaaataaaccagtggactacaggggaaaatggcataattggatgccagagtaaggagaaggtatgttcttttttcaataagagaacttaatcagaggacatttattattaattattgatgatggggttcttcatttaattcatcttagttcaaaatttcaattaatctgatatcatttttgacaaggcagcaaaagtgttgacaattttatttttgttggtttgtcagatcaaatttcatgctgagagattacttaaaaaatgagatattcacattaatagaatacagtactctatacatatactactactactattcaatatttcaaattcaaaaagattctttggtgtgggctacagtctacacttggctcttcaaaaagaggttaggtcatgttcaacttttaaccaccggtcattctttcatcgaccacacttaaaatgatatttattattctttctcttttgctttgaattttccaattctcacttgctgttttccttttagttgttcgcttaaactttgcactttgcagctcaccctatccataaatgttgtattttaatttttaggcctaaagtgcggtacttatgtttatagtcagtgaaattattacattaatcttttttctttcttattg

SEQ ID NO: 348139 - DNA, 614 bp, Cannabis indica
tcccatttttttgtactttttaaaatttgttttaatttaattttttcaaaaataattttttgtacttgctattagtatttttagtgtatttaatgtcatatcggtatgatactcaataagtggtttgtaattttttttgtctcttgtatttttttcatttgtgtggatgatatttgtactatttataactattatttttggtaaataatttttaattagttagtaattttttatgaataatttttgtaccatttactattttttttatattttatgtttttttttgttttagttttttaaaatgaatttttgtacttgttattggtactcttcatgtacttaatgctatattggtgcggtacccaataattagttagtaattttcttttagtcttttttttaaaaaaatttactttttatgaataatctttgtactatttttttagtaaataattttttcattattattactatgtgactctttaaggtgttcattaccatattgatctggtacccaataattagttagcactaatattaatatgtacttatctttagtaacttcaattagaattttaattttttttacatctaatctgctaatttaattagat

SEQ ID NO: 348140 - DNA, 1109 bp, Cannabis indica
tcacactaaagagttgttcatcaagaaactgctcatttatttgtacctcttttgtattctggctctcttccaactctagtcttgacagatgatctgctaccagattttcagtgccctttttgtcctttatctctatgtcaaactcctggagtagaagtacccaccgaatcaatcttggctttgcatccttcttggtcataaggtatttaattgctgaatgatctgtgtagactacaaccttattcccaattagatagggtcagaacttatcacaagcaaacacaattgccaacatctctttctccgttgtggcataatttagttgagcatcattcagggttctactagcatagtagattgtgtgaaacaccctatcaaccctttgacccaagaccgctccgattgcatagtcacttgcatcacacatcaattcgaagggcaactcccaatttggtgaagtaactattggtgctgaaatcaatttctctttaagaacttggaatgcctttaaacattcatctccaaactcaaaaggaacgccattaacaagtaaactggacaatggtttagagatctttgagaagtccttaataaatcttcggtagaaaccagcatgacccaagaaactccttactccttttacagaaactggaggcggcaaattctctattgttgacactttagccttgtccacctcaattcctgcttttgagatcttgtgtcccaaaactatcccttcttttaccataaagtgacacttctcccagtttagaaccaagtttgacttttcgcatctgattagcaccttctccaaattctctaagcaatgatcaaatgaagaaccaaagaccgagaaatcatccataaagatctcaatgcaagattcaattaagtccgaaaagatagccatcatacacctttgaaatgtagcaggagcgttacataatccgaatggcattcttctaaaagcaaaagtaccataaggacatgtgaaagtagtcttttcctgatcttcaggtgctatggctatttgatgatatccagagtagccatctagaaaacaataatattcttgccccgccaatatatctagcatctgatcaatgaag

SEQ ID NO: 348141 - DNA, 984 bp, Cannabis indica
  modified_base (10)..(10): a, c, t, g, unknown or other
aaaaaaaaanaaaaaaaaaaaaaaggaacgccaactgactctgtttaacagatttaaagggcgaagtgaaattactatttcgttcgtttgcttatgtcttcagagaatatagaaggaatgggtagttttgtcctttacacctctcaacactctcttctcttctctgtgttgtacgtttaaataaaattttaagtgatatatatagtaattttttttcctttcttttttcttttatcaaattttattatcgaaattttaagggagtaaaaatttaaataatttatttcaatagataaaaaaaagtcttttgaaacagttttttctgttatttaaaatataagataattagttttaaaaaaaatattttaataattaagatttttttttgtaaaataaaaagatagttatgtaattagtatattatttatttgtatattctttttttcaaaaactaaaacaaaaagattgatttgatgtaggactctataattatttataggatattttttattttttccttctcactcttttgtttttttcaaattttatcatcgaaatttaagggtgtaggattttgattattatttattttagaatatattttttaaaatatgaagagtcttttaaacaaaatttccggccatttgaaaaagaagataattagattttttttttggaaaaagataattgataaaaagcccctatttttttgagaaattacttatatacaattaaccaaggatttctacgtagaattccgtaaaaataaaaaacaataaaaaattattttaaagtgtaaaaataaaaaaaaacttatttttaatgataattttttttttagataaataaaattattatttgttttagcttttttttctttttcctaaaaactaaaacaaaaagattaatttggtgtaggactttaaaagaaaaaggaaatctttttgtttcggaaaatgctaataatttaaaattaaatgcttc

SEQ ID NO: 348142 - DNA, 598 bp, Cannabis indica
aaaattgatccaatccaattagtaattggatttgattttgaggtctaattgaattagatcggatgataatttttttaaatccaattactaggatcggattgagagaacaatattggatcggatcacatgtccaacccaaaaatatagcatggactaaattttacaccacaataaatattacgtctaatttttgtttactttttttttctagcacattaatgtaattcatgattttttatgtttttatttatatatttaatgtaagttttaatattttaataaaaataatatttttattgatttttttatactattttattaaagtaaaagtttattttattgtattggagttaattataaaatttgaactaaatataatattgacttatttttttatttacatttagcacaaaatttacatcaccgttagagagtctcttagccaaaggagctatttcatttggttgctaagctcatgtgttatatgttggcatgctaaattataagtggtgcaatgttatatttgttggatattattttaccaagatcttagatctactcacaagtatgtttattaacatcctaaataagaactttc

SEQ ID NO: 348143 - DNA, 1063 bp, Cannabis indica
aaacattttccaagtgataaaacaaagcttcatgcaaaaaatcaaaatccaccattaaagctccaagctttgagttcaaaactcaaacttggttaaacaacactaacatgcattcaaatcaatcccaacctacttaaacatgcataaaatcacctctgaaaactacagcaaacatcacaaaacaacagcaacagatttcaaccattttctttgaaaaccatagttttgagccaaaatttcatatcttaataaaatcaagtaatcaccagccctatcatgcttgaatcaacattttaaatcataaataaacctctgaaatcaacatcaaaacacagcagcaagaacaactcaaactaagcatgcaaaccatttctttttcatcaaaaatcaagaaactaaaagaaaagaagctagaacaaggattacctctactagaattactatgaacttatgaaaatcacatgaatcaaacaaggaaacccagccctagcagctcccaagcttggccgaaaagagagagagagaaagagctttgaaattctaatttcttctaactttgaaatttttgaataatgagaaaataaaaatgctattttaactctttacttcagccaaaagaaatgccacatactcatatattttcaccatataaagtccactaaaggacaaaataacaatggggcaaaatgaccattttgccccttctcactaaaatagcataactaacactaaaggggtattttgggaaattctaaattcccgaccaatcccgacattcccaatgtctaaataaccgtcctaataaactaacatactaagttgtgattttactgagccaaacaccgagttccatgttaccgggcaccggaaggcaaaattatgaaatttcactatatgacataaaaatgcattctgaattcaaaaataacagtataaataattatttaaacatctaaaagtaattttcataattaaacataattaactgctaatttccaaattaaactaagcggtctttacaagtattcccccttaaaagtatttcgtccctgaaatctaacct

SEQ ID NO: 348144 - DNA, 1190 bp, Cannabis indica
tatatattctaccaaatcgcacaagatcaggaattactttcctaaaatctcgaacagagaataatatcttgccaaaaaggaaaattggataattagaaatcaggtaattaatatgtaattaattatccataattaaaagacacagtatgaacaattagcttcatgataaggcctctatgtcagcatacacaaggtacctcatgggctaggcttcactagataagtccaaagccaatgtattatttgtaaactttctattagagggaaaagactaactagtatgaactctataacactataaatactcatggaatccttcattcaaagggtagcttacttgattaggacaaaaatagagtgttcatactcattgtaatcccttaagcttttctagcctacttcataataatactgacttgtagactaaggctcattaacgctccaaccacacgtaaaacctctgagtgtcttcttcatatatttctttagctcttatttttaataattatttttctagaaaactcggtaaataactcacgactactacctgaggaacacattgactagagggaagaagagtacattggctttggcagtaaggcctgttgataaactgcttgcaacattgctttggcaattgccaattgtagggttcttcaaggttaattcagatgctagcctatgtgacttagtgtaagtgggtcttcgagttgttattaggtacgatgctggcatgtgtggcttccacgacagtaccggtgacggggttgcctttgttggaatatgttttacctggatctaaatttactaccatgtatgttaattaaaatcctcaatatgaatctctaaaacaatgtaaataaacacatataaagtttcagaaaccttacagtgggtgcaacggaataataatggctccatccactcagatctctaactcttgtatcctgtctgtagcagggtatcaccaagatctgagcccgaatctccttctcttgaaactggattcttcacagccttacagactatgattgagtaccagttgatgtgtgtgggcacttactctatcactatagggtatgaaaatatgaagctggtggctggccaaaaatacacctagtggccggccatgatgtgggcccaacactagttagatttttgccatttttctcaaccatttgtctattttt

SEQ ID NO: 348145 - DNA, 596 bp, Cannabis indica
aggttgaactcgtcatccaccaaaatagcatcagtgagccttaagaatatccatgtgtcatttttaaacacttaattggttattaaagaattgactaaggttaggtgttgttacgataattatgtgtagttaattctttagagtctataaataccaattttattgattcattccttagatcagtcaaccaaattctcaacatatactaccatcactctacatattactctacgtcacatatcttcctttatataagcactatatataaaagccatccatataccatcatcctttatcattttctctattttttttttttcaatttctttctctatcatttcaccatcctctcaacagtattcccaactgattattcttgtcatactcacatatcaccaccaccaacctcttaagcatttatatatatatacccctctattatttacttatatatatcaacaccatcaccaccattatttctctgtcagttttccttttgaatctaaggtatcattctataaaattggatttgtagattcaaggttaaggtcttgtatataaatatatatatatttatatataccattgtgatatgt

SEQ ID NO: 348146 - DNA, 598 bp, Cannabis indica
ttaagtatagttacaattataccttttttatttttcattaataattaaaatgtgttatctcatttacttgtttatttttttggactatttaattaatttttcatacttttttactaaataatatgtgtaatatcccgaaaaataaataatatttaaatagacatattttattaaatatgtaattattttggtaacgaagtaagattatgatcttacttaggataattattgagaatttatttaatgaaatagatagcgtaatttattaattacggagattatattgggatatgtgggtaccgaggataccatctttcaaataaaatattttttcgggcccgacaattatggaaatttagcgatgtggttagtaatgtcacgccgttaaattattttgagtgtattctagactaggtaggaattttaaggtatcggtttaatggattagtaaaattatcattaatgcccctaggtaattttaaagtttagtttttttcattgggggtaaattagtcattttttttaggttttattgtcccttttatttttgggctgataaaagaaaaaaaaaagaaacaaaccctatttaaggaagttt

SEQ ID NO: 348147 - DNA, 949 bp, Cannabis indica
ctcgccatcctctccacagtcttcttccaagtaactccctttacacaataaacacacacaatagagtacattttaaatgaaagcatagtcgacattgtattaaagcacaaatacaaaatgtttatgccgatttttaaataacaaagttcgtacagaaattcttgtgggcataaaccaagttctctttgatccaatgccattgcgcttcctctctcgacaattcattatttgagcaaagcaatcaatgagttgccatttacacaaacagtatccattatgttgtgattcatacaatcgcagtaccaaaatgaagaactaaaataacaagattcatgagcaaagcattccaaatcaaatgcggtaagcaggaaacagttaactcaactttcaagtatgcttatgtctatttatatacataacaaacataactaaccaaactgtcgcaactcacaaaacagttaggcaatagtaaatagggaatgtgccttaaaaccaccaacaacaaagtcttactttctagaccataacacaacaaattacaataattaaaataatgaactaaaaaatagaaagcaaccaaatagaaatttctacgtacactgtttgagatatcggactccggtctcatgcatttaaaatccctacgatcaacctcaaccttcccaaaatgggctaacacttcactgaaacacaaaacaaataatcaaatacaataaatgtactaatatcaactacataaacaatattcaataaacaggagattacctcggatcatggcgctagagaaaatgtaacgaaagaactcgtacatttgattcaaataaacctttttagtacagtgaagggcccgaatcacctttcctccagaatctttgaatctttccaaggcagcatcatcaaaatcatccttgacggtctgctcaacctcctctttcacaataactgggac

SEQ ID NO: 348148 - DNA, 985 bp, Cannabis indica
agatttaataaatcttttagaaacgctgtgtttcaagcttatatagagttggaacctaaaaactacaaacaagcctctcaattcacacaatggctcaatgccatgaataaagaatttttggctctcaaaaagaataacacctggactgtagtgtcccttcccccaggttttcatcccattggaaaaaatgggtttacaaaatcaaatacaactccaaaggtgaaattgagagattcaaggcacgcctagtggccaaaggatacactcaacaacagggcatcgattatgcagaaacttttgcccctgttgcaaaattcaacactctaaaactctttcttgccttagctgccattcataattggtctcttcaccaaatggacattgataatgcttttttacatggggacttagatgaagaagtatacatgtctcttcctaaaggatatgtgcatgacggggagcttcctcccaatccggtttgcaaattacacaaaagtctttatggcctaaagcaggcttctagacaatggtttgctaaactaagcactaacttaaccaaaaatggcttcatacaatctgcatatgatcactcttttttcatccgatcatctcctaacaaatttctggctcttctagtctatgtcgatgacatcttaattgccagtaacaacactacagatgctgctgcattcaaaacctttcttaactcaaaatttcaactaaaagaccttggctcaccccgattctttcttggccttgaacttgctcgatcaaaatctgggatttccatgtctcaaaggccatttaccattcaactcctaaccgaaactgatcttctaggatcaaaggtcgtctccacacctatggaagctaatctttctcttagcaaagacattggtcctcccgtatccaatcccacatcttatagaagcctcattggcaagctgcttttcttaacaataacaagacccgacatctcatatgc

SEQ ID NO: 348149 - DNA, 620 bp, Cannabis indica
ggttgtcgagtgggtgcatcgaagtgcaccaggcactcggacaacacgaaacacgcacgcgcatcttaagacaaaatccagtctgtagcgcccgcatgtccctctctcaaacacgcctgacgctgcacctcgcccacgaagaccctgcaggcgccgaagttttctcggcgggacacactactgaagctcttgtccgcgcgcgccctgggccatttgcagcctctcaaggctgcacgtgcagcctagctgccaaccgcacccgtaaacccaatttcagattttttcaattttcaaacactaatatctaattaaaatattatttttatcatttaaacctaaatattaatattttaaattaataatattttttaatagattattattcttatttttttgatattttgaggtttaaatttaaaaattgattattttaattttaaaattattctcacatttaaaaatttgttagtttctttaatatttatatattacttatttttaagattagatattttaatattatatattttaaaataaaagataactttatctttataatttgaaatattatattaaaatcaccttatatgataaattaaataattaataaatttgaaatt

SEQ ID NO: 348150 - DNA, 1179 bp, Cannabis indica
agatcctggtaaaataatatccaacatatcgaaccagctacttgctaccccagtcaacgaggttgggaataaaatgcatcacagattattcgaaacgttactggctcgcattatggtattgaagttattaagatgagcgactgggtccgaagccccatcatattgcgagacctgtccctgagggaattcagagttcataatatcagtatggaaaggttcggcctcctcatccgagtcatagccaggtaatttctagtattccccatcttggtattttcgaagcttaccctaactaaatgattcgcaactggatgggatccacttgctgttgattcacaataagttgatggcataagtgggggcattttgatttaactgctcgcaaagattgggttgtcttcgattcaaatgcttacgaagatcaggttgtcttcgttcataattacttacggatctcgtatctgagcaactctcagattgacaactcctcgtattgctcatactttcttgattaacataacagtgaggtcggcttccttctcgtgttttcgttcctaatcaactttgccctcaagacctcgagtgtcccgagctagaacttgactcgtcttgcacaggcattcttcatcggaaaaggttagatacacgccctctatttaggtatgtgtatgcctcctccctcttagattgagaaggacgctaggggtgtcttagtggtaaccctcttgttctaggttgagtcctaggatttctctcgttattacgagggatttcctattccctagttcggggttgccttatgttctcatttctgcgagaagcctctggcacatcattatgttcattcccttgtatcataaatccttggggtctttgaggtacttctcgacgatgttcttggttattctgttgttcatccactgaaacatccctagttcccccaggttgttcctcctgggtgtttatgggatttccttgatttgcttcctgcctcctggttcttgaacctcgaggtctacctcgtggccttcttactccaggatcaggttaattttgtgtattgtttcctttagtcgccttgactattgcagcctctctttccaactcatcgtttcgttggttagactcggccaagcattgtcagagttatcgattttccaattctactaatggtacata

SEQ ID NO: 348151 - DNA, 538 bp, Cannabis indica
atagatttaagaaacttgcacacctttcaatcataacacatacagttttggttattccatatatgtggttgttgagatttgatgccctaaataaaacctattttaatataatcttattttctatgaatagaaaattagaaatcatttaagtttacatattattttcatgattatgttttaatatacaaattctgataaattcagaacatatagttattcataattacagtgatgtcattacaataaaaagtaattattattatatgcttcaaagtttagtcctatgatttatcggtgcactggatttacactaatgtgataatcagcgataaagtttacttacacttagataagtggatgtatggagtatacatacatcagagtagtattggatgtatacactagactgcaccgatatatgaagtatacatcaggctgcacagatattaaacttggataagatatcataaacttaccgttatatctttctaagtcaatatcacttagttgatctgaggtcaaaagatcttaatcctga

SEQ ID NO: 348152 - DNA, 1013 bp, Cannabis indica
caaaacgacgtgtcgttttttggcttttggtatttgtctcaaaacgatgtgtcgttttgtgtcttcgggatcagcctaaaaaacgacgtgtcatttttgtccccaaagccttcccgcgaacgatagtcgttcgtcgtccccttgcgctagtcgttttgtccaaacgacacgtcgtttctgtcaaacgacatgtcgtacggacatgtgtataatttaaaaaaaaggaagaaaataggcgcgtgggggcgcgtgcaagggtgtttttgggccatttttccaccattttcatgttttttaattctctattattttttggtatgcacaatactaattgcatgaattttattcatatttggttgataattttagtattgtggcataaattttgtgatttatttcaacaattagtgcttattttcttgcctatcgtaagattaagcatggaaaattgtttggtgatgaggaacacttaaatattaatttatttaagtattgtattttcctccaaataacattgagatctttatgagtaattaattatcctatcgatgatggttgcttattaaagatgcgtaatatggtgaagaaaattattaaatattatgaatcacaatttatctatcctttcgatagtgaattaatgcatttgattataatatttaatagatttttcttacctgtgtatgagttccatcttgttaagttgtgtgagaactctagcatgcataatgatcatgtgttattttgcgatcatttatttatgagaagagagcacaaatggcatgattatgttataacatgcatttaatggttattgctcttgtttctcattagctttaagcaatccaagaacctctgccatgttgacgctgaacggaactaaccacaagtagtgggtagaatctctcatgatgaatttgactcttatgagagtggatttggccttgagaactgatgcacctccgaaacctactaatgataccactgaaaaggatagaaagtcctatgaggat

SEQ ID NO: 348153 - DNA, 659 bp, Cannabis indica
ttatttgaaaatttagattctatacaaaattttaccaaaatttgaattttgtttcattgaaaaccgatttctgaaagttaaaaaatcacaaaattaagacgaatgcataccccccccccccccccgccgccaagaggcatcatggggcgagggaagaggttgcattgcagcatggtgggccgagctagctcggtgtccgagaaacatcagtcaagaggttgtctgaacctcagtcatgaccgaggtgcttctctcgtccgcttgagcacatagtgcctcaggtttagatatttatatttgaacttcaaaaaatcataactaatccaataaaaattcaaattaagttctttaaaagcctaaattgattactttttcatatgctttccaaaaataataattctagtacgaaactaaaaatattttttgtcaaaaattcgtaattcacaaacatttatcaattaagcacataaactaacatgaacacattcaaatcatcaaatttatcattttaaatccatatttcatgaaagtaaaacattatcatggctctaaggtaagttgttagaaattattttactaggatctagatttactaacatgtatattgattataatctataatctaacagcctaaatatgaattcctaaaacaataaaaa

SEQ ID NO: 348154 - DNA, 1409 bp, Cannabis indica
gaaagaaagaaaggaaggaaaaaagaggtatgggaaaaaatgatgaattcttctacgttattcttaacctttctaacattagtttataaaaattattttattaaattaataatcagcctaggttgatcacaaaagacaaaagaagggttttctaacattatgaccattttacccctaaataactcaaatattcaaaatcacccaaggataaattagacattttgcaaatctcgaccaattcacaacacctctaatacccaataataacaccctgatacaaatattctaaacatataaacgcgactctctaaaggcccaacgtcgctttccacagcttccgaacacaagcactgaaattaaaataattacatgaagtagcataattaacatacataaacttaaatatatttccacaatatgcattatataaataataattaaatctcttgcataaaccctaattatttaatactccaaggtattaatcataagtggtttttacaattatccccccgttaacaggatttcgtccccgaaatctaacctgaacatctctggatgctgagtcctcatatcagactctaattcccaagtggcttcctccactttgctattcctccagagcaccttaaccaatgctatggttttattccgaagaaccttttcttttctatccaaaatttgcacaggttgttcatcataagataggtcgggttgaaattccaatgtttcataactcaggacatgcattgggtcagataaatatttccttaacatggaaacatggaatacattatgtacagctgacaaagatggaggtaaggctaaccgacaagcaacctgcccaaccttttcgagtatttctaatggttctataaatctaagacttaacttgcctttctttccaaaacgtctgattcctttcattggtgacacacgcaagaaaacatggtctccaggttggaatgtaacacatcccgtcgcttgggatctgcattacttttctgcctgctttgagaagcaaacattcgagctttaatcttatctattgcctcatttgttttctggactaactcagggcctagatatttttgttctcctgtttcgtcccaatgaattggggaacgaaattttctgccatagagtttctaataaggagccattcctatggtactttgataactattattataggagaactcaatcagaggcaaatatctgctccatgaccctccaaaatccatgacacaagctcgtaacaagtcttcaagtatctgaatagttcgctcagattgcccatcagtttgaggatgaaaggccgtgctaaattttagactagttcccatggccttctgcaaactcacccagaacttcgaggtaaatttagggtctctatctgaaacgataga

SEQ ID NO: 348155 - DNA, 885 bp, Cannabis indica
tttatttttttatgtttattttcatatatatatatatgcatcaatatattcatatttatattataaattattttaagcatgaaaaaaccattttaaaaaagaaaaaaaaaaattctaaagccatcgttcagacccgaatttttttattgattttaaagtttttgttttacgtattttcgatgcataaaatatatatgaaagtcttcatttttgtatttagattcatttggaatttatttgggctgttttggtcttcgaaattaaaaattttgatagggtttgggtcgggtccgtcggacccacgtggctgaaaacaggtcaaatttgacccggctggaggttgacgatgctccatacaacgtgccatttttcattttaaggcagccatcgttttaaacgacatgtcgtttttcacactgtggaaaataacgtgtcatttttcgtcgttgtgggcagccctcttcatgtaaaacgaatgttgtttacggtagtgaatttttttttctaaaaaaggggaaattttttcaaatttttataaatttttatttatttggaatattaattattttctaatttgtgttaaatttagtcaataaattacatttattcaattttccattttttatttaatacataatatatttagtataaattgaaagtagaaatttgttttaatttggtaatttattacatgatttattaaggcatgtaataattgtgctaatttgtataattgtgcatttaattgtatattaccaaatttttgtaatttattgtttaaattaataaattttgaaaaatctgacattaattatatatttaattatgaatttatatttaattaattatcatacattaattgtatcaatttgtatttatttggca

SEQ ID NO: 348156 - DNA, 517 bp, Cannabis indica
aatataaaggaggaaatagagttacctcatcagacaaaacaacccccatctgagcagatatgtacattgtaatacccccgaacccccatctcaggctgttttaaaaaagaaaaaacttttctcggggtgtaccctgacccccaaatctcgaggtaccccaaaaccacctccaagaacccatctcggggtggtgtgacacctcaagctcaggggtggtgtgacacttaagctcacgggtcgggtgtataggccatcttacgaaggtaagcgaaggtgctcccaaccaactcagggtaggcgtagcatgacaccccatataccaactcggggtgatctcaagggtgtggggatacatggtggtacgaaatccacaccccacacataaagcatagtcatcaaccttttttcccaaggtttatagtatttccacacacattttttttttcaatttttatgagaatcaaaattgaaaaaatagagggaaaatgaaacttttttcatgttcttggtgttcttc

SEQ ID NO: 348157 - DNA, 810 bp, Cannabis indica
tatgtaatggttttgtagtaattaaaaatacagttatatattctgtttacttaaaaatatttttttggtatttagtcttgtaaagtctaacggtgtctcagttcttcatagtagatttaacatacttattcttagtcttgtaaaaatatttaacattgtctttgattcacaacaaaaaattatcaacctcaaccttattttaaagcagttttgaataagaaatagaaaacatgttattacaacgaatacgtacaagacgcctcaaatgcgggctttgcatgttgctctgttgtggcctgaactgccacagcggctgcagtttcgtggtacagaaccttttttatcaccagacgggaaacggttctcccgtcttcttccagcgttgctttttcttggacgacctacaggcttcttttccacaggtaccccaactttcatattcttgatgtgttctgggagaacccaatcatcctcgtcaccagcaagattgatggtatcatcgtaaatcttcctccacgtttcttttgaataataaggtgagcaaagcgtgtacacacttgtgttcgttttcaatgccgcggcacatgcatgaaggcaagggagtttcaataacgtgaacacgccgcaggtgcatgttctttcaactagattcacatcaccacctctttcaccgttaggtcccctaccaacgttatacaaattggctccatttcgttggacgcgcctgtaccttgcattttcatgaatttttgccaagtttttttcaaagagcgtggccaaaggggtggcacatttgtcagcattttcgag

SEQ ID NO: 348158 - DNA, 1124 bp, Cannabis indica
tcttttattgataacaaatcagattagattaaaatgggttttatttagggcatcaaatcccaacaggttgcacgcagcctatttcctcatccatctccttgcatccgcgcacaggggtatgcaatgcatactcttgtgcaccaatcttgtttcatcataactttgattcaaaaatcatttttcattaaaacaaaattcgaatttttgtagaattttgcgtagaatcttatttttcaattaaaaatctaattatcagaataaaattaattttttaattaattaaaattagttttagatgttagtaggctttgaattttgaaaatttgatttttcacaaaaataaccttatggttaattttgaaatttagtattattttatttattttaattataagatcactatattatatttttttattattaattttgaatgtatcttattttgtatatttaaaatattttttaaataattcttgtttaaatttcaaaaatttgctaaccatatcattatattttttttttcaaattttcttatttttgaaatatattttattaattaaaatataagatttgataaatgttagttttaacattttatcttcttagatattttattaatgaacattaattttggcaaaaataatatgaaatttgaaaaattggttagtttaggtttgaatagaaattttagggtttttaaccataaaatttttcaaacttattttaattttttcataaaattggtaatttcctaaccataaaatatatatatttttttttgaaattgtttattttgtaatatttaattcattaaattataggattaagaatataatattaggaatatctaaattttaaaattcaagatattatattatattatcttattagaaatttaattaatttaaatttcgaataaacttgaaatttgaaaattggttagatatttgaatttaagttagaatttaggaccagtaaaaaaaacaaaagttagaatttaggatatttaggagatttgttaggtttttgatttttttcaaatattatctaacaacctaaattttaaattatagttaagatatattttaaattttaaattttaaaatagaaatatcttaacctac

SEQ ID NO: 348159 - DNA, 1075 bp, Cannabis indica
attaattttataattatatatttccttgtttcttcgtatttgtgtaaataaatttgttaaaaatatttttataaataaaatcaattttaggtataatattgaaaaaaattccttataatagaatttaagagacttgtagttatgaaggtaatgtaaatgtaactttaagtatttaatccgtcagaagaaaaaacatgtggtatataagtgtatgaaatttttaacataagtatttatgccgcaaatactctatgtttaaataggattaaacagaaaagtagtaacttaaattatttaatccgtcgaaaaaaaaacatgtggtatttaagtgtataaagccgaaaacgtatggtatttatgccgcaaatatccctattttatacatgcgtgaaatagactgtttcaaccctattttcagcgtatttattttttttttaatttcttcaaaattttataggatgtcctaaataagtacaacatagacgatcatgaaaaatacttgactaaaacattctctcatatactgaaatagataggggtgcatcagtagacccgtaatacattgtagaattttagtttatttttttatggtcatgtacattatagttatttaagatatcctgcaaaattttgaaagttcaaaaaataaaatttaacaagccgaaataaaattcaaattgtctgttgcacgagtgactcttttatttttaggggtgtattgtaaaaatactttttaaattattgtgtgtaaatttaaatgtgaatattataattatttttattttattacaaaattaatataagaataagtaatattttttagtgtaatttttggtgttgtgattggagtagaaataatttttgacaccaaatttagtgatagtgcgacactaaatttagtctgctccttagaaatgctctaagcaacactaaaaaataaccaccaaatcaaacacactattatttaatttatttattaatttgtttacattaaaatattattgttgaccgaggtttttcggcaaccaataaaataataaaagattaaagagctgtaagaaattaagagaagaat

SEQ ID NO: 348160 - DNA, 585 bp, Cannabis indica
tgagtttgtttcttatgtgcaggacctttattcttatagcagcctcattttttcttttcttgctcttattcttagaggtgcttggcaaatgagcactttcagtcttctcttacttcaatatttattcctcttgaacacaaaatgaaatgagctcattaagagctcattttttcttttttcgcagttgtaactgaccttgaattcatgtggaggaagagagataaatactaattaaatgcacaagcaagtcatctgaaagctcaagctttagtgccttcaactttgaagcaaggtgagacatttccataatgtactaccttatgttttccttgcccttgaagctcgtgaaaataagtttctttaaacgagtacttgttttaaccttatagcaaagcatttctcaattttagcaaggaaagttgtggcatcggtgacctcctcaaacaccgcaccgctaaaagcctcaggtatgccgcccttgatgatcataagactcatgtggtttgaacggtcccacttctcataaatcctcctttgctcgaaggtattggtatccgtaagaggagcaggacgatccatccttaa

SEQ ID NO: 348161 - DNA, 205 bp, Cannabis indica
ttttataattttaaatctttaaaattatttttttgtaaataaaaatttcaaactgtaaaattgtaattaaataaaacacaacaaacaattatttttaaaacaaaaagctggtcaatgatttttttttccttttcatataatatatatatatatatatatatatatggaagaggtttcaataggttactatttttattgtaaccat

SEQ ID NO: 348162 - DNA, 850 bp, Cannabis indica
gctaagtagatcttgttccggaagggctagatctagtagttcaacttgaatggagcaagagaaatccaagatctaggttttctttgtaagtggagtaggaatacttcatttaccttgcataacttaagaattgacgtttgaatagtgttctgcttgctagtttaatataggaatatattgagctaagtggtagaccttaatttgtgagttttggaaaattctcacaagcctagaggaatttatgttatctctgtgcaaaatgctggagtaatgttgaaccgatactgtaacaactggaaaaaaaacctaactagaaggaattagctattcaagccacttttatcattttacatttttttttctcgcaagcaatttttctaacaacagtagtattaattttagcaagtttaattactatcatttttaattctgaatcattgctcaactattttcatgttatttcctcttacttttagttgtaattagttggttttacatcaaactttgtttgcaatccccgtggtgacgatcttacttatcactttattacttgtttgactacgtatacttgcatacataattttcacaacaagtttttggcgccattgtcggggattgaaactaaaaattgtgtattatcaactattttacaatttattttctggtttgaggttctattcccattttagtgtgctgaatttttctttttcaagtgtaatctagtgcatgaacgagcaagaagaagaccttgaacttgctcctattgaccccgaaattgaatgcactttcagacaaaggaggaaggaacaaaaggctaaaaaatgctgcaatatggtcgatagatttgaag

SEQ ID NO: 348163 - DNA, 727 bp, Cannabis indica
atttcattttactactttagtttataatagtttataaaaaataattctgagttctttaatgttaaagttcaagatctcattaataatcatagttaaaatattttttagtttttttactcccatttttctcattattatatatttatgatctattttttaaagaaaataaaataaatgaaagagtcttattttaatgggacattatttttcttaaacaattccaaaaaaacaaaaaacaaattcaacctcaaattttttttcttaaacaatattattttaatgatattatttttatatacattttctacatcttgttaatttattaataataaaagcttgatttaatatattacgtttgaaaaatctaagagaaggccttaccaattatatttcaattgtataataaattgatttaaatttaatttttgcttacttcacaaatcacataaattcaaaacaaaccacacaattctaaaatttaaaacaaacctcttataagattttaagatagtatcattcggttacctactcttttcttgttagaaacttgacttcagcgctttcaatattttcactataattagtcatcaatatgctcatctttagtagctataaattagaatcttcagtacaattaataatttggtaaaaaaattcattcaatgggataagataaataaaaaatccttaaggaagaaagtattttagttaatgaaattaatttgac

SEQ ID NO: 348164 - DNA, 1208 bp, Cannabis indica
ctcaagaatggaagaaacattggtttcctcaggtagataaagcatattttcagtatcaaagtcatggaggagatcatttaaagaatcagaatcatcatgaataagaacttcctcctcaataattgtgtctatcacgtaagtatgatagcaatcttcctcctcgtctggtggttgtttcgtaacatgaaaaatgttgacctccatagtcatattcctgaaagataatttcatgagaccattcctacagttaatgagagcattggttgttgcaaggaagggactatcaaaaagtcagcgggataatagaatgttccaactttaatcaagacatcttcaactattcctcgtggctttttaattgagcggtcagccaattgtagcaccacagatgtgggcttgatttctcctaagcctagttgcaagtaaattgaataaggcatgagattaacacttgcgcctaagtctaggagagcttgaccaaatccttgtgtcccaatttggcaagcgattgtaggacaacctggatctttgtatttgatcggtatcttttgttcaatcaccgcacttacttgttctgtcaagaatgcagttttcttgacatggtgttttcttttcatggtgcataaatccttgatgaccttggcatatgctggtacttgtttgatcacatgcaagagaggcaggttgatcttcacttgttttaaattttctaggatttcaccatgattttccagtaccttcctagaagatttcaaagcctgagggaagggcaccttcactggagggttctgtggcatattagcatctggagcaggcattggtacactagtggtcttaggtaatggtgatactgtactttgaccacttcgagtagttatggcattaaccccctttagattagactctgaagaagtagaggtttgtgccatatgttgccctttgggagtgattagaggctgagcgggaagcttaccacgctcttgaatggctgaagaatcatttaactttgttaattgaatctttatgtccttcaattcctctatcacctgagcaaaataagtcctgaactctagttgagagtctgcgagaattttcatggaattctcaagagaattattttgttgatcaggtttccattggctcccagatgcttgattttgacttgtatccttccaactgaaattgggatggttacgccaaccaggatt

SEQ ID NO: 348165 - DNA, 1077 bp, Cannabis indica
atagaaacccctattgcaactagcggtgcaacctaaattgtaatagaatatcgtacataaacctctattggaactagcactgcaaccactttagaaacccaaaccgtaaatttgaaaaaaaaagttaaaaaaaaatagtatatggggtaattccccttattattattatatatattttggtaaatggtatatgtattttttgttatacggcatattatttttttaaaatagtatttaagttctattttctattttacttttgttgacatgatatataattttattagcattctatatatttttatttttatttgttgtcattacatatatatttcgattgtaagatatatctttttttgttatatggtatataagttttattgtataatatatcattttattttagattatgcaagtttaatttttattttattatatataaatgtgacatgtaattttgtaagtatggtatacttattttatatttgtatataattttattaatatggtatatacaattatttttaataatatattattactttattttgattgtaggtatatatgttttgttctatgatatatgattttttgttgtctatagtatatcatttatttaagatgatatttagattttattttattatatataaatattttggtatgtatacataatttaatagtggtatatataattttatttgtatgatacatctattttttgtagtattaatttatatagtattgttaaaacttctttgtagtatataattttattacgacagcatattaattttaatgatacaatatattaaatactgttattacatttaatgatttaatatatttattcatttttgttacaatgtattaatatgttttactaaaaaatactacaacattgtacatcattagcggcggaccactccgccgctaataaacccacttttggccgctatagggtattagcggcggagatcggccgctattggtccgccgctaatgcctggccgttattaatagtattagcggccaaaaaaggggtccgccgctaatactattaatagcggcggagca

SEQ ID NO: 348166 - DNA, 893 bp, Cannabis indica
gaccgcagtgtaactaattgggcgacatcaactgggcaagaggtcgcaaacagtttagtcgagaatttaccctagagatattatctaagaattaatattcagagatattgttgtaagagctataagaaaaggaacatttctccttgttcttaagtcaatacaaatagcgaggattaggctattaccgaactgctcgaggctgaacctctataaaattcttgtgtctttatattgctttactgtatatcgattgctataaatcacttattgcttactaaataagactcattgtcgttgactaaaagcgaagtcaacaattataatttttaaaattaaatttttttaataaaagggggcaaaattttgtattggtcaaagttcaggaggtaaaaatattaatttttgacagtaaaagaaattgaacctaacagaaggggcataattatgtaactgttatattttaagaaaaattttaacaagccgtatattttaaggaacaaattcagatagtgccgaaagtgcaagggacaaaaatactaattattcttttagttatttcattgcaatttttctaacacgtactaagaaggaactcacacgtgtctggttaaatcatcaataatagttaggggtgttcattggatcacatccaatggatttggacccaatcgatccaatccaattatttattggatattgaattttatcatccaatccaatccaatcgaattgagtcatctgatccaataaatgtattggatggatcggttccaaccattagatacattaactgtagaaatttttttattagattggattggatccatccaatctattttagctaccatttaagttgatttcaataaaaagaaaaatatatatatatgaaaaaa

SEQ ID NO: 348167 - DNA, 512 bp, Cannabis indica
gactaaagtgtccttatttacatataattattataattaagtaattataattaatttagataaaatatcctaccaattattatctaaaaaaaatatcctaccaattataatattttcttccttctacttataagttttgaaaaattattaataaacatatataagagaactacaaataaacagatattaattaataaaatatatgaaaattaattaaaaataacaaaaattcaaaaaaaaaaataaaaaaatccttctatctttcgtttggatcataagagagatccaagatttgctttacagtctttcaacttgttaactaaacaatttgaaccaatcattaatctcatcccatttcacttgcccacctaaccagagacaaacgactccaagtccatgaccacgagtatataaacgataacaccgaaaagtattatatatgtatatttatatatactagttaaagctacgtgtgaggcacgtatattaaattttttgttagtttttttttt

SEQ ID NO: 348168 - DNA, 719 bp, Cannabis indica
tattcatatttatgcttattacacgtgtttgattggctactttatgcatgatctatgatcttaatacaaaatttgaaaaatgagtattgagaaaactctaaatgaataaagttagattttgatgtgaaacacaagtatttacatagtttttgtgatttttagattatatattacttaatgcaaattgtatgttgttctatctcagagatgcagtagttgacttgtacaatttaggacttttatgatctgaaaagagtttaggttaatttataatctgtcatcacatagaatagaggatctctctttattttctaagttgtctgataattggttaagaaaataagagcatcttattctattataagatatcttctagggttaggtttagaattaaatagaattaaaaaagataaaatagtggctcttaattgaactccttggccgaacccttaatgtgcccaacaagatttcaattttgccattttatttaagaacttatcttttctttcacaaatgtcatgttcatttaaccatttctaatgttcatttaaaccttaatttttttccttgtgctaattgtacacatgttaaatacacacatactacaagaaatgtcacttttgccagcacaaaatgtgctggcaaaagttagtattgcactggtaaaatagaatttacttgtgatgtgttgacaaaaaggggttggcaaatcaatgttg

SEQ ID NO: 348169 - DNA, 487 bp, Cannabis indica
ttgatcttccttttgtagactagtatccagtctgttcctctagcagattttcgagtgatcttaaggcttatattggtccattatggcaaggatcaaacagacttgccacagggtgccacctttcgaccttcacattgccaggctggcaactaggggtagagtgttggaattattttaccgatatgagtccgaatgtccttctgttgaatctggattcttcacgatcttccacactatgattgatgtaccacttgatgtatgtgggcactactctatcactcaaggggttcggttcaatagtgaagaagagagaaagagaggtggcagctaggttaggtagaaggcactcagatttttctctgaaggaataagatgcatcatctttttctgaaactatcactacctatttatagtatgccacctagggttaggttagaattatttggcattaaaataatgaaaaaattaaatgataaaacctacataa

SEQ ID NO: 348170 - DNA, 509 bp, Cannabis indica
aaaataatacaccaacgtaaaactcaatatataccaacacataatttcataagttataaaaaattattcttaacaatgtactacaaaacataaatgaacgtactcagtacgtgatattttgtactcggtacgtgatattttgtacactaattttactaaacaacatgcagaaacaattaatgtacaaggtacgtgatataatgtactcaactacaatcccaaaattacatacatgatatgaaggaatgaaaataccaaaataaccctactccgacaacatggacccactgcctatagtatatttgtacaattaactgccacgaagtaaagctgttatactttttcgtacattaactaacgtaaacagtaaattaattgtacctttttattttttaattaaaaaaataactgtacaactggtaaacaaacctagaataaccggttcccaactaaattaaataattaaaaaaaaaaactattataacatgggacttacctgccgtacaacg

SEQ ID NO: 348171 - DNA, 1468 bp, Cannabis indica
gactatgaacaaccccatggtgtcactgttgactaacaacaagctctctagagctaactttgtcaaatggaaagagaacattaatatttctctcataggtgaaaatgccctgtttgtgttgactgaaaaagctcctgagcagacaggtgagaatgcaaccaaggcagtcaaggaaaagtttgagcgttggcagaatgctaacaacaaagctcgacactttatgctgtctagcatggttgacaccttgaaaacaaggtttgccaatactctcacgactgcagatatcatgaaccagttgactaaactatttgggatggtgtcagatcaagctcgttttgaggcgaccaaaaattttatcaatgcacatatgaaacctcatcagaatgtgcgtgatcacctgctccagatgactagttacttccaagaggctgagaatcatggagctattatagatcagacaactcaagtgagttttatcttgaatagtttgactccagcttttctaccctttacctcaaattatgtcatgaataagttgacttttgacttccacgagttaatcgcaaccttcagacatttgaaaatttgattggaggaccacataaaggaggaactaaagctcctagttttggcactgctaatggtacgactaaggctgaggcaaacattgtctcaacttcgaaacccaacaaaaagaagaggtggattaatagcaagacacctcttaaagctattaacaaaaaaaataagaaaaaggttactcatctcaatgcaaagcaaaaagaaaagtgcttctattgtaacgaaaagggtcactggaaacccgagtgtcctaagtttttggcaaagaaacaagatatttctatctatgctataaactcatgtattttagagaattgttatctccttgaattattaattctagatctaataaccaagttattttcttcttatttcagctccaactgcttaaacttggattgctatcctagtgagttgagtcggatggttggacagaagggtggagattgtccaagtgaagatgaagctcagaatcttattttatttttgattcaattgtttcagtttatgaataatttagtttcaattattagtttgggattttattccctatttcatatttatgcagacaattcattacgatatttttgagattatttataaaaaatttctttaagaaattttcattatgaattggagttatgaattgagctttatgtttactttattttgtgtatgccaataccaattttattatatgtttatcatgttttgtctgtgtttgtgttttattattgatgcaaaatctatggtatattattctctgcaaagagataataccacataaacactagaatttaaattcgatctttatgaataattattaattcttaagtaattatgaagattttgtttaataaaaagatcttttgatctgataggggtg

SEQ ID NO: 348172 - DNA, 880 bp, Cannabis indica
tcagatcttggtaatactctgcgacagaaaggatacaaaaattagagatctgagtggaaggagacattatattccgctgcaaccactataaggtttctcatactttatatgtgtttatttcatatcgttttagaagttcttatttaggatgttaaataacatacttgttagtaaatctaagatcctggtaaaataatttccaacagaccgacgggttccctttggtaacatgactaacgcttacagtgtgtggcctgttattttagtcccatacaacttacccctgtggaagtgcatgaaacctgagtcgttgatgttgtctcttttggtgccagggcgcactgcccctgggaaagacatggatgttttcatgagaccattgcttgatgaattgagggagtggtgggattcaggtgtccaagctcgagatgcttacagcgagactattttcacactgagagctgctattttgttgaccattaatgacttcacagcgtatgcaatgatgtctggatggagcaccaaagggtacaaggcgtgccccacctataacgaacacactccttccattggattacgcaacaagattggttatgttgggcacagaaggtttcttgaaatggatgatccaaggcgtagaagtaaaaaaatacgatggaaaatttaggaaagacaacctcctccacaattgtcgggggacgatattttagctcagcttgagcagttacaattttttttgcctaaaaaacacaagcaatttggtggagtcaaacgtaaacgttctgtagctgagttaaattggtcaaagaagagtatattttttgaactacagtattggaaggacttgtctctccggcataatcttgacgtaatgcatatc

SEQ ID NO: 348173 - DNA, 690 bp, Cannabis indica
tgctttaggtttttgtaaaacctgtcataatggttggtcagtgtacacccttgcagggtgagcttggaagtacggccttagcttttttgatgctaagagtaaatagtatgtcagcttctccatgagtgggtatcgactttcaacgtcgattagccttttgttgatggactatactggatgttggataccgtcttcttcgcttattaggacagcactcacaacatactctatgacagctaagtatacgcctaattcctcgttgtgtagaggttttgataggataggaggttgagccaattgcttcttcagctcttagaatgctttttcacactcccctgtccactcaagtgttttgtttcctcttagtatgttgaagaaaggaacgcacttgcctatggatttggacatgaatttgcttagtgcgccaatacgtcccgtcaggctttgtacttctttgattgttgtgggcgacttcatgtttaaaagggcttagatcttgtccatgtttgatattattcccttggaattgactatgaagctaaggaacttgcccaattctactctaaatgagcacttgaggaggttgagcgtcatgttatactctcagaggatcttaaagcattcatttagatcctccacatgttgggttttgtgccctaaataaaaaacccattacaatctgattagtta

SEQ ID NO: 348174 - DNA, 652 bp, Cannabis indica
ccccaaataacataaaaacgagaaaaaccagggttcctaaaaatcccccaacccgtagacctgttctgcaaacggaattccggttctgggaattcctgaacccccattcggaattctgattcctcgcaggatgcaaacaaaaatttgttactccctcaaatcaaatccaattcaaaccaaaccttccatacttgttctaaataccccaaagaacatttctaaagcatcaaaacagcccagaaaacacagaatcaaaaataaccattaaagctccaagctttgagtttgaaactcaaacttggttaaatctaactagcatgcatccaaataagttcaaatctacctaaacatgcatattataacctctgagaacttcagcaagcatcaacaacaagtgcagcaactgattttatcattttccttaaaaaccatagttttgagttaaaattccatatattaataataccaactaatcaccaacacaatcatatttgaatcaacattctaaaatcatgctctaactacagaaatcaacaacaacatacagcagcaagtacaacaacaacactaaggatgcaaccaatccttatttgatttttcaagaaactaaagagaaaaaggttaagagctatacctagagcttgaattgcac

SEQ ID NO: 348175 - DNA, 673 bp, Cannabis indica
gaggatgatcctcgtgcaaaagttgaatgaggtcctggttgatccgatgtccgctctcctaagagtcacctgagttcatctacaaaagacaacacacaagatgagtgtttggtcagaatatcgaacgataaacaagcaaatatgccgaccaggagtactcaacagattaaagaacgagaatgttcaaagaaaagtcagacctcaagaagtcagaaattttctcgagttagggcaaaaaagttcacgaagcttagaataagcaagatgaaagacagacgttacacagtttaggaaacaagcattatggactgtaaaatcgcatgaaaacatgacaaagaagaatcgcaaaagttttcggacctagagtttcctagatattttctataggaaagtcgaaggtgcattcgaaatgtaaacatgcaaagataagcataaaggaaattagaaacttactcaagagtcagatgtctgggttcaagcaacgtcaatccaacaagcagctttgatgaaggcacttcagcaactttaaagccaagaacttctcttttcgctctgaagcttacttagcaaagaagggtgatgaaaatgagtttatgtgccaatgctgtttgatatttatagcaaagtcatgaaaagaggtaatcatctcaaaggaacctcagacgcctcagtt

SEQ ID NO: 348176 - DNA, 805 bp, Cannabis indica
cttttattaactaaatatgtatagaacagatctacttgtctctgttgggtgctaatcaattaatagtagtagtgattatagttcttataaaggtcaagttattgaagttatataattatagatcgatctattaattgatgtttaattttgatttggaatggtttatgtactccaaccggactgtcaccataaaaaagttactagtgataattttttaattacaaatataagtttagtgacaataaaaatcagtttgttactaaaatgtaatatttaaatataaattactcctaattttgttttaatcacaaatgtgagactaagaccaaattcaattaaacaaattagtaaaacttcgttagaagtttttttttttttttttttttttttttttgtagaggaaaacttttattataaattaatgataaagttcatttacaataatagcatgaataagaacagggatatctgctcgccaaacaatatcagaattcatccttaaagaaaatctaactaaaccatgtgccattttattagcaattcgacaaacatgactcaaagaagctctaggaaagaaggacatttgataaataatatcacgggtaaatggcggcaaaacccccaatattttcgttttagtttcattaaactcccaaaagctaaatttctgcgggtaaacccccaaaaccaggaaactgttagcaatttatcctttccgtctaaatttagctgttaagtgtcatgttggcttgtccacgtgaacacaatatacacgtggcaccatttgattggtccacgtaaaaaa

SEQ ID NO: 348177 - DNA, 594 bp, Cannabis indica
acataaaaatgcatcactgaattccataaataacagtataataacttatttaaatagctataaataattttcataattaatcataattaactgctaatttccaaattaaactaagtgggctttacagccggtcaccaactaatggcgatcttggcagaagaaaatgaagagaaagacaaagatcttgacccctgagatcaagatgaaagaaacctattaaaaccaattaaagaattggaagaggttattttcgacccatgaaatcctgcgaaatgtgtatacattgggaaaaacctggacaagcagctcaaatagcagctaataagttttctgaaggcgaactaggatcaattttcctggagctatggagatatgatagggatcgacttaatattatgtgttatcatttaaatgttgatccaaattacccaccgaagaggcagaaaaggagacccttagattctgagagacaagggacgctaaaacaagaagtggttggtcaacgactttatacatgaggtgttttatccctcatggatagctaatcctgttctcatcccaaagcctaacggaacttggagaacttgtaataat

SEQ ID NO: 348178 - DNA, 518 bp, Cannabis indica
cccatatttctgatacctgggcggaggaaaatatccttagcagcccgaacatgattagttagcatctataatagtcggttatctgagcagggttgtggagaagatatctgaccaagtagaagaatgtttgtgccgagcaacttacaagagatagcaacttcagagcataatctcgttgtatccaaacacgaagacgatccctataattgtgggattgagtcagaggaaaattgaaacctgttctagttttctatttcatatattgtaattataaaaacattgtaatttcctatgttgtgcattgtaagcgaaagagaaatcatccctcatgcattaagcccttataaatagtgacctaatctcactatgaaaaggatcgaaagacttgctttagagagatattctagagagaaaagagtgatctaagagagaaacacactcagagatcagttataagagctttcaagaggaataacactctattctttctcttaagtcaatacaatacaagaggagta

SEQ ID NO: 348179 - DNA, 1040 bp, Cannabis indica
taaataaataatgtaaaatatattttttaaaaatttgacttaaattatttgtgctactagtacggtaatgagttataattaaaaactcgtatttattttataaatttgtgtataatacgtatatacatcaaattacaaataaaataaaacaatgaataattgagatttacaaattaaaaaaaaaaaataagaagtaaaactagtttaataaaattatatattaaatatgtacaaatataattatattatatatgtatagtgtataatatatatgttcggtcagttctcggtttaattagtcggtttgtcattaacactaaaatcgaccgtgcaaagacaattttaaccgaaggcagttttttcggtttttagttttttcagtgttccgacggtcagtatactcgatttggtcagtttcttgaattttttgctaacccctaataaacccttctaaaaaaagagaaatttttataaatatacattatatacattaatattccataaaaaaagttatataaaaagaatgggtttacataccgtgccatgtcaacattctatattgtgtaggggtgttcatcaaaccgcccaaaccgctcaaaccgcccgcaccgcaaaaaaaaatacagtttgaaattctttacggtgcggtcgcgatttgaatgtttcctaaaccgcgcggcgcggtttggtttgcgattttgaattgttaatatgcgattcaaacttcaccgcaccgcatattataaaaataccaatttttatatttatttaggtccaatatgtgaatattcaacttaaagtctactatttttcaaaaaaaaaaaaaaaaactttaaagtcttctaattattgtattgttgacacttaattttttttcatatttattttaaagccttatggtattttgacaagttttgctcaaagtttgttgtatttgtaatagtttaattatttagtaatagtccaaaccgcataaaccacaaaaaccgcaccacaccgcactattttttgcggtgcggtttttgcgggtttttaatttc

SEQ ID NO: 348180 - DNA, 741 bp, Cannabis indica
cgcctaagatagttagggtgttacatgtgttatgagaatcttgagctacaacaagaccaaccataccaagaacaacatgttcagatcttggatagaaaagataaagtccttcagaacaagaccataaatttggtcaaattgctttggagaaacagtaatgtggaggaagccacctgggagtttgagtccgacttgagggcttagtatccagagttgttcaggttagatttcgaggacgaaatccttttaacggggggataattgtaaagactgattagttttaacttggaaattaatagataattagggtttagtaatgaaattagaataaaaattatgatttatcattctgcagagatttatttgaattcgggatatattatttatgtcatacatgaaattttatgtttttgcatgttttgtgcccgacaacattggaacacggcgtttggccaatagaatcacattttggtatttagtagtagtggggcaatatagttagacattgggaatgtcgagaattattcgagatttagaaatgaccaaaatacccctaagtgacttagaagctttttggttttagtggggagtaaaatggtctttttgaccatttagttctttgtcctttagtgagatttagataagttttattaatctaaatatggttttaattaaattaaaaaaccatttgatttattcatttttatccaaaataagaaaaatcaagaaaagctaaactct

SEQ ID NO: 348181 - DNA, 951 bp, Cannabis indica
aaactagaaactaaaagtttccctatcaataaaaagcatggcaataccctaaacaacataaaaatgggaagaactagggtttccaatttttccccaaccagtaaaccggttctgggacgaacccagaacaccaaccggaattccggttcctacaagctatactgaaccgaaattccgattcagtgcaggaaacttcgaaattttgtttctcactcaaatcaaacccaaaccctatcaaaccttccagacctgttctaaataccccaaataacaattccaaagcattaaaacaatgcttcatgcactaaaacaaaaaccaccatgtgagctccaagctttgagttcaaaactcaagcttggttaaatctaataaacatgcatccaaacctgcttgaatctactcaaatatgcataatataacctctgaaaacaacagcaaacaactacaacaagcacagcaacagatttcatcatttcaccattaaaatcaagatttagctcaaaactccaaacttgcttaaaatcaactaatcaccaacaaaaacttgcttgaatccacatattaaaacctaattaagctacagaaaatacaattagaccctagcaacaactacagccacaaattctcaagcatgcaatactcaacttttccttaaaatccaagaaaacaaaaagaaagttacaaggatcttaccaacaacttgagatcacaaaatctttgataaaatcagttgaaattccaaggagaacaccacctccttgctgctcaaagagaggccgaaagagagagaggcttgagagaaaattgggttttgctttttctttgatttttcaatttggataaaatgagttataaaatttactttttccttatttgattcagccaaagcaaagtaaaaatcaatttacttaacatattataaaaatccataaaagacaaatctcataaag

SEQ ID NO: 348182 - DNA, 1522 bp, Cannabis indica
atgcacgctaaacatgtaaatagatatgcatactgttatactaatcttacctcgattccgaattcacgtgtgccggtcaacctgagtggagcgaactgctcggcgaattataggctcctaaacaataataatcacaacactgataagtgacacgctaaatcacttcccagggacttaaactagaaactaaaagtttccctatcgataaaaaaatatggcaataccctaaacaacacaaaaatgggaagaactagggttcccaatttttccccaaccggcagaccagctctacaaccggaattccgattctgtgaggaacccagaacaccaaccggaattccagaattccagttcagtgtaggaaatcttaaaaatttcatttctcaatcaaaacaaccccaaacttcatgcaaccttccagacctgctctaaataccacaaataacataacccaagtaataaaaccaagcttcatacacagaaatgcatttcaccattaaaggttcaagattgagttcaaaaactcaaaacttgactaacccctcaaacagccactacttcatgcataaatcaacctattccaacataatttaactccagaaaacacaattaaactataacaacaactacagcaacaaaattcatcattttaccttgaaaactaaagttttgggttcaaaactccatactaagttaaaatcaacaaaccacaacaaaatattgcttgaatcaacatattaaaacataattaatcttcagaaatcactaacaaaccaaaataacagccacagtcacaaattctcaagcatgcaataattcatttttttcttaaacttcaagaaaataaagaaaatcttgaacaaaggttacctccactttaattactctaagaattgctgaaaaatcttgaattgcaaagaaaattcccaacactagcagccccaataaaaaccgaaagagagagagggctcttaagagaaagaacttcttaattttccaattttctaatttttgaataaatgaagtaattgccttgattacttgatatactcagccccataataacataaaaatatgattattgacttaaaataaagtccactaaaggacaaaaagaccattttacccctcccacactaaaagggttaaaaagcacttaagggtatttttgggaaactctaaattcctgaccaatcccgacattcccaaagtataaataagccgtcccactatgctaaaatattagattgtgattctactgagctatacaccgcgttcgatgttgtcgggcaccgaaaatgcaaaattatgaaatctcactatatgacataaaaaatgcattcagaattcaaatataacaacataaataattatttaaatatctataaataattttcataatcaaaccttaaatatttgctaatttccaaattaaactaagcggtctttacaactatcccctccttaaaaggattttgtccccgaaatctaacttgaacaactctggatattgagctctcat

SEQ ID NO: 348183 - DNA, 1132 bp, Cannabis indica
acccagctaagagacaaaaaagatgacccttcaattccaagagacaaggggcactcaagcaggaagtggataagtagttagttaacgacttcatacacgaggcgttctatcccttgtggatatccaatcatgttctcgtcccaaaaccaaatggaacttggagaacttgtatcaacttctcagattttaatcaggtgtgtccaaaggattgctttccactaccaatgattaaccagttagtggatgcaatcgctagatataagcttatgtcgttcatggatgcatattctagatataactagataaaaatacatgtccctgatcaagtcatgccgtttggtttaaaaaatgctagggcaacatattagagacctgtgaatgaaatatttgcgagacaaataggaagaaatatggaagcctacgtcgatgatatgttgaagtcgataaagagtggagatcatacaacagaccttgcggagtgctttgagatattgaaaaagtacaatatgaaactttacccgaaaaagtgttccattggagattcctcaagaaaaattttgggattcatagtcaactcgaggggcattgaagcaaattttgagaagatcaaggctttgatagatatgacatcaccaactaaaccaaaggaagttcaggcattaacaggaagaatggtagcacttaacagattcattttgaagtcaattgataagtgtctaccatttttcaaggtattgcaatgaaaaaaaaattgagtggacagaagaatgtgaggaggcctttaaaagaataaaaagacatatgtcaacacctccagttttggcaaaaccaataactgaagagacattactcctctacttggctgtctcgaaaaatgtgattagtgcagcaatagtgcgagaagagggaaagcaccagcaacctgtttactatgttcgtaagaattactgggggcagaatcaaggtcgtatccccctcttgaaaaacttgcctatgcctaatccacgcatctcgcaaactatggccttagttataggcacatccgattaaggtattaattgatcaacccctgagacaagttttatcaaaaccagattcttctgaaagattaataaaatggtcaattgaactg

SEQ ID NO: 348184 - DNA, 488 bp, Cannabis indica
taatataattactgaaatgaggcctccaccttttaaactcgtttagccaagctctaagaaaactatcgttttacttttatgtatttatagaagatatagattctaaatctatgattagcgcttccactcaattgtactaacgtgttcccaagatgtaagcattgagtcaatcctaatggtcagctgtaacgaataagtcaaagaacatataaaatacatttaatttagaacctaatcatcttaagattgagatcattgatctaagatcaactttttaatatttacttaggaaagatagtacggtaagtttatgatatcttttctactgtgcatattagtctcatctaaataatttgaagcatataatcacaattagttcctatgtgatgacatcactgtaattgtaaataactatatgttcaggatttaatagagacttatatattaaacctataatcatgtaaaaaaatatgtgaacaaagcatatg

SEQ ID NO: 348185 - DNA, 504 bp, Cannabis indica
aaattaaactttaattataaatggaattaaaataaaacttgtaataatttaaactttacaatctaaaagttacagaagttgggatcccaaaaacatttacaaaatatgatcacaagtcccttttctttcaaccggcctaagcagcaaaacagagtctcaaaaaaaatacaacactggtagatcccaacccacttggtctgatatggctcggacatgtacattcttcgcccagctcctgtactcatggctgatcagtaatagtcttaccctttcctgcacaatagagcacccgtgagccaagcccagcaagacagtataaaacatatcaacaatatgctcatcatatgatataaacaataacgccattcaaatttgtctgtgtgacacagacctgcactatttgcctatttgctatagaccttcgtgttacgttcacacgcctatatatgtctatgtggcatagacctacgtgttgctctcacacgtctatatatgtctatgtgg

SEQ ID NO: 348186 - DNA, 975 bp, Cannabis indica
aattatttattctatcagatcgcatgagtataaaaatgttggttttgataagatttcaattatgagagattaaaagttttttcacattagattttgaattaagtatgtgtttatcataaaataaagaaataaatatatatgtacgtatcaaatattgaattggactaaatttgattcattgtaatataaataaaaaagatattatgatgtttgatttatttttaaaatagcaatatataggaatcgagtagtgtatttacaaaaatatttttactttcaatttttttcttaataaaggaatgatataaaataaaggtataatttataaattagggtcatatttgtttatatataaatgagtgtaatagtaattatttatgtttatatatatctttaatggttatttgtataaagattattacattgtataaaatataacaaaacttatttatacatatatattagtttagaattaattattagttctacataaatatatttataaactctatatattttattaaaatgtactaatcatagaggtatattttttcttaatacgagatttagaaaaattaagacttaattttttaataataaattagaagttactcttgaatataatattcttaagagaaatgcttagaggcacgggtaatacttttctaagtgtcatattgctattggtataattaagtataggatctcttatataattttaaaaaaataaattttagaaaatatcactaattaattttaaggcatcacttataaaaagtgttagatatcaggagtgcctaataaaaatattgtattccttaaaaaaaaaaaatagctaaaggacacccacaatgcttaacatgcttataaagtataatgttactacttactattaatataatttaatatcaagttataattattttactttaataaatattatataatatttaaaactaatttataaaacaatac

SEQ ID NO: 348187 - DNA, 644 bp, Cannabis indica
gggaacctcattctccccagtttgttcttcctgagcattttcttgcctcctagttcgtgagccatgaggtctacctcgtggtcttcaaactccaaggtcaggttgattttaagtgttattcccctgtgccgccctagctgcggctacatcatgctctaattcagcgttacaccggtttgcctcctctaggtggcgcttaagatggtcgttttccatttaataagtaccctcacccatttcgttgagcacctccacggttgggcccttcatctctcatttcaggattttggccattcccatgttgagtcctccttgaatgtgtcgtttgtgtactaggaccacctcaagttgagtcctcctggaacgagtggtccgagtgtcgagaccaccctcaggttgtgtcctcctagagcgagtggttcgagtgttggggccaccctcaagttgggtcatcttagagcgagtggtccgtttagactgtgagttggaaggccttctggagcccatgggctcctttccaggatggtgatgagtttcttcatgtggtgtgttaacgttctctgggctgtcagccatgaaggatattcttttttatatgtaaagagggttttttctgagctttttcacgaaggctctcaatgaaa

SEQ ID NO: 348188 - DNA, 842 bp, Cannabis indica
tggtccttcccagtttggtccaagtacaccttccgtactgtctttggtgtttaggaatacccttctcaggaccatatctcccacgaagaatttatgagccttcacttgtttgttgaaatattgagctactttttgttgatgggccatcaactttaagtttgcagtggctcgtctttcttcaattttatcaagtgattctgctaggagtacgtgattggtatcttgattgtacatcaatcttctgtgagaaggtggctcgagttctacaggcagcatagcttcatatccatacgccattgcgaatggtgtctgtccgcttgttgttttctcagttgtccgatgtgaccatagaacttcaagaagctcttctggccaatttcctttggcatcttcaagttttttcttcagtgtatcctttaaggttttgttgactgcttcaacttgaccatttgcttgaggatgtgccactgtggagaaacttttgatgataccatggttcgcacaaaagtcagtaaaggattggttgtcgaactgcttgccattatctgaaactatcttgtacgacagtttgaaccggcagattatgttcttcacaataaagtcttgaacttctttgatgtaatggttgtgagtggttcggcttctgtccacttggtgaaataatcaaccgctaccactacgtactgcactcctcctttgcccttgggtaattgtccaatcaggacaattccccaaatggcgaagggccacgagctttgcatctgagtcaactcgctaggtggagctctaggtatctttgaaaatctctggcatttttcgcacttcttaacataggcttttga

SEQ ID NO: 348189 - DNA, 705 bp, Cannabis indica
agaggatgatattcaatggcgaattctaagtagaaaaagtcattatccataacattatttctctcaaggtctgctgctaattgctattggtgatcgagatagtgacatgatcaagagacatgaatatctgcaattagtaattaatgataaatgttacaaatagatttttattagacttattaaaccttacatgagcttttatcatgtttttttgtacttggaccaaatttcatttgtgatacatgtattgaatattttgatggtataagaaatatattagatttatcatcttattttgtacttcgatcaaagtgttattattgagaaattatagcaatattaaaatataatattttttaatatataacataataataataataatgtaatgaaaaagtatatgattatatttttaaaatgttattaaatgaatataacataagaggaatgataacattaaaaaaatgttattattaaaaaattataacaatattaaaatgtaatatttttttatatataacataataatattgtaattaaaacttatatgattacattttgaaaatgttatcaataaatgtaacataaaatcataacactaaattaatgttaactatttataatatataacactaaataatagttataaatactatttaaattaacatttaaaaaatagtaattaaatagtcaatacttttaatt

SEQ ID NO: 348190 - DNA, 610 bp, Cannabis indica
ttgtaataaaatctctaacaaaagtgagatgttttgtagtgtgtttatgtatttttgtgtatatatatatatataaaaatatatatgtttatatatgtatatatgtgtatgtatatatatgtatatgtaaatatatagatagacttagaatggagtcttgcaaagtgtcaattgtgtgactagtcatgcacaataaatataatatatatattgcaccaataaatatagtacaatctaaaaaactgacacatgttaattttattttttattttatttgacacctattattttaagctaacaaaaataacataaaggacactcactactacaaaaactccctttagaggcagtttttaagccctttcaacgtcggtttttacgaaatttgctaccgacgctgatcagggcaacactaaagggtttatatgaaccgacgccatatggacccctatggcgtcggttcctaccataggtggcgtagcaaccgacgccaaaaggtcgcgaatttcaattttttcaattttttttaatttaattatatgattttaattacattttaattatatatttattaatttatatattactttatttaatttaaattacaaat

SEQ ID NO: 348191 - DNA, 859 bp, Cannabis indica
caattaaagaaaaatgaaaaaaaaaaatattaaaagaaacaaagaggtcaagatatatacaactaaaaaataaaatattattcaaaaaatacaatacacaaaacaaccaaaaaatattaaaaaaaaaaaacaacaagacataccaaattagaatcctccatcgcatccttagttttactcttctttgacgcactagcgtcatcactaacaaacttctttttttttttgttgcaacaacttccgagacaaccttctgagtttgaaatcatcatcatggtctgcttgaaggacattagaagccttcttcctgaccttcttactatggtgtttatgagaaacagaatctgcatcatcagctttaacttcttgattatcatcctaaaaaaataaacaaaaacaaaacataataaattaataaaacacaaacaaacataaaaaatcggttatagaaaacatactcaaattcaagaactaacatataaaagataaaaactaatttttgtggaacaaagacttggaaaatttaaacaacaatgaaacataaaataaatgcaaaaccagattcagtaaaatttaaaacatactttaagtttctaaagagattttcttgttggtgctttcatgggaatatcttcatcagcagtatcagccttgaacaaaacaacaaaaaaccagtttcatccaaaaaatataaataaagaaaaagatgaataaacagcaaaaaacagattcaataaaaatatagaacatactttggatttacagggagatttcctcgtttcaacttgaacagggttttcttcttcaacagaaggatcctaataaaaaaattaaaaccagtttcatgataaccaaaaaa

SEQ ID NO: 348192 - DNA, 637 bp, Cannabis indica
aatagaaggatttaattctctctctctctctctaaaaaaaaaaaaaaatagaagaatttaataataattaatcaagaaaattaatgacatttttgtcatttactttaagaaagcccaaaaacaacattctctcttttaatagagttatagatataccacttattcttattccaatgttttgttattattattaacttttagtgggactttttgtttcataaaatatcacattttacaataataccatatttcacatattacaataatatcacttttttgtttcataaaatattacattttacaataatactacgtatatcttactataccattacaaaaaaattgctacctttaattacaatctttttagtcacaatataatttttttatgactaaatgtaatttttagttacaacaaaatattacttgtgaataaaacatactatttagatacaagttgttactaatttagttttaatcagaacaggtatggtgactaaaaatacatttagtcacaaaaaaatttataatttttataattaatgcctttagtcacggaccttttagtcacaacataagaatgatgatttataattagtcacaacttttttacttttagtcacaagttttgttatga

SEQ ID NO: 348193 - DNA, 434 bp, Cannabis indica
attaataggacaccacacccaatctaaagaacaaatcaccttttcacatacttcattccaaatcacctgcttatgagcatttaaaagcctttggttgtttagcttatgcctctactttgagtcaatctaggtctaaatttactcctagatcagctccatgtatttttcttggataccctattggtatgaaggcatataagcttcttgatttgaacacaaaccaggtttttgtctcaagggatgtttgtttttatgagcaaatttttccttttgtcaaaacaggtagtagttgtgctacttatgagaattttttaactgtccctaatgattctggttctcactcattgcacagtgatcaattttcaactgatttgttgcatgataatcaattaaatcacagtcagttgcatactgtattgggttttatgccctaa

SEQ ID NO: 348194 - DNA, 576 bp, Cannabis indica
ctatataataatatagttctattaagcacataatgaaattaatttcatcattttacccttctcgggtcataattactaaaatgcccctagctcaccaagagggtcttaccatgttataaatcatattaattcacatacactgaactatataataatataattcctcgattatttataattatctaattagggttttgttaatccattacataattccagggtattacatacttgtacaacccaccgtcgacacccacgactgtaacaaccccaacaatggcagaatacgagtaatgtacaccacagtgaagaacgaagtatgaaaattgaagaaaatgtaaaatatgagttttacctaagctgaaacaaaaatggaaaatagaaaatggaagaagaaaatggaaaatgaaaatgagtgttttgccctagtagaaacgaaaatggaaaatcgatagagaaaatgaaaatgaaaaacaaaaggatagtgaagaatgaaatggaagagtagaggacggttgatgtgattgatggatgtcagtttcaactttttcaaatttaaaaaataaaaattcaaaa

SEQ ID NO: 348195 - DNA, 727 bp, Cannabis indica
aattataattctaaattagactagtcttatttttgaattttcactaagttatggcttgtttgtgaagaaaaaggatttaagggtttatttattaattaagagactttgtggagtctaattaataaataatataaatgacaattttatttgataattaattataattattaaatacacagttttgacatttatagggttgaaattagaaaatatgatacttgtgaaataatatataaatggttgaaaaatggcaaaaatataattagtggggcccactatcatggccgaccactataggtttattttagctattatgttattatttttatttcttataattcaatcctaaccctaagtgaattagtataaaaataataggatagtctcataatccaactaatgactctaaacctagtttacaacttgtcagacaactagaaagttcttgagacttcttcttcttctaatttcgaaattcttgagtgttcttcattaaatttttgagccttagtgattgagtgcatgaccacccataacaagtctagtactcaatcattgtgtgtaagactgtggagaatctaaacaactgaaagagaatggggcttagatctatgataatactctgcgacagaaaggaacaagggttagagatctaagtggaagaagtcattatattttcatggaaccaatgtaaggtttctcaaactttatatatgtttaagtttca

SEQ ID NO: 348196 - DNA, 1120 bp, Cannabis indica
tcagatcattccttaggtcatggatcgcccctaacctttcgaatacagaagtgcctagctgccttagcgattgatttgcttggttgacgagtggaatggcaccattgatctggttggaaccatcaggtatgacttctcctgatgaattaccaaacaagtggaactcgtgactggggatagggcggctggccacttgcagtttgggaagtattcatcgctggatcttcgtctatttcagacatgggaatgacattcggaggttgctgacctacagtttggtaggcttttcgtatcagcacggtagcttgctgactacgattttcaatctcagcatggtgagcccttaacgcctctatctttctatctctccattctgtaagcatacgcctttgttcttcgaacgtgagatttaccacagtgtggagttcgccctgatgatgattcagtgtattgttatgattctgcatgagtccaagagcgtcgcagagattttgtaactcagtagcatctctgatggtcgtctgggcgttggttccaggcggaacagttgtgttatgaatgccctggttgggtgcggaactgttattcccagtctcttgcacaccaggtgcgacttcctttataggggttgttacaccattgcccacgtttgctggctgtccaggattaccagctggcagaacccttgtgcttcctgggttctacaatgcaggatccaccgtctgtgaatttgcttaatcagtcaggtctctacgagtttgcaccatcatatttgtggttagatttttaatagagagcgattcttgattcttctctcaatgaaagcaccaaaatcttgagctcgcttttagccaacgacaatgactctaatttaataagagataagtgatttatagcaattgatatataataaagtaatataaagacacgaaaattttatagaggttcagcttcgagcagttcggtaatagcctaatcctcgttacttgtattgacttaagaacaaggagaaagattccttttcttatagctcttacaacagtatctctcaatatataattcttagataatatctttagggtacactctcaactaatctgtttgcgaccctttgcccagt

SEQ ID NO: 348197 - DNA, 665 bp, Cannabis indica
agggcataaaacccaacataaggcccaacgcccaggttgacattttatcaacatgagcatcttctttgcttttagaaaattcaactatttctagggaccaaacactacatttgaagggccataactgggacccaacgcctaggttgacacctggtattaggcccaacgagttgacacctgaaattgggccaaacgccaaggttgaaccctggcaatgtgcccaacgcccaagttaacatattgtcaacctggactgtttctaatcaagttcacgaaaaagtgttttagacatttttttcttatcagaaataataaagattcaagcaaacttggggagaaaactacacgcctgagctcctggaaacaaggcctagcacccaggttgacaattaacttggggcgttgctttcaattgctcaaatgtcgaattttgattcaaccaatgaatctagattggtcaaaaatagggtaggagacctcgtcctcaagttcaagaaccttggaagtatcaaaacgagatctcaggaatgagtgcccagtgcccaggttgacaaatggtctagtgcgctaggtgttggtttttatggtccatattagagttataaaagaagaagcgaaattttgataaataatttttaatctaatataaactataagtccaagga

SEQ ID NO: 348198 - DNA, 455 bp, Cannabis indica
cgactcttacttacaattatacttaaataattggaggtattaaaactaaaatattagtaaatttgttgtggcttacgacatgcaccaacagtacaactcaccaatagaaaggccaagtcaacacctaagcaaacagagaccctagcactcaaatgggcatcaagtgacaaactagctctctctcaggagctggtcggccacccctgggtcggccaaccttaggagtgcaccattgctggccagcctaccctccacaggggcctggccggccaagaagtgttttgtagggtttcctgtgcacttctacacgtggacaacacctctttctctccttctttagtactctaatccctaagaggttcgaaaataaagaggaagaagaagagtataggtggcggctaggttagagagagaaggctcaggtttttctctgaaggaaagtgtgaaagttaagt

SEQ ID NO: 348199 - DNA, 1268 bp, Cannabis indica
catgcctatctccaacttgtcctttttaattgagatcaatcctttattaattctttctaaccttatacttaaaccttaatagaaagaaaacattcagagtactcaaaacttaaatccatactttatatgcagaatcaaaccataaatatgtgtcagcttgatagaacattccaaatacaaactcccacgaaaccaacaaactcttaaataataccacatccatatatgagcaacaagctcctgaaaagccttaagtggtatatccttaatgattcgaatcacacaaaatatggagtttgtccttattatgttgtatagacaccttattactctgaactttattttaataacaattagcgctaagtcaatgtgcctttgaccttatagagatcatattgttactaaaatgcaacctgattgatttattgtcacaacatatatctttaatagcttacaataccatttctaattttgtagcgtgacaaaaaatctcacaactaaaaactttataatatcagaataagaaatcttaatgatctccaaaattttttgttttctaattctgataagtgaacatatagtactttgttctccttgaaatccttatagcccatttggttgcataccaaaagttccttatatggttacttgaatatctatccaatattcttaatatgtatattaagtacaaaaatataaatgcttgagcatatattagattccaatataaattaagaatcttttatacttcttaaatactaaggtttcttttaggacaataacttagacaatctattttctttagctacaagcctttcacctggtacagtatcttttgtgccaaaagtttttaatactttattgatatacctcttttgttataattcatgaatatctcaagaacaatctcaacatatcttgaattcctaatataaaatgtgtatatcattagtggcaagtaatttttcactaatatataataccagaatcatatcttactcccactgaaacttgtaacgtatacataatcatcaaaagcttctatctcaaaaccaaatcagaatacttaataaaaaattgtgctattgctaacgagaagcttacttgagtctatacatggattttcctaatttttaaacaatattctttggatacaaaggtttctggttgcaccatataacttttgtcatcaatattaccattgataaatgacactttaataatccatttgacataactcaagaccattttgagcagttagtgtcata

SEQ ID NO: 348200 - DNA, 788 bp, Cannabis indica
ttaaaaactcaaacttgagtcattaattgcatatttttgttttgtgtgtatttctagattctatttcttgcaatgtgctgtttggtttctttttaggtaaactggaaggtttcgcttggtttgggcacattttgagcaagattcaaactatttggaagaacctggtgcaaatcgattaaccagtttgacgggtcctgtaaaacagtggcaatgtaacactctactagtttatgtgtgtttacgtgatttttaacttaattgtacagctcgttgctaatcaacgagtttattgaaaattgtgaataaataaacctttatttaactaattatacataaaaaaaattacatacttacattaaactgggatcccgtttacaaatatatttacaaaagttttatagtgcataatacaaaagtttgttgcccaacaactatacaaaatatgcccagctgtcccaaagaccgtatactctaggcctaactgccccaacatgtacaatcttcatatgctcacagatttagtaagaaaagcataaataatatcacagtaataacatcgattataattaggtgcccatacaccaaactgtaaccctattcctgagtctgacacagtactgagtcttgaacgttcgtacaataatactatcgaccataatatcagcctatacttagtacactagttatgctctagacatactaatgttatagcgtcgatcagtatttgagccaaacatacatctatcagtatccaatataactctgcgtatattgataccgctattgat

SEQ ID NO: 348201 - DNA, 705 bp, Cannabis indica
gaacttatgaaacagaaagccgctgcctgagacgacgtctggaagaggcacaacgtcgaaaagctaagttagaacgtgaggcagtctcggccagggcgacacagggaacgaataccctaaatcaacctgaacatggagtgagaagaccacgaggcaaacctcgtggctcacgaaccaagagacagaagaagacccgggaagcaacctagggaaaatgagacaactcctgaaaatcaagaggaacagccagatgggagacaaccaaaaattgatgaacgagaaatccctaatgaaaatgaggatgattttgggactcaactgggagaacggagatcacctgctagaaatcaccaacgttcttcccaaacacattgagcgaggactagtacataccctggtgggggaaatgcgatatatcgctctcgagaggaaggaacagagcctgaagaagcaagtgtgactttaaggtgatccacaacccatagtcgatcaaatcaatgagaaaagggtactcaatgagctaatgattgagaaattatgggaaccagtaaatccgcaagccactcaaagacaaagtctatgagtaggacgcgatctatgagtaaggcaagatctgccagcaattactcccaaccagatctgcgagagcacttgaattgaaagtttcctgaccttcgccaaaagcttggtccaaagcaagaggat

SEQ ID NO: 348202 - DNA, 822 bp, Cannabis indica
acaaccttgcagtggccaaggctaagaaggaaatatgctccagccaaagcccagacaagggaaaaacattcccaagtaggaaacttcccaaggcaaggatgaagatgtggatcctttacttggagacccaagcagcaatgttggacttgtggaagaattagaagagatcgagattgatccagctatcccgaccaaaaagctaaaaattggaaagtgtttgttgctcgaagtaaaatccgagttgataaaatttctaagagcaaacctagatgtttttgcctggtcacatgcagatatggtcgaaatcgacccttctattatttcacatgttttgaatatcgatcctaatatccggcaaattcaacaaaaacgaaggctgttggataaagaacgagcagtagccctgaaagatgaagttgaaaagctgtgcaacaacaacttcataattgaagctttttacccggcttaggtcgcgaatgccgtactcaggcccaagacgaacaagaaatggcgagtttttgttgatttcacacacctcaacaaagaatgccctaaagactgttttccacttcgaagaatcgatcggcttgtagacgcaacagcagggcacaaaattttaagcttcatggacgcttattcaggctacaatcaaatcaaaatgcatccgccagaccaagaacatacaagtttctgaacagatatgggtctctattgttacaaagccataccgttttgtctaaaaaatgttggagctgcgtaccaaagattcgtaaacaagatttttaaagaccagatcgggcggaatatggaagtgtacgtgga

SEQ ID NO: 348203 - DNA, 515 bp, Cannabis indica
atatcacacattatatacagttcccaccttctaacctgattcaagtgtactaccgagctaaacagaatgtctcgtgctagatggatgccctaatcagtaaaattgggtaaattacatggtcgaataccctaatttgggaaatccaaacctacaactttaggttcttttatactctctatgaatcacactaactcaggaaatagggaaacacccaactacggcattgaaatggacaagaattgagaaaactaatttttcagggaaccctgccaaaaccagtttaccggtttcacaggtactggtaaaactggtaaactgatttttctaccagcctccccaaaaattcaccaatttgctcaaaacttgtccaatttcaaccaaactttccagagtacctaaaaaatgtatacacaacatattccaaccagaaaatcacagaaaaacccaatgaaactcaacttgccattaaagaccaaagctttgagttcaaaaactcaaatttgcataaatccaac

SEQ ID NO: 348204 - DNA, 580 bp, Cannabis indica
ttttttttttttaaaaaagaagacgtgattaatatatagatttagagtaatattgaaaataataataaataaatgtctataaacttaataaaaaataataaaaaaaaagagaatgaaggagagaagagatagagttatttaaagtattttagagcgccacatcaccgccttatacttctcctttatatatatatatatatatactaagtaaaagttacgtgcgaggcacgtacactaaatttatgctagagtatttttattatattaaaaggtaatacacttaaaatatttatctcatcttggttcaacccgaattttatgttgttcccataggattgtgtgttagatatgagcttagaagaatagtattcgttagaatgggtgccagcaatggcggtgctgatgtgagttttatcttctgggaaaaatctagctactccgacattacaattacacctagcctttcaaaatgagcatcatcaaaaaattcaaggattataaattgaaaaggatatcttgttacttttggtgtgcccaacaaactctctaacggatgacattatatttcgcatatcccaaa

SEQ ID NO: 348205 - DNA, 432 bp, Cannabis indica
tgttgttatacataaaaaaaaaatatatgtatatataaaaattagggaaacttaaaataatactgcttttttaccaaatcttttcaaaaaaaactgggacacagcaaactttacatttttactgtccaagcccgtttttttttcttttgtactgcccaggcccaataactttacttttatactgtgaacagtaacaaaacacaaaaacggcacctccttcctggttggggacggaacaaaattgcagaaaaccaggaaaaaaccattaaacccaacgaagaggaaacactactaaatcaaaagataatccaagaacgaacaacaacatttacagcagcttctttcccaagaacagaggtaaacacaacaaaacccatagtagtttaattttttaagaactagaaaaaaaaaaaactcagatttagatctgaa

SEQ ID NO: 348206 - DNA, 556 bp, Cannabis indica
ttagttttagagtaaactttacaaaaataaattaaataatgtgtcattattatattggttagacataatatgggatataatatttggacaggtgatcttgattccccatttcattaattctcaaattgaataaaatcaaatcaattttcctctgtctaaatcctaatatggtatcagacgttcacactagcattaaagcttcaagaactcaaagaactcaaattgcagcttctatcatggcaagaactcgggccaccttctctgctaccactactgacaacgaaactccagtggtcgatgcaccttccgctccgcaacacactgaatcggcccctgaaactcaggttaatccgaatcctgctcctccaatcaattcaatttctacttcttctcattctttgcacgatcgtcctgcctatgaggacattcgacccccatactaccttagcaatgcagatcaccctggtctagcattagctacccctgtcttaacagatcgtaatttccaaccatggaaacgcgactttaaactctccattggtgcaagaaataaaac

SEQ ID NO: 348207 - DNA, 1270 bp, Cannabis indica
aacttttcttcaaaaagtttctgaattcttcccatgtcataacactgacatctcgggtctgacccactatgtcctaccagacgcgggcatggtcttgaaacatgaaggccgcacaattcaccctctcagttcccgtcacccaaatattatcgaggatacgggtcacagtgctcatccactggtcagccttaataatatcaacacctcccaggaaattcggaggttggaacttcacaaactgctcaaatacagaatccttattcagcattataacccctggttacccaccactggcacaagtaccggtggtaacacttgatcaacaggggcagctggtgccggttgccttaaacgacgcaactcttcttcttcttgacgaagtatgatacctcgcattccttagaacatctgctgccagtcagcaggaggattagcattgccaacccccgcattatccccctggattctgcggaggtggaagcggtggtggtggattggtttggtctacaccatgctctacaagctcgccctatggtctggatgattaaagagggtccattctacaaataacccaataatcaacaacctgagcgagttaagcaccaatcccactcttacgcacttattgccttaaaccctaacttatctatttacgccatacaaatatacacttaatcatatagcatttaaagcatggcatcacataacacataaatactgtacatgcttgcatactgcctaaaatggaaaacggtaaagagatggtcacatagacagtaaagtatttactctcaatacttactgcaccatgagtcgagcttgtctctaacgatgagggtacatgttcggacggtctacaggaagtttaaaaacattggcgctgtgataccaaattgtaacgtcctaaataattaggcatgctaccaaatttatttatgaaatcctaatcccctaaatgggattactaatcaaaatagcgcagaatttaaacttttgtaataaacagaatgaaaataaaacttgtaataatttaaaatttacaacatttgggatcccaaaaatttttacaaactttattacaagtctctttcacttagccgacctaagcggcaaaatagagtttcaaaagttcaacactggtagacccttaacccgcttggtctgatatgactcgaacatgtacattcttggccaactcctgaactcatggctgatcagataatgccttaccctttcctatacagtagagcacccgtgagccaagcccagc

SEQ ID NO: 348208 - DNA, 820 bp, Cannabis indica
tgagttgaaaactattaattcaaccactgtaaaaacatttcatgaggctgcttatttacatcgtttactaacatctgatgcaacatttcacagttgccttgaagaggcatctatataccaattgccgtatacattacgtcgccttttttttctacaattttagtatattgtaaaccaggaaatccaagagttttattcgaaagtttttatcgtgcaatgtctgaagattatgtacacaaaaacattacattagaagcagttagaagagctgtcttagaacaaattcgattagctttgctatctatggataatgatataaatgatttccaattagttgattaccatgtgcttgaaaatgatgagcgtaacactgtaaaagacatagatgaagaactcaatattgttgttaccgaaaaagatttgtctttagtgtcctttctaaatgtagagcagaaaaatgcttatgatattattgttgagagagtcatgacaaggaagggaggtatattttttgttgatggccctggtggaactggtaaaacatttctatataagtctattttagcaacaattcgatcacaacatttaatcgtcctagcaactgcttcgtcaggagtagctgcttctgttttacctggaggtcgtactgcacattctcgattcaaaattccacttgctgttgataaggacattacgtgttcagttagtaaacaatcaggcttagctaaacttttgcgtcgtacaagtttaattatttgggatgaggctcctatgtgccatcgaagaactattgaagcacttgaccatatgttacaagata

SEQ ID NO: 348209 - DNA, 631 bp, Cannabis indica
aaaataaaaaaaaaaaatcataaaatgaagcaattccattacaaacccctcaaaacctgtgaaaccagtttcgaccctatataaagaaatcatataaattttatgaaactagtctcgaccctataaaaaaaattatcttcacccccaaaaacttttaaagacaccctattttaataatttttattttatataaaatgtatatatttaattgtactaagttttttttaacgttttttctaattcatattcttaaaaaaaatataacctattaaaatagaaataaattatattttaaatattatgacaaaaaattatataaattttctttgaaaaaattaaaaaaaaatgaaaataaaatcaaaataagtattgaaattaacataaaataatgcgagaaaaatattttaaaaatatattaagaataatttttaaaattatataagtgtttttctaatagggtgtacttatcattttattgggtgtaaatagaactcataaaaacttataaatttagttttgactctataaaaagataatatgacagacttaaattaaaaaaaaaaaaaacaacaacaaaaaaaaatgaaacaaccccaatacaataaaatagaggtgctcaaaaaaacacaaa

SEQ ID NO: 348210 - DNA, 663 bp, Cannabis indica
taagggccacttgagattccaaagtatcttgattgtcttttttgttacatttttcccttttttcactgggatagcagttgggcttcacaagagtttagcaaaattcaccgtttctacaaagagaacaagtgagttagactaaagcgagacacaagagaaaaaaagggtaagttactcaagaacaaacaagataaatctcatctaaactactatctaaaaagttagaggaagggggatcaactcgagtatctatatattccctagagcctgttatctcatagttcccaagttttggcctagtacgcattgctactatatttgtccgaaataccataatatgagctgctgcttgtaacttgaacgtgaaaattgagatatcaactatcaaacctatgtgcgatgagattaattcaattccaaatgtaaaaattacattggccatcagaaaatttaaccaagcaatttcgaccagcattaagaacagttgggggttggggaccacccataaaaatgttcaatcttacctcggggagctcatttaggtgggcaacttcccaaggaactgtggctttaacataggatcgcaagcttccttgtaaaaactaattaatggatttaaaaaattaattatttttattaaaaaatccatttacatataaaaaa

SEQ ID NO: 348211 - DNA, 551 bp, Cannabis indica
atgacacgcacaaatcgagaaaaaaaagtatggaaaagattactattaccatttatatatgtgtatatatataatcttttgaaagcttaaaacgtgatagtttaaacaaataattaatttaaattttttaaatattatatcaataattaattatttatgttaaaataaaaaaaaacatttaaaatttaaatgttcaaagtagttactatacagattaacgtttgaatgtaattttattaaaaaaaaattatgtaatcaaaataaataaaaaataccacataaatagctagctaattgttataggcaaatcaaaatgataaattttgaaaacaaaaaaaatttaaaaataatcatttatcatctattaatgtggtataatatctaaacattttgtcattttaaatttaaattgaatttttttgaaaaaaaaaaaaaattaaatagtacaatatataaatcttttaagagaatttactctatatactattttttttatttttttttttcaaatttttagcgtctagttgcaatagggatttttatgtaaaatt

SEQ ID NO: 348212 - DNA, 1073 bp, Cannabis indica
tttcaataaatttctttcatcttgaatccgaggatcaagatcttcactcttcttctcgccttcttcagtcaagactgccagtagctggtgaccagcctttctgtgttgcagctcgatgtgatagcactcgcgaatcagcatttgatcacctggcactactcccacacccattggtgtttgaaacttaagggataagttttttattgaactaactgcccctagtctaaatatgttgtaagctgatgacaaatcaacaacgaaaaattcttgcattattgtggtggataaaggtgcttcgcccaatgttaacgggagctcaattatttcttgactggcgacactattgcctataaatccacacagatttacgatgcaaggtcttaatttagctttttcaagtcccattgtcttcagtgtatacctataaaggatgttcactgaacttccgctgtccaccagcatcctctttatcctcttattggcaagctgaatggtgataatctatgggtcgacctgaggatacctcacgtctttttcatcttcctccgagaatatgatcagaggttcttcaatttttgctttcttggaaggttccaaagcaaaggcagactacttgttttttacttccttcacatacctcttttgggcattgttgctctctcccgcaatatgtggccgtcccaagataaccaggatatcctctcctttaagaggagggagttgtaatccctggttgccttggttattgggcagatttgactgttatgtctatttccctgtcttttcacatattggttgaagtggcctcgcgcgatgagaatctctatctcatccttcagctgataacactcgcctgtcgtatgcccaatgtctttgtggtacttccaaaatttggttgcatctctcttatatctcacgtgcctcatgggctcaggtttacgaaatgccaccctgtgctcatgtgggagataaatgttttcccaagtttcattaagcccggtgtaaatggtatagattggcacgtacttgtcgtgctttcttttgtatttttcttgtccttggctgactcctta

SEQ ID NO: 348213 - DNA, 877 bp, Cannabis indica
aacagcacagcacgagcaagagaagtgatcctagccatagaagaaaggaagccaaaaaatcccacgagcaagagagcccaccataacattcaacgacgaagatgctgtcaagatcaagtttccgcacaacgacccgttggtcgtggaggtccagatagccaacaagatggtggccagaaccatgatagataatggagcctcttccaacatcttattcaagactgcctatgaaaagatgaggctccagctcaaagatctaaccccttgtctcttgcctgtgtatggtttctccgattaaggagtcgcacctctaggaaaaatttgcctacccctcactattgggaaagctccaacgagcatgactataatggcacaatttctggtactagatgttccatcagccttctgttggaattattttactaggatcttagatgtccttctcttggatttgatcctttaagttttccaaactatgattgaggtactgtttgctgtgtgtgggcactactctctcactaggatttcgaaattgtatctctcttatgtgtagaagaagaaggagatgggcaactatatatagagaaagggaaggctcaactttctgaaagaggcagtttcctgaattactgaacaattgcttaactgccttatttggtgtgagccatcactttccatttatagataactgctaggtttaggttagtaattaattggcattaaaaaattgaaaataataattggaaaatgcacatacaagtggccggccatgggtgttattgggcctcacttggattttgcagtttccacaattttatttctattttcccaaaaatgccaattttccaattctaaccatttaaatgccaaaactaat

SEQ ID NO: 348214 - DNA, 1192 bp, Cannabis indica
tactaacggacctcgtcctactcatggacctcgtcctactcatggatctcgtcgttgagtaactttcagttctactagtgcttgtactctctcgatcagtattgcgacgagttccatcccctcctcacattgatcaactatgggttcttgtgcgtcccgaggtgacacttgcctcgtcacctcccgtccctctcacttaggtatgggtcgttgcatgccccctgctgggttgtgtacatgccccttcgctgttggttcgagaaggatgttggcgatgtctcagtggcaacccacctgtcccaagttgagtcccaggatttccctcgttctcacgggggatttcctattccctggtcccgtgtcgccttttgttcagatttttgtgagaaggctccgattggtcatttggttgttcattcatgggaggaccctcagtttccccacgttgttcttcctgagcgttctgaggattcttctgagttgtctcctgcctcctagttcgtgagtcgcgaggtttgcctcgtggtctcctcactccaagatcaagttggttttgtgcgttgttttcttgtgccgccctggccgcgactgcctcctgctccaactcagcgttttgtcagtttgcctcttccaaacggcgcctgagatggagattttccaactcgacaactggcacgtatctcatgggatcataggcaccatcatcatcatattccatgggttgagcaccaccaacactcatgttgggctcttcattccatgtttctgggtttcggccgccttcatgagaggtccttcttgaacgtgtggaccgtgtattttttgggtttcggccaccttccttctgggtccttcttgagcgtgtggaccgtgttgtccgggagttgggaggcctccgtgagcccattggctcttttccaggacggtgagtagtctcttcaggatgagtatcaacattttctccgttatcagccatggagaaagatttttcttttgcttaggagggttttttctgagcttttttcacgtaggctctcaatgaaagcaccaaactgctaacacaaattttcgttaacgatataagcctatttttgtgatacgattagcacgaaaaaataaaaaataaaaataagaaaaataatgcaaagataacaccaagttttttacgtgattttgcagttaaaattctaca

SEQ ID NO: 348215 - DNA, 1038 bp, Cannabis indica
aggccgcaaacaaatggacaggcggaggccgtcaacaaaatactaaaagttaccttaaagaaaaggctgctagcctgcaaaaacaattggcctgaagaactgtcacgagtattatgggcctaccggaccactccaagaacaacaaccggacactgcccattctcaatgttgtatagatgtgaagctatggtaccggtggaaaccttgtttccatctcacagaagggcagcatatgatccagcaacaaacaaagctttattacaagaagcgctggatcaaatagacgagctccgggatgagtctcaggtacggatggcagcttatcaaagaaaggtggctaaatatttcaacgacaaggtcaaagatagaaaattcaccattggtgaactagtcctacgaagggtctttccagccacctaagaacccggagtgggggtacttgggccaaattgggaagggccatacgaaattgagaataaaatcggctccgggacctatatgctaaaaagaatggacggatgcacagtgcctagggcctggaatgctgaacacctccgaaaatattattagtagttaaaaacgaagtttatattctataaaataacctgtgctggacaaatatatgcaatctcctatgtaatttttaaagctaagtgacctaaaaaatttcttttcatgtcacttaggggggtattaaagcacaaaatactggcaaaaaataggatgaatctaaacaggatgaacataagaaagtaaaaggctaaacaaaaccaaatgacgtacaaattgttcaaaagaaaaaaaagtaaaggcctggggccgggccataaaatgtctccctttaaaagaaaatagaattgtcttataagtgaagggaaggaaaaaataaaaaataaaaatcaacattacttaatcagcccggggaggaagacgaggatgttggaaatattttaccaggatctagatttactaccaagtatgttttattaacatcctaatatgaattctaaaacaatgaaataaacacataagagttta

SEQ ID NO: 348216 - DNA, 1204 bp, Cannabis indica
tagtagctcacttaacaccaaggtgccaggagtggtggagagctgacaccagggtcccccttaaagagaattctaagcttttagccttctaccaggaacatacatgattttggctcggtagacatatggccaaaccatataccgaatcacagagtttctccaatccgattgaaccattgtattcgtagacccaaataaatggcaaataccaagtctcgtcccaatccggacaatattgaagatatttacaaaaatgctactgccatacaaactaagcataagcatgccaccagcatgcacctcaacatgtgccaccacttgaccaccacttggccaacttgtgggcatcacctagcttgtaacgtgccatctttgcacgcacgttacattctccccccttcaacatgtcgatgccctcattgacggaccgcaggcaaatcttcctgatctcgactcctaagcttactccaagcttctcctgaatcctaagtctgcacttgtccctctacctccgtcaaacgaccctcttggtgacgatctcccttgcccattcttggacctgatcaaagaaactgtcccactgtcactattcagaaccacccatgaaatagtgcctccgcactagaatgcttcccccaacatgaactcctctaagtccatcaccatgtccctcaagtcaaccaagtagcccttacaacactaaccctgaagctcacacatcctctgatagtagttcactcgccaatgttcaatgcatactcctttcgacaaggactaagtatggtgcacccctcggggtgaggttcgcaaaccaactgtacctaatggcacctacaaaacacgcttccactgaagccaagtccttctggaaaagtccctccaaaaacttcacacgccaactccatggcgttccatcctcctgatggcaatcgagaaagacactctcatcgcaggataaaatttggtgtgtcccacctggacgaggctcgcaagccaactacacccaatgcagcaccaagtgcactcctgcacaaaatctcttcgcaaagttctcaacattggccatctggtcctaccacacacccgcgaattcatgcaaaaggcccctctgacccactgcatacgtgctcctctaagcttctttcacgttgtcaatgatctaacaatcacccaaaactacgaattttccctatggctcctgctt

SEQ ID NO: 348217 - DNA, 647 bp, Cannabis indica
ttatctcaactagtgcgaggaccgtgagcctacttaatcaagttcccaataagaagttctaaaatttaccgagtaaattttctatcttattaattcttctggactccattatagatttaaaattacactcctaattacataaaacgctctatatgtttcatatatagataaattattaattatccattattataatccaataatcaaagatcctctatagatgattcacatagagtagggataaatttatcgttctaccccttaatgtattttatccttaaaacacttagctttgataaatgatatttcagtaaactaatataattattgaaataaaaattcttccatttatctttgttaagccaagctcaaaggaaatcatcatttcacttttatgtcattatagaaactataaattccatgtctatgattagcgctcctaggggtgagcaaaaaatccaagaaaccgaccaaactaagtacaccgaccgttcgaacatcgaaaaaaccaaaaatcaaaaagaccgccttccattaaaaatgccttaacatgatcggttttattgtcaatggcaaaccgaccgattaaaccgagaactgaccgaacatattatacactatacatatataatatgtattatttttat

SEQ ID NO: 348218 - DNA, 472 bp, Cannabis indica
gaatagaatcataagtataatttagtggtacttaatccaattccctgtgggatcgacctcacctgtgtgagatttactacttgattgcgtatacttgcgtagtgtttataaattatagcaacacatgccgagcaaggtgcaatcttgcctctacattcatattttatgaagatcacaaattattataagatttgttgacccaatttactctgaagggaatcaagtacttggccgcacgatttgtgttgtatgccaaacaaggttggggccaaccatctactcatgatacgaactgtctctttattttgaagtcttgcccaaaacaaaactagtcaagttacttctatttttcaaagaatgaatatcaatggctgagtggcacaacgcacaaggatgtcttgaagataggtgggttcatccaagattactatatagtgaaagacatggatgtcgaccacctctccttctagtt

SEQ ID NO: 348219 - DNA, 829 bp, Cannabis indica
ataaaatagattacattgaaatggagttttatttagggcataaaacctaacagtatcttgcatgaaagaatttgttttattcacgacatgtttacgacgctgattgcgatatatgtttttttagtttttaatatgtttgcttacaatatttgcaaatggctcttaaacttaaacttccagtttcccaatatttcacaggacgtctcacctattgaggttcagataggtttagagatgccaatgccaagtttcaagagcataagttgatagataagattaaggctagccttttcggatacttctggaaagctggagatttgactttctctgaggtgttggtccacgacctactcttacggaagataaaagtttataatgaaaaggaagatgaggtatggtttcatgtgggcaaaaatgacatgagatttgggtgtatcgagtttggacttattaccggcttagctatgggtagtgcccctacaaagaaggaaatagaagtcaaatttaacgaccgtctagtgaggacgtattttgaagggaagagtttagtgtagttggattcactgttgcgtagaggcgagtgggtactctcttcctaaccaaaaacaaatagaaaaaaaaaagactaattatgagttttgtcctttgaacattaatatatacaaaatcatgttccttacttttaagaccattaaaaatctcatgaactattgagatggttcgatttaaagactattttccaattttagtaagaaatgaaagttcaggaggcttgatttggtacattttaaagttcgaatgacatgatttgatagatatcaaagtctag

SEQ ID NO: 348220 - DNA, 768 bp, Cannabis indica
gtaccgtacagtcttgatgcatggttccacaacaccattgacttctacagtataagccttctcaaaagagaaactatggaatttcgttgctaactcttgtatcaatattgtgtacctagttgtctccacaacattctttgtggtattatgccaaatttcatcgatatgataaagtaattcggggacgtgagataatgccacccttaatactaaaaatttctcttgtgaccagatcaaggctccccgttttcttacaattttattaatctctccattgatagcgataatctccctcagagctctaagtattttatcttccttgcccaaaacatggtcgatcttaagcgataagatgctcttgatttctctaagtaccacttcacgcgacgctcttattctaggaggcatattttatcaaagatctgcgtatcacatatacaactattaatggcaataccaagcatactaaaagtaacacttacgttatagtgagagggatctttttcagtcttctgtatgtatactgtgagtatccttcgggctaacggacgatcgactctgataccaactgtaacgccccgaaatttagccttattttacaaaatactaactttgatgcataaattgaaaagactcaaaactgtttagaaatacacagcggcttttactataaatatgccaaagacgaatgatcattcatattaaaataaaataagtagttgagtacattttttaaaaaaataaatttacaacatcccgctgagctca

SEQ ID NO: 348221 - DNA, 591 bp, Cannabis indica
ataaaaattgcacccttaaaatatagggataattatatggaaacacttttatttgtaaaaaaaaatacatttttaattttttacgtttaaagattttttaagaaaattttataattttttttataaaccaacacaaaaacaacaataaaattacatcaaagatacagaaaaataatatccaaacgacatcaaaacaacaacaaaaaataacatacagataataaacaatgaacaacaaattaattagagtacaacataaaaaaaaccgcattttctgtatataaaatcataaaaatcgtaaaaatatttaaaattccgtacaaccgtatttttgtaatttttttttttgttgtttttgtatatttgtgaataatccttcaaataaaactatacaataatcattgttagagtgaattgatttggtttgattttgtttggttttaaattttgtaaaatatactattattggcctggttcgaaaaaataaaaattcagaacaaattaattcatgagcaatcctacttaatgtacatttaagtatatttttagtatgtgtcaataatattacataatatatatatatatggaaga

SEQ ID NO: 348222 - DNA, 775 bp, Cannabis indica
tagatcgaggaaagaaattcttctcaagagaattactcccaaaacaatattccttgataacaaagatcctacaacaagtatattcaactaaactgagaaggtccgcaccatgttacaagataacagtaaaggtgcatacaagtctggcgagtacaatgagaatttgaagtcaaaacttctatgcatacgctaaaatagggaacatctcgataagtactctcaccagccaacttatcaactagttcctctagcatttcatcgtccaggaacccataaaagagatagtacccattgcttttcagcatggccacccatcactcttcagtgatactcgttgcgcggtaagctgcgtaggggtagccactacgtgatttcaaaagtagatacaaagctctaagcttttgttacacgtgagaccagctgtgtctaaaccacttgctcacaagactaactttttaaagttactcttttagttccacatgcgtactatggatagcaccccaaggaagaacctaggcaaagtctatggaagttggtgaatagcaaatgaccaagatacttgcctgcatggccgcttgagcggcacccatactatataatgcatcgaactagcacaaagaactcatatagagaaattttaatgcttagaataagctactaaacctgcctgtaagtcgtgtaggcatactttgacttgacatagtaaatttagacccttacgtgtcaaggccattagaagatagcgatgatgatctgtttggaattattttaccag

SEQ ID NO: 348223 - DNA, 776 bp, Cannabis indica
gattagcccaaaagacatgatacccgataagtctgaaaaagcacagtacgacacattaaaaaatcctataataattattatctgcatttttgagtgtgtgacatctgacatgtggcatatacaaggagagattaacctcatacactctcgctaattaaaatttcccattgcaatcctatcgtggagaagtctcacggaactgggaacaagttaagactactcgataagcgaaagtgatctgcccaaccttatccaggcttcccgaacgtggaagacatattgtctctcccggacttggagtggtccaaatgacactacaagaaatattacttttgtcagcgcaattcactaatgcactgacaaaacttacttttaccagcgcatctcgtgaactgtgctggcaaaaagatcacagttttaccaacacatatttgcgctggcataacatatttttactagcgcaacttatatttgcgctggcataacaagctgtgtaaaactcttccctttaatactttttattaccagcacaaaattgcattggtaaaagttacttttgccagcgtaatagtgttatgcgctggcaaaaattacttttaccaacacatccacaaactatgctggtaaaatatcatagttttatacaaataaatttttttcaattttataatattttataattattagtattataaaaataaataacgttctaatttatcacataatattaacaaaataaaataattttagaatatttattaaactaaatattataa

SEQ ID NO: 348224 - DNA, 1512 bp, Cannabis indica
tagtccatgagtcacttttatttagaagtgtattacttataataatctcacaagtacatagagtgtattttgtatattcgcccgagcaaaagtacgtaagagaattcaacccctaatccatgagattagttgggtatttatagtagttggagaactacattagggttttcccttttccctctattagggagtttacaactgaataatgtccatgggctcgctcatgaaatccagtccatgaaggatacaacctgctgactaagcaaatcgggcttgagttgatcaggtcaaaaccgtatccaactataatggaagaatattttgaaataattgccctacacttgttatgggaagtttcctctttaatcacaatatatatgatattattttccaatctgacagatgctgtttccttatttataggaggaaacaaattgagaaatcggaagaatctttcgagcatgatgcatccttccccctctaggctcacaactccagagttgtctttcgggctctatctgtagaacgcggaaggtatcccgagtacagaaccaagataactcccagaaggacatattaagatgggcttggcccactttaccattgatgagggtcccactgatgggtctgggatgctgacattgtaaagaccgcttagctttaatctggaaattggcagataattaggattttaattatgaaaattatttattagtattgaattaattatttatgatgatttatttgaattcagaatgcatttttacgtcacatatagaaatttcataattttgtgtattttgtgcccgacaatattgaaacgcggtgtatggctattagaatcacatcttagtattcttagtatagcgggacgataatttagacattgcgaatgtcgggaatagtcaggattttagaatttcctaaaatacccctaagtaccccttttatgttgtttaatgtgggaggggtaaaatggtcatttttccccattagccttttgtctttttgtgagtttgcctatgttaataaatctgatttttattaactaatatagctgatatattttctaaataaagcaaaaatgtatttactcatttatcaaaataaaaaaaaattgaaaaaagaaagctttctctcaacacactctctctctctttcgattttaccttgaggcaggtagggcttgctgaaatttgtcctccattcaagttagtttcagctggatttaagtgttataaagtgctaggtaaactcttgtctttactctcttaagtttcttaaatttttagaagtggatcatgcatgtttttgtgtttttggtggttattcttgctgttagggtttgatacagttttcagaagttattatatgtttagaaatgttgttttgagcatgatttaagggatgttagtaagttttatcaagttttgagttttagaactcaaacttggagctttaatggtgaaaattgattctgagctttgattgttgttctatcacttggaaaat

SEQ ID NO: 348225 - DNA, 227 bp, Cannabis indica
catcaattggtaccaatggcattttgtgttggtttgaaaatgacatattcaacatttgcatcaatttataatagacacaacctagcgtcagttaaaaacattaaataaaagaaaaaaaaaggcaattgaaacataaaaactttacatatataaactaatataaatcaaaacctaagtcataatcagatgcaccccatctctctctctctctctctctctcgtcggac

SEQ ID NO: 348226 - DNA, 579 bp, Cannabis indica
tttggtaatatataattaaatgcctaattataaaaattagcacaattattacatgtctaaataaatcatgtaataatttaccaaataaattttttttcacttttaatttatactaaataacatatcaattctaaatatatgtattaaataaaaaatagaaaaattaaataaataaaattaatatttcaaataaataaaatttttataaaaattcagaattttttttgtttttgttttttgaaaaatcatgtccccttaaacgatatgtcattacagtaatgaaggttgcctttaaacatgaaaaacaacatgtcgtatggatccaccttcaacctccagtcgggtcactttgacctgttattctgcacgcagatcacggtggacacaacccaaactcaattggaactttctattccgacgactaaaacaacccaaatcaattccaaatgaatcttaatgcaaaaattaagacattcatatggatttcatgcatcgaaaacacatcaaaattaaattttaatttcataaaaaaaattcgagcccaaacaagtatttctagaaaaaaaaaattacaacttt

SEQ ID NO: 348227 - DNA, 681 bp, Cannabis indica
aattgaggaacaaaataatgaaatccagcgattgagacagtaggttgctcctacagtgcctgttctagaaattctagtggcacctgcccctgttgtccaagccgaaccagttataggggtgaatcggatggaacctctgtatgaaaggtttcgtaagcaggcacctccagtctttctgggaggttcgaatattatgaaagccgagccgtggctaacagtgattacaaagatttggaatttcatgggcgtcaccgggaatgatagagttgtctgtgccactttttcagtttcaagaagatgcattggtttggtgggacatggtgtctatgatacacgatgtcacaacgatgacctgggaaaagttccagaaacttttcaatgctaagtactacaatgaggccgtcagaagtgccaagaggaacgagttcactcacttgaccctgaaagaaaatatgagtgtcactcagtacacaacgcagtttgatcaattggcaaggttggcctcgggaattgtgccaaccgattttagtaaaaataaaaagtatctggatggattgagtgcaaagattcaacatgacctgatgattactacagacgacaacaccacctatgttgaaatggtggaaaaggcactgcgagccgagggcgcagttgggtttatgactgagtctgctaggactc

SEQ ID NO: 348228 - DNA, 799 bp, Cannabis indica
aaggctgacagcctagccaaggtcaaaagagggagaacagctggctgcccactagagccttggccttgtgccggcttgggttccaagccttagtggctggctagggtttcaggccttagtggccgaccaggaaccctatttccaggcataggtcggccaacctaggaggtacaaccccttggccggttagaccccatgaacgcctcccttggtcggccaggccacaaacaaggcttccttggccacccaggatctgcatggatcagaacacgtgttttttctagagctcaaacatgttctttgcattcttcgtgttcttcgtgactcaaagagccaagaatcacaatgaaggacagattcagatctttttcatctagaaatcacacatcatatatcctaaggctgtcatgtagatcaaaataccaaaaggataacaatctaacgtaagaatcaaagcatgttctaaacaaggaataatattcatgcatccatggcaaaatcaaccaaatcaagtaaaataataggaataggaagcttacccactacaagatgtcgttgaagaagaaggtgggaagctcaaatcatcaaaacagtgcaaaaatcctgaaaagatgatgcttgtgggttcgaccctttaaagagaaggaagagctttttcttaggcaagtttcaagtgagagaaagtgaaaagtaaaaaatgagaagttaaaaaaggttttccctccaaaactcacttatgtaatacatgcgggccccttttttgtcacttacctcacctacacatcataaaggcaactaa

SEQ ID NO: 348229 - DNA, 1020 bp, Cannabis indica
aaaagtgctattcatggtcatgttttaatttcaatattattactttgtttataatacacacatctaaatgttatattttagattatataatttacaaaagttgggcaacacgcgcggcttagttccctagttataagctaaaacaaataaagtacactgaaagtatgacggagtatctgtatcatatttatatatttattaaaatatttaattaatattttgtactatttaacaaatattttcatacggagaaattcataccacttcaatgaaaaattgataaggaaattcatcaataagcttgtaataaaattcatgaaacttaaagtatccaacaaattcaacatgtttcaaagaaataaaaaaactttcatcaaaattatacacatttcagataaaagacaaggctttaactcaaagaatcactacagctttcatttaaaaaacaatttggagatatacatatcacgtaatacaattcaaaaaatcttttgagctttcaagacagagcaaatcatgctaccatcggacgcttcatctaccagctcacaccccatagcaggatccaagcccccatactgatcgacgtcgatgttgattggtggacgctgctacgtcgtcgctagctcccagtggcctagcaagtcccccccaagttacaccgtcttcgtctcaactccacctgatgccaccgaacaaggacgaagatatctaaatatttatggttttgttttctttattttattattatttatttatttatttattgtgaatagatatgtatacttaaatataatattattaaaataatataaaaaactttatcaaatacattagaatctattctacaataatacactcaacctttatattgctgtttgatataaaatacacggctaagaaagcttccccactggtaggattgtaacgcccgtacttttataaaaatattaattttgtttacaagcgttaaacgcgaaaaatcataatgtcgcatttttatttaatacttgaaaatgt

SEQ ID NO: 348230 - DNA, 594 bp, Cannabis indica
gattatatgaaatgagttttattcagggcataaaacccaataattatttcataaaaaaatattacttttatattatataatttaagatacattttagttacctctaaaatttacatgtatccactttaatgatcaattaattatttaggttatattaacacatttgaggtaattttcaagtttatttttgaaaataatgaattgtcatctagtaaactactattttagtaaactttattttaaacaaatatatatcataaatatctaaatcacttatattttttaaatataaattaatatatgtattttgattagttaaataaagaataaaattacaaataaattttaaatcattatatatacgacattttttgggaaccaattagttatgatttcgataagataccaattagttacttttgataaaatcattaattttatataaaaagacgatgatcagaccaaaaatcctataatcagatatgtttatactcatatatgtccaataaacttgtttattttggcatattgaaacaaatttttattgtttgtttatatttttcgtatagcttaccattgtatatgctaacaaat

SEQ ID NO: 348231 - DNA, 631 bp, Cannabis indica
aagatcgtagtcggcaagctaccgtgttgatacgaagagcctaccaaactgtaggtcggtaattgccgagtgtcattcccctaggagagacgaacgaggatccaacgatgaacacttccaagactataaatggtcagccgcccaatccccggtcacgagttccactcgtgggcccagcggtaggtgagcagaccctgtctggtaattcatcaggaggagtcatacctgatggttccaaccagatcaatggtgccgttccacccatcaaccaagcgaatcaaccgctaacacagccaagcgcttctgtgttcgaaaggttagggacaacccatgacctaaggaatgatctaaacagaaggaggggagcagacgatcagaattttacgataatcgtgcagcccgaagcccgtactcaaatccacgctcataaagatgctgaaataatctaaattgaccagaatgccgagcaggtcagcccaaccgtataggctcagctagacgaactaaaaaatatgtttcacgacatggttggacaaagaaataatgatcttgagctagaccgagcacgcggaactcatttcttgccagagatcaatctcctcccactgccccacaagtttaagatgccgac

SEQ ID NO: 348232 - DNA, 715 bp, Cannabis indica
gttatatgaaactatatttaggaataacattacaatattgataatgttacacgtactaacatcatcagtatcatcagaacaacaatacataatatataacttttagtttaactcctgatcgtgaataaattatttaagtttaattttttatggtaataatacctaagttacatttctaaaactttattacgtcatgtccattaaatctcaagtataaatggccagtaaaaaatttatttaaatatattaataaaaaaatgacacttgaataatgacttgatattttacctacaaaagttccaaatatataacttttttttttgagaaatgatgaattttattaaatcaaatcatccaaaaccaaagatgcaactaccataggtaaagcatccccagacaaagtacaatcagcctcagaaagagaagatcgcgccagaacatgcgcaaccttattagcagatcgttttacaaaattaaaggaaacatccacaacacccgaacaaagagccaaacattcagaaattatatgaccataaggcgaggccatttgtttagactgttgaatatctctgatgactcttaagcaatccgactccactaccacatttgtccaatcatttgctttaatccaactcaaagcttccttgataccaatagcttcaacctcatgcggcttcaaaagacccattttactcatcttttttgcttgtaacac

SEQ ID NO: 348233 - DNA, 474 bp, Cannabis indica
aaatattttataagtttaatttaaaagcaaaaattttagttcatcacgaattccataaacctcgttgattagtaacgggctgcacagtatgtttaaaaatcacgtagtacgcctatgctagttagggtgttacacgtgagctgaacaaggtgaccatcaagaataagtaccctttgccaaggattgacgatctctttgatcaattgcaagactcgattgtgttctcaaagatagatctaagatctgggtatcaccaactgaaggtccgaaaggaagacttacccaagacagcattcaaaacatggtatggacactatgagtttttagtaatgtcttttagactaactaatgctccagcagccttcatggatatgatgaatggggtgttcaaggagtacctagataagtttgttgttgtattcattgatgacatcttatctacccaaaaactgtggaggaacatgaggaacacct

SEQ ID NO: 348234 - DNA, 584 bp, Cannabis indica
acaagaatgttatttaacatcctaaatatgaactttgtaaaatgataataagtaaacacatataaagtataagaaaccttacattgggtccagcggaataatatgtctccttccactcagatctctaacccttgtatcctttctgttgcagagtataatcaagatatgagtccgaatgtccttctcttggatttggatccttcataatcttccaaactatgattgaggtactattttctgtgtgtgggcactactctttcactagggtcattcgaaattggaagagcaagagaagagaaaagggttcggctatagagagaaaagagaaggctcaaatttcagtttcctcattgcttaattgctacttttggtgtgagccttcactttctatttatagacaactgctaggtttaggttagtaattaaatggcattaaaataatgaaaataataattggaaagtgcatgcacaagtggtcgaccatggatgttattgggcctcacttggattttgcagttttcacaaattctatttctcttttcccaaaaatgccaactttctaattttaaccatttaaatgccaa

SEQ ID NO: 348235 - DNA, 795 bp, Cannabis indica
ctctcaaacaagtagtgtagatcgcagggtgagcaagattgaactccaagagaactcgtttggtaagtcatataaaagttgtattatattaaataataaatgacactatatttagataaaataatgtattgtattaattattacgacaaaaatttcaatacaatataagttgtattatttaaaacataacaaatagtttgtattaacttgtattataatatttacaagggatctagcgtccaccccaatcttcgacccaaatttagggactcagacctatattgggacctggatccggaacgggatcgggtgccggacctcgaacccgaaactggacccggaccccaaactctgaattccagaccctagacctagaccccggatccggacctgccctggagttggcgttggggtcgaatttattaaaaatatattataactttacacagcttattaatacaagtctatatcaatcatagtattgtactaaataatattaatactaataatgatactaggagtgttcgcggtgcaggtggtgcggtatagcctttttttaaaaccaaaccacatatgcggtttttgtattttctcaaaacgtattcgcaccgtgagatctaaaaactgtaaaaaccacactgcaaaaatacaatgtggtgtggtacaatttgagcgaattacactatcatcattatcaaatattataataaaaattcaaaaattaatctaataaagtttcaacaataaaaaaaaatatcttattaaagttttaacatcataacatatatattaatc

SEQ ID NO: 348236 - DNA, 698 bp, Cannabis indica
ttgtaattttttttgttgttttggtgtatttgtgaaataatccctttaatatttatgtaaaaggggtatttacataaatataggaaaaataaagctagtctacataaatatggtaaggaaacttaacaggaaaaaatatatatttaaaataaaaactgaacatatatgagatatgtcacttgaattaccataaaaaaatattaaaattcccttcatgttttatttttaaaaataaaataaataaaattatagtgattgtcggagtttgtgactggtgccggaaaaggcgtcgaagtttgctgtcggcgcaaggaaagtcgttggagtagctgccggtgccggaaaagtcatctacattggtattgttgttggaaaaatcactaagaaactggtttttttatcaagaaaccagtttcttggtatttttcggcgacaatgccgattttgacgacttttccagagtttgctgtcgatgccgaaaaagtcaccggagtagctcccagtgtcgaaaaagtcaccggagttactgccagtgccagaaaagtcattgaaattggcactgtcgccgaaaaaatcgccagaaaagtcactaagaaactagtttctttatcaagaaactgatttgaagaaaccagtttcttggtgattttttcccgcgacaatgccaatttcgatgacttttttggagtttgctgtca

SEQ ID NO: 348237 - DNA, 520 bp, Cannabis indica
tgttcgaaagaacactgataccatgtacaaatctcttgtgtcaagttatttaattttctgcaattatttttatattctgtctgttctgttttgtcggtgcaaaattggattctgcctctgcagacgtatacaattttatattttcatatatattattgacatttgtaaaaactcagtttttcagtaaccataatggccgaataatttacatgaataggggacgccttaagaaaattagacagtaaatgtaacaccctactaagttagatgtgttatcgtgatttaaagttaattgtgcaatctgttgctaatcaacgtgtttattggaattcgtatttaattaaaacttttcttaattaatatttaattaaaataaaatagactttataaaagtcggggtccagatatttaaaatttacaaccaaaatacaaaatattagttacaaaacttgttgcctagcaactaatcaaaatatagtctgttgtcccgaagatcaaacacttcaggtctaaccgcccc

SEQ ID NO: 348238 - DNA, 742 bp, Cannabis indica
ttttaatatattgcacacacgtggcatttctgttggacagggcgttacaaaataaaagttacaacacataatatacaatatcactactacaaattacactagtcacatcggccaatgctactgtttgttatcccaattttgttactctcacgtggcatcacatgactgatgaaacgtggagtctacttgaaacattagctcgggaagcacagtctgagcaggatacctcgctggcatgcccatagcaaagtattcagtaatccgcacagaatggccaaacacttagccaattcaactttcgtatcgtgagtcattagcacaatccctataactcagggagcaatttatgtggatatggcatacacacgatcccgctatcagtgtattcagcctcaatcccacgatccttgcatttagcattgatcccacgatctttctgtttatacgcattgtaacaagaggggaaactcttcctctccaaccttactagccctataaatagtgatgcatattcactaggcgagagatcggtcgaaaaatagttgagctaatactataccctaaatatattatctaagaattatatatttagagatactgttgtaagagctataagaaaaggaatgtttttccttaatcttaaagtcaatacaaataacgaggattaggctattaccgaactgctcggggttgaacctctataaaattcctgtgtctttttattgctttatcatatatttgt

SEQ ID NO: 348239 - DNA, 857 bp, Cannabis indica
ctggacctccggcgcccattcccgtggatcattcagtccacttgtcctccagctggtttatcccctcggacaactttcttggggatgacgaagccagcactgtagttcaagactttgctagggctgaattagagagtcagggtaggattagttttattgctttgttgttgggcgcatgccttcttatgattattctaacactttgtttatttctttattgcagcagccaagccaatggaagatctcctggctaccctggccgaggcctacagccttgatgcttctctgcttccggcctcatcccaactggtgacaatcgggaggtcctcgtccagtgcccctttaggcacaatagtcttgatagacgaggagggggaagtcgaggaggatgagggcaagattgcggccacccttgagcgcaagcggaagggtaaaatgattgagaccgagccttccaaccagccccgtaggagggacactccagctgttagcgctgactccaggattccttctgaagcagaggagtatactgtgccgcacggcatcgttctcaccccgatccccacagacgaggaaaggcaaatgctccgcatcgccaaacataactacgccctagaggagttgagtcggggacatgatgaggtggaggccttgaaaaaggtcctacgggaggagcaataaaacaccttgcgcaaggacactttcaggaatccttgggacctgaacatggaccccttgacggactggtttaaccgcttcgtcggtcctactctcgccctctttgcctaggagatgaccagccagtttgtctcccatctgactcaattcccagccaagagatacgctgcttgtgcctc

SEQ ID NO: 348240 - DNA, 583 bp, Cannabis indica
atcgccaatacgatggtgcaaactcgtagaggcctgactgatccagcaaattcacaatcgctggatcttgcatcacaaaacccaggaaacatgagggttccgcttgctgttaatccttgacagccgacgaacgtggggaatggtgaaacagttcctatagatgaaattgcgcctggtgtgcaagagactgggaataacaattccgcacccagccagggcattcataacacaattgtttcgcctagaaccaacgcccagacgactatcggagatgccactgcattacaatatctccgtgacgtggtcgaactcatgtagggtcataataataccctacatcatgatcaagacaaactactcgctgcagtaaatctcgcgttcgacgaacaaaggcgtatgttcgccgaatggagagatagagagatggaggcattaaagggctcaccatgcagagatcgaagatcatagtcgtcaagctaccatgctgatacgaagagcctaccaaattgtagatcagcaatcgccgaatgtcattcccctgggagagacggatggggagacaacgatgaatacttcccagact

SEQ ID NO: 348241 - DNA, 1203 bp, Cannabis indica
ataatatttattgaaaaaataattctaaggatgaaaaataattttttatttttcagatcttcctagggtataattttataaatattgaattataatttatatttagacttatctaaattagtaattttaattaaataaatatatattaatataaatagattaaaataagtatcaaatgaaaatataactttttaaaataatgagctttagttataaggatattctatttccattgctggttcaacacagttgttattttagtgagattcacccccaatagatggacgttcattagaaatttaatgtcgtagaatctcgaaagataagtaacgtccatccgaatagtggctactaagaataggacttacaaggtatgaaacaatggtggaagttcataatatagaaatgaccttgactctcgactcaaaacgaagcaacgttgaattatcttttcaattgaataaaaggttgctagaatggtttaaattttagatgagttgactactctattcaatgattgatatctttcactctcgattcaaaacgaagcactgtatcagtttgttggaaaccttggaaattatttaagatgtgtttgttttgtatttttacatgtctttcttacttactaattgtatgttaatttctgaatgtgtatgaatttatgttgaaccattttgttttctgttattaattgtagtataatttcgaatcattgttggtctaacttagcttgttatttttaatgggataaatcccaaaggattgtcatccattagacaaacataatagtgttagatctcgatagaaaaatatttataaatgcagcatctagttgtacatccaaagatgacaacttagattagtgtttacaatatgaaacaatgaagagattcataaaataagaataacttttactcttgcctatcaagacattgttagattcttattttaatcaaaattatcctttaatttttcctcttcgcttattcattttgaatttgcttaaattatatttcattggtagaatggtttataaatcatctgctcaagatgttattctaatttatgaaattgaatagcgtagatgacaatattcttgacattctatcccgaaatgatataaatcctcgatcttaaatatcttctacttgtatatgtttactttaggcaaattaaacataaagttagattagtagtggt

SEQ ID NO: 348242 - DNA, 633 bp, Cannabis indica
attagttaaattttaaatattattttaaattaaatttgaatattttaatagtttattttcattaattctgaagataaatttaggacgaataatatttttttttaattattattataaagtataatagtaatttttgtttttatttaaatcactattatgctttcaaatttcaatgattatcagtacattgaatattattaattttaaaattatgatattaaaaaaaaattaaaaactaaaataaaattaacatacgtgacttgacacgtaacatctatctagtaatacaatatatgacaaagtaacactatttataaataactattcataacacaatgttatttttagtttggaaaaaaaaaacctcaacgttgcctaatttttgcaaatttaaaagaaaaatttaatactacttaaatctcaatacatcttgttttaaaaaaaaaattcgcaatagaccaaacatttaaaaaaactatgaagatacgtcaatacagaattttttttatttattttttgaacttttttatttataaacatacatctttaataaaataataaattgtatttttggttagtttataatttacttatagttgtattatagttgtcgtgaagttaattttttggttg

SEQ ID NO: 348243 - DNA, 1018 bp, Cannabis indica
aaaataatttccaacaattcttagtcgtttcaaagggagcttgaattgatgccatcccaaacagttcagttaacttgttcatgatatttgtagccgtgagagtgtttgcaaacctcgttttcaaggtgtcaaccatgctagacagcataaagtatcgagctttgttattatctttctaccaacgctcgaacttttctttaactgccttggttggattctcacccggctgctcaggagcctcttcagtcaacacaaacagggaattttcaccaatgagagcaatgttaatgttctctctccatttgataaagttagctccattgagcttgttatgagtcaacagtgacaccatagggttggtcattgtcatgttggatactacaaataacaataaatagaaatcaaataaggtttaacacaaaatcttattcagaaattattagcacttagcaagtaagaatgacaagcgaaaatactaaaacatacaatcctaaataatttccaaggttttcaacaaactgatatcagtgtcccgtttaggcgagaatcaaagataccatccattaaatagagttgtcacctcatctaaaatgataaatattctagcaaccttttactcgatcaagatgagaatccagcattgtgttgggattttatgccctgaataaaacccatttcaatctcatttgatttgttatcaataaccgattagaagtcatttatgtttacatgtagttttcatgtttatggtttaatatatacaaaatttgttaagtccagaacatatagtcattcacaatcacagtgatgtcaacacaatggagtgtaattgtgattacatgcttgaaaagacaatgtccctaattcatcagtgcactggatttacactgatgtgataattagcgataaagtatacttacaccttggataagtgttatgttctttcgagaacattggcaaagtatgctagtttcggatgtcctgacatgcttaggttcaatctcaggagtgctattca

SEQ ID NO: 348244 - DNA, 667 bp, Cannabis indica
tcttttcatcccataccactagaagtagggtttcaaatccttgtacattttggtgggtcccggaggtagtgaataaggtgtggtgtgagcttcatcaagtatctctttcttaagctcattaagaccaggaacacaaactcgagtcttttacaacaacattctactatttgagactgaaaagtctctaggccgaccagccaatacctcatctcgaaccttaactagctcgggatcttctaattgttcctttctgattctctctaacagatcagattgaagtgtcaagttgtgcaaccttctaactacaaactaaatccctgcactaaccatatcagaggcgagttgaggggctatcaaaatcgtggtacaaacctgcctgggaccctttctacttaaagcatcagccacaacattggccttctcggggtgatacagatctcacagtcgtagtctttaaccaattcgagccaccacctctgcctcatgttcaaatctttctgggtgaaaaagtacttgagactcttatgatcagtataaatctcacatttttcaccgtaaagataatttcgccatatctttaaagcaaaaaccactacaccaagctctaggtcatgagttaggtaacgatgctcataatctttcagttgacgagaggcataagctatga

SEQ ID NO: 348245 - DNA, 748 bp, Cannabis indica
ttcggccattgaagtactgctgtagcttgaagaaggagggaagaagaaaggtagaaggttgctgcgtttttcaaagcttgaaggagaaagaaaagcttgctgcgtttttcagcaagagagaaagaaggaaggaagaaaggcttgctgctagggttgtgtatcagttcaaagaaaagaaaggaaggagaagaagttgaagggttcggctgctaggtttttggaataagaatattatgttgctagggttttctatgcaaaagaaaagatgaatatatactgcctttaatggcagtaggtaaaagaaaggggtatcagttttttgaatagggaatattccctttggatccgcatcacagcaaaagacaacagtacccttatttttttgaacgttggtgttgtgtgtagggggcattttcgaactgccagctgtttcctacagtggtatcagagctcggggaagcaagaagattcaacaacacctggaaataacgtcaagaaacaagaaagatcatcaaaacattgaagaagccaaatctgaaactatcgagaaattgataaaaaggaaaactctaacctaaactttgtcttgttacattcttacttttattatcttgttataacaattaaacatgagtaatattagagtggatgttgacaagtttgatggatcgggggactataggatttggaggaagaagattagagcccttcttgctcataacaaattacttagggttcttagtgaacc

SEQ ID NO: 348246 - DNA, 511 bp, Cannabis indica
tcaaaatttataaacaaatcatagtttctcttattagacgaacatttgatctggtgccatctcaaaaaaaaaaaaaaaaacttcaaaacccagctctctaaaatcgtgatggcagggaaatgatctcgatagacgcaacaaatcttagctgaactgagctagggaagacgtcggagcgaaggtcgtcgagactttttcgacacaaattgacgaggacgaggacgttacagacagttcttcaacgggtcaaacggtcgtcgggacttgtacgactagaatgacgaggaagggtcttggcagtgtttggttgaggaagattaataatttcattgattaggaatttttttggattgacgaagctgaataagtttctaggtttgagatttttcaggttgaagaagatgaacaggtcattcgtttatttattaattatatatttttaatataatttataattttaatcaatttttatttgttccataaaaaaagaaaaataaatctcttataaaaa

SEQ ID NO: 348247 - DNA, 661 bp, Cannabis indica
aggctccattatcaatcatgtttctggccaccattttattggctatctggacttccacgactagcgggtggttgtgcggaaatttaattttgacagcgtcttcatcgttgaaggttatggtaggccctcctgctcgtggaactttgggcttcctttcttccaggaccaggataacttcctcttgctcttgctgcgctgttcgggcatacctctcccgagctttgctcgaatctcccgcaatatgcggacctccaacgataacttgtagatgtccatctactggtggaggttgcaaatcttggttattgtcgtttctctgaccctgatcgatcttgacatacttctgcaagtgagggttgtttttccttatcaggaattcaatttcccgcttcgagttgttgcattcattagtgtcgtgaccgtagtctccgtggaatcgacaaaactttgtcatgtccttcttgctgacatctttcttcatgggcccaggtttcttatatggggccagcgactgagttcccatgtaagcactttctatatcttctgtcaagatagtaaatgcagtgtagtcggcttgattctcccggggagcttcttcggatttcctggagaactttcccttcttcccattcccttgcttgtggtttttgttggaacgttt

SEQ ID NO: 348248 - DNA, 1153 bp, Cannabis indica
aaactgaagaaagaaaagaacaaagaaaaggggcaagcagatgttgctgatggttatgattcagctggtgttcttgtagtgtctaatacagactctggacaagaatggatactcgactgaggctgttcctttcacatgtgtccttgtgaagaactatatattttgcaatcttgagaagaaaacaggggttactgttttactaggtgacaacaaagcatgaacaattcaaggaactggttcaattgtgatgcaaatggatgatggtattcaaagaacaatcactgatgtcaggtatgtccctgaactcaagagaaatctcttgtctattggtgttttagcttctaaaggctgtaaaattaaaatagatgaaaactcactcaatgtcattaaaggttccactactgtaatgaaaggaatctatagaaatggattgtatttcctcaatgggaaaacagttactgacctagcttcaaatgtgacaggtacaggtgatgatgacttgacaaggctgtggcatttgagattgggacatgtgagtgaaagaggcttgatggaattgaagaaacaaggaattctcaaagggaaggtgtcatgcaaaatgaatttttgtgaacagtgtgtaatggcaaaagctgcagacaaaaatttacacctgccaagcacactactaaagagcaattagcatatgttcattcagatctttggggtccttcaaggattcccacacttggaggtgcttattatttcatgagtatcattgatgattactcaagaaaggtgtgggtatatcttttgaaaaccaaatatgaggctttcaacacctttgtcaattggaagaaactacttgagaatcaatcaggcaagaagctcaagaagattagaacagacaatggatgggaattttgttcaaaccagttcaaagaattctgcagcaaagagggaatagcaagacacttgactattagagacactccataacaaaatggcctggcagagaggatgaataggacactacttgagagggttaggtgcatacttaaaggagctggtttagagagaaaattctggggtgaagctttgaaaactgcatgctatctaataaatagatgtccttctactggtatcaatttcatgacaccacaagaaaagtgga

SEQ ID NO: 348249 - DNA, 1061 bp, Cannabis indica
aatcaaataatgaaataacattatatatgcagtttttttattaatgttatatctacatatgggtacaattattttgtgttgtatagttatatattaaagggtaaattgcggcataaatacttaatgttttcgattttatacacttacatacctaatgtttatttttggtggccaatatacctaatgttacaattctcttataccgttactaccacttccattattaactcataaatataaacacgttgagggctcaaatgcattacatttatttattttattttaaaattggatattcttaatataaaaaattaaatattacttgttttttttcaaaaaaaataagatagatgcaatactaaattaccatagttgagtaaaccggtgtagtatatgaaacatgataatcgaattgaagtgtcaatatcatgtgaaaattattaatgagaacacttttttttaaacaggtagcatttagtttctgatgttaagaatattaagttttaaaataaaataaaaataaatgtaatgcatctgaacccttcacgtgtccatatttatgagttaacggaagtggtagtaacaatgtaacagaattataacattagatatttttgccaccaaaaataaacattaggtatttaagtgtataaaattggaaaccattaagtatttatgccgcaatttaccttatattaaattacttgaaaatttttaaaacaactatattaatacaaaacatacctagaagattttttttttttttgggttaatataactatacaacacaaaataatcacttacaaagctttatgtaatatgcttccacccaatctctatatttgttaagttgttagatttgttgggttttgtgcgctaaataaaatccattacaatctgattagttatcaatttagaattttgaagtgatttatgattacatgtatgttacatgtttatggtttaatatatatacttgatatatgcacaaaatcagttaaattcagaacatatagttattcacaattacagtattgtcaatacagtggaatgtgattgtg

SEQ ID NO: 348250 - DNA, 1073 bp, Cannabis indica
aatattttttataatttttttgattttatttatagaaaatacggtctttttatgttgtattcttattaatttgttgttgattttttgttatctgtatgttatttttgttgttttcttatgttacttttatataattttttttgttattttcgtgttgtgcttatataaaattgtaaaaaatataaaaaaaaattctttaaatgtaaaaatataattttttttattaaaaataatttcttatctaattattcctaatatataatgtattaataatgataaatggtccatccttacaactttaatcccaactaaacaaatgataacattaacaactattatcactatctttcttattacccattttctctaaactcttcattcatattttttttttcttcctaacaaacatagtctaagaatcttattaccaaggccatcttgaattgtattaagccttagaaaaataaattttttaagtctttattataagaatagatgatatttttgaaaattattaaaatatatatttttaaaaataatttttttttagagaaaattatatctagaaacgaaaatttgaaaaatatattacaactaacgttaatgattttaagtgttaaatatacctttagttttacaaatttttttggcaggtatatacttaggtactctgccttttcttttttttttttttcttttttttttttcattttgtatgtataaattagtctttttttttattatctaaacattcatctacctcatttatatttatttttctttttatttatttattttattttatttttttactttttcttttaatgacatgacattaacatattcttttttattttattctagtgttattttttatttttaatgtatatgttattaacagtttatgatttagtagtatttttggctatagttttggttggtatactaattagtttctgttgtattaacagtttatgatttagtagtatttttggctatagttttggttggtatactaattagtttctgttgtatttgttttttattaagtagatttttttctaggtttgtgc

SEQ ID NO: 348251 - DNA, 814 bp, Cannabis indica
atatttgaaccttgagtgaaagagtgccatgcccacacatagcaagtcaagtactcaatcatagtgagtaagatggtggtaaccaaacttgaaggagagaaagagatccaggttcagatcttgataatgccctgctacagaaaggaatcaagggctagagatgttgaacggaaggagtcattatattccactgcaaccaatgtaaagttttcttaaacccttatgtgtttattttattgttttaaagaattcatatttaggatgttaattcgacatacttgttagtaaatctagatcctggtaaaatattcccaacaacgatacagtatgaaattaaatacatgggataggcacaacacaacaagcttgaaaacatatcacgtaagcacgaatagattagctcgaaagtacaatacattaaaaacccaataaaatgatagtaattgttgactgaatttttagccaactgacgtggagtcgtaataaatgagatttaaaccaaaatcgtaacaataaatataaataatgataccgggatttgcaataaatgtaaagaaagacactagaatttaaagaggttcggccccagatgtcggtaatagcctactccccttgtgttttattaatcagagttgcaaaagtcaagaataggctcctgaatagccaaagaagaaaagagtatttttttctctaagtgctcaaaatcgcgaatccccttcccaaggtcatggtgaccccttatataggggaaaaggtcggtgcttctcgctttaggagcgcgaccaacgcggtgttggattatgttttacaagga

SEQ ID NO: 348252 - DNA, 1367 bp, Cannabis indica
agggtattgaaatggcatagacttatctccacacaattttttccttaccacgcaggagaatagtgtaagggcagggagggtcagtctgactttcatcacacttttgaaggtaaaaatgacaatacctcttggtacgatcaagtttaccacaaaagaaacaaaaatcagggagcctctcatatttaaagtcaatccatttgacaaactctctacccatacgtatgaacctaatgttcatacccctcctaataggaagattaacatctagaaggattctgagccttaaataaggcccagtaccctccttgacagtatccttatccacctctataagatccccaacctcagcagcaataaaacgggctaaatcaaaggacttacacatgaagggtataccatagacttgaatccagaatggaacataatgaagagtgtcaggggtgatagggaaagaactttcaggagcagcaaagatggtgatactttgagcaaagtgccacggctgtccttctaaaattcgacccttatccccctcacaaccaaaagtcacaagaaacaaaccatgagcatgctcagtgacagagacaaggaatctaccctgtgatgactaaataccagagagggttttcatcaaagagggcctattatatagtctaatggtatggagcttaaggagaaggctaatggttgcaggagtggaagaggaagaactagcatcatacgtgaagatagtgttttcatcagaaggaagaactaaggtattagagatagtgttaaggaactcatccatgatcaaaaggaagtaaaaacagaaatacacatataacaaacacccaaaccaagaaattgagaaaatgaaaagaaagtgccataaaccatacctcagccttactatatatagatagaactagaaaccccgtagatgccttctcgaatcgtccctagtcacatccctagcctccacctgaagaggcgcaatgatggtgaaggtattaagatcctcataattccaggcctccgcccccattttccgatctccaagagaaaaagatggctggaaaatatgctcaggtggtattaaatgccaaagatcccaacataaacgcccaggagagaaacaaaacgaagaaagagaaagagaatagagagaaaaaatgggtttacaattaatgcgatgggattgtgtgaacaggggataacacatagagcaattaatgcccttaatcatgaagtaaagggaactaaaacgacaaaaagaagaggaagatgaaagagaaccaccacttaactgagtagggtggacgagaatcatgttagaaattattttaccaggatcttagatctattcacaagtatgttgattaaca

SEQ ID NO: 348253 - DNA, 866 bp, Cannabis indica
cgaccataatggtcttttatatttttcaaccaattttaaagaactttaattttctctgaacgacctttaatttacactatgttcttcacctttggaagctatgcgattggttcttggtcttcctatagtcttgtcttcaggaggtgctatcacttgtattgcaagaatatcttcaggaatgtcagtccattgtgagtttggaggtacaggataaatagtttcagcatatgctaacaaccaatattctgatgtgtagtactgtgaacacatagaatatatgagttccccagtattttggggttgtgcctttcctgctgctgctattgcatggatacatggaagtttctcaatatcaaaaactttgcacgtgcaactctttgaccttaaatttactattgcatcgagttctccacacatcacatcgtactcattctcatttaactggagagttatcaatgaaccagcttcatcccatctcttgcgtaatatctcttccctctttagtgttaatggagttgtaactacacatgctttccgccgacgttcaaaagaccattgtcccatcgtgctaatgataaaatcaatcatagcaataattggatactctctggcctttcgcatcatattgttcactgactcaactatgttagtggtcatgacttcatatcagttaccaacaaaatgtgctctagaccacttactgaacttgacatcattctcaagatacttagcgacacgtggatatattttgcgaagttggtcaaagtgtttattaaactctttgatacggtacgctattgcagctttcttatacaatttagtcccagcagcacttttaaaacagtgttttatattttgctttacat

SEQ ID NO: 348254 - DNA, 574 bp, Cannabis indica
cgtactcgatcaacgtgaggaggggacggtacccatcacaatactgatcaagagagtataggcacaagtataactgaaagttgctcaaggacgaggtctatgagtaggacgaggtccatgcatgagtaggacgaggtccgtgagtaactatgaccagcaacaaccggatcttcgtaatcacttgaatcagaaaaaaccttaccttcaccaacagctcagtcaaaagcaagaggatcctatccaattgcgaattgatgagttggaggaaaaattcaagaggtatcaagttggggaatatggaaaacaatttggatacgactcggacaaggaactcgagcctttccatccaaacattatgggtactgaatttccctagcgattcaagaaccctcacgtctcgtcatacaatgggactacagatccggtctcacacttgaataatttttatactatcatgtgagccagtaatatgacgaataatttacgctgtattttattccttacctcgctagttggggtggcagcgagtagctggttcaacaaatttacccatcattcaattaccttttgggaa

SEQ ID NO: 348255 - DNA, 694 bp, Cannabis indica
tgaaaacagttttatagaacatgtttttgaaaaatattttcactttttcaattttaaaaacagaaaacggattgaaaaagtgttaccaaacgccaccatgatctaaatgaaatattttaataccttaaaataaataatccaaatattttttctattacataacaacaaataatctaaactaaatatttttcaaaataactaaattaaaaagtaaataattaaatctaaacaaaatagtttttaatacctaatctaaaactaattaaataatttatctaaatatctattaattaaacaaataggtagaaatatatatactgtataatcatataaatatattaaatatataaattaattatatatacggtatatatacgtataatatgaatataaatatatataattaatattaataaagaaaatatatatgtatataccttaggaggaaggccatcaacggtggcccgtggaggaagagggggtggttgttaatggggacgcgagagagagcaacaaacgaagcaagatgagagagagaaggagagagggcgtcggagagtgagtttcttaggtgggtggaggcgagacgagagagagggagatcgagacgagaaagagattaagagagagagggagatggctacattgcacgggttttgtgcgagagagagagagagagagagagagagagaga

SEQ ID NO: 348256 - DNA, 832 bp, Cannabis indica
ctggtacactttgtcaatgccctggaaaaggacataaaacttatccaaggtgtaagtataccttatcgtcgattatcatgccagtctaaatccaatgaagtgacaaatcatgattatattttagtgtgctgatgagactataatcatgaacaaatatatacatatttatatatgctctggacttaatagaatttatccattaaacataatcatgaaataaatcatgtgaaccatgaagcataaaatgatttcttatctttattaattagtaaatctgattatattgaagtaggttttatttagggtacacaacccaacaagattaccaacagatgcttcgaacacgtgccacccattcagataaggatccaaattgattgaagtccacgttcgacttcgaaagtcccgcgcagacttggtgggcaaatattatcccattttttttactatgatgtggcagcatgtacgagtgatacgtgtccagcattccttgcatatgaatggaaagatatttggaaaggggcttcagttagcacatttgcacgcacaacatctgcttatccgagcagggtaaagggtagatgatctgagtagagaataagtttggttttccgagttgtgtaacaagacatgactacttcagaatggtatcgtgaagcccaagtatgaaggcaatccctacaatcatgggattgaatcaaagggatatggcaggctgtctcaatcccccatttcatgtattctaattttgtaataaatgttctttccaattatagatattgtaagtaaaagggaaaccttccctcatgcatcaagcccctataaatagtga

SEQ ID NO: 348257 - DNA, 427 bp, Cannabis indica
ccacaaggggtaagctagagtggtggaggagatcgctcagccccatgctaatgctgagctagagattggtcaaggagcaaagagtttggatgctgaatccgatctagtggaggctggactagtgaagaggaggaggagaagttacagtacttgttctgtcctcccaaattatcccctaggtcgctatgacgctcatggtaatccactaagcaagctcgatgagccttcagagtttgaactggatcataacctggagcagtctcctaagctggagatattagactcgagacaacatggagttagttgggtctttcctgcttctactctttctgatgaagcctttgttgggttttgtgccctaaataaaactcatttcaatctaatcagatttacttattaataaagatcagaaataacattttatgtt

SEQ ID NO: 348258 - DNA, 654 bp, Cannabis indica
cttataaaaagtattggacaccataaactgctcttccttattcttcaaatacaattttcatattttttattcttaataattagtgtataaataaataaatatacatataatatacatgaaatccaatgaaattaatatgaaaaataaaattaataacattgaaattttgaacttaattgtagaaagaatctactgacagcgtggagtctcatccacgatcatgttttttaaataatattattttaagacaaagattcttatattccacttctctctattctaaattatctcataataataataataataatttagcatataattatgctttgattttattttaatatattgtaactcatgcatgggttataatattaaaaattgaaaagtatatataaaggctcaaaacaatggtcaaataaggacctttttaatctgaaaaaattaaaatagaaataaaaaaaaaggcacaactttccaaaaacatcagagaaaaaatatatatgttacttttttttttttggccaaaataaataaataattattgttaatttgaaaataaagacaactaggattatgattaattgaggtagtttatgccttagttagggtaattatcttcaatctttacatgtattaatgtgtttttattta

SEQ ID NO: 348259 - DNA, 749 bp, Cannabis indica
tgatttatatatttcttaagtgttttataaaccctaacatgttcaacctaaggaggaatgaaaagtggtgttttaccaatattttgtacaagccagccagttggcccatcctttgggatagtttgaagaaaaacaatatagatgggtcttaaggcaatggttgacaaccttagttttcccatctatttgagggtgatacaaagtcctgtggcagagctcgatgttggttttatggtactaaatcaaggacgcggcggaagagttttgtattatctaattatcattgtaccgtagcccctaggatttccatatgtgtgtacattaaatcaaaataataaaaacaataagtttaaagtatacctcttgaagcctattagggtatccttaaaacttctgtatgttgtatcccttaattcagttgatgaggaatatgcaatttggactcacactagtgtcttccaaatcgatccaccacatacaaggaatagtgtgggttattagaataaattgtttaaccttgttcttgttgagttctcaacacatgagcaagaacaactaagagaaaaaatagtttcctttttctctcaatagattttgaaattttagtgtgaaaataggtcttctgatttcttaaatcagactcctatttatagtagttaatcctttttattaaatcattatttaattgtttaaataaataaatatttataatcaaatttggttactaatatttatgagggaatctctca

SEQ ID NO: 348260 - DNA, 982 bp, Cannabis indica
cccctatggtaatttgaatatccctttcttcaggaagtgttagtgatgcagctaaattagccaatgcatcagctttaccatttttagatctggggatgtgatttagagttatatcttgaaattggccaagcaaatatttagccttttcgtgataagggactaaattctcatgcttgaccgcaaattcaccactcatttgcttaataacgaaaagagaatcaccaaatacctccaatgattgtattttcatttcaagtgcaacttcgaggccgataactaatgctttatattctgctacattatttgtgcatatagctagaatgtggaaagagtaaggtatcaggcctcctgacggtgtcacaaagacaattcccgcacctgccccactacttcttgccgccccatcaaaatataattgccacaatgaagaatcaattgcgaagacttcttcatctggaagatcctctcgcaactccatatcatctggacttgggcgtgctgccagaaaatcagccaaagcttgtccttttattgctttttgcgggacaaagttgatttcaaattctgatagcatcatggaccatttggcaagtcgtccagacaacacgggcttggataggatatatcttagagggtcagcttttgacactaaagtcacaagatgtgagagcaaatagtgtcatagttttgtgacagcaaagattaaagccaaacacactttctcaattggagggtagttttgtctgcccctactaaagttctacttaggtagtaaagagcaacttcttttccctcctcattgtttgtgccagcatggctcccaaggagcggtcgagtgaagtgatatataatatcaatggctttcctaagattggagctctcaacactggtgggtgcaacaggtactctaatgctttcaaaagtcattttggcatgccctcaccccaaagtaaatgggacatttttctgcatcaacgcgaaa

SEQ ID NO: 348261 - DNA, 813 bp, Cannabis indica
catgcattttgtaaaaaaattattaaaaaacatattgaaacttacatgtagttctttgcatgtctcgctaatccaagtgtcttctgttccttttctgaggtggcctctcttccaagtatgaattgcgtagacgtcctgtttaaaaatagagttagtttgtgtttagtaaaagaaattgctaatagaaagttgataattttacttacatgttcattacgagacgctgccatcgacctcgagccttgcgttgacaaatactgcatttcccctctatttttcttgttttgatttgaacgcgcaatgaattttgggctcaaaaataagtcaatgatttgcttccaactctctgtagtgcagtgatcaggtactgcttcaataacacttgccaaatcatttggatccccagaataatgttcctgaaaccacgtgtgcctgatattctttctctcagaatatcttctcttcatctcatgataaagagtactcatcactctttcaggctcaggatggccatcaatatcgtacaaatactacaaacaaatagtatttgttaaaaaattatgtattaattgaaattaaatatttgaaacattaaacttgttaatgtgttttaccttcatttttgtacaatttggtctttaaagtgttgagggatttcactaaaattcaagtagtgtcctggcaacgtaattgtgacctcaacacccatttgacgtacaaaagcttgattttccttaccaaccactttgcctgtcacggcatcaagttttagtggtaatggttttcctgcatcccgccttctttgctcaacat

SEQ ID NO: 348262 - DNA, 1103 bp, Cannabis indica
atttatttaaatacattaatgtaaacaaatatatatttatatagacggtcaaattaatggtaaatatgtataccttattggtgtttcactttctgaccctacatccaatcgtcgatatagaacagcagctggaacggaagcatacatagaattcttcaaaggcctgagctccaaagaagaaataaaaggtgtgccatgcccagtgtttaccagacacacaaatatataatctgaagttggaatatatatgatctccttggtcgcagttatagatgcattgtcaaatttgacagttccccatttgttaggtccaagatacaaatcgaactctggcacaatcatttttccatcataatttccgtacaagaaccttgctcttatcaaatacttgttccctttcccatcaactggctttagggtgtagcaatttttgtctccttgagggaaacttcgtatggttgtaaactgctgctcaagagaattggaatggtattcaactgagatagcattgctttcgccaatgttattttcaatgaattcgaaatctgaaacgtaagttaagtcggtttttttgtcctacgtaagtcatattttctggtattccacaatctaaactgatgaagcctgacaaaacatatcccaaaactatatgaacaagttatcaaagaaaattttaaaaatatattttatatatgtatatatatgatatggggtgatatatataaatatatattgcatttatctgactaattatgtttactataatatgtatatataatcgtaaagcatatataaatatatatatatattatataaaagattaatcttacctgcttgagcatgaattactttgaaggctagcatacaaccaaggtatgccattaagaggaaatgtcttaacatcttcatcatcatcatcctttttttttatcggacaaaaacaaaaaaaaaaaataaaaaataaataaagagagaaagaaatgagctatagggagaatatatatcctgctatataatatatgtatatatatctcttataaggcatcatcacacaatgaatgtaagtgtctgtatgcatattggatatgttatgtatttagtac

SEQ ID NO: 348263 - DNA, 1034 bp, Cannabis indica
ggtaaaatgggaagttcatgtaattaatggactaaatttgtacaaattaagggagggtataaattttgatatggcttgaattattaaggccaaaaagtgaaatttcccttataaattagggttgaattgaaggtttatactagttttttcgcaaattttttctctttcagttatggttgcttttcgatttgagtttgttcttctcatgtgacattgccggaattaatggtgcttccacgtctactagagttttttcatcatcgccgacctcattgcattgcacgaaggtttcaatctcacaaaatgtggatcatatgggttgaagatatatatgggcttcaatctcattgcattgcaactttttattaagctatatatttatttatttagctagctcacagtttttttggtgatcacggccggccagagggtggggcagccggggcataggccccaggctctacaatttttgaggccccgaaaaattaaaattaatatacataaatttaaaatatacaataaataaatattttgatttggaaaataaatgtataatagtggtacaacacaaaatggtaagcggttgtaaatattaacgttgtggtggtacatttcgatcctttcactctccatttttgtggttatttttacaattttaaatggttttttacacatatttaatgtaaaaaattagtgaaatattacttgaaaaattcttcatttgtggttatttttacaatttaaaatagtttttacacatttattttaattttcttagtggccttatagtatttcaaggtacaaactattaaaatgaaaaaaaatatatatgataataaaaaatttaaataaaatattaattgaaaatttatattaaagtttatctttcatgtttaatactaactattttttcgtcaagaatagtacatacacttatttaattttcttagtggcctatatatatagtatttcaaggtacaaactattaaaacaaaaaaaataatgtgataataaaaaattaataaaatattagt

SEQ ID NO: 348264 - DNA, 720 bp, Cannabis indica
tttttttttaatttttacggttttatttttttttttatttacaaaaaatgtctctttaatttcaacaataaaatatatatttttttattttatagttgtattatagttattttgaagttaattttagttgttttataattgtcatgagactgatttatcgttattttttagttatttttttaatgaaaaaaattatttttataattttaaaattttacaggtgtatttttataaataaaaaactttacgctataaaattataaataaaacataaaaaaagaaataattttaaaaaacacaaaaataacaaaaaaagtatatatataaaaatatggtatgtacgaagtttctaataattttacaatttcttagattttatttacataaatacagtcttttagtgtatttttatgttatattcttattattttattgttcattttttattatttatatgttattttggggttttttttattttttaaacttcaaaatagtttgtcttttttgtatttttataaaaatccacataacaaccagcagagcaatttaaattacaatcaaaattcacttagcaatccatataaaaactactggagcaactcaaattgtaaatttaaaaaaaaaagaaaaaaaaataaaaaatagtatatgggataattcctttattatttttaatattgttttgttattgttttgatgttgttttaatattatttt

SEQ ID NO: 348265 - DNA, 902 bp, Cannabis indica
tcattaaaaaaaaaaaaaaagctagggaagaaaaaatcttaggcctttcagcatcaatcgccaagccatcgtgaatcaccgccatcaactgttctatccactgttgctgcattagtaacaatttagtttttagattgtattactgcttatctccaaactgttaaaaaaagtaaaaaattatattaatttttatatatatattattatttgttattataataaatactataatcaataattaaaacttacagccttttgatcttttatgtaacggttggggtttgcacgtgcgacgatgtcagtaatgtatttcaaaacataaaaaccacattcttgatttttaggttgtcttggataataaggtctaaatggataattttcctttgcgcaacgacctctagcatccaatgcgcactagaaaattatattgggatataagtaagatagtttaaaaataatttcaatttataatatagaaatgaacaattagcactaaaaaattaaataatgtttacccaatattccaaagaataaagaacattttgtggttattattcatcgaggataaccacgtagccaatcatcttgctgcattgtcaaaagactaactcttgtcttcatcgttaataccattcaatgtgagaggctttgggtcgtaaaacttgaagatttttctcaaatcgtttatgctctcccagatgtgcctgcattaaattgttaagtattagtgtcttataataattttactagaatttgatatataaggttaattagattaaagaagagtatacatcattccaaacaacattccctggttgccgatgaagttagggctgagcatcggtcggtttggtcagtttttttctatataaaaatcctgaattcagtttttggtctggatt

SEQ ID NO: 348266 - DNA, 674 bp, Cannabis indica
attaaactaatcttattttaaatttaaataatgtcaatttatttaaaaaatagaataatttttaaaaaatattaatatctgaccttaaatttaaaataagacaaaataatcaaattttaaaaataagataacaaattaagcaaaaaggatagatttttacctattttcaaattcaaatttcactaatatcttaaattatttttttaaaaaaaataataatttaattctaataattagatttgaattttgaaaagtaaaaatcaaaatacaaaactacacaaaaaattcgaaattaattccatgaaaaagcatgaaaaaatgaacaaaatcgaaaaaattgtaagctgtacagatggtatgcacagcataccacccgcgcgcgtagaggagatactggccgagaaacctcggcgctgaaggctgcatgcagcctttccgcgtgcagacgagggtgttcagacagcataaaccccctgaaaaccgagaattctcggacatgtgcttgtttgaagcacgtgcacccgagaaatctcaggcatccgcgcgcgcacatgtgggtaatgtcacccctgatatttttggattttcaaaaattcataactaattcaaataaaatcgaaattgttaaaaaataatataaaataatataaagtagatgagaagaaagaagaaga

SEQ ID NO: 348267 - DNA, 661 bp, Cannabis indica
atcaacctttgagccacttgcactccatcacgagtccttggcccttcgcggtctggggcatcaacctaataggggagttacctaaaggaaaaggcagagtcaaatacgccgtggtcgcggttgactacttccccaagtgcacagaggcaaaggcacttgcaactattacagcagccaaactacgcgagtttgtctataactccataatttttcgatttggcatccctcacaaactcatcgcgaacaacggaaagcaattcgattgtaaggaaatgccaccattgtacaaggagttaggaatcaaaaaggcattttcagcagtcgctgacccgcagagatatgggtagacagaagccgtcaacaagataatcaaacataccatcaaaggaaaactggaagagcgtaagggagtatggccagaagaactttcgcaagttttatggtcatataacacaactccccgatccacgactggtgaaactcttttctcgctctcctatggatgcgaagctatggtaccagtcgaggttggggcaggttccctacgaagagatgtcttcaacattgtccaaaatgaagaaaaacagttgcttcacctcgaccttttagaagaaaagcgcgatcaggctcacctgaaaaaatgcggcttatcagcagcgaa

SEQ ID NO: 348268 - DNA, 536 bp, Cannabis indica
aaaagttaagtaactatttaaaatcttgagaaaatagtattcccgacggtttaaaatcgtagtaaacaaaataggcaacgtgttaataaaatgcaaatttttaggagagccttatacccgacggttttaaaccgtcggctataagggcccattaaaaaattgtcacctacttctcgccacatttcccacgttcccacctatattttttctatttctcacatgtccacctatttcttctcaatttcccacaccctaaaatgaaaatattaactctctaaaatcccacccacacctccgcactatcgccctcctgtctcgctgtcttcctccctctctcgttcttcctttcttctcgtctctcccgtccatcaatctccacccaccctcctccggtctccctctcctctccgtcgcatacgtcggaccaccaccacctcccgtctgtctccatctcactctttctctctctaagcttggtataaatacatttatttatttatatactttttttatttattatatatatttattttatt

SEQ ID NO: 348269 - DNA, 928 bp, Cannabis indica
attgtgagcaagtattagacaaaccaaggacaggaacattggactgcagttaagcatattctgaaatatttgaaaagtactaggcattatgtgttagtctacaagggttgtgctttaaatctcgtaggctataccgactcaaatttttaggcttgtcttgatgacagaaagtctacatctgggatggtttttactcttgggcgtggaatagttgtttgaagaagcgctaagtaaactgaaatatcagactctaccatgaaggccgagtacatagctgccgctgaggttgctaaggaacttgtttggctaagaaagttcttctcaggacttggtgttgttcctggaatggaaaaatcactggttttactttgtgacaacactggtgctatagccaatagcaaagagcctcgaaccaccaagagaaacaaacaaatagagaggaaataacacatcatcagagaatatgttgcaagaggggacgtactggtggagaaagtggacactgaagacaacttagctgatccatccaccaaattttttactgcaactacatttgaaaagcatagattgaatttatgattaattgaaatatattgattattttacattagtgcaagtgggagtttattgggctttgggtcctaaataaaactccattaaaatgtaacttttcaattcaattattaataaagaaacaaatttaaattcattacttgtttaatgtgttatttggttcatgtgatcaattatttacttatttgattaataaattcatccaaatccttatcacactgatattcttgtttattgtgatgtcaacatagtggaaagtaatcaagattgtgtgattaaatgtattcctagatttatcagtacacaagattgaactgatatgataatcgacaacgtagtttacttgcaccttgga

SEQ ID NO: 348270 - DNA, 511 bp, Cannabis indica
tatcctgagtgcccgcgttgcaagaaacatcatcccgagacttgtaatcggagagcttgttttcaatgtgggtcaatggggcacctcaggaaagtttgtccccaattaaagaaagaagaacctaagcctgaagccaagccaagcctgctcgtgtatttgccatcacactggcagatgctgtcgctagtccttcagtagtcacaggtcagctttttatcaatggtttggtctttactactttatttgattcgggtgctacacgatcatatgtatcatcaagagttcttaatcagcttggttggcctagtgatgtatttgagatggcatttggaaccctattgcctaatggggaattaattatttcaagaaagtgggttagatcagtgttaattagaattgaaggcagagaattgagcgctgatcttgtggagttaccattggccgagtttgatattatactcggaatggactttttgtccaaatattctgctagtattgattgcaaacgaaa

SEQ ID NO: 348271 - DNA, 749 bp, Cannabis indica
agagatggaagcattaagggctcgtcatatagaaattgaaaattgtagtcggcaagctactgtgctgatatgaaaaagcctaccaaattgtaggtcagcaacctccaagtgtcatccccctgggcgagtcagacgaagatccaacgatgaatacttcccaaactacacctggtcagctgccaaatcccctgtcacgagttccacttgtgggcctagcgttaggcgggcagaccttatctagtaattcatcaggagaggtcatacctgatagttccaaccaggttaacggtgacattctgcttattaccaagcgaatcaatcgctaagacagtcaggcgcttctgtattcgaaaggttggggacgactcatgacctaaggaatgacctgaacagaaggagaggaatagacgatcagattatcatgaccatcgtgcagcccggagcccgtgctcaaattcccgcttagaaggatactgatgtgattcaaatcaaccagaatgccgactaggttaacccagccgtacaggcacaactgacgaactaaaaagtatgttccaagacatggctggaaagagaaattatgatctcgagctggaccgagcatgcgaaactcctttctctctcgaaatcaatcttctggcgttgccccacaagtttaaaacgccaacatggaaaatgtacacaggaagagaagatcctctttcccacctcaagtatttcgaaatgcaaatggatttacaaggtgtacg

SEQ ID NO: 348272 - DNA, 737 bp, Cannabis indica
cgtattttggtgtaattaatccatttatatttcatgagtgatttataaattctaacaagtggtacgagagccacttttgttgaattaattgaagattgataattttatttatgaaatttgaggtttttaaaattaaattttttatttatatcatatatatgcggtttatttatatgtattgggttagttaattaatgttgttcaatatatatatttcactcggatagtttgatattatgtgttattcaatttttttttactggattgttttatttcgtagattcatatctattttatataaagtgtgcctatataacagaattcttggtttatgagaaattcatgggtaactttttatttatattaaaaataaaatagtttatgagaaattcatgggtcactttttatttatataataataaaataaaaataaaataaatcccattaaatccaaaaagaaaaaataaggttctagattttctttaattaccgtatttctaaccctatctgattatttatgcttcttttataaatcctatttgattaaagttaagattataagattaattcaaattattgttcataaattgattaatcccatattaatcaaaaataattcaatatataaaccatatttgattaaatcactttaatcaaatagagttcatatattgaattattttttattaatgggattaatcaatatatgaacaattgttgcccctgattttatccaa

SEQ ID NO: 348273 - DNA, 540 bp, Cannabis indica
atcaattgtgcttcgtaaggcttaacaaccagaagacaatccgtttcaagaactacatgtgtccattgttgcatcttgatccagcttaacgcctctcgaattcgcatgacttcgactgcaacaggggaaacttgtccgtggaacaattttgtgcagccttcaactaacataccccgagaatcacgagccaccaaaccaacctcaaattgtcgggtttcgttgaacaaagacgcgtcaacatttaccttaacactatcaacatgtggaggcacccaacacacagcagcatcttcgggtagaaaactagaaaatgtagtctccatgattgatttttgtgtgttttgccattggttaagaaaactctttgctgatgagacaatgctattgtaaagaccgcatatgattaataccttgaattattgaataattagggtttatgtatgagattaaattaataagaataattatcttttttaccccctgtacttatgacactatactattatgccccttaatctattcagcttgttacaaatagtc

SEQ ID NO: 348274 - DNA, 1216 bp, Cannabis indica
acggcgttaaattactaatgaactttcctccattagagaagattactcactaaaataagaactatgtagaaccaacaatggagatcgaatgtccttataataaagctcattattttaaagtgtattttcatctaatatttattttaatctatttattttaaatatatatttatttaattaaaattactaatttagaaagttctaaatataaattttaatctaatatttattgaattatacttagatagatctgaaaataattaagattattttccatcttagtaataattttcaataaatatttcgaaaattactcaatttaagttgatcaaaaattaattaaaaattaattttcaataaatatatatagcgaaattcaaaatccaatgtatataaaaaaaaatacattttcgaaattgcttaaaataaatcctaaaaaattattctaatttatgttggtccaaaattaattaataaattaattttcaacacaaatataattttcctatttaattaaatattaggaaaattatcaaatatttaagtttcatgaataaaatcaacttaaatatttattttctatttaattaaatataactagaaaagtacttcaagcaaacagaaaatacctatctagattttcactaactaatctctttattttctaaccacttgaggctagcacaagtggccataggtgggtgtgtgagtgttggaggtcctgggttcttaaataaaaaaaaatctctttattttctaattaaaatataatatattttagtctatttattttaattaatcattaatgaaaaatttaattgatttaagttgatctaaaattaattaaaaaattaattttcaactttaatgtatttttcaaaaaaaaaatcaaaattatctgcatttaaataattcaatttctaaattttgggaaaaaataattaataaaataaactaaaatatattttgaaaattattcaaacttaagttgtctgaaattaaaatttccagcttaaaaataattatttatttaattaaatattatgaaaataactaatatttaagtatcaagaataaaatcaacttaaatatttaattttcaatttaattaaatgtattaaataaagaattaaataattaagtataaaatcaacttaattattaattctaatttaatactagaaaaaatattctaatttaagtaggtccaaaatta

SEQ ID NO: 348275 - DNA, 1109 bp, Cannabis indica
gtaccattttaaaaaaatatatatgacattcttagagcatctccaatcttttttaaagatattaaatatctccacatcattaaatatataatattttattttatttctcttttatattatgtttgatatttttatttctaaaatcactctaatatatagtacctttcaaaaatattataattatgatatatataaatattttttttattaagctattatatatattggatctttaattttttatttataaaaaacatagcatcaatgttattatgtggtatcaatataaattttaagaataatatattggctaattaggatttttttcgctcgaattttaaaatgtaccaaatcatgttctctgaacttttaacatagcatcaatgttaaaaattctccttgaactatcgagattgttagatttaaggacttttgtctaattttagtaaaaaaaattctaacatagacgtaaaattgaatgaaattagacaaaaatccttaaatctaacaatctcaatagtttagggagaatttttaacgaccaaaaaagttcagggcatgatttggtacatgtcaacgttagagacaaaaaatcttaattagcctaatattttttatctccaatgatataatttttttatattttgccacgtaagagcatctccaatagtagcatcatttaaggatgctaaaaatttacacataatctaaaaatataatattttattttctctcttttccacatcatttttactccaatgtatagcacagtgttcattggatcacatccaatgattttaggcccatccagatccgatctaatcatatattggatgttagatcttaccatccgatccgatccaatcaatttcagtcatccaatcgatccaacatccattggatgttgttggatgttggattggatcagttttatcaattggatgtattttatatatattgattggtttaatttgagtttatccaatattttagacctagtatttttttgatcggatcgaattcatccaatattttaggtccagtatgtattggattggactggatccatccaatccaagaaaaaagagtaaaatttcaatgttaatttt

SEQ ID NO: 348276 - DNA, 801 bp, Cannabis indica
ggggttaacgccatcacaacaagaagtggtaaagctttggaagatccatccatcaaaaccactacttcaaattcaaaagttgcccctgacagaaacaatgttcttcctccacaaattgaaataataccatcaccctctaccccaatctcttgcacactcgatgaggatgatgttattactatttggagtgataatatttctcatcttgaaattcttccaaccattccaaatgtcattccaaatgaaaacaagtgttatcatactgatgtgatagacacagttgtggaggaaatttgtaaaattttctcaagtaaccaagcataccacttcctccacaatattttctttatcctgaaaaagtcaccaatgcatcaatttttgagacgaaggataaaagaaagttcatttttgatactagatagtacaaacatgtagttggtacacttacttgaggaaatcacttctgtctaccaatgaaaaatcaggttttatctttacgtttttagtaagtttatttacgtaattttatcttttctgtttttgtgtttttattttctattgtttgtttttgcattgccattatcaggttatctctgctctcgccccatgcatatcgtcaatcaggtgtactctttttcctatctttttcattttcatattttgggaaaatgaagacactgtctaattttgagttgggggtagtgagctctagtgagcgttcattttggaaaattttaattgtcttgttgaatttttaaagtcaaatttttttcaaaattatccgagcatgattgtaaaatt

SEQ ID NO: 348277 - DNA, 565 bp, Cannabis indica
tcctttatgttgatgacattttgattattggcaacaataacaagaaaatgactgatatcaaggaatggcttgacactcaattcgaaatgaagaatttgggtgaagctgcatatattctcggtattctgattatcataaactgaaagaacagatcccttgctccctctcaaaaaacttacatatataaggttttagagatattctcaatgacaaacaccaaaggggcaacaattccttctagatttggtgtccgtctatttaaggaacaatgtcccactgatcctcaagagatagaggacatgagaaggattccttatgctttacaagttggaagtctaatgtatacaatgttatgcactagacctgacatctgttatgcagtaggaattgtgagcaggtattagacaaatccacgacaggaacattggaatgttgttaagcatatcccgaagtacttgaaaagtacaaggcaattcatgttagtctacatgggtggtgctttgaatcccgtaggctataccgattcacattttcaggcatgtcttgatgacaggaaatctacatc

SEQ ID NO: 348278 - DNA, 982 bp, Cannabis indica
accacttttcttaccttagttctgaaatcaagagtacgggccgacctgagtggaaaacaagctaggcaatcccggtcctatgtcacgacaattaaaactcaatgaaaaccttaatcaaatttctgataatcaactctaattctcacaatcgaacacaccctactttcccccagatcaaactagcttaaccatctctaaaacaccctaattccactccgaaagacaccccgaatcagatcggacttgaggagaaaaacccaaaatccccctttcctgggaaaaacggtcggccgtttttcagacacccagaaaaacggcctgcctttttttcctggcagccatggtgatttctggtttttcaccccaaaaaccaatcaaacctccaccaaacctaaccaaactttccagaacagtatattatggcaattataacataaccaaacaactatttcaatgcaatatatcaatttgctcaaaatcacacttcaaagtgaagaaaaactaaattttctctcaacaaccatatccaatttcaaccagccattaaaaccacttaattcaaacttcaacacactccaaaacaaacctaaaaacaccatctcaaaccaaactaaacctacagccacgaaatcccaataccctcacccaaaaccaacctaaaaccaattaaattcttaagacaaagcatagaacttaccttgattgcttctaggtttggcctaggttctacaagctgcttcaattcaagaataaagggtgaaattttgatcccttgctggctggttttggttcacacgaaggggagaagaagaagaagtttacttgccttgtaagctttctccttaaatagggtttttcatctcatttcatttcatttctttctttttttcttcttctttccttttttttttttttttttttttttatttattaggtcgtaactaaaacgtaaaaagtacgtaaacgacgtaccaacttgaac

SEQ ID NO: 348279 - DNA, 1023 bp, Cannabis indica
taaatctaaatcctggtaaaatattcccaacatcctggtggtggttagccgcccacaagatggacagagggggctgttgttgagcttgagatccctagctagccccccatgtcactggttactgagatttggcattttttgttgtttggcctttgagtaaaggtatgtcctccctccgcaagggaagatctatcctagttactgaggaactgggttgatcagtatatcgatagactttccgtgatttatcaacaagtcttccttgaagtggatctctaatgagatcctcgcctcttctattggttctctagttgaaccgccttattagattgctggcctttcttttgcaacgatctaactctgcctagtgagaccgaaggacgcactcttgttcatctatccatctcaagaattcacgtcttggctgagcgagtataccgcagtcaacaacgtgtggttctttaagggattcgcgtctctattgaacgaatatatcgcggtcagcagcgcatggttcttaagggattcgcgtctctgctgagcgaatatatcacagttagcagcacgtggttcttcaattaggcctacatggcctatagcttccctgagtctggccaactaaaggtcttctcccaagcctaggtgaggtcacaaattaattgtcccgtccctcttgcatagtgatgataagattcaccacatctacagtgttcattgggattccagttgagcctgaaacttaagtatttggacctacagtctgtgggtcttgagggacacctaaatatgcaaatggtgcaacaagaattcttctcgtatcaaccttggcatttgattagatacgatatccacgctctcaatgaaagcaccaaactgttaacctcaacaaatgattaactgacagctgggtcgtatagatctgatgctcgccacgtgtcacacaaacagaataaaaagcaataaacatagagattttttatagaggtttggcccccttgtggtagtggataataacctactccc

SEQ ID NO: 348280 - DNA, 775 bp, Cannabis indica
tagttcattttgcctaagtgagttttgtctttttgtggattttaattaaagtttgttaatctgattttttagtttattttggctgagattatatgagataaaaccttttcttttttttttattacactcattttacaaaaaataagaaaatcaaagaggaaatactttctttcttgcaaactctggctctcttttctgttccaccctagagcagctagggttgcttttgttcttcaaatatttaggaattcagctgggttttaagtgattttaatcaaggtaaaggttcttagctcttctcttcatattttcttgaattgtaagaaaagaaattttgcatgaaatgatgttttggctactgtagttgctgttggtgttgattattgttttctgcagtttagatatgttagattatgttgttttaagcatgaattggtagttttttgaaggtttaaccaagtttttgagttttaaaactcaaacttggagctctaatggtgaaattcaaatctgagctttgattgttgttttgttgcttggaatatgttcattggggtataatatctaggtctggaaagtttggttgggtttggaaacgatttgattaggggtttgaattttgttggttttctgggtaaaaccggctaaccgattttacactgcttgtaaaatcggttacccgaattttgtagcagggaaatctcgatttttagcttgtagtttcgtgtcagtttcaggttcctaattggttgactccctgctagtttagggtatt

SEQ ID NO: 348281 - DNA, 583 bp, Cannabis indica
ttgtggacaagtattttagtgatatgactgttaactatgctgctgttaaaaaaagattcttgaatagtatttcaaagatgatgtatttgcttttagaatggctgtgctttattttgttacgaatttcttgcttagtaagcctggtcgcaagaaagtagatagtgggttacttcatttaataagacttggtgagtttaacagttttccatggggtaaggttgcgtatgatactactttgtatagtttgaggactttttttgaaggaaaaaacaagaagaaagttgttaataagacgaagggtacagttgcttcgaaggcaaaagggaagaataataagggtaaagaaaatgattacaatagtaagacgtacaaattgtgtggtttcccttttgcgttccaggtttggctctatgaggttattcctctttttaagaagcaaggtttctgcacatatgattcttctccagattataagatgtgtaggtggagtagtgtgggtaatccgttctcaggtgaagttgagaagaaaatatatatgtcaactaaggtatgcttttgtgatatataatttttttttgtgttg

SEQ ID NO: 348282 - DNA, 509 bp, Cannabis indica
aaaatttgcattacttgaggaaaatttgaagggttgcattgatcgtaaagttggagaggattttactttttgatcttgatacaatatttttagaattgaaagatttgattaaagagagtattgcgaatgttgtaccactgaggtgttttggtttcttttatgattgaaattatttatttttaattttatttgttaacatgcaatgatttttatatgattttgtttttgtagagtcatgacgatgaggatgaagatgacggtggtggtggtggcgttgctagtccccgtaacctagatgacattagtgatgatgttgaggtattatttagtagtttttagattttttagtttttcatgtgtttgtatgttgtgtttttgtgttattagttgcgctatgatggtatggtgctatttttagtatttcttattatgtgcttttttgggttatgatgttgttatttataatgtggtgttgttattttttttattgtagcctactgttaaggggg

SEQ ID NO: 348283 - DNA, 755 bp, Cannabis indica
acaagctgtcatctgtcctattgagcatggttttcatttttctaagttagatcaatctctgtttataagagttacattaactagttgcatctacattttagtgtatgttgatgacatccttgtaatgggcaacaataatgaccttgttgatcagttaattcaagagctaagtagcacctttgctcttaaagatctgggcctagttgactactttcttggcattcaggtaactcgaaactctgatggaattcacctgtcccaaacaaagtatcttcaggatctcttaaccaaggcagatatgcagaatgttaacactcagaacacaccaatgaatagtggtcttaaactctctcactatggcagtgaaccagtcaaggatccaactttgtataggcccatagtaggtgcacttcagtatgctacaacaaccaggcctaaactctccttctctatcaacaaagtttgtcaatatatgcaagcacctttacaagcacactggacagcagtaaaacacatccttagatacattgctggcacattggactatggtttacacatacaaccagcaccagattactcactcgaagctttttgtgatgctgattgggcctcggatcctgatgacaggagatccacatcaggatattgcatctattttggaggtgatcttgtggcctggaagtctcagaagcaggtcactatcagtcaatcttctactgaagctgaattcaaaagtttggcaaatgttgtttctg

SEQ ID NO: 348284 - DNA, 1053 bp, Cannabis indica
ataaactaaaaacataacaaaaaaggctggaaaattaaagaaaacacttgggttgcctcccaagagcactgtctttatcgtcatctaaccggacgctgagttgttcgtttagagaggcgccagaataatggcggacttggcttggtcaatttgacctcccaagtagagctttaaacactgtccattaaccttgaaggttgctggaccttctccttttaattcaacagctccatagggaaacgccttgaccacggtgaacggacccgaccatcttgactttaacttaccaggaaacaatttcaaccttgaattgaaaagtaacacttgttccccaggttgaaactcctttctgactaagccttggtcatgccacttcttggtttgttccttgtaaatctttgcattctcataagcttcatttctgaactcctctaactcattcaattgcagcaatcttttctcccctggagcttttaagtccatgttaagagtcttcatagcccaaaaagccttatgttctagttccaccggcagatggcaagattttcgaaacaccaaccgatatggtgacgtcccaatcagtgttttaaatgttgttctgtatgcccatagtgcatcatctaactttcgtgaccagtcctttctcgatctatgcactgttttctccaaaatcatctttatctcacggttagaaatttcagcttggccattactttgtggatggtacggtagagcagttctatggcggacaccatatctcgagagaagtgcttcaaattgtttgtcatagaagtgactcccttcatcgcttatgatttcttggggagtaccaaaccgagtgaatatgttcttttgaaggaagaggagaactgttttaccgtcattggctggtgtggctgcagcttgaacccatttcgacacatagtccacagccaataagttgtacagattgctaaaagatgaaggaaaaggacccatgaagtctatcccccacacatcaaacaattccacttccaagatttctgttaaaggcatttcgtttctctttgagat

SEQ ID NO: 348285 - DNA, 737 bp, Cannabis indica
gtgattttcactgagccaaacgccgaagttccaaaaataccggacaccggaaatgacaaaatatgcaagctactgaataacataaataacagtataataaattatttaaatagctataaataatttcataattaatcacaatcaactgataatttctaaattaactaagcgggctttacaccttagctattcttttatactaatttctattgggttagagttgatttatttagaataaaaaatttgataaaaagtagagcataaaacccttaagtggccggccatgatatgggccccacacaagtttggtttttgccatttttctcaactattttatctatttttcacaaataccacttttgcaacttcaaccctataaatgccaaaactatttatttaataattaaaataattatcaaataaaattgtcatttataatatttattaattagactccacaaagtctcttaattaataaattaaccctaaaataccaattcttcacaataaagccataacatagtgaaaattcataaactagacatagtctaattttagaattaaaattgattaattaaaatcaattaactgagtcttacaagcagtttgtctcaactagtatggggaccatgggcctatataaccgagctttcaataagcagatctagaatttaccaagtaaattcactaacttattaattcctcgttgaacaactatagaacttgaaattgcactc

SEQ ID NO: 348286 - DNA, 674 bp, Cannabis indica
acatccttaagcctggtacacagcatcttagtagctatcttgtagataacattacaacaagctatcgggcgataatctttcaccgtattcggacattttactttagggacaagggtgatcacagttgagtttatctcttttagtatcttgccagattcaagaaaagaaatcaccgcttgtgagattagatccccaatggtatcccagttatcttggtaaaaataactagagtagccatcaggacccggagcttttgaaccagcaatactaaaaacagccttcttcacctcttcatgactaaattccctctccaacatctcagcttgcactttggataccattgggcctctcctcaatatccctggaagcacacatcttctattttccatttgagtaccaagaagttgtttatagtattcaataaaagcatcttgcaccagcttgggatcatggattctcttcccatcatgatgttcaatagatagtattctattctgcctgagcctttgccttatacttgcatgaaagagtgatgtattgctatcaccatctcggatccaagccatctttgccttttgttgtagaaaagaattataatctgtttgtaccttaacatatatctcccgagcctctttttcctgctgctgtatatcttcattaaacgggcagctatg

SEQ ID NO: 348287 - DNA, 948 bp, Cannabis indica
taactaaactttaaaatcaaaataaaaattttagggaaataattaatataattataacagtatttctttttaatgatttttttttatttattactcgaaaatctgcatgacagtcaaaaaaataaaaaaggtacaaccccttcttcaatatcacaatctaagaaaaaacacgatgttctagaaatattataagctaacatgtttattgatcgcttaacaaaataatgataaaaaaacatgtctcaacttagtcaatagttgttacaatcataaataattaaatcaaaagcataattttcaaaagttgagcttcagatttcttgaacttccaacaaacaatcagactctaactccatcttagaccattaattccgtttaaactacctaagagctttcttaatgtcaagagcttcaacaactttaggtgtcacagtcccttcaacacactgaatttacatctctacaatgttgtcacaaccacaataatttttcgatacacaattcatcccatactggttctctctttcgactagaacagtatcaacattgaccacttaatgtaatatattgtgcattggtaggttttgtcgaaacgttatggtatgtttcagccaacttaattaatatattgtaggaatcactaagagttgcaaaatatataatatctctaaactcgcttaataaataatttttttaacccatttaattaatgatttttgcgatttggtcggattagtttgcctaaattattctcgttgtttatttggtgtgaagtaattatgtaagtaaataaacctaaatagttatattctagcagtttcaaaaataaaaaagtatgtaatctaaattagtattaaaaacgtaataaaataaatataaagtgaaaataaataaacttaaacaattgtaaagtataaaatttttttaattagtttaatataaaaaaat

SEQ ID NO: 348288 - DNA, 551 bp, Cannabis indica
ttaaaattaaattaattataactgttaattaatttttcttaatttcttattcaataaggatcttttagcaatttttttgtccttaaattattaaaatttttatagcaactctttataatttaaaattatacacatataatttcataattaaaattttcttatacttataactttaatttataattattacacttaactatataaatctttttatttaaatatttaaaaagtaaaaattgaaataggttgaatgtattttctaaaaaaaaaatggctaaactcctccatcttttttttataaggagtcattcactcaaaaaataaaagtcaagctaccccaaaaaatgaaagcaacctgaaaactcgaatagaaaaatctcatacttagttcttctagactataaaaaaaattaatatcatttaaaaataattaaattatttaaaaatttattatacaagaagagaattctaatttgtgtaaaaaaaaaagtctaaatttttgtaaaaaaaaataaaagtttcaattgtaaatattataatcaaatggctta

SEQ ID NO: 348289 - DNA, 733 bp, Cannabis indica
cccctcccacactaaaagggttaaaaagcgctaaaggggtagttttggaaattctaaattcccgatcaatcccgatatttccaatgtctaaataaactgccccaataaactaacatactaatttgtgattctactgagccatacaccgcgttccatgttaccggacacggaaaatgcaaaattatgaaatttcactatatgataaaatacattcagaattcaaatataaccacaaaaataattatttaaatatctataaataattttcataattaaatcttaattaactgctaatttttcaaattaaactaggcggtctttacttatttttacctataaataatatctttgatttgttgtagtttcattaacttatttcacaactaatgctttgaaattatacttttataagtgaagaaaattcgtattttatgaaaatactttgtgcttgaatggaaaatatattttgaaaatgataatttgattgagttcaattatcaagggaacttgggagtcaatacactattaaatattattaatatatattgtggattctaaagtcttaataatcttttctctaccatttattcaacaaatcccttttaacttgtttattttaaatcttatttattttcttatattttatgaaacaaatcttatcaattatttggagctaggttagagtttgattaattttgagtttaaaaagtctctcttagatataaatcaactc

SEQ ID NO: 348290 - DNA, 609 bp, Cannabis indica
ttaaatttttagttttagttttagttttagtttttagtgatttgtttgttttgagtcaatttgctgaatgtgagtcaatttgaaagtaggtaaatagcatggtttggaaagttcatttattttttttcgaaaaatccgtgtgcttggtcatattacattcttgactaatttcaattttgtgatttaaaagaacatggaatcataatatgtaattttctagcaattgaattagtttatgtctgctaaatttgatatgtgcaaagttgtttggaaaattctagaacttatttgcttgctatttgaggcaaactaataaattatgcataactaggaaagtgatttaagcattctttgaatcgattgtgtctttcaagccatccctataattttatcctagttaccccttttgagcctcaacctattctttgttctacacattttgagtctaaaaaagataaacccatgaatatccaaaatttgacccttattagaccataagtagatctttagtttgggggaattcggatgggaagtttgttgtatgtgtgtgggaaaaagtgtgaaaattaagagaagatgaaaaaattgattgacaacaacttgaaaaaa

SEQ ID NO: 348291 - DNA, 728 bp, Cannabis indica
atgtaaaagattgtctatttttgcttaaaagtcccgaaaagttgctttgtggtattctttatggtggtttgtccaaataatttataacctatctttgtttcaatgtctattcaaatgttcgtcctaatttgatctatctattttcatttcaagtgctcacttttcaatttccaactccatgagtgaaattcttagccaagaataaatttttttaacctgtgaggctaatggagttgagacttttacttggtatattatttcgaaagtttttatgtgttatggttttgctgtaagaaagttcaggtttggtgcacacacttacaactctagatttattcaatgtaattttgtatactttttattgtcttgttactaatattttgcttgaatatttgtgctatttttaaaatttttgacttggaaatattatgttgacattattattctttcgcttgaattgctagagactaccaataagctagttgggggttgtgattaaggctcaaatttatacattttaagcatttaattgtttatataaaattaatttaattaaatattttcatagttctagttgtaaaattattttaattgaaaatatttaatttattttaattttttatgtcatttttcagatttatagtacaaagtgagtaagagggcatgaaagcccaattcaatggcctaatcacatctcctttattccatggcatctctaccttactaag

SEQ ID NO: 348292 - DNA, 503 bp, Cannabis indica
atctagaatttaccaattaaattttctaacttattaattctgccttgtgccactatagatttggaattgaatagcactctcaattatatagaacgctctatatgtatcacgatatagatacgttatgattctatttttacgatcctaatagtcaaagatcctctatagatgatgtacattgaatagggacaaatttaccgttctacccttcctagtattttatccttaaaacacttaactacctataaattatattttagtaaactaatataattactgaaataatatctcaatcatttatctctattcagccaagctcgaagaaaatcatcgattaacttctaaatatttatagaagctatagattctatatttatgatcagcgctaccactcaattaaactaccatgttcccaagacgtaaatattggctagaaccatttgttagcttccacaaacacctcaaagaacataaataatgaaactaagctgaacctaaccata

SEQ ID NO: 348293 - DNA, 819 bp, Cannabis indica
aaaaaaacccctaacttaaatcataaaattttcagaattatttatttaataaccggattaaattaaactattttgtattcttctaagtgtttaattatatataaaaaattattgtttcagcattttttgcaaatccttccaattatgaattgatgcgggagataattttttccaccagtcttcaacaaatttaaacaaagttaatgaaaagcaaaaccgctttacgtcatcactagcttttgctacctacatcatctggctgtactttgattgattatctttgcggatccgttgttccttcatacaattttatctgagacattttgaagtgttctgacaactatgcatctatgattcttttgacacacggttatatatcctcctccgagtcagacacaattctattttgctttcgagagatctttgacttgttcattatcagcttacccataggaattgtccatacttacatcttgggaatttgatagtacaattgagtgagagcgttaattataaatatagaatctatagcttctataactatttagaagtgaatgatagtttccttagagatttgattaataacataaatggaagagctcttatttcaataattatattagtttactaaaagatcatttataattagctatgtatattttaaggataaaatacaatgaagggtaaaataataaattttgtccccactaaatgtaaaccgtttatagaggatcaatgactattaaggttaaaacaatggataatcatagagtatcaacatttggtatatagagcattctatgtaatcaagagtgtaat

SEQ ID NO: 348294 - DNA, 727 bp, Cannabis indica
tattccaccttctaactgaatcttgataaaactttaagtgttcgaactcccttcgatctccttcaagagtacttgcttcctctctagacaagacttgaaaagttatctcccaaaagcttgtagaaccttctctcgaaggtagcattgatgttcttcttttgtagacttgattgcaaactcaagacaatacagaatacgtaaacacaaaggaagagacaaacaccctctcctctatacaacaaagacattctttcttacaagatatggatgaaatacaaagatgtgaaataggtgcatcacctacttattataagacgtatttataattaatatacaccttactgattgcccatacatggtctagacaagataacaactcacttggaaacattcttaaaaaattcttcaatcagctcagaaatttcatgttctgtacctagagattcgtgagcagtaagcgcgatttttcttttataggaaaggaaagacttgctcttattttcttcacaagaaatctgatcaaacattttaggaaactcacaaagggtcatatatacacagcgatagatagaaatagttgagtcatcaaacttaccatttataccttactttccataaatagaaaaactagtcatatttccttccttatataattcaatcaatataaaaataaaattaaggaaataaactaaacagctcaagccaaaaataataattaaattataaa

SEQ ID NO: 348295 - DNA, 896 bp, Cannabis indica
gatatggaggtttctttggagttaaggacgagagggaaaatgagagagttatttcgtatcaaagagtttaaatactcatatccctcataaattgggattacgacacgtggcagcaagaatgcctaaggtcgccctatctaacggccagccatggccacgcctacacgaaaaccgaggagtttcgtgacgtggcaccataaatgtaataaagtgaaataattacaactgtcctttttcgaaaccctcgataatacaaccaaacgtcacctcctcgtgacaacctttcacctgtctctcgcgtatagtttccctcgtgaccgcatctgtcacatcgcgaaactaggggcatgtgttatagtgagatttctctcacctagaaactcgagaccagaatcctgtttggaggacacgtgtattcatttttccaaggaaagctaagatgtccatgagagactcctcgagtttaaacctcgcctgagctagaatcagcgagatgatgcgagtatgatcaaagtctgatcgcatttgtgtaactcgcatgtatcaggatatgtgcgggtatcctttctatactcctgcgtaaacatagagatcgattctctataatgcgagctggtctcgatgacccaacagcctcggtaaaccaatatagactcgcatgtctaggttctatcagctcgtcatataatgaccatagatgcgactatataagaacgcattaaacttaattgaatgttaggtctatcttatgcccgcgaacttacactagaatatgaacagtcaactcgcatattagaagacgcatacgttgctgtatttagtgaatagaaattgttattcatttattgatgtttacgtttttagtttaattactgtaaatcaatgtgcaaacggat

SEQ ID NO: 348296 - DNA, 746 bp, Cannabis indica
tgcgtcttccgcatctgcgagttgactgttcatgttccgatgttaagctcgcagggttatcattacgtttgggatgtctgcgtccttaggtagtcgcttcttgtagacatcgcatgtcgagctgatagaacctagacatgcgagtctatatcggtttatcaaggctgttgggtcgtcgggaccaaatcgcattatagagagtcgatctctatgctttcgcaggagtatagagaggatactcgcacatgtcccgacacatgcgagttggatccattctctcatcccgcataatgcgagttacagttatgcgacccgactttggtcgtactcgcagtatctcgctggctctatcctgggcgagggttaaacttcgaggagtctctcatggacatttcagctttcattggaaatctgaatatacgtgtcctctaaataggagtctggtctcgagtttctaggtgagagaaatctcactataacatgttgtaatgggaatggtacgtggaatcaaattatccattacaatgtttgctttgcttttaaaagtaatgtaatgggattatattataatcataattacattaaacaagggaatccccattacattagaaaagctatgtaatgaggattacattacaaatgactaaataaagtaaagctaaaatgactctaataccatttttttttatataaatataaaaattaaagtaggggataattttgtcaatttatcatttattccaata

SEQ ID NO: 348297 - DNA, 556 bp, Cannabis indica
actcagtaagatatgcaagatatacatgtaaataatgcgatgtcggctttgtgtttaagctgccctgagctcaataattaagctcaccaagtggataagaacgttcttaagggaagtacgacctctgtaccaaatgcaccaaagtaccaactctatactcgtgttggtagagccattaatgtactctcggaaattactaagtgttgtatcacatgcacgacgtaccccttggtactcgtgctgataacaccgtaactctactgatatcctacactatactaacactctttaaaacacatacacaatagtgttagtagtgtaaacatccaaataagcatactttcatatatatattcttatgctatcttacctcgttccgtgctcaagtgtgtcggtcagcctgagtggaaacgtagctcgacgctttacagggccctaaaccataatgttcagaattcgatgagagacacgctaaaacacttattggggatttaaaattgaaactaagattaatcctatcgataattaggatgctaataccctaaattacacaaaa

SEQ ID NO: 348298 - DNA, 736 bp, Cannabis indica
ttaatctaaaattaatactaaaaataacctaacactagcagctatgcccaagtccttctagggaaatgccttaaagatagcaaacgacattctatgtcatttcatctaagtatgatcctgagaaaacctcaaagtgatggaatgatcgtatacttagtgtacaccattactagattcagagatgccctgatcatgaacttaagaaaagctaaaactgctaattatggtttttgtatgtttgatagctattctaaagtgattagaggtggatcatcctatggtcattaagataataaagtgtttgattcaacacatactattttttctaaaaacgtgactaaatctaaaaacaaagtagcagagtaaaggagattttttttgattcaattttaaagtgttctatcatcttattctatataaggtggtcacactgcctctgttgtaactaatgaggtcaatatcactaatgttcctagagagaaatgttagatatttatttgtatagactaaaacatacatgattatgaataaagtgcggaattaataaatcatatatgcactataatttaaggatcgaaatacctccagccattgaatctttgagctttagtcccacataagcatgatctgcaaaagaaaccgattgatgtgggtaatcgggcttcctcgctctctcaactctctttagatggaattttactgttatgaacagaatgagtgaggagctcggggaccg

SEQ ID NO: 348299 - DNA, 727 bp, Cannabis indica
gcaaaaaactcattagcaatatcaaataatctttcataaaaattagataaagttcaatttctgacattctcaattcatcaaatctagtttacaacatggtaaaacgtcatttctttacatcagcaataccttagcactgagtttgaaggatttcccacgcttcctttgtagattcacaagatgatattaatttgataaagccttcaccaacaccattaaaaatagcatgcaaagttttattattataatcaggcaatttttcatcttcagtagtccaatttagttcaggttttaccttagcactaccttcatcatcatttttagtatgtcgagaccaacctacaagtatagccctccaatgcttctcatcttgtgacttaatgaatgctctcattttaaccttccaatatgaataatttgattcattcgacaggggtgatcgagtaatagagcttccttctgcaaacaacgacatctcatacaaaacaaattaaacggaagaaaataatctcaagatcttactaatagtgacaagctttgataccaattaaaattctatattttaaaattaccaattaattatttaattaaataataatagaattggtgctaaagcagttattctgtagctacagaaaacaactttgtaactccagaataaaccagaaaacaaacagtacagaaacgtaaaaacacacaaggtttttgtacgtggtttcaacaatcc

SEQ ID NO: 348300 - DNA, 536 bp, Cannabis indica
ggaatgggattcaacatcatttaactcattttttgactgggcttggctttgagggttacgccgctcggtatcttcttcctgagatatttcgcgatcagtgtttcgtgcgacttgttccctatgcgttgattggttcaagtctagtccctcctactcattttgatgttccctgcgagtacgattattagttcgtcgcctattggctgttacttgagggttgtttgaacacgtgtttggtactcgaggaggacgtcgagtcctgacccatccatcttttgggttttatgccctaaataaaactccatttcaatgtaatccgtatcattcaatatcaataaagaaacagaagtatttttcattcatttgtgtatgttttggttcacattatcaattatttgtctatttgatttataaattcatccaaacccttttcacattcttgttcttgtttattgtgtcgtcagcacagtggaaagtaaacaagactatgtgattaaatattcctagatttatcagaacactgggttttactgata

SEQ ID NO: 348301 - DNA, 613 bp, Cannabis indica
tttgacaaaaaattagttcagggttctattcgtaccattttagaaaatacagggtccattttatcatttaacaatacagagggtccaattagtaattttgcaaaacacatggtctaaaaatggtatttacccatattagaattacgtgattagattcctaacacaagatgaatgtgaatttagttaatgttgcgattggaattgattaatcccaatcaggggcgaagccaggatttaattactagggggccaagcggctaattatattttttttttaaaaaaaaaaatctatagtgcacctcttaaaagactagttcggtacacctttatttattttaacattcaggagagctttttagtctatttttttttataatcacatatgttatagtattttaagatcacctataaatttttaaagaattatgaatattttatagtgtgaaaataaagttcaaatagttacttaccatacttaaaaaatagtcatgagtgtaataaaatatttgaaccttatttttgacattataaattattttaattttttaaaaatttttacatgtaattctaggaaaatataacgtacatatcatgaaataaaaaaaaaaaatta

SEQ ID NO: 348302 - DNA, 822 bp, Cannabis indica
aacttctctcctgggtccatctgccaacattcttctgggatccctcgtcgattagaggaggacctttaagatcactcaaaagatctctgcctatccctgtggagacaaagaaaaaaggtcaatggagcaactaaaaacataaaaaatcaatgatatgtataaaccgactcaaaccaccattcacaagggatgatactcaccttcaaagaacacttatgaggatctcccatagcggactacgaagttcccttggtttggattggtcgaaagctcctcagcctgggaatccatcgtttccagctccaatcgaggcttgaagtccttgggaacaaatgaaaaatagttggtgcatattggtattatgagtttgggaaggtgaaattctgaactcagaagggacattctagtaagaaagagatgatccattctcaagatagatctcaccagagaaccaggagtttgtgaaaaatgtcaagcttgagccgcccttttatacacaaagtccagtgacaagaaaggtaaggattgagaaatccaatggttggaaggcagaatatgaagggacgattcataatgacactcgaaatcgtacaaccgccaaaataaaatgatgcgttttttccaagaagggattctgacaaacatgacctctgtaattattaaaaagctctttttttaaaagagaactttttaaggggcaattgctatatttgaaattcggctgccatctcagtggaggatacgtgtcaagataaagggaatatgtatcggtgcaatcgctttttatggaataactcattaattacgtaagtattagagtat

SEQ ID NO: 348303 - DNA, 1455 bp, Cannabis indica
agtccacctccgccctcatggtgttggacagagccaagttcttagaagctgtagacttagctcgagagtaagtgtaggccaacttcagaccagcctgcgcagagaaaaaactttagaatctgagccaaataaagaggatgaaaggaaacagtcaagaaagacttaccgttgtgaattccttcaagactcctcccatcagtagctccaaagaagagtcgttgtcagcaccggccagttgctcactcaccttaggaaccaaccggttcatgtagtgggcgatcatctccttgcatttcttggtctctggaagcactgacaaaggtggagtaggagcccgcatctactcgggaccacttttttctagctcggatccaccttttgattgctcaggcctgtccaagcttcctcctcgagaatccttggacttagcaacttttggagtggatgggttcgaaatagttagctcctcagaaagatcgatgacctccccaacaagcgccttttccttggaaggggtcccctcgccacccctagatttcttggccagaggaggtgcgcttgagcttcctccaactctcttcttcagaacatcaagcatcttctgagacatgtctacatggaacaaaaacaacatggttagagaaaacaaacatcagaagcataaagcataatagtcaagaagcttacaaacaagacagagtagtatgcaagacgattgcccgagcaagactcaaaagtccatcatcacctgacaaacctcttatctcagccataacagctttccctttcctagcacgggagaaggcggccgagcaggtgaactaggcttcataatgcgaattgcatgttgaataggcgtgggctgggccagaagtttcttcctcctcttgagcggagtcacctgctcttcctcggcctcatcttcaggattcaagggctcctgagcatattgcttggcccttgcacctccctttaacttagcctcgcgcttcagttgaatcagctcattctccttatcagctccctcagcccggccagcacctgatttcctcttcctccccttcactggcttaggaatgaaatccttcagatggagctcgtacttcacaaagttttcctcggaggttaactggatgaaattccggtcatcgcccagtagctgagcaagctcttgagctctatccctaagagtaagagtgaggggagggcggtgataggtagggatctgctaaaaatgagtgtgggtggtgcccatgccatccaccatgaagtactcatcaataaaatgcccaattttgctgatggtcgaatccccggtgccaatcaaccacttgaagtctggttgagagaaatagaagtaccccgacctgccttgcttagggtggacttcaaatcaaaaaaccacctaataacctcatggggagaaggcatatcccacttctgggaggcatagag

SEQ ID NO: 348304 - DNA, 755 bp, Cannabis indica
tcccacggatggggcgctccttccccccacgaggtcgcttggttcttcgacctgaagtctacccccaagcaaggcaggtcagggtatttttacttctctcagccaggcttcaagtggttgagcgggacggaccacaaggccatcagcaaaataggtcattttgttgatgagtacttcatggtgaaggatccgaacatcacccggactcagtttcagcagattccgacatatcaccgtcctcccctcacccttactcttaggtatagtgctcaaaagcttgcccggttgccggcggaagacagggatatcatctagttgacctccgatgccaatctcgtgtagtacaggctttacccagaggacttttcttcgaagtccgtgacagggaagaaggggaaatctgatgctgccctgcctgaacgagctaataaggaggatgagctcattcaacttaagcatgaagctaagttgaagggaggtgctcgggcaaagtagtatgctcaggagtctatgaatcctgaagatgaagctgaggctgaggctgaggcttaggctgagaaggtggctcctttgaggaggaagaagaaactcccggcaacgcccaggcccgttgaacatgccattcgcataagggagcccatttcacctgttcggccatcccatccttatgctggaaaagggaaggccgctatggctgagatatcaggtgatgctggacttctgcttcctgggcgggcagtcacgtctgtcgcttt

SEQ ID NO: 348305 - DNA, 1039 bp, Cannabis indica
cttattattgctttattatatatattcattacgtcttatcgtttatcccttatcagagagactcattgtcgttggctaaaagcgaagtcaacattttggtgctttcattgagagaaggattgcagatcactctcttcgacattcaacacgatggtgcaaactcgtagaggcctggatccgacattgcaggacccagggagttcaagggttctacctgttgtcaatcctggacagatgggaagcgtggtgaatggtgaaacagctcctgttactgaaaccgcggttggtgtgcaagagactgggaataacagttccgcacacagctagggcattcataacacgactattcggccaggaaccaacgcccaaatgaccatcggagacgcaactgaattgcaaaatgtccgtgctgcgctcggactcatgcagggtcatagtaacactctgcatcatgatcaggatgaactgcgtgccgctgtaaatctcaagtttcacgaacagaggcacatgtttgctgaatggagagacaaagagatggaggcattaagggctcaccatgcagagatcgaagatcgtagtcggcaagctaccgtgctaatacgaagagcctaccagactgtaggccagcaaacgccgaaccgtaatcccctgggagaacggaggattgcctgacgatgaatgcctcctagacaaccaatggtcagccgtccaatctccggtcagaagttccactcgtgggccaagaggtaggcaggcaaaccttgtccgggaattcatcaggaggagccatacctgacggatccaatcagaataatggagtcattccgcctgtcaaccaagcgaatcaatcgctaaggcaaccaggctcttctgtgttcgataggctgggaacgacccatgacctaagggacgatctaaacagaagaaggggaatagacgagcagaatactacaacgatcgtgcagcccagagcccatactcaaatccccgcttagaaagacgctgacgtaatccaaaccgaccaaaatgccgatcaagt

SEQ ID NO: 348306 - DNA, 1519 bp, Cannabis indica
tgtagcttaaaggtcttggattcaacccatgacctcttccttttctcatcactccctcaccactaagctagccttagtggcttaaattgtatgagtgtaattattactcacttttctctccatctaggtctctatatgggacattatgtaagtagtgctgtaaatatgagcatgattttttgacacgctacgaaatcagtacgagcataagcaaacacaaaaaaatatgggtttggatacaacatgacacgatacgacacgaaaaatatgtgcttaagcacaatatgaaacgggaagcataaaatgcatgaatagactaacaaaaaaaaaaacactatacacgacaaacccaaaaaacatgacatggaatattaattaaaaaaacttgataattgagaaatttgaatttatatgcatacatttagtatatattaaatttttgaacataagcttactaaaattaaaaaataggcacactttatattcacactcataatacccttctctcttctcttctcttttaacttcaccatctatactctccattctcatttatattgatggtggtccgatgagggttcgatgctacctattttttattttttatttattttttatgttttatgtttttgtacataaaaaaaagtagcatcaggccactatcaaaccaccatcggaccatattctacatttatagatgttaagctctattcattaagcttgtcaccatcggactttcgtcttcaacctttactcattttaacaataggaaggcattgaactaccatcgtaccaccatcgagcctagtaaaaaaaccaattttttgcctaaaactcaaatctgaccattttcaaccctaaatctaacatctactcacaaataacaaacattaatcatataatttattcctttgacaatattgtcaatggtgaagtcgtggttgatggagaagtcgttgggtctgtaggtcgctgggtccacggtggtcattgggtccgcggtggtctttgggtccgtgagttgttgggtctgtgatcgtggtggtcgtggagagaagggaccaaggttgtgagtggtgggttgtgggtcaaatccttgggtgagttcagagagcaagagagataggggaggaagagagagggttagatatttgaaatgggaggggtagaattggattttataattaaaatgttaacctattctaccaatataggttaacttaggtgtagaaaaataattttaatctaataaatgtataaaaaatcaaaatttttatataatttaataattattataataataatatatatgtatttacaattataaataaattaaaataataataaaacttaaatataacattcaatattataatttaataacttaaaaatgtaaaactaaaactatatgctaatttatttatagagtgtgctataataaattgtaagtaaatatttaaattttaatatgattttttgtaaaatattattgaaaaattacataaatataattaaaatt

SEQ ID NO: 348307 - DNA, 787 bp, Cannabis indica
ttgtatatatgaggaccagtttttctgatgaaaacgagtctttagatcattccaaatacccgaggcacattcatcataaagaatacttgatgagatttctttagaaacataattcaagatccaagagattacaatgttattattacgataccaagcattataaagactttgttcagaaatagaagctttaggaattgaaccgtcgaggaatttgattttgtttttgactaaaatcgcgagctgcattgccctgccccacgagacataattgtcctttccagtaaggggttgagacatcaatgcatttcctggattgtccccatggtgcagaaagaatggactggctggatcctccaatggattcttgatgaaagtaatttgaagaccttgattagtttgagtggaaggattgccaagatcggtaacaggaccaggaatactggtttgatcttcatctatagccattttgcggaatcaatgaacagaaagaaggaagctcggagaagatgatcgagaaacacacagcaacaccggagaaaggagacacgatagctgaaaggatcagacgggaaagcctatctttcccgctctgataccatgatgagaaagaggaattgaatattgaagcaggaaagaatgaaattcaattagaacaaacaggggagaggcaagccttttatagcttggacctcagtacatatcagacccaagaaaataggacgacattgttttaacagataaaacaaaataaaccgactcctatgctgacatttgtaacaacaactaa

SEQ ID NO: 348308 - DNA, 1057 bp, Cannabis indica
ctcttcattttgtattaaagaaataatactttgtattgtgaggttgtctttgttgtcctctctatagtgtattaagttctcttatgtgcaagttgtttgacactacttttcttctagatatgctgggaaatgtactgtgagcattaaagtgtaaaatcaattatcaattactcactgaaatatcttccaagtgaacgatgctcaatttgaaaaatattttagtgaaaagttagcatcttttgtactaaaacataattcatctaatctaattgtaaagtgttaacaaaacattcttacaaaaatattaaattttgcatcaaattttgtaattgtacatttaagtacaatactaaaaattgatgtaaattatcacaaaagtattttttttttactaaatatagtataatttttatattttcaaaaaaaaaaaaactttaataaaaataaattttttaacaaattttataattatttattgaaatataatattaaaattaaaacaaatatattacaaaattatttttgtgttaaatataacataatttttatattttcaaaaggtctaacaaaaataaatcataaaagagtaaatagaaaggaaaggaagtgagtcacgggtgtgaatagagagagagagagagagagagagttgttgtagtcaacatatgaagaaaaatgggacaatatgtgttcaatgattaaaatttacttgtgactcgtccaacaatgtgtaaatatataagaaataaagaaatgaaaaagtgcacaaacatggattcacgtgccaaaagaaagatctggtcggataatttgtttgaagagcattcttattaactattaacggcattaatcatattaacggcattaatcatatttagtacttttcaatatattgttttgtaattgattatcaatcttttttaaaaattattacattaaattatataatttaatacttaattaaattaatagggaaatttcaatttttgaccctaataatacaacctatatcaaaatttatacccctttataatttgtacaaatttagtccattaat

SEQ ID NO: 348309 - DNA, 482 bp, Cannabis indica
atatatgtatgctttatatatattgatactcagaatttaatgtatatataaatataaataaatatatttgtgtgtatgtatctttttatgtttgttgtacctcgataatcgataaatgtgtatacttatatttttatatgcacaaatatgtttatatatacttttataatactgtatatgaatactattatttatatataactattatttgctttatgtatatatatatattatattttactaaattaaatggttttattgtggaaaattaatatatatctataaacctttataaaaaggagaatagttctttgggcttttcataggctatttacaaaaataacccttcttaattatttatttagctataacttaaacaacacctgttaactattcaatgacaagtgtggtaaggtgttacatacgtgggcttttcataacccatattaattatttatttacttataatttttaatgagata

SEQ ID NO: 348310 - DNA, 1181 bp, Cannabis indica
tagacgtgccatcactgacaaagcctaaggaagtataagccctgacaggaagaatggctacacttaacagattcatttcgaagtcaactgataagtgtgtgccgttcttcaatatattgcgaggcgacaaaaagttcgagtggacaaaagagtgcgaagaggcctatcagaacataaaaaggcatctagcgacgcctccatttttggcgaaacaaatatctagagaaacactgtttctctatttagccatctcaaaagatgcgattagtgcaactatagtgcgagaagagggcaagcaccagcaacctatttactatgtaagtaaaaggttactaggggcagaatccaggtatccccctctagaaaaactcgcgttgtgcctagtccatgcatcccctaaactacgaccatacttccaggcgcacttcataaaagtgttaaccgatcagcccttgagataagttttatcaaaacaagatgcttctagaagattgataaaatggtcgattgaactggggtagttcgacataacataccatcctcgaacatccatcaagggtcaagctttgcctgacttcttgatgaaggtataactccagagaaattccacctgtcagcgagacgcagaaaccttgaagttatacgtggatggtgcatccaacgaacagggttcgggtgtaggggtaatattgatattgccagaggttccaatttgatgcatcaaataacgaggctgagtatgaagccttgatcgccgacttaaagatagttgaggcattgaatgtcaaaaatctcatctatcgtagtgattcactactgattgtgaaccaggtcctcagggaataccaagccaaaggcttaacaatagcaaagtatttagagaaagtttggaagaacttggaaagattcgattactttaaaatcgaataaattctgagagaacaaaactccaacgctgatgccttagcaaaactagccttacagaatgatttgggtgaattgaacttaattccggtggagatgctgagcgagccaagtatatgtgaaacggaagatgtcgagatgacagacgactcccctacatgaatgactcctattatcaattacttactcgacggacaacttccaaatgacaaaaacaaggcgtgaaaactattgtattcagtgcctcgttacacaat

SEQ ID NO: 348311 - DNA, 431 bp, Cannabis indica
ccaggccttggaacatattttttcgttcatccaactgtgcctgcatgactggattaacttgttcagcctcttagccgactacagtcacatcagcatctctttgagtgggattttgagcacgggctctgggctgaatgactagcgcatcgtgctggtcatccaaccctctccttctgttcagatcatctatgagatcatgaaccatccctaatcgattaaaaatggaaacaccgggctgtctctgtgactggttggttaggccaatcaggtgaccgacaccattaacttggttggaattattaggtatgagttctcttgatgaatttttagacaaggtctgcccgcctaccacttggcccacaggtggaaccaatgattggggattggacagctgaccatttatagtctgagaggtgtgttgggttttatgc

SEQ ID NO: 348312 - DNA, 538 bp, Cannabis indica
ttgcacagcttacccggtatttccccttatggatcacgggactactgactgtcacagtgggtgtctgcggagtgtgatgtcttggttgaaggagaagactacgtcactgaggagctcactgaagcagttcctcataggaggcagggtgccttaggtgccagatgggtgagccctccgtccaagatcaatggggcacgcatgaaggccttggaccaggctggttatcttggcggacttgagtattacattccttcttcaagacaccgagctacgaacccacaaaaagggatgtgtgcttggtcgggtgctcatactaagcaaggggcaatgttgcccttgcactcgtacttcaagaaggtagcagattatttttgcctttgtctaacacagttttctcccaagggcattaagtatttttctaccctgttcatcctctacgccattcaaaaaatggggtgtgccgtctccgcatgaggttagttagttctttgacctgaagtctacccccaagaaaagcaggtcggggtacttttacttc

SEQ ID NO: 348313 - DNA, 748 bp, Cannabis indica
gacaggcactgtggacaaggtcgatagcaagcttgggggttttgttgacgagtactatttcgtggaaggtatggacaccacctatactcagtttcaacagatcccaatatattaccatccaccccttacactggctcttagggacagagctcagaggattgtccaactgtcggatgctgctcggaatatcactctattaacctcagaggctaactttgtggagtacgggctttatcgaggatactttatacctcagtttgtgaaggggagaaagaagaagtccagtgctgactgggctgagggagctgagcaagagaaggagctcattcaattaaagtgtgaggctaagtcgaagggtgatgcaagagccaagcagcatgctgaggaatgttctgagcaggagaaagagcttattcaacttaagcatgagggtaagttgaaaggaagagctgaagccaaacaatatgctcaataatattttgagcaggaggatgaggcccaggaatattcagaccaggagaggccgctcaaaaggaagaaaaccctcccgactgggcaaaggcccatcgaacacacaatccatatcagagagccccggtctacctcagccatccacccctgtagaagcaaaggggaaagctgtcctggaggagcaggagattcatcagatgacgatgcccccgtccgtgcttgttcaggaaaatgctcctgctagcgtgcagagtactccatcttgcattttaacttc

SEQ ID NO: 348314 - DNA, 960 bp, Cannabis indica
aaataaattttatttagggcacaaaacccaactatgctggcatatgagtccagtggaagggatgaatggaggagaagaaccttagttttagaagcatcaaaggtaatggtatttttggctgtgattgtgtcttttctcttctcaaggttttttaagaccccctcgacatcgaaaactctttgcaagccagaagctagaagatctattagaggcgaggtattttgattagtcgatacacttattgctcgagggtcagacttttgtttcttaagggccacttgagattccaaagtatcttggagaacaagtgagttagacttaagcaagacagaagaagaaaaaaagggtaagatactacaacgaacaaacaagataaatctcacataaactacttaatctaaaaaaaggttagaggaagtggggatcaactcgagttatctatatattcccaagagcctgttatcttcgcagttcccaagttttagcctagtacgcattgctactatattggttcggaataccataatatgagctactgcttgtaacttgaacgtgaaaattgtaatatccagattaaaatagtattttaatttttttttctctccttgggatattaattgtgtgaggataattatcttatatatttgtgttgttagtgagttgagattattgcttagattattgtaccaattttctagagagagttaaagttatattaactacgaaagtaaaatattatggtatttttacaaggtaggtaatcatttaattaaagcccaatatgaaagtttattagggttttataaattatttagtggattttaattaatggtataagtgatatcaaataacattattatagaattaatgttaaaaattcgtaggtttggataaattcgcaggattaaaaactgttttactaaaacgatcatatctggagttctagagctcggattgagg

SEQ ID NO: 348315 - DNA, 856 bp, Cannabis indica
tttttttttggggtacggcccaatggccgcagccagatagagtgccgccgcggccatataaattgggcagagagaccaattttcggccctcatctcgtcgcggcgagggagagtgccgccgcggccatataaattgggcagagaggcattttttgacctctatctcgccgcggcgaggtaaactctagccacggcgagacagggtcgggcggctataaagaggcaaaagaatatcaaatttcaaaaacacaatttcctcaaaatctctcacttccacctccgaaaatacctctcaaacaccattcttcttcatctaatctcaccctaaaccctttttctttaaatctaaccacaatctttcattccaaaccattctaaatcattaatcctctcatcaaacactcttttcctttcaaaatcaaccccaaatccctaaaacctcacccaaatttcaaaaaccactattcatcttcttctttctcaagaacttcaaggttttcttcaatggaggttgaataaaggtggattctcattgaggtaacaattctaagactctctatacaaattttggtggagaattttgggattttagtgtgaatttttgggatttttgctcaatacattgttcaatagagttgtttgtgattaggaattggtttatttgtgatcgggttgatacccgggaagtggattataaggggaagtgctgccaaaacttttcaaatcttgaatgttagaatatttggtgagatgggtcctaaaagagctagagtgggtgagagagggggagcgttcgagtcagtccaaccgacctaggggtcgctcgtaatgctgatagagcgaggtttgtgaatat

SEQ ID NO: 348316 - DNA, 691 bp, Cannabis indica
gtctacccctcactgttggataagctctgacaagcatgactatcatggcgcaattcctggtgttagatgttcattcagcctttaacgtaatgctagaccgaccagctttgtataacttaaaggttgtcacatcgatatcccattcttgcctgaagtttccaacaaagaatggggtaggatgtctactaggaaactagcagactgctcgagaatgttataacctcgcagtggccaaggctaataaggaagtatcctccagccagagcacagacaagggaaaaaacctttgcaggtagggaacttctcaaggcggggatgaagatgtggatcttcgacttggggacccaagcagcaatgttggacctgtggaagagttagaagaaatcaaaatcgatccaaatatcccggccagattgcaaaagattagaaagggtttgttgctagaagtaaaatcagaattgataaaatttctaagagcaaactgtaaactccaagttcttgtctaacctatctttttcatatttagattgattttatcttgatttaagcttgaatataaaaagaacaaagtcaaagattcaacaccagaattttacaagcttcacctgccctagaaactcattgtaggcggctagtgcttgggttccccgaaccagggtaataactttcactatattcaaagatgtatctt

SEQ ID NO: 348317 - DNA, 726 bp, Cannabis indica
ttaaatattatttaaatatccataaataattttaataattaaatcctaattatctgctaatttccaaatttaaactaagcggtctttacattgcatgtatatctcttcatcaaggtttccatgtaagaaggtagttcttacatccgttcgctcaatgtgtagttcttctctagcagctttagccatcatgacccttatagaagttttcttaacaactggagaaaaaatttcattgaagtccactccttcttgctgagtgaatccttttgcaactagttttgctttgaacttgactggttcaacaccacgaataccttctttctccttaaaaatccatttgcagcctaccaatttctttccctctggtttcttaactactatccatgtcttgttcttcttgagtgaagtcatctcttcatcaatagcttttagccattttaccttgtttctgcctgtagtagcttcaagataggtagttggttctgaagattctaactcttctacagtgagtaatgcatatgctatgaaatcagcatatccaaacttgcttggtggtctggtttctcttctcaccctgtctctagctagttgataggtgcttaagtcaataacaccttcatttgtgtcagtttctgcatttatttcagaatactcttctggattttgagtgttagattggtccacctcaagttgcagaccttgcactggtatagcaggttgtatttc

SEQ ID NO: 348318 - DNA, 1791 bp, Cannabis indica
ctggtaaaatatatccaacaccctcaccaacaaagcctaaggaagtacaagccccgacaggaagaatggctgcacttaacagattcatttcgaagtcaactgataagtgtgtgccgttcttcaacttattacgaggcaacagaaagtttgagtggacaaaagagtgcgaagaggcctttcaaaacataaaaatgcatctagcaacgcctctagttttggaaaaaccaataactggagagacgttgtttctctatttagccatctcaaaagatgcgattagtgcaaccatagtgcgagaagagggcaagcaccaacaacctatttactatgtaagtaaaaggttactaggggcagaatccaaatatccccctctagaaaaactcgagttgtgcctagtccatgcgtctcgtaaactacgaccatacttccaggctcaccccataaaaatgttaaccgatcaacccttgagacaagttttatcaaaacaagatgcttctagaagattaataaaatggtcgattgaactggggtagttcgacataaaataccacactcgaacatccatcaagggccaagctttagctgactttttgatagaaggtataactccagaagaaattccacctaatcagcgagacgcggaaacctggaagttatacatggatgatgcatccaacgaacagggttcgggtgtaggggtaatattaatatcggcagaaggctttaactttcactatgctctgaggttccaatttgacgcatccaataacgaggctgagtatgaagccttgattgccgtcttaaagatagcagaggcgttgaaagtcaaaaatctcatatgtcagtgattcgcagttgatcgtgaaccaaatcctcagggaataccaggctaaaggcttaaaaatggcgaagtatttagagaaagttcaaaagaactttgaaaaatttgattactttaaaatcaaacaaatttcgagagaacaaaactccaacgccgacgccttagcaaaactagcctcgcataatgacttggatgaattgaacttaaaaagcccggtagagatgctgagcgagccaagtatatgtgaaactaaagacgtcgagatgatagatagctatcctacatggatgactcttattatcaattatttactcgacgaacaacttccaaatgacaaaaacgaggcacaaaaattgttgtattcagtgcctcgctacacaatgatcgaagacaaactatatagaagaaggtactcaatgcccctacttcggtgtgttctccccacagaagcaaaggaaatcattagagaaattcatgaaggcttctgtggggatcatgcgggctagcaaagtctatctaaaaagatcattagacaaggataatactggccaacgataaataaggacacacacaggtttgtcagagaaatgtgataagtgtcagaggttttcacatatacctcgcataccgccaacatagcttagaatgatgacctcactctacccattttctatatggggtattgacctaattggggcattacccactgggcgaggaggagctaagtacgcggtagtagcactcgatttcttcactaaatggacggaggctgagcccttcatttccataacctgcaagaaagtccttgcctttgtcttcaagaacattatctgtaggtttggaatccccatgaagatagtatccgataacggaacccaatttgatggcgacttgttcactgaattctgcgagaggaataaaatatcaaaagcttctcgtcaatatccagg

SEQ ID NO: 348319 - DNA, 916 bp, Cannabis indica
tatattattttttaattaatcaatatatttctttaatgaataattattttatttttatgtataagtaacattctataaatacaataaaaaaatattttaattttaattttttaaaataatatataagattcctgtactcgaccaaacagtataactcaattaacgggaatatgattacatattaccctacataaccaaacacagtttatgtatttctctataatcatattttctttcataatattctctataatcaaattattttgaacacctcataccaaacgcccgtaaacgtataatccggatataataaataaaagaaggtataaattaaatatatagaaaggaaaggtaaaaatgaaatgaattaacaaaaaaaaaaaagagtatagtgaaattttcaaaaaaaaaaaaaataacatgttttcttaaataaatgagattaaaaaggtactgttttattttaaaatctttcatttatactgtgatacgctagttttcttatttatactattctggattttttttttctcatttttacgtcaaacaccataaaactttttatgactctataactatcttcatcttcatttaaccttctatctctatactattttatctcaatttaattacttttataacttatatatatatacagttcatgattaggtgcgactcccaacttcattatcgtttctatttctagattgagtctcaagtttgttgtggatgataaaagaattgtgcccatctcaaaacatctcatcaattgagctacgcaggaagttcttctattatgttgaaaacttgtaatgaaccactacagtaacacaaggggtgttcatcaaactgcttaaaccgttcaaatcccacacctcaaaaaaatacggtttgaaattctttacagtgcggtcgc

SEQ ID NO: 348320 - DNA, 964 bp, Cannabis indica
gaaatgaaattgaggagctgatgacctttaatggcggaaagaatctgagggcgccatagaagaaagttgtcactgtctagtttgacagacagtttgtgggagaagatgacaggattgaaggaagctgccgtgcactgagacattgccggagtagctgcagataaatctgacatgatcgatgaacagaaaaactagatgatcggaaaaaaaaattgagcagagctctgataccatgtgagagaagcaagagagagagaaacaacaagaaagagctgaatgattattctgttattgaagtgagcaacaagctcagtatatatacagagataagttagttacagagtctaaccaactaagcaacggaagctacagtaaataactaactctaactaactatgactgtacaaaataacagaaataacagaatgtacaattgactcatatagagtctctaacagtatatatatataagacctttgatcttattaaaaaatatatattacttttagtgacaatttattaatcacaataaaaaaaatttataattaaatgtgatttttagtcacaataaaaaattacttgtgactaaaatatagtatttagagacaaaattgtcactaatttaattttaatcacaataagtatgatgactaaatatacatttagtcacaataaagtgtaatttttgtgactagtactgttagcaacggactttttagtcacaatacactacaagaaatatcacttttaccagtatagtttgctactgtgctgaaaaaaataacttttaccagcgcatttcacaaactgtgctggcaaagaggtcaaagttaccagcatacatttgcagtggctaaaatctaacttttaccaacgcatattgttaggatatttttagtatttaatttaggttaattttagcacatttttcggtttaatttaaattatggttggagcattttta

SEQ ID NO: 348321 - DNA, 688 bp, Cannabis indica
acaagcctctggattgagtttttctattgataagctttgagtaaactcaaacttagctaaccaacctcaaactcacactaaaattagctaaattaactccaaacaactcaaaataatagtagaattcaacccttaaacaacttaaacatgaaaagaaactataacccaacttgcataactgaacctagctttttacttaaaattgaaagagaaatcaagggaggagcttacgttatccttcggctaacaaagccttctaattcccttctcaaaaacccttgaatatggtctaaaaatgttgaataaaaccttggttttccttggctagctagggtcgaacaaagaagagagaaggaggagacctaatttttttaataagttcctaatttactaacttaatgtatatcttaaacaatcaatctattacaaaattcactaacttagtacaaaatatcaaatttttcccttccttccttaagaataaacctaaaatgtctaagggtaaaatggtcctaaactacaaccttgaataaactcaatattcaaaatatctaactatcatgacccgttaattctaagacacttaaccgcatctaagtgactctactggcaaaaacgtcgcattccactattaccgacataaactatatgaaaaatataaaattttatatataacatatatattaca

SEQ ID NO: 348322 - DNA, 1017 bp, Cannabis indica
attctattctattttattaatgatttaaaaaaaaataaaatctaaaaaaaaagattttatttttgtgccatatatataaaagataagattttatttttgtaccatatataaaagataagattttatgtttatatataacagctcatataaatatttcacaaataaattttctactgtcatgcatcacatcatgtcttttgttatttagctatcatttatttcatttgtattttctataaattaataaaagattagagtgcctcatatatgacaattaccaataaatttcatcatcaagaaacttctcctttggtcttagtgactttgtcttctattaattacaggagttccaagctagttgaaaatggaatgcaatcaataaatatgatgaactaccctctatgccctcaaagaagtaaaattatatcgtcttccaatcaaagaaagccttctaataaagtttacattatttaatatgaataacatattacattattttaagcatatataaagacatcattactttactagcaactagtaactagtaatgtatcttttgcctctgtagcaaggataaaatccacctcaagaacaatctcttgatttattatttattaaattaaagaaatatcttaataataacttgatcattgattcaagtccttcagtacatgtaattaataattaagcttaattacaatttcataatatcaagataagcttttccatcaggttcactggaaaatgtacccttcacatattctttatttgtaactgttttgtatttgggaggattttgtggagtgatcaagcttgaggctgggcctatatcatattctaaatttggattaagaaatgtagcaattgagagcctttcctccttagggtttactacaactctgtgctcaatgctagggtatagtccatttgttaaaatctgcaagcaccatacatatgaaaattacataaatattatgtatattggattgatttaatcacactaaatataacattttt

SEQ ID NO: 348323 - DNA, 1682 bp, Cannabis indica
attttttctttactgcttttgttttcagtgcaaatctatcacaatttaggctcaaatatagttaatgaaaatttgcattaacaatttggtgccttcattgagatcttccgtgaagaaagcttagaaaaaaaccctccttatatacgtaaaaaaaaaataacttactccatgactggcaacggagaaaacgtcaacactcttcatgaagaaaccactcacagtcctggaaaagagccaataggctcccggaggcctcccaatttacgatctaaacagaccactcgttctaggagaactcaacttgacgttggcccaagtacgaggagtacttattccaggaggacccaacctgagggtggcccaagtacacagaccacacgttcaaggagaacccagaatttggggaataaggtatgaataacctgaaatgaatattggtagaccccatcccaatcaagttggtgaggatggtgcctacaatccaacaagatacacaccaatcgttgagttggaaaaccaccaactcagacgccgcctggacgaggcaaaccggtagaatgccgagttggaacgtgaggcggccgctgctagggcggcacaggagaataatacccaaaattaaactaaccctagagggagaagaccaggaggcagacctcgcagctcatgagccatgaggtaggagacagctcaagggaaccctcagaacgctcaggaagaacaacctagggaaactgagggaccccttaaaaacgagcaacctgaggaaactgaggttcatcctgaaaatgaacaaccaaatgattagctagaaccatctcataaaaatgagaataggaggcgaccagaaaccagggaataggaaattcctcgtggaaacgagggaaattctgggacacaacctggaacacgtaggtcaccagcgaggaaccaccaacgttcttcccaaacccatagggaaagggctcgtacaaaccctagtagggggaacacaacgaaccacacccaagggagaagatcagggcatgaagaggtgagtgttacctcggggtgcacaagaacccacaaccgatcaatgtgaggaggagaaagtactcatcgcaacaatgatcaagaaagcacaggcacaagtaagactgcaagtcactcaaggacgaggtccataagcaggacgaggtccataagtaggacatagtccatgagtagaacgaggtctgctagcaattataaccaaccaaatctgtgagaacacttgaaccagaaaaaacttgatctttgccaacaactcggtccaaagcaaggggatccaatctaattcaaatagatgagttggaggataagttcaggaagtatcaagtcaaggagcaaggaacacaatctggatatgactcagatgaagaactcgagccataccatacagatatcatgagtactccttttcccctgggatttaaaaacccccacatcacgtctcgtcatttgatgggaccactgatccggtcttgcatttgaataacttcaccactataatgcgagctagcaatgttacaaacaatctacattgtattttatttcccacctcactagttggagcagcaagcaggtggttcaacaaatttactcatcactccatcacttcttgggaatagttgtctaaggacttcaaaaagcagttctaggcc

SEQ ID NO: 348324 - DNA, 582 bp, Cannabis indica
ggaaatcttgaattttttatgcgagtgaggtcacttatattgttttcgcacattcaccacactgaaaagatcttctatctttcagatgaacgatttgtcggacagccagatgcttggctctggaggcaatgctttcgaccgcgaccaggaccaggaggatagcttcatcccaacctcgatttcaaaagaggagaccccaattgccgaagatgtggagctgggtccgttatactccgcagatatcgaaaaaatggttcaggagctcgttgaaccaggaactatcgagattcgtgatagcgagtctacagtgtcagctcgcgaacaacttgttcattccaggcatgctccttataccaaagttgaggagatggacgaggattgggaggctcctgatcgcgagtcagatgaggaaggagatgtcgaaggaagcaggagtgattcagtggacaacacgcaactgaatgagcctttctctcgaggactggtctcacgagtcaccaaatccgatttgaccgccttttcaagattaaatttattgcgactcgacaccatgcatcctcgccctacccaaagaccgcagct

SEQ ID NO: 348325 - DNA, 735 bp, Cannabis indica
attaaatagatagaattagtattgaaataactagagaaaaaaaaaatgatattactgaagaaagacaaggttgtttcattaaagaagcaaaataatagcaaaattccaactcatgggcttcataagagattcggccatgagggtccattctaagccattgaatctttctaatcatcccatttagttctaatcctaaatctaataaatccctataaatagaacattaagggttttgattcaaatgatggctctagactctcttttgtctaacaaatcgaataaaaaatctattattttctatcattattttgaattcttcttgagatttcttcgtagaaattcatgctcattggtttgagaatatgcccacacatgtcaaagcaatatctagtatagtgaggaagattgtgtagttcatactatcaactcaaggagaatccaagttcaaatattgatcatactttgtgacagaaaggatcaagggttagagatctaaacgaaaggagtcatattattttgctgccaccaatgtaaggtttgctataacattatatgtgtttaattcattattttataaaattcatatttaagatgttaaattatagtattataagtagcatacatgttagtaaatctaaatcctggtaaaacaagtttcaacaattggtatcagagccatggtaataacttattttcataaaatatggatttaaaacgatgtttgattgatttgga

SEQ ID NO: 348326 - DNA, 486 bp, Cannabis indica
  modified_base (479)..(479): a, c, t, g, unknown or other
aataagttttatttagggcataaaacccaacatgatcatactccttaccatatctcgaagagtacggtttcgtctttcagcaacaccattcatgctaggagatcctggcatagtgtactgtgggaaaattccacactcctctagatatctggtaaaaggtcctggacgttgttcacctgatccgtcatatctgccatagtactcaccaccacggtcagacctgacttgctttattcttttgctaagttgattctcaactacaacgttaaaagatttgaacacatccaagacttgagacttttcatgaagtagaaataggtacgcatatcttgagtaatcgtctatgaatgatacaaaatatctttgaccattccaataaggtgtaggaaatggccgacaaatatttgtatgtatcaactctaagacatctatagctctttttgcatccaaattttttgttttggtctgtttgcctttgntgcattc

SEQ ID NO: 348327 - DNA, 1164 bp, Cannabis indica
aatgagttttattgagggcataaaacccaacatggtccgagcaggatgcctcgctggcatgcccagagcaagatattcagcaatccctgtagagcaaccaacactttgtgaatttagctttcgcatcatgagtcatcatcacaatccctataactcagggatcaatttacgtagatatggcatacacacgatcccactatcagtgttttcagcctcaatcccacgatccttgtattcagcattgatcccacgatctttctgtttatacgcattggaacgagaggggaaactcttccgcctcaaccttacttgccctataaatagtgatgcatattcactgggcaagagatcggccgaaaagcagctaagctaagactatactatcatctaagaattatatattcagagatactgttgtaagagctatgagaaaaggaatctttttccttgatcttaagtcaatacaagtaacgaggattaggctattaccgaaatgctcggggctcaacctctataaaattcccgtgtcttatttttgctttatcatatatctgttattatatatcgtttatcgcttataaaatatactcattgtcgttggctaaaagcgaagtcaatattttggggctttcattgagaggaggatcacgaatcgctctttattcaacatccaaccgcaatacgatggtgcaaattcacagacgttggatcctacatcgtagaacccaggaagcacaagtgttccgcgttctgttaatcctggacagtcggcaagcgtgggggatggtgaaacaactcgtattgatggaattgcgcctggtgtgcaagagactgggaataacagttttgcacccaaccagggcattcacaatacgactgttccgcctgtaacaaatgcccagacgactatcgtggatgccaccgaattacaaaatctccgtgacgcactcggactcatgcagggtcataacaacaccctacatcatgatcaggatgaactgcgtgctgcagtaaatctcgcgtttgacaaacaaatgcatatgtttgccgaatggagagataaagagatggaggcattaaggggctcaccatacagatattgaatatcgtagtcggcaagccaccgtgctgatacgaagagcctaccaaattgtaggtcagcaa

SEQ ID NO: 348328 - DNA, 850 bp, Cannabis indica
ttatagagattgagctgatgactcatgatgcgaaagctgaattcgctaagattgggtgctctgcacggattgctggatatctgatcctggatgtgccagtgaggcatcctgctcggtctattcttcccgagcatatgctccaagtggactccacgtgtcaccattctcgtgatgccacgtcagagtgcaaaatttgggataacaattaggaactgtgccatggtagttatgctcgtcggagcttgtccaacagtgcggggtagctagatttgtcctagaggagcaactccttgacctgagaaaccaaagacaggctggaggcatggagttagatccttgagttggagtcccatcttttcgtaagcagtcttgaacaagatgttggaagaagctccattgtcgatcatgattttggccatcattttattggcattctagacttccacgaccagcgggtcattatgccgaaatctaatcttgacagcgtcttcatcgttgaaggttatggtcggctctcctgcttgtgaaactttgggcttcctttcttccatggctaggatgacttcttcttgctcgtgttgcgctgttcgggcatacctctctcgagctttgcccgaatctccaacaatgtgaaggcctccactaatgacttgtaagtgtccatctaccggtggaggtagcaaatcttggttgttctgaccttggtcggtcttgacatacttttgcaggtgtggattgcttttccttattaggaattcaatttcccgcttcaagttgtagcattcgttagtgtcgtggccgtagtctccgtggaaccgacaaaactttgtcatgtcccttttgttggtat

SEQ ID NO: 348329 - DNA, 916 bp, Cannabis indica
caggatgtcttaaataattataacatacataaccatgagaaaaaatttgacaaaaaaattatttcgggtgctaaaacagataagggtacatcaatgtatccattttaagggggtgcattgtagaatttccaaaattaaataaagatgtaatttgtttcaaaaaaatatataatgatcttttgaaaaaaaaaaaagtaatataataaaaattaaataaagatgtaattttttaaaaaatatataaggatattttgaaaagaaaaacaactaacgtttatgtaatttaattagattaaatataatatttgtaaacttaataaaaaattaataaaatgggagaatttaggagagaatatatatatatatatttgaaataagtttagagtgtcacatcaccgcatcatacttctccatatctattctatataaaatgtggctatataatagatcgtaattctgaagataaatttaggacgaataataatttttttttattactattacaaagtataataataatttttgtttttatttaaatcactattatgctttcaaattttaataattatcactacattgaatatcattaattttaaaattataatattgaaaaaaactaaaaattaaaataaaattaacacacgtgacttgtcattgtcacgtaacatctatctagtatttatatatatatatatagatagattgaacatattgcataaataatatataattaataatgtattttaattagagtaatatattaatttcagttagtaaaattattattaacttattagtattgtaaaaatatttatatatataaatatctatatagataagggaaatttgatattctatacttaaaaaattttaattttttttttattaccaatacattttacactacaaaaaatat

SEQ ID NO: 348330 - DNA, 1027 bp, Cannabis indica
aatacaaatgacataaatataaataaaaaagtattggcatttacttatgtatataaattttacatcatagtaaatattgggccaaatttagcacaaaatttactatgtgccaaatttatatcactttttggcatactattggagtacactttttggttaaatgagctatattttagctttataccacttatttatatctccattagagatgctcttagtaactaaaaagttacttttaaaacataaagaaaaatttaaaaaaaaacgtcaaatgtgactaacgtagtacgtcattaataatagtaacattattattataaattaaaataaaaaaaatatatattattgtaaatattattttatctcacactttactaaaaaaaaatagtgaagtgattagttaaaatggcataagtataataaaatatcaaaatatttttttaattaattttattttttttaaaaaaatgagtgtttaatttattgtgtaaatttttttaaaacgaaaaagaaaaatgagtatttttttacatcaatcaaacataacattaaataatgagtgggaccatattaaaagtcaatttcaatctcctacaatataccccattttagtggccatgaactctttttatatccacaaaatacaatgagactcattgtatttttaaattcctactacatataggatcttaaaattttattttattttagacctcatatttgttaggacaagcttgctttggactaaataacgttcaattcctaatgcattccaaccaataataaaaaaaatgacaaaattaataagcttaaacatttctttgtattgaattactttatatgtaactacaaagttatcttcaaattctaatgctaagtgtcacgggctcaccttttcaggcagcggaacacccgtgcggtaccttgacttctcaaagccaaggtcagccttccaaccatctgagtaacaatgagcttattttttttcgcgcgaccgtgtgtctcgtgcacacttccgtctctcgaa

SEQ ID NO: 348331 - DNA, 574 bp, Cannabis indica
catataaatacatagaagaaataattatttctacatatttaatctcattaatatatattatatcacatgctctatatatattactcatatacatacatgctatatattatatatatacatttgataacataatataaattcaaatatcatattatctactatatataatatatgatataaacctatgatcacataaatatgccacgtatacaaatatataactcacatatatatttatcatatatattattatcatataaaatagcaaatcacataatattcaccaccatgctcacccataaatgattttcacacaaaatctcttatccttatattctcaaaatcttatttatctcctcttccattaaaaagggataagcttttaattgttagagagtttattacaatgaaagaaaattaagatgtatttcaactctattataaaataatacaaatacgtaaataagagattgattaaatgtatgttacaacacacatatatatctacactatatatatattgcatatatataaaagtagaagaagaatacaacacatgtaatataatacatat

SEQ ID NO: 348332 - DNA, 544 bp, Cannabis indica
aatttttttgcataaggtaaaatctagagtaatcgtattaagaatataatgataactcatatccacctctgaatgtacattcatattcgaatatagatgaacttactttcaagtggatataggcatatttactctatgctaaaaatgaccttgtcgaaaccactatgaacaagatgaaaatgccatagatactaaaatgtagttgtggtctttcgatgaaaaaggtttagtgataacagagagtttatagaatagtccaagtggatcttggtcaccaaatactaactcatattccatacataaacatacagtatgaatccattgacagaagatggatattaaacaacttgtgaaagttatactatattgtccaatgtattctacgaaaatgaaatttaaaatttaaagtcaaagacttaaatttataccaaatatacatgagtactattctagcttagaccacaactactaatctaactctaagttttagttgcctaaagtaagcaaatacaagtaggagatttctaagattgaggatttatat

SEQ ID NO: 348333 - DNA, 705 bp, Cannabis indica
cccaattaataagggatatgggtatttaaatactttgatacgaatcaaaattcccatttttccctcttactcttaacttcttctttccctccattacatacacttcaaaaatccattcccagattttctaccatttttccacaacattctcaatctcagaagtgatcgagagcaatcgcagaaatcagaactaaaggttagttttcaaatcactgcattttcgttttctgttttggagaaaatatgctttactttctgggtttgggtattttaaaaggctttttaggaatgtatgctagtgggtgtttatgaggctatgtgttttaggtaagtaaacctgggtaaattcatagaatatgacctgtaaactgacataaccgcacacaattcataggcactgttccacgtcttgaatactcgcggatattcggatgaacaacttgaatgttcgcgggtgttcagatgaacagcttgaatactcgcatattgccaagatttatttccatttgactgttagctagatcttttaggatttttatatgtcgcgggctgagttgcgagggtattaatcgctattccaaatggtgggtgtgtcacagtattctaatggccatatacgcggttatatgccccttgagatactgagatacacccagccatttgcgacatgcgttaatattcaaatgagcgtactctttggttgat

SEQ ID NO: 348334 - DNA, 689 bp, Cannabis indica
ttgtataactattaatcgtatttttattgtttcactgttttattaatttcgtcatcctaatatttttaggtgcgtgataagacctctgatgttgttgacaagttgaagcttctaaagaaaatattgtcaaggtttataatttactttttttgatttgtcttgtatgaaatgttctctgattgttgttcatttatttgaagaaaaaaaaatcatactagaaagttattttatagtttgtttaatgttgttttgatgttgttttaactagctgtatgacttgatttctagtgatgatgaacttcaaagttgatcagaaatatacttgttcatttctattcctttggtagaatgaagtgagttgcatgcattcaaagtgtacaagaaaatattttaaagtcttttaagaaagttgaagttcatttctattcctttggtagaatgaaatgagttgcatacattgaaagcgtacaagaaaatatttcaaagtcttttaagaaagttgaagctactgtacatgaattaatgattgagaagtgtacttagttttggttgtatgcgctgaagagcaatattttttaagaaactttacttttataattttttaaatatttttctatttaatttcacatatatcttgcatagaatattgaatataataatttttttatttgtttatattttttagtaca

SEQ ID NO: 348335 - DNA, 702 bp, Cannabis indica
accataacaaggcctgatatcacatattatgtgaatcacctgagtcaattcctatcatgtcctcgagcaccacaccttcaagctgctcatagaattcttcagtacctaaagagaactcctggacagggtatttttttccctgccacttcttctccgcaactttctgcatttgctgagacaagtctatcctcaacgaatgttcaattgtcattctttgctgatgcagattggggcgcttgccaagacatacgacgttctgtttcaggttattgtgtctttcttggacaagccttagtatcttggaaatcaaagaaacaacaaattgtctctcgctcttcagccgaagccgaatatcgagcaatggccaatgccacttccgaagtaacttggatccttgcactactcaaagactttggcatctcactcaacaaatcggtctctctctattgcgacaacactgctgccattcacatcaatgaaaaccccgtctaccacgagcgcaccaaacatgttgagatcgattgccatttcattcgagagaaagtccaacaaggcgtcctcaagttgcttcatgtcccatctcaaaacaacctggccgacatctttactaaggctctgctaccagcacctttcaacaacattgtctccaagctgaacgtttcgaatatctacactacaacttgaggggggctattacgagat

SEQ ID NO: 348336 - DNA, 659 bp, Cannabis indica
cgctgtgactgtgacagcttccaaatcctcttcgtcgatatgaaacctcaaagttttgtcctccacaacccctgtatgacgactagacaaagccatactggttgacaaaaaaatagcgacaaacactccagaccagccttttcagaacaaaatctcgatagcaacaggacaaagccttttcacacacacacttccttaacaatagaacagacaaaacagacgtcgacagcaacaggacaaagccttttcacacacacacttccttaacaatagaacagacaaaacagacctcaatcatacacaagaacgacagacacaagaaaccatgtcaaaagacatgaacttttaatatataagaaaaatgtatgttaattattaaattattagagtgtctatcttactattaatagactgcaatattttatattaaactaaatgactttaagattttatagtagatcatactaaattgagagattttcttttatatatttcaacagcgttataactgccaccatcaactatcattatggccattatcaatgccaatccccatatatctaagttggtattgtcgcgatattttgtatcatctatcatactatttggggtgaccagaccaccactactaaatagtcatattaaaaatttaatgaaaa

SEQ ID NO: 348337 - DNA, 542 bp, Cannabis indica
agaagtggtttttaagcaaaaatgttttgatatgtgcagatgaaattattagagttagtcctacattgctaatgtgtagaaataaattatcatatataagatgaatgggctactcctctcattgccaattagttttgagatggaacctcattcaccttatcccaaattctaacagaaataaacatcatgagttatcaactacaacaattataagcttttagtaaaagcattaaagatacacttaggagttaggcatgtggagtatacaaaatttacgtcagtatatcaagcatggtaattctaggtgtggcgtgctgccccatggcacacccacaatggggccattttgtaacatgagcatgccttggtgcttgatcattagtcaagtcttgcaccaagcacctcattggggtagggagtcttttgttgtttagctttcattctttgtatttccactcaaatatgtatagagagctataatcatatatgttcctggaaatccccttaaaaccccaataggctctttagggggggtgacctgg

SEQ ID NO: 348338 - DNA, 644 bp, Cannabis indica
ggggtgaccagaccaccactactaaatagtcatattaaaaatttaatgaaaaaaaatttctagtaatactaataccaactttaagtattttttttatttcaaatattactacacatagtctgtttggtacgcatgattggactggattgaactcaaaataattggactagactgaacaagattggattatgctaaaagtaattttgtatttagtttaagaatagactggactattttatttatttccttttagaaaaattcaaataaaaatatataatattaaattaaaattaaaaatataataataaataaataaaaatgaatgatttgcagcaacaaaataaaaataaaaaataaaaaaaataagtaaattataaaataaaataaaataatatatcttatataattaagtatatatcataaatatataataaaatagtttatcaatagtaaattaaaaatacttgattaatataaaattatttatgttaaatactaatttaagattgttgctccaaaattcgcccaaaatacgtggaccagtcgaaaggggacacgtggatcagataacttagaaagatttgctaagtcttttgatgccaccaggaagcgctattagcatgggtcccggaggagacacccgg

SEQ ID NO: 348339 - DNA, 884 bp, Cannabis indica
gttacgtaagaatggtagtattcatggtatatatgtgccctgtgaagtttgaagtgatttggataagtttttgtagtgtttcggtgagtgcgaaaattaagattttcgtgtttcatagtttttagaaattcatacgagatcagaaatcgtatttttatcatcttttcactcgggtgtccgttttggacgttctatataccgtttcgaagcttgcgacgagctctatgatatggtgtatgttttagagccaaaatataagttttattttagtatatgtataccatagagtttggtagaaaatcctagattatcttacgcgagtgttaagtggtgttttgggataaacacttattgatttattattgttatgagatagggcttgagattattgatcgttctccaagcaggtcgaccaacatacctgattcagaacttgaggtaagaaaagtataatgtaccgcatggcatgacaggttctgaaattatcgattgtctgattaggcaatgataatgtaatgatactatagatagaatatatggtctcaccttattaggtgatgcaatatatctggcgacgtaccaggtaaaggtatgggcgtcagtagcatatgatgagtaccgagcataggtacgacatcctttgattagacgatgtgatataatagtgtcaagttgtggcacgggctcacctgattaggtggcgcaatgatattatatatgatattgtattatgacacgggcttgcctgattaggcaatgcaaatatatgagcatatctatttctatgcatatgactaattatattacctagtgttgaatgttatagtttaatcattttgtgataatgaaatgtataattagctatttaatgtatcattctttat

SEQ ID NO: 348340 - DNA, 580 bp, Cannabis indica
ttgttatcacgagcaaatttagatacactcagcaaattcttagtaatctcaggaacatgtaataaattcttaaggattaaaggcttattaaacgtattagaagcaacacaggtgttaccatagttttgaatggacagacctgtgccattcccaacaaagatttgctcttgaccattgtattctgctgtagttgtgagattatgcagatcgggagtacaatggtttgttgctccagaatcgggataccagttgcaatcctcagcaggtgtagtttgagtcaaatgagcctgcattgatggagtttcagcaggtgcagcaactcctgtgaaacttttatcgaatcgatagaagcaatcgatcacagtatggccaagcttgtgacaaagctggcattgaggcctattctggttctgaactggttttccccctcttgttccttgatttgagcctctcccagggttatagtaagatggtgaacctcgagagaagttaccagtataaggtgcacgattagaggaatgatgagagaaatttgaaggaggaaaactgggataagagggatagaactgacctctttgca

SEQ ID NO: 348341 - DNA, 817 bp, Cannabis indica
aaatggtggaaatgctttagactaggctttcgacttgtccaaagctcctaaggtgtttttgcaactgctttactggtacttcatttcataatgtaagctgttgtctttaatgcttctccccaagaggggactcacggtaaggtagaatgagcgatcatgctccttaccatatccttaagagtcctatttcgtctctcagcaacaccattcatgctaggtgatcctggcatggtgtactgtgggacaataccacattcctctaggaatttagcaaatggtcctggacgttgttcacctgagccatcatatctaccgtagtactcacctccacaatcagatttggcgttcttaatctttttgttgtgttgattttcaacttcagctttgtaagctttgaatacgtgcacagacagagatttttaatgaatgagatataggtacccataacgtgagtaatcgtctatgaatgatataaaatattgttgaccattccaagatgccgtagggaatggcccacaaatatttgtgtgaatcaattctaagacttctaaagctctattggcacctaatctcatagtttcgatctgttttcccttgatacaatctacacagacattgaaatctatgaaatcaagagactcgaaaatttcatcagacacaagacgctcaattctacctcttgagatatgacctaagcatttatgccataatgacggtgaattttcttaatttaatttgcgtttagtacctcgtgattccacatgtaaggtttcattattggatacaattgtttctagcaaataaagattgtcataag

SEQ ID NO: 348342 - DNA, 528 bp, Cannabis indica
taagcattaaaaatgaaatttccgtgttattccataaaagaaattaattttgatgtaatttactctttaaccattgatttattgtgaatggcttttacattttttaggacagactattcttctcttcattttttaggacctcacatattttttaaattttttttgaatagttaattctaaataattataattgtatacttagatggaaaaaaaaaaactttggtagatatcgaaacagatgaaaactgtcaaaggagaaatgctaaaagttaatagtagtgcttagcactcttcgggtgtcatatcagtgtaattaaaaattgaatatattaacttttataaaatatcgttaactaattgtaatataccacctctaggtgaggctagtgagcaccactagtgcctagcaatgtttggtgtgaaaatgatgactaacaaatataatatttaatggctaaatactattttaaaccatatgttttgaaaaaattactaattagactttctgttttattaaataaaacgtgt

SEQ ID NO: 348343 - DNA, 481 bp, Cannabis indica
tcaataaatactacttttctaagagtatgactaaattggaaaattaattagcaaagtaaatgaaataaattttttcacttgattctaaattgttctatcatcttattctatataagatggtctcactgcctctattgtcttgacacaactgatgaggtccatacaacttatgttcttagatagtaagtcaccgtacctcgtcgtagttggagagttttaagggactcaccctgttattacatggaagacacttgtgatgaaaatccattgttagtttaaacaagtaatggatagtcaaaataaggaactacgaagccaagcccagagaactttggttaaaaccatttatatggagtaaccaaaagttttctattacaaggacaagaaaagaaattttgaaaataagtttattccatggatttaacaaaacttcctactcctagttttaaaggtttgagtttatctaaacctatggcttgtg

SEQ ID NO: 348344 - DNA, 572 bp, Cannabis indica
actttttttttttttttgagttttagatattaaagggttctttcaattcagatttttttttttacatggctaaaatatgtattctgaattatcagagatggcttttaaaaaagaaaaaaattatcaaggatggtagataattaagattttatttagtgcataaaagaaattttaaaatataaaatgatacgttaattttcataatgatatcatgtacaaggaaatctatggaccctcttttaatagtgtaggatcttttgtttaactagggaatagaatggggatgacaattattttttatctctgaatattaaatgaggcgaagcaagaataacactccccgtcctgacggtaactcatttagtatttattctatatttttaataatattttttataatttataatttaggaaattttataatgcacctcattaaaagagatacactgatatatttctatctgttttagtatttgaaataattttttagttcacatttttctcatggtcatgtaaattatagttatgtaagacatcatgcaaaattttaagaatttcaataaagtttaaca

SEQ ID NO: 348345 - DNA, 788 bp, Cannabis indica
atattacataatactaatatttcataataggtgataattaatcactttattacactatgcattttttttttgaatgaacactatgcatttaaatatatagtaattatatataaattcttaatattttgtttggtaaaacaattaatatttaaaatagaaaatttttagtaattatactcaattttcatgggagctataagaattagagagtgttgagttagaaattttaacaaagaatcataagcccaactcacttgctaaattgatgagaatgaaatatttgttaagtataaacaaagagagacataacaatttatagtagttcattctctgtatcgcgaaagtaatggagctacatctacttcaaatttttatttctcacaatatggtaattacagaaaaatgctaagtattcaagctctctagtttctagagatagaagctctaaccttgtgggtagttttctgaatgtgaaaaatgagctagatgagctctccttttagaggtgaaggatgtccttgaaaataggaataaaataataaaaaaatattaaaaaaaaaatacaagttggttatttttttaccgtagatgatgatttttttaaaataacatcttgttcattaattaataaagatagatgagaatcacagggggacttccctcccattgctacaaagctcgttgactagcaactctagcatacttagctacactattcgcaaacaagttaaaactacgattaataaaaaagaacttataaataataaacttcttaattaaattaacta

SEQ ID NO: 348346 - DNA, 568 bp, Cannabis indica
aacctctttgatgagagaggagttgaactattataacttcctgaccaaacctttttgacgagagaggggtcgaatagttataaaatcttgatcaaacctttttgactaaaaagggatcaaacaactataattttttatgaccaacctatctaaggagagtggaaaatcaaatgttataaatgagattcaactcataactcgtgcataaaactaaatgttaacggttcgcgcgagctaggaaggtgctaaacgagacattaagacgtcttgataaaagcacttgaacctagaaaattgatagataatctaactattcatatgagcaaactaaaaatatacaaaaagtgataataaaataattaaaagtatattcaagtttgcttaaggcatattataactgccatagcgaggcacaattgagaactgctcgaaaatcaaagaagtttggtaggtaacttactacttaaacaggatgattacgagcaatggaagaacccaaaagtactttacatttgattaaaatatagttgttcacattgtgaataaaaatgcaagcaaatacaattgt

SEQ ID NO: 348347 - DNA, 678 bp, Cannabis indica
attagatattaaatgtattggatttttaaacactctatccaacatctaattctgtccaattgaatactcaaaaataacatccaatttgatccgatcataattgaatatttaatatttggcggtcagttgtaattggatcgactgattatcattagattggatcaatttatgcacactcctactttttcatcttaatttataaagttgtattgagttgtaatcccaaactgaggttagtgtaactaacttctaattttgattatgtttttattccgctgtaagagagttgtattatttttgtttaagtgctattgttgtacagtaattagaactggttttaagtggaatttaaccaacatattgaaatattgagaatatttattgtcaaaatgaaacattagtatatgcacaatattttaaaaataatgacaatatttagaggaaggaaaaacaagataaagtacaaaatacatatttacataatattgaacattttaaccaccatttactcacagtaatgatttttattcattcaacaaattaataaaaaggaacttcacatgattgtgaattctcgtgatgactttctatatattattatatagtagagtaatttacggcataagtatctaagtttaactcccagtcgtaaataaatacataaatttaatttttagt

SEQ ID NO: 348348 - DNA, 702 bp, Cannabis indica
aattcaaaaataggttattttgtgaaatatttaattgtttgtaatttatgaattaggaaaatgatattttatatcattttacttattagaagtttataaatagtattttaaatatattaaataacctagatatttttgtagaaatttgaaaaagtctttttttttttaataaacttagcaacattattaactagcaatagttaataacaatagaacgcacttcgttggaacaattctctaattaaagcacacaacctggagagaaacaagaatccctggctaaaacatgagccagcatgtttgcagatcgtttcacaaaacacaactcaacattatttaaagataagagaagagtacaaacatcatgaactaatagaccaaaagaggatgacaaagtaatttggctatcagtttccaaaatcaattgtccccacaaatgacggtcaatccagcttaaagcttcttttatgccaacaaattcatctatttcaggctgcaccttccatttcggcataaaaatccctaccatgttctccgctgcctccattctcagataactactcgacgccatggtcacctgaacgaacccagaaccaagaactagtaactaacgccagaaaccaataaaccaataccaatgagagaaattataaaaccatgtcaaaagataagactaatgggaaaacctaattactttcaaca

SEQ ID NO: 348349 - DNA, 545 bp, Cannabis indica
ctagctcccggacatgagcaaaagacccatcttctcctccaggagtcaagacacatataggcgtctccaggccagaaaggcttgagttgaactgtcactttacatttaatgttgcatggagaaaatgtctgggaacgtccataagatgacgtgtcagacatcataaacctgattttgggcgattacacgataatcaagggaggtagtgacgactccgtcaagaaaaatcacatcaatcaagaagggatgaaggctaatctcacctaacacctattacataggttgtgcatgttgggaatattttaccaggatctagatttactaacaagtatgttgattaacatcctaaatatgatttctctaaaacaatgaaataaacacataagggtttaggaaaaccttacattgattgtagcggaatataatgactcattctgttcagatctctgacccttgattcctttctataccagagcattatcaagatctcaacttggatctctttctctacttcaggtttggttaccaccgtcttactcactatg

SEQ ID NO: 348350 - DNA, 688 bp, Cannabis indica
aatcattgtgctgactaaggatctcgaggttgttgaccgttttgaggagaccattgagatcttatctgctgaggtaaacagtcttcaagatgagaggacttctctacgagcagttcttcatcggatgaaggaggaaaaggacgccaaggaggggtagcttttggctgaagtggacaggttgaaggagaaggtcaatgccttggagacagccggtcttgagctcttctttgatttttggaaggctaatcgttgggccaatttggactacttgggtgatgctaaggacatgtaccttgagtatcgcgcatcccaagtggcctatggtggaactgaggcagctgcttcaacctccagtcagactgttaatgttcctcccgttcaacaacagatcctcctgcaccagttggcccagaagaaccgaatcaagagcctgggactccagctgtttaaacacttctctttttatctcctttttatatctatatcttattcagcctcagggccttttctaagacatcatgaccggccaagcggtctttgaacttggaattatttttcattttttggacaacgggctaaccgggcagcttttaatcgctgtattacgtgcttttgttatccttaatgaatttcattctctatttataattgtcatgcaattgtgattgttttatttttaccaaatgct

SEQ ID NO: 348351 - DNA, 623 bp, Cannabis indica
aaattcaataataatacttttttcttaaatataggctaacactgacacaggagaacttccagctgcggtggaaacttttcaaaagtttcaccataaaagcaacaattggcgcaacgaatacgtgtaacaagcttatgtaagtttacctttatattgatttctatctatttctttcaatttattctgtatttaaattaactatttaagttttttttttgttttaagagcaaatggttgaattagctgcaactcaaccagcgtccactgaggatcggcttgatgagactgatgtagatcccacacaatacccccgagacttgcctgttatgacacaagtacgcagggagcgatctcgacatctaaaaggctttggccatctcccgagactgaaggcaattggggccaaaagagcacctgccatgaattcttttgccccaccgacagttactatggaacagtacgaggccttacaaaaaaaatgaggaagcagagcagacaactcagtatacgaggcagcaatatgaaacacaacaactctacctcaaatgattccaagatcagtttcagtatctttctcgggccgtgtcgggtttcaacttacctcccatggatcttctaccatt

SEQ ID NO: 348352 - DNA, 513 bp, Cannabis indica
gccctcatatattgtagcctttttaattcaccaaaaaaatatctcaacttcttaattgtacttctaaaacttttaaatctcttaaacatacattccaatactgattatttacttaagactataccatatatgtattaaaacatagaaagcacactaataacccctttaaaataagttcaaccctaccatggcttatcgtagcctaactatttattatctgttgacttttaacaataagtcaaccataccaatctcataatgtattgatcagccaagttatcagggtaaggatactatatatataatttgcaaaccatgtcgaacagaccttactctgtccatcactattatacctcctatacccccacttgtatttgatttactactagagactcagtatttataattccttagtgagggatccttgactcttattttctaaactacctttaaaaataaatttataattcacttaagcattttattccatatttgaatgcaatcatgttatca

SEQ ID NO: 348353 - DNA, 966 bp, Cannabis indica
aactaaaagtttccctatcaattaataacatggcaataccctaaacaacacaaaaatgggaaaaactaggattcccaaaattcccccaacctgtagaccggttccccaagcggaattccggttctgggggaattcctgtgagccaaccagaattcaagttcctacaggcccctctgaaccggaattccgattcagtgtaggaaagaccaaaaattctataactcaaccaaatcaatcccaatttgaaccaaacattccagacctgttttatgcaacctagagaacataacccaagcaataaaacaactacataacctcaaaatcaaatttcaccattaatgagccaagcttgagttcaaaaattcaaagcttgctcaaacaacaaaccagccaacacaacaagcttaaaacaacatatctaagcataattcatccactgaaaacaacaacaaacactagcagcaactacaataactaaaatccctaaaacatgcataataccttggcttaaaacccaagaaatcaaaaagaaattgctaaggactataccttggcttggatcacctaagactttctggaaagagctagaatttctgaagaataatcccaaaccctagctggttctagggatttcgagagagagaaggagagagttaagtttgagagagaaaatgagatttttgggtaattttctattatttgccaaataatgagataatattgatatacaccaactaattcagcttattatcaactaaaaaaaaatctgatttaatacctcccgcaaaaggacaaaatacaattagcaaattgaccattttgccccttaaacactaaaactcactaaaagccactaaggggtaatttaggaaattctaaaatcccgactattctcgacattcccagtgtctaactatatcgccccgctatactaaaatgctatgatgtgattcaactgagccatac

SEQ ID NO: 348354 - DNA, 1128 bp, Cannabis indica
gattggttataatcaagttttaccataaataaatatgtataaaaattgcttttctaggataagtacaataaaggaatttggaatattttagaaacggggacattaataatgaattaaaatggttgattttgtctatttattttaggaaggattatggaataaatgggtcattaaggcttaataatcaaggttattttgtttcattgtattgaattacactaatcattgataatcaaggttattgaagtacattattcgttggttactttattattgcgataattttcaaagtaaacttttgatatcctatgaatgggagcattgtagggttttttgttattactagattacatatcaaaaaattttagattttagggtcttagtaagggatagtaatcataagatatgaagtaaaatacaagagttaagttgccactagccaaagggtttccctttggctagttatagtattttatatggggatctaatttttcagtttttgagttttgagtgttttgattggattgataattttctaattaatttttttttggtttttttttaaaaaaaaaacttaaatgtattttttatttcggtgaaagtttgaattatggtaaaaattgaagaaaaaaaattctttttaatgaggggctctaatttatcacataacagaaataaaaaatttttaggaaacactactactcacatgcatgcttttattatataatgcaacttgatcaattctaacaataatattattaattataacataccacaccataattatttcattttctctcaaatagtcaaattaatcttcttcttccttccttaataatttaattatttaattaatcttcttatctcttaatctgtctatatttataattaataccaagtaactcttattctaaaaagaaagataaattaagtgtatgatttttaaatgttattacactaaaaagcattgcgaacagtttttaaaaaaataaaaaaatattgtctaatttttgaaagtttaagaaaaatactaagtaatcaagaaaaattatttaatcattgttatttattatgattgtaagaattaaattatataaattttttataataattatttagaaaataaaa

SEQ ID NO: 348355 - DNA, 1237 bp, Cannabis indica
acgttccatactagggtatagccactataccacatgcattgcgtacctcaatgtacgagtgttggtaggatttgttcataccctgagtacccctaagtgatataccacgcactcccagtacatctccgtacttatgctggtatcacggtactctcagataacattcactataccaatgcactctatacgataactgtgtaagtgttggtagtgcaactaacattttaagcatgcatatacacataacatatacatacactcagatatgtatatcacacattatatacagttcttaccttctttccgaattcaagtgtcctggccgatctgaacggaaagtctcgtgctagatgaataccctaatcacataaatcataacatagatgagtgacacactaaattactttctggggacttaaacttgaaactaaaagtttccctatcgataaataacatggaaataccctagatatctcaaaaattggtaaaactagggttccaaaaactgccccaaccggcagaccggttcccaaccggaagtccagttccaggacaccaaccggtcgaccggttgctacaggtcccccagaaccagaattccggttctgtgctgggaacccgaaatgcccccatgaccttaaaattaagccaaactttgcaaaactccccagagtaccaaattagggtataagcagcatattccagccaataaaccaaagcaaaacccactgaatcaaaacatgtcattaaagatcaaagttaaggtttctatgctctaatttgcacaaaacccaaatcaactaatcaaactagctgccagaatcattaatcaactcaaactaagcctagaattcgaaccctaagcatcccaaaccataacagccactgattcccaaaattacaagttcaaactaaactttaaagtttcaaaacataaactatggttctatggttacttttggttgcccctccttgaatccctaccttaatttcagagaattaggaacgaaaaattgatccttgccctagttttgcctcagccgaaagagagagagagagagagagttcaagaaaatgtaattttcttctaattttgatttttccttcaaatgaaaataattaatctaatctaatatgcttgctgagtaaaatggacaagtgtcccctccctaggcagccaccaaatcacctattaacagttacaaaaatacccttaagcctacaacttaggcatttc

SEQ ID NO: 348356 - DNA, 983 bp, Cannabis indica
tcttcgatttcatcaagtcattcggccaggagtacatgattggtattttgggtgtacgtcaatcttctgtgggatggtggcttgagttctacaggcagcatagcctcatttccatacgccatagcaaatggagtctgtccggttaccgttttctcagttgtccgatacgaccatagaacttcaggaagttttctggccaatttcctttggcatcttcgagttttttcttcaatgtatcctttaaggtcttgttgactgcttcaaattgaccattcgattgaggatgtgccactacggagaaacttttgatgataccatggtttccacaaaagtcaatgaaggattggctgtcgaactgcttgccattatctgaaactattttgtacaggaatctgaacaggtagattatgttcttcacaataaagtcttgaactttctttgatgtaatggttgcgagtggttcgacttccgtccacttagtgaagtaagcaaccgctaccactgcatactgcactcctcctttgcctttgggtaattgtccgatcaggtcaatttcacaaatggcaaagggccatggactctgcatctgagttaactcgttaggtggagctagaggtatctttgaaaatctctggcatttgtcacatttcttaacacaggcttttgaatcttcgatcatcgttggccaaaaataacctcgccttagaattttcttagataaacatttcccagcgacatgatttccatagaatccatcgtgcacctcagataggagtcgtccagcttcttcttgagtaacacatctgagcaatggcattgagaatcctcttctgtacataattccctctactatgatataccatgtagccttccttctcatttttttgagcttcattttgattatcttcaagtttcctagtgtcgaggtcagtgactattggtgccatccagtttggggaagtatcaatcatttcaatttcttc

SEQ ID NO: 348357 - DNA, 557 bp, Cannabis indica
cctttgtagaggacaggacccctcaccgcccttagacttcttggctggaggagaggcactagagcttccgcctattctcttcctcagagcgtcgagcatataccgagacatgtatgcacagaatgaaaacagtgtggttagaaaacaaccatcagaaacataaggcatgaaaatcaagaagctaaaaaacaagataaagtaaaatgcaagatgactgcccgaacaagactcagaagtccatcatcacctgacatcgatcttatttcagagataacaggtttccctattccgaacacgggaggggatggccgaacaggtgaaatgggctccctgatgtgaatcgcatgttcaacaagcctgggcagggctaggagtttcttcttcctcttcaatggggtcacctgctcttcctcggcctcatcttcaggattcaagggctcctaagcatactgcttgttctatgtccctcccttcaacttagcttcgcgcttaagttgaatgagttcattctcctgatgagctcgttcggtccgaccaacaccagatttcctcttctt

SEQ ID NO: 348358 - DNA, 632 bp, Cannabis indica
caagctaaggtatctcttgtgtaaccctttctttagtttttgaaattttatgaagaaaaacttttgcatgatgagtttgggtttatagctgctgtatatgtttgttgttcttttcttgtggcttgattatgtttagatgaatggttgagagctggttgtggtgatccttagttgtgtttattcaaagtttggaattttggctcaaaaattatggttttcaaagtaaattgaggaactagttgctgcagtggttgtttgtgcgtgggtttgatttctggggttatattatgattaattatggttaattaaagcaagtttgatgcatgtttgttagatttaatcaagtttgagttttgaactcaaagcttggagctttaatggtggattttgattttatgcatgaagctcagttttgatgctttggaaatgttccttagggtctaaatagcaggtctggaagttttggtgtgatttggggttgattggagtgagttatgaatttttgatcatttcctgctctgatccggaattctcgttcagcaaccggtctaccggttgggttccaggaattcccagaaccagaattccggttgtagaactagtctaccagttggggaaaaattgggaaccct

SEQ ID NO: 348359 - DNA, 680 bp, Cannabis indica
atatgcaagctgccacacgcattctccattacttaaagaactcaccaggccaaggtcttttcttccatgcttctccaaccgaccctgttcagctcaaagcttttgccgatgcagattggggtgcatgcctcgacacaagacgttctataacaggctactgcatattccttggccaatccctcatctcatggaagtctaagaaacaacaaaccatctctcgatcctccgccgaagcagaatatcgagcaatggctcatgcaacttgtgaactcacatggttactttccatcctcaaggatttctccatcaacatgacactcccatccacacttcactgtgataacaatgctgctattcatatatcagaaaatccagtttatcacgaacgtacaaaacacgttgagatcgattgtcatacagttcgagaaaagatcaaccaaggtgttcttcgcatgagccatgttccatccaaagctaacttagccgacatactcaccaaacctctctttcccagtcacttcaacgatattgtatccaagttgggcattcgagatttctacgctccaacttgaaggggcctgttaagagttagttagcataagttagttatgtttactgtctttctgttttttctgttatttgttctgttacaagaattagttggcttgtatgccaaatcc

SEQ ID NO: 348360 - DNA, 737 bp, Cannabis indica
gtaatcggaatgcttaaattgactaaattgcccttttgagttaaactatattatatggtagttattttgcaagacatattttaaaggacaaaattgtcattatatatttaatattaaaaaataaaataaaaataataaaaatccattacccttaatgacattccttacaaaattgatgggagaagttctccctttcctttctcccttatttaatcaacttctccttttcctaattttaataatgcaagtaaacaaatgtaagggaatgattaccttactattaattcccgttacttattagtaaacatgccattaatataattagcctttgttcttttaatatttatcatttactaatgaaaagcttttgcatgaaaattgaacctacatacaaaaaactagtaaacacatatgaataactttcacttgccataaagcaaagaacttttgctttctttttctttgaaattactaggagaatcacctccatactttttaagtctttttataataaaaatgaaaattatttattattaaaaaattaaaattagaactaaatttttatttttatttttgcaaagtgaattgcatttttatttttcattttttgctgggaaattacatttttatttggttaccaattcttctctctctcaccgccttaaaaataaaaaaaaataataaataaagaaagaaagaaagaaaaaaagactaatctagcaaaaaaaaaaaaaaaa

SEQ ID NO: 348361 - DNA, 579 bp, Cannabis indica
gtcaaatatgacagcaagtatatattttggccattttggtctatataaagaggactactgttcttatttctaaggagaataataggaagacacaacacaatagaaagagaggttagagtgagaaattaagagagatattctgagagaaagagttggaattgggaaattatattgagcaacattgtcgattatgctggctcgggttagtgagttaatgagtgataaaggattacaccatgaatgacttactgtgattattttcttgtagttccttagattgatatctctaattctcattatcaataaaaattggtggcagtactttcaaactggagtataaccaagttcacattgaacttaggatcaaaaccagtataattctcgtgtgttgttgttagaaggtctctaaattcatttgtgtttatctttctggtttaatatgtgtatactaattttggttcttgatttttttttgttttgatttaatatttgtttgtttcagtattatctttaagctcgaattatagaagttaatccttatatatcagtgctaaatttcctacagggacatttggtaac

SEQ ID NO: 348362 - DNA, 1024 bp, Cannabis indica
tgtcagaacacacctgaaaagacaacacaaacatactatataataatatagttctattaagcacgtaattaaattaatttcatcattttacccttctcgggtcataattactaaaatgcctctggctcaccaacgaggtcttaccttgttataaattatattaattcacatatattgaactatataataatataattcctaaattattcataattatctaattagggttttgctaatccatttcttaatttcaaggtattacattatctctttatcctttgctctgaaggtctctcttctgtccttcaaaattttaaaaatatggagcttttgaggggtattgcaatttctaggcatgccccatccattactcatctgctgtttgcagatgacagctttcttttttgcactgctgaccaacgttcttgtgagactctacatcatgctttatctatctattctagagcctctggtcagatggttaattttgctaagtcttccattttattctctgcgaatactagtgctgatattagaagcttctttttccaaacttttcagctggaggacagggcgtttattactaaatacttgggtctttctcaatgcctgtcacgtgttaaatatcatgcttttacttttcttaaggataagattgccaatattattcattcttggaatcataaatgtttctctagggcagggaaagaaactctgatcaaggctgttcttcaagctattccatcttatgccatggcttgctatcgcatccctactaaaatttgcaaagaaatcgaatctctgatctctaaattttggtggggttcttctacagagtcccacaaagtccattggaagaattggtcgagtgtttgtcaatccaaatttgttggggctttggggtttcggtctttaactcatgttaatcaggctatgcttgccaagcaagcttggcgaatttttcaatgccctgattctttgttgagtagagtccttaaagcctgttattgttgggttttatgcc

SEQ ID NO: 348363 - DNA, 906 bp, Cannabis indica
tgtttttttgcgtcgttttgaaaatgacgctaataaaaaactatttgcgtctacggtatataagtcggttttataaaccgacgtaaattctttaagtgacacttaaaaacagacgtgaatagtgaattttgtagtagtgacagtttatttggaaggggaccctagccctgtgtctaggttgacttgggatctccgggatggaagttcagactttaataacttgaatccaacctactatatttcagtattctgtaccatgaagacatggagtaatctaatccaagttcgaggagctaaaatgacatgaacctgcaactcggaagccaacatgggcacctaaggtttcactctgtgcccaagttgacatatctaactagggtttcagttttcgggaccgtcttagtgcaaaagggtaaaaacttgtattgaaacatcaactagacatacgacggacatatttgaggtatcagaatagtaatcagagcaagttcatttttgagcaccgggggccccgagcacctagcgcccaggttgacaattcgtcttcatcaaaaataagaaaataggtccttttgcgaaagaaaaaacatttcctgggtaccaaaaacagggccagtgcccaggttgacacttggggctggcctgtttggaatattttaccaggatctagatttactaacatgtatgttgattaacatcctaaatatgaatatctctaaaacaatgaaattaaacacataagggtttaagaaaaccttacattagttggagcggaatataatgactcatgccgttcaagatctctagcccttgattcctttctgtcgcagagcattatcaagatttgaacctagatctctttctctccatcgggttcggttaccaccgtcttactcactatgattg

SEQ ID NO: 348364 - DNA, 400 bp, Cannabis indica
atcatcgccatcttgtggttggccacgttgatcgcggggttgccactccctacgttgggcgtccttccactatttctgccacagtcaccattattgtttctagagtttcctccaccactccgccttagatggacattgagggagtcatcacgtcccatatgatgaccgggtaggacttgctcaacagccgggggtggtcgattattattgtggggaaccctgttggaggggtgactcctagtcctttcttggttccttgggcgctcttcaggtccatagaccaccctctccctatgggaccttggggtagggacctcccgaggttaggtttgaggtatctgttgatcgtgggcattagtacccatcccttgagtgttttggttgaagtagcttcgtatta

SEQ ID NO: 348365 - DNA, 731 bp, Cannabis indica
tctatttggctatctcggaagacacaattagtgtggcaatagtgcgagaagagggtaagcaccaacaacctatttactatgtcagtaaaaggttactgggggcagagtcgaggtacctccctcttgaaaaacttgctttatgccttatccaagcgtctcgtaagttacgaccttacttccaggcgcacctaataaaagtgttaattgatcaacccttgagacaagttttatcaaaaccagacgcttctagaagattgataaaatggttaatcgaattgggacagtttgacataacataccaccctcaaacatccatcaagggccaagccttggcagacttagaaggaataacttcagaagaaaatctgcctgatcactgagatgcggacacttgaaagttatacgtggagggctcgggtgtaggggtaatattaatttcaccagaatgctttaagttttattatgctttgagatttcaattcgacgcgtcaaataacaaggctgagtatgaagcctttgatcaccgacttgaggatagtcgaggcattgaaagttaagaatctcatctaccatagtgactcacaactgattgtaaatcaggttctcggggagcgccaggccaagggcctgaagatggctaaatatctaaagaaggttcagaagaacttggaaagattcaattactttaaaattgagtgaattccaagagaacaaaactctaacgccgatgc

SEQ ID NO: 348366 - DNA, 583 bp, Cannabis indica
acttgaggcgggctcttcctttggcttggaccaatactaactcgccaattccaactttgagcttcaactcctctggatttagataatcccaagtttcaagcagctgcaatggagaacaattatggttagtagatctagaatcaacaatccagaaggatttgtcattctctaaaacacatgaataaaaaacaaaagcattaccttcattcgaattgttcagaagtctaggacatcgttcttcctgcaatttgaacattgaagagcactaccatcaattgtacttgaagaagcagcattgttagaagcttcatccttaatccttttcctcttacaaaagtttgcaaaacctggaggcggcattgcaatcaaatttcgttcatgagctcgtaattctgcttctagcttatccatgtcggaagagttaaaattgttgatcatacaagatacaaccaatacattatacactggaggaagactattaagtatgaattgaacccactattcttttgataattccattccaagcaagtttgcttttggaatttcagattcatcattaacaggtgtgagttaatgctctttc

SEQ ID NO: 348367 - DNA, 708 bp, Cannabis indica
ttttttttattaataatattagaatacttttttgagttatttatattatttattattttttgtatatgtctagtatataatattttttatattaaataatttattttggatagttttttaaattatttaattatgattaatacgacttttagtttttatggctaatgtgctttttgattttgtaaggcaatatgtttagttttgtaagtggcttatttttttgatttgtaaggccaatgtggctaatttttttttgtatggccaatgtggctagttttcttttgtacgaccaacgtggctagcttttttggttttgtaaggtcagtatgactagtttttggttttgtaaggctagtatggctagtttttgaattgtaaagccagtatggttagttttaattttgtaaggctatcatggatagttttttggttttgtaaaattattatatggctagttttattttgtaaggtcagtttggtctaataataacacatcaaatgtagtgtattcaccgtcagcaatggagatgagaatagataagttctagtatttacatcagagaattctatgtgactatttataaaaaaaatacatattttattttatttttatcttagttgtaaggggaaaattttcatattttattaaatatttattatgtattaattttttctctctttatttttgtaggtattctattagtgggg

SEQ ID NO: 348368 - DNA, 585 bp, Cannabis indica
taaagtagggaagcaatttaagtcacgatacgcagatttgacatgagcacgactcgagatcttacgagtttgacacgacgacgtgaaaattttgctacttgtatgtgttttatcaattttttatgttacgggtcgtgttcgtgtctgctatctaaaataaatttcaaaattcaacataacacgaacatggcatgatgacattaaaatcaacaatttagtttacaacccaccaacacggtatatgattttgtgggttcgacacgacacgaacttattcgagtcgtgttcgtgtctgtgttttttttattattttttcgtgttacgtgtcgtgttcgtgtcaacaactttttagtaaatttaagacaacataacacgatcacgacacaccaacactaattgccactccaactgtaaagcatgacttgcacaagaaaatttaatcctaatccaaatagcacatgtagcattgtttacaatgcatgattgactacaatatgtgctatttgattagtatcctcacaaataaaattcaaaccaattacacaatcatgtgtgatattaatttattttaatatgaattaaaaa

SEQ ID NO: 348369 - DNA, 787 bp, Cannabis indica
tgcttgtgacttctctccaatcgatttgagaagataaaaaaagttcattgaaataagaaaccatgagttggtccaaaccactatcccagtcaacccacgcaccagaatggtccttaagttttgccacaaaattatttcatcgtcttgtagttgcagcagcatgaaaatatttgctattactgtctccttgcaaccataattgcttcaatctttgacaccagaaaacttccctttgcacataacttttggccaaatttctctttgcttgtttgtaattggcaatggatacttcatctcgacccaatttccacctttgcatctcatttttacacttttttaatctttctttaaagtttccagtaacctccttatccaatcggctagcttttccccacaaaactgaattttatacatcacgtcatcagccccacaaatctcccaactatctttaacaatgtgataacaaagaggttccctcaaccatgcattttcaaaccgtaaccacttcacaaaattgtggtcagcagcaggaaccatgaccataagaatcggagtatggtctgaagttgaaatttcaaaattatggagcttagcagaagtgaacatgtttaaccaagtaagatcagctagccctttatccaaacacacttcgatccaatgattagtacccctcccacgctcccaagtaaacagataaccacataactccatgtcttgaagtccactatcaaccaaagactgttgaaaaccttagattaaaaaaatcagggtacctattaccgcccct

SEQ ID NO: 348370 - DNA, 1017 bp, Cannabis indica
ctttcaccaatcagcttcagacaccttttaatgagatttatagtcttgacgagtcagttctctcgagcaaaaactgacattcaaatgatgttaattgctgaagtaccccttgtcgctaagaactacgattgtcaaaataaagcgttatatcttcaagcaaagaagcgacgaggtttacattatcaacctcagaaagatatggaaaaagctcgagctcgctatcaaggttattggtactgagttcctatcgagacatcccagaacattataatttataacgtgtttaatacacaattatcttgaccccgtaaaagccaactaatcacagctgtgtattattcaaatattaactgcatttattttacgtgatatgtaatcaaaccccacaatttcaggggataatttttgtaaagatatcagtcaactctataattaactgcctgactatgtaattataaatagaggcaagttagactgaaaaaggaacaaaaaattcataagagaaaaagccctagaactgtatcagaaatctaataagattgactcgtggacaatgtagaattttaactacaaaactacgtaaataacccttgtgttcatacttttttctttactatttttatttttctgtgcaactttatcaccaattaagctcaaatctggttaacgaaaatctgtgttaacagtttggtgctttcattaagagccttcgtgtaaaagctcagaaaaaactctccttacataaaaaaaacaacaatcttcttcatggctggcaacacagagaacgttaacacaccacatgaagaaactcatcaccatcctagaaaagagcccatgggctccagaaggcattccaactcacagtctcaacggaccactcgctccaagaggaaccaacctaagggtggccccagtacttagaccacttgctctaggaggacctaacctaaggttggtcccagtacacgaatgacacgttcgaggaggactcaacatgggaatggccaaaatcctgga

SEQ ID NO: 348371 - DNA, 533 bp, Cannabis indica
attttatatttatttgaaacatacctctttttatatgtattgtacccaaaatactctgatataagagagtcatatggagagtatcttgaagtgacaaaagcaaaattggtacaatatttaaaaaaagaggtaaaaatgatagactttaaaaaagagggtaaaactaaaagaggacaatataaaaagggtatagagtataatttcctctaaaatgatattgttaaatgttaacatgtactattgatgcgtacacaagtatacatgtggcaaaattaaagtgattcacattattttaaaatatatatattaagaatagggtaaataccattttggaccctctgttttacaaaagttaccaattggaccctgtgttttgttaaatgacaaaatggaccatgtattttctaaaatagtacaaataggaccctgaattgattttttgtcaaaataaagtttaattataatccgatctaaaagtgatatgacaaaactgtttacattttttgtatctgttcgtattaagcattgtcttc

SEQ ID NO: 348372 - DNA, 791 bp, Cannabis indica
ttagtccttgtattattttacaatagagttgtaataaatcttgattttcttccattgttataaaatctctaacattaatatgatttagcacgtataaattgtttcagatacttaaaaggctgtttgtgttttcaattttttttatgtgccgtttggtaacacttttgtaatctaattttttaatcataaaataaaagtaaaattttaatttgttttttaaaaataaaaatgcgttctgtaaccacttttgtttttcaattttaaaaacagaaagtaaaaatgtgttctgtaaagttcatttttatttttattttttgattttatttaagtcggctctaagtccggggttaaatttgggtttgggtaagaggccgggttcaacgccagggacgtggggggatttgggtctgagtttggtcgaaatccaaaatattgactaagaaataaagttgtttaaaaaaaaatattaagaataatttttttttgtttttaaaattttgattctcaattaaaaaattaaaaagtaaaaatagttttatataacatgtttttgaaaaatactttcactttttcaattttaaaaataaaaaactgattaaaaaatttttaccaaacgccaccttaatttttaaaattgtgtttttaaaagtgagaatataaaatagttttttgttattttaaaaatttaatggtgtttggcacaaattttttaaaactatttttagattttttcttactaaaaaaattaatattttaacaccatacacatgaactcatccaggttcaggttt

SEQ ID NO: 348373 - DNA, 525 bp, Cannabis indica
ttaagttgatctaaaattgaaaatttctaatttaatattaatttttatttaattaaattcatctaaatagaaataattaagtatactaaaataaaatcaactaaattattaattctaatttaatatctaagaaaaataatttaatttaagttaatccaaaataaattaacaaattaattttcaacttaaatatattttctaatttaattaaatttcttgaaataaaaataaataattaagtatcttgaataaaatcaacttaattatgaattctaatttaacttctaagaaaaatatcctaatttaagttggtctaaaattaatttataaatcaattttcaacttaaatatatttttccacttaattaaatattagagaatataaactagttactagagatcactatctagaatcttttctttaaactaaacgtgctttctaaattaattttaaaataatctaatgaaaaattaatttcatttatttcaaaattaatgaggttgctaattcaattttaattaggt

SEQ ID NO: 348374 - DNA, 1029 bp, Cannabis indica
gacaaaaattaagaaacatgcttgaatatgctacaccaaccccaactaaaaatcagatagtgtcaatcaatgtctaaagatataaaaattaaaagaatagggaaagagaacacctggagagcaagcaaccatggatagcagcgatattgatcctcttaaaaaaagaaaaactgaaaaacaaaaaaaaaatgaataacaaaggaaataaatagcgaataaaatataaacataaactgaattagaaacaacctgatcatcatgggtaggccagagtcacaaaggtgatctcctcaggtaagcctaccctcctaccaaaatttgtgaatatcgcacatcgacccgaagaagcgtttcatagatcgggtctggaatcgcaaattctcatattgcgacattgatgcttcatcctgggacatctcaagaatagaagaaacattggcttcctcaggtggataaagcatatttttagtatcaaagtcatggaggagatcatttaaagaatcaaaatcatcatgaataagaacttcctcctcaacaattgtgtctatcacgtcagtatgatagcaatcttcctcctcgtctggtggttgcttcgcaacatgaaaaatgttgacccccatagtcatattcccaaaagataatttcataagaccattcctacagttaatgagagctttagccgttgcaaggaaaggtctaccgagaatgatgggaatttttgactcagtattaacctcagattgagtgtccgaaatcaaaaagttagcggggtaatagaattttccaactttaatcaagacatcttcaactattcctcgtggctttttgattgagctgtcagccaattgcagcaccacagatgtgggcttgatttctcctatacctagttgcaagtaaattgaataaggcataagattaacacttgcgcctaagtctaggagggcttgaccaaatccttgtgtcccaacttggcaagcgattgtaggtgtaatatcccgaaaaataaataatatttaaatagacatattt

SEQ ID NO: 348375 - DNA, 1050 bp, Cannabis indica
agcctcgttgtttgatgcgcaaattgaaatcccaaagtataatgaaacttaaagccttctggtgagattaatattacccctgcacccgagccttgttcgttggatgcaccatccacgtataacttccaagtgtccacgtctcggtgaacaaacagaatttcttctggagttatgccttctcttaagaagtctgccaaagctcggctttggatggatgttcgagggtggtatgttatgtcaaactgccccagtttaattgaccattttatcaatcttctagaagcatctggttttgattaaacttgtctcaacggttgatcgattaacacctttatggggtgtgcctgaaagtacagtcggagcttgtgagacgcgtggactaggcacaaagtgagttttttgagagggggatatcaagaatctgccactagtaaccttttacttaaatagtaaataggtttatggtgcttaccctcttctcgcactttagctgcactaattgcatcttctgagatagccaaatagagaagcaatgtttctccagttattggttttgccaaaactagaggcattcccagatgcctttttattttctgaaaggccatttcacactcttctgaccactcaaatttcttgttgcctcgcaatacattgaataatggcaaacacttatcagttgacttcaaaatgaaccagttgagtgcagccatccttcctgtcaaggcttgtacttccttaggctttgttggtgatggcatgtctatcaatgccttgattttttcagggtttgcttcgataccccttgcattgactatgaatcccaaaaatttccttgaggacactctaaaggagcattttttcgggtttaacttcatgttatacttctttaatattttgaagcattctgcgaggtctatggtatgattcctacttcttattgactttactaacatatcatcgacgtaaacctccatgttccgcctgatctgatttgcgaacatctcgttcaccaattgctgatatgtttccccagtgttcttcagcccaaac

SEQ ID NO: 348376 - DNA, 562 bp, Cannabis indica
caattttagtttttacggaactcgattctgataaaaactacaaaagttatgaattttggaaaaatcgggttcaatggtgtcgagcatggtgctcgcacgcaccaggtgttcggacaagacaccattacgcgtgtgtgggctcagacatcacccttgtctgaagccgtgtccgcccgaggagcaccctgcacatccgctcgacgaaccctgaacaccgccaagttttttcggcgtcaccctcacttccacgcgcgtatctctgggtttgcagcctcctggggctgcacgtgcagcctactcggctgcttacacccaaaaacccaaattatgtgggatttttccccaaaattcgatttttccaattttcaaactccaaaattaaaataaaatattatttttaatatatttaaacttaaatatcattttttaaattaataatatatatttttaatagattattattaatctttgatattttgaagtttaaatttaaaaattaaatattttattttttaaattatggtcggatttaaatatttgttaatttctttaatatttatat

SEQ ID NO: 348377 - DNA, 667 bp, Cannabis indica
ccggtgatttctatgtagattttaattgcgatttaactcgtttcgtgagttggttgagtttttatgtgaattttataaaaatacaaaaaaaaaactaatttaaaatataaaaataaaaagaacttctaaaataattgtacatgtaaattaaatttttattatttttgtaaccattaacacagatacttctataattcaaaatactttgggctgtgggttaagtgctgtgattagagaccatagaggagacttgattgctgctcaaactttgttctttccaggtattctgtcagttcaattagcggaggctgctgccattcggatgggaattctgttggctcacatatggtctctaccgaagatcattgtttcttccgattgcttgggagttattaatggactgaattctgtctcttctacttcctcggattggagcatgttgattagcgagattttatcttttcagcatcattttctttatgtaaagttttcttatgtccctagagtttgtaatggtgtagcaaatgctttagcaatttggagtcgaatgactcattcttcttgtttgtggatagattctttgccctcttgtgctgctgcccctttattggcagataagcctagtgtggctgtttaataaagaggttacatttaaaaaaaaaaaaaa

SEQ ID NO: 348378 - DNA, 863 bp, Cannabis indica
taattatattataataagatttaatttttgttttagtaagtttttcaaatacgggagttacaacgagaagaacgtgtattgcacttaacatcaacttattgaaccgaattaaaaaaaattaatgatatgtgtagtacacttaacatcaacctaatataaagaaaagtataatagagattgaggtgacactctatatttcattccatcaattttttctttatgtaaaaatttcatattcttattaatttatattcataaaaatataattaataatataataaatattaagttacaccttttctacttatatcataacatctttcactattgcatatttatcactatatatatacaaatattttcatttatctataacccttttgaatattactatatgtttatcactatgttaaattaattattacacaatgagaattttattatcaataataataatcacaattaatactcattaacatccaagatcaatcattttatttagggcattgaataacaataaacatactttaatattgtgcattctttaattgtgagtctccttgattcaccacaacatcttctaagtattaagagagcttatggaaagcatccccttgtaaaacttttaccaccatatcacccatatatcacccttattccactaaaattacacacatatatatatactaatttaccctagcggtaaagtggacatagttttcggtttaaaatactagtggtggtggactagaatttaatgggctaatttatagtcattagggtgcttccatgtgcctcaaatgcaaataataaaaccgaccatcccattattgtaacgccctaatctatagggacgccacgtg

SEQ ID NO: 348379 - DNA, 547 bp, Cannabis indica
ctacattattaaccacctttttatttgttcatcattattgtgacttaataataagggtcggtcctgaaaaaatggaggcctaagacgatataaaattttgggccccttaataaataagtggtccaagtaataccattcaataatgaagcaaatgataagaaaaatggcataaactacacactcttagtagtaataaccaatttctgcaccaaaaaaaataagcaattaaaatcaaacaagaaatactaatattaaaaagtaactaattaataactagtaactagtaatttaccataacagctaatggagcaacataaatcatgatattaaagagtatacaaattgtaccaacaatggttgatctttttgtaacgcccgtacttttataaaaatattaattttgtttacaagcattaaacgcgaaaaatcataatgtcgcatttttatttcgtacttgaaaatgttcacaactggccagttttcgtacaaaagacacaataaataataactaaaataattagcgacataaatttaatagcgtaaataa

SEQ ID NO: 348380 - DNA, 507 bp, Cannabis indica
agtataccatgtaaattttcctcaaataatccaattatactccttaaatattgtttatctagtcgaagaggtcacatgcttcccacgtgatccgaaccaacacttctgatttaccgttagaaataaatatcattttgaactttgtattttgtaaaaattattaattggatcatctattttattaaataataaaataaactatatagttttcaaaatagaaaaaataagaccctaatcttaatttttaacaacttttttttttaatatgactaacttgaaaacaattcctaacacgaacatatactgaaaatgtaaacagttttgttataacacttttagatcggattataattaaattttattttgacaaaaaattacaattcagagttctatttgtactattttaaaaaatacaagatctattttgttatttaacaaaacagaaggttcaattagtaacttttacaaaatacaggatccaaaatgatatttacccttattattatt

SEQ ID NO: 348381 - DNA, 735 bp, Cannabis indica
gatcagaggaagagagcacccactgcatccggtggctcgagtcagaacaagaggttccgggggaaccagaatagaggtagtcgtcctggtggtactgagacccgattctcctatcccgagtgccctagctgcaaaaggcaccatcggggtgagtgcaaaggtcagggggatcctctttctttttatcttttcattctctgtgctgaaggcctctctgctcttcttagggcaaaacaagatgttggtttgcttaagggtattgatatttctaggactgctccttctctttcccatctattttttgctgatgatagtcttattttttgtactgctattcgtacttcctgtttagctcttcaggatgttttcaatgtttattccaaggcttcgggccaggttatcaatttttccaagtcttctattcttttctctcttaatactcagcatgatattcgcactacttttttcaatacttttaatcttgaagataggcctttcatctgtaaatatttgggtcttccccaatgtttatctagatctaaatatcactcttttgctttcttaaaagataaggttaattctgttcttagaggttggtctgctaaatgtttctcaagagctggtaaagaggtttatttgctgaaggctgtcattcaagctattccagcctatgccatggcttattttcgttttgccagtcaaattgtgtaaaggtattgaagctgtgatggccag

SEQ ID NO: 348382 - DNA, 1237 bp, Cannabis indica
tcccttattaggtgtcaagtagcccaaggtctttgtcttcaaccatgtttcaatttctatttacatgtagacttaaagtgggatttgtaatgaagccatgatggagcaatgaaggagtaaaccccatttcctactcgatacgctgagtaggaataggaggagaatcatacacgacatgccgagtagtagcggtgttcatcaaaccgctcaaactgtctgcatcgcaagaaaatgtttgaaattcttcgcggtgcggtcggagtttgaatttttcctaaactgcccagtgcggtgcagtttgcggttttgaattattaatatgcggttcaaattgcaccacaccgcacattatgaaaataccaatttttatatttatttaggtccaatatgtgaatgtctaacccaaagcccactaattattgtattattgaaacttaaagtttttttcaaatttattttaagccttatggtatttttgacaagtattgctcaaactttgttgtatttgtgatagtttaattattggtgatagtccaaaccgcagaaatcgcaaaaaccgcatcgcgtcgcaccatttttcgcggtgcggtttttgcagctttttagttttgcggtacgggtacggttttgaaaattggaaaaaccgcatgtgcgggttggtttgacaaaatggtcaaaaactgcaccacttgcaccgtaaacacccctaccaagtagcgcttttatcacaatttgctcccgtaaagtttatctaatgccttagtctcgtcttaaacattaattagctcatgtcatttttcatataaacaaaaaagttagctaatacagtaatattgcgaacagtttaaaggactaaaccattaaaaaagaaacaataaaaaaatagaatatataaaatatataattataaataatatacaaaataaacttattatgattaacaaaaatcaacaacacataattttatttttttaaaaaaatgatttatttttgaaaaaaggagaaaatatatttttttaccaaacaaaataaactattttgattattttttaatttcgtttattttataaatctgtttaatgtattacattaataatataaagtattatttgtttattctaattttttttatttaatgaatttgtttcttttatatatcatttgatgacatataaaaggaaaaaaattaattaaaatattttttcaaatgtataatatgattgtattgtatataaat

SEQ ID NO: 348383 - DNA, 1712 bp, Cannabis indica
atattactaccaaaatataagttaaaaatacatttaattatctatttttcaataagttaaaaataatttttctatttattacattgatcttgtaattgctacagttagctctgtgaggtatagaataattcatggtggtcatgagctgggttcgattgttcctgagaggggtattagacaaggtgatcctctattaccttatttatttcttatttgtgctgagggcttctcatctttgatacggaagttcgagggggatggtcggcttaaagggtgcaaggttgctactggtgccccggttatatctcatatgctttttgcagacgacagttatgtttattgtcgtgcgaatgacagagaggcttcgcatattttacatctgcttcagctgtttgagctcgcttctggacaacaagttaattttggtaagtcctctgtcttcttcagtactaatgtgcctaatgctactcgagaacgattgtgtgggatccttcgaatgagacttgctgatgaacatagtacttatcttggcctcccttgtgcaatgggacgaaataaggatgctatcttggggtttttgaaagataaaatgcagaagcgcattcaaagctgggagggtcgtttcttgtctatcgttgggcgtgaggttctaataaaatctgtagcgcaagctttgctatgtctgtgtttttactgcctctgaaaacttgttcacatttggaaagcattatggccaagtattggtggaggtcaagttgtaggaagggtgtgagttggtttagttagaggaaactatgcaaagataagaaatctggtgggatgggttttcggagtttgcatgagtataatctctcgttgttgggtaagcaagggtggcggctacttctgcaccaggattctcttgtgggtcggatatataaggctcgatattttcctaaatgctcatttttggaggccgagttaggtggtaatccgagttttatatggcgcagtgtctttgcgtcacaaaagctgctcagagatggtgcccgtaggagaataggatctggttcagctactgaagtgttaaacacaccttggcttttgtctgaggctaacccgtatgtgatatccaatcatccggcactggtcaattgtaaagtgtctcaactaatgaagccagatagtagacaatgggatttggagcttattgaggacttgtttgagtctcgtgatgtggagctcatcaagcaggtgcctttgagtgttaatcttgagagtgatagttggttttggaataaggatccgactggttttttcactgttaaaagcgcctatactcacttgcagtcggtcaatggtagttggaattcatccatggaggaggatgtttggaagatgctgtggaagattaaagctcctcctaagattttacatttttttttggaaagctctttcgggttgtttgcctacacgtactcaacttcatagtaaacatgttcctgtggatttacattttgcaatgttacggaagagtccattttccatgttttagttcaatgctcttttgcgcattcttgttggctccgatcagcgttaggtgttgggcattctgtagataccaatttttttgactggtttatggaagtgttggcagtaggcaatatggggttggttgaagaagccgtcatggttggttgggaaatttggaaggctcagaatgatatgctttg

SEQ ID NO: 348384 - DNA, 418 bp, Cannabis indica
ccgataaagcaaacgataagtaagaaacctatccgtagtttcaagagtaattactcataatagtaataaccgtatctaaccctaggtcataaccaaggctcaacaaacatttaatcagaatcttgataataattaaggctacaaccattcaaccaccaacatttagccacatatggtacttacaacttttcttacctcaattcagaactcaagcatatgggccgacttgagtggaaagcgaattgggcgatcccggtcctatgtcactgttggacttaattttaccaagatcttagatctactcacaagtatgttgatttaacaacataaatatgaacttctaaaacgataaacaaaacacataaaagttaagaataacttacagtgatggcagcagaattaagtgtctccttccact

SEQ ID NO: 348385 - DNA, 1046 bp, Cannabis indica
acacctaattcacttccaacaacaccaaaaaccagcaactaaaaatcagcattcagcaatgaattttagcccctaaactcatctaattcaacacaaacccaaacacaactcaagctaatcattcaccaaataaaaagtacctaaataggcattaacatacataatttttatgcttgaacaccagcaaaacacatcaaaatttcagattaaacaacataaaattcaaagctccaacttgagcaaaatcaccaagaactcataaagaagctacacaaggaagtcaccaaaatgaatcaaaattcagcatgtttttttctaacccaaattcagcaactagaaatccccaaatttaccattcaaagcatacacaaagcaaatcttataattcacaacacaaccatgactacaactccataaacaatctaaaacccataagcatgcaattcaagaacataacccatgagttcatacctatttcatttcaaaatcaaagcaataaaattcagaaataagagctggaaaatacctcaaagttctcacaatcaaagcacaccaaaatcccccaagctccaacaagctcaacaacacacaagagaggaagatttgaagtgaaaagattgaagggagagggagaatagggttcagccaagagctgagaaaataacccagaattttatttctaaaatgtaaaataattcctttttgttgcaattaatccaaaaggccaatttaccaaaatgcccctagggccaaataacacataaaagcattccaaggataacatagtcatttctaacataaatatacccaattaaatttcagattaatcacactttattaaaatgctaataaataatcccaaaattgtatttcggccccgaacccggttcggcccgaaatacccggttgtgactataccgcgccgacttgtcagaacacacctgaagaaggacaaaacaggcatactatataataatatagttcataagcacataaataaattaaattcacagttttacccctctcgggtcaaaattactaaaatg

SEQ ID NO: 348386 - DNA, 604 bp, Cannabis indica
gtacatgtccttggcttcacccaagtaatcgaagtatgcctaaggattatccttccaaaagtcatagaagagctcaagaccggctatctctaaggcatggactttctctcccagcctcgtcacctcagttgtaagctcctcctccttagacttcttctcctcttccagccgatgaagggccgctcaaaaggatgttctttcatcttgaaggttgttcacttctacagataaggtcttgattgtctcttcaagtcggtcaaaagcctcgagatccttagtcaacttagttattttcttctgggcggtaaaaagcttcttgttgacttcacctagctccatccgaacagctccaaattccaccctggcgtcctcagcgtccttcttggctaagtccacctccgcctcatggtgttggacagagtcgcgttcctggaagtagcagacttagctcgggagtatgtgtaagccaacttcagaccagcttgcacagagaaaaaactttagaatttgagccaagtaaagaggattaaaggacattgtcaggaaagacttacccttgtgaattccttcaagactcctcccatcagcagctccagagaagagt

SEQ ID NO: 348387 - DNA, 1290 bp, Cannabis indica
ttaggattcaattatatggattaaaaaagataaaataataggcaaaaatcaagcttaagtagtcggccatagtagcgggcctcactagttacaattttttcattttatttcatgattcatattttctttcaataatgctatattttcaaatttcaatcctaaaactaattaattgagtctacaagcagtattatctcaactagtgtggggactgtggccctatgtaatcaagctaacaataagtagattcaaaatttaccgagtaaatttcctaacttattaattcctccttgtgtcactatagatttggaattgaactcttaattacataaaatgcactatcaccaaaaatagatgtgatttaaattatccattatttcaatctaaatagtcaaagatcatttatagatgatctacatcgaatagggacaaatttattgttctaccctttaatataattactaaaatgagacctcaatcatttatctttattaagccaagctcgaatgaaatcattatttcacttctagatacttatagaagttatagatttcatatctttaattagtttttctactcaattatactatcatgtttctaagatgtaagtattgggtcaatccattagtcagctttaacgaacaactccaaagacataaataacacagtttagattaaacctaaccatatcaagattaagatctattagcctaagatcaattaactgatattgagttatatagatataacgataagtttataatatcttatccaatgtcaatatcggtatggtttgatgtatactccatacatctgatccaagcatactttgccaatatcctagaaaggacataacactcactactacaaaaaatacaattctcgtcggtttttaagtgtcatttaaagaattggcgtcggttcaaaaaaccgacgtatattccgtagttgcaaatagttttttattcgcgtcgtttttcaaatgacgcaaaaaacaattatcttcatttaaaaactgtcacaaaatatacatttttttttatattttctgcgtcgattgagaaatgacgcgaaatcgtttgtggcatttcaaaaccgtcactaaaaagttataccgtcggttataaaatgacacatcaattgttgaaatattttttttttccaacctattgcgtcgattataaaatgaaacagaaaaataggtaaggaaaaattgcaatttttcatacagctttccccacatgcattataaaatttagaatgattttatataatagtaaataaataata

SEQ ID NO: 348388 - DNA, 709 bp, Cannabis indica
tcagtgcattggattcacactgacgtgataatcaacgatatagtttacttacacttgtataagtagaatgtcttttccattgcattagtaaagtgaacttgtatcggatgtatcgggtatatattggactggaccgatattgacagtgaaaaagatattactgttatgtctttctaagtcaaagtcacttagttgatcttaggtcaattgatctcaatcttgacatggttaagttctagcttaattgttctatatgggttctttgacttgttcgttacccgcttacctgtaggactagcccatacttacttcttagaaattcgatagagcaattgattgggagagttaaaatgatagtttcctctgagcttgactaaatgtgataaatgataaagcgctaatttcagtaattcattagtttattgaaatattatttacaagtagccaagtgttttaaagataaaatacattgaagagtaaaatgataaatttatccctactcagtgtaaactttctatagaggatcaatgattgtttatgttttccaaattttatccacctgacatggcatgtccatgtaagccaagacagagtacatgtggaatacaaccctcccaatagtaagacagggtcttcatacaagatatagtgaaactgttggaattattttaccatgatctagatttactaccaagtatgtttgattaac

SEQ ID NO: 348389 - DNA, 711 bp, Cannabis indica
acatatctctctaacaaatcctaccatttttgaaaattttttaccggctaaattcaaatccattgtgatcgacggcccaaatttcattgatacagggtttctgcggtgtgactattactaactgattgtaattgatatagatatgggatggggtatgaatgagacgaggggtttttgtaagttgcttaactgatcgaagaatcttcaacgtagtctttaccctttttttattctattgtgctctctaagccaggtttttctttcttttcattatttgtttatttgtagtattcttttcatcgatgtttatctacatattgtactttggaaattctgttactttgaagagtattgctcaaatcagtactcctgatcctgatgcaagttccctcatgatccaggtattacatatatcattgggttctaaaagagtttagaattttattataccaacataatattataattcggtttttgacaataagatatacacatgcttgtcatagagaaaggcctggatatttttgtaatcgtttctcattatcaccttaaaaatagaatatcattcatatgggaattgcatcatgtaattggatctgttattctgttttatccttacatttcttgtaattaaggctatcgagaaagcaatagtcatatgtgtattaccatggaataacaccaaacaatgatggtgatgttataagattg

SEQ ID NO: 348390 - DNA, 581 bp, Cannabis indica
aaagtttagaaagtgtgaattctggttgtcagaggtgtcttttctaggacatattgtcgggaagaatggaattatggttgatccaagtaagattgagttggtgaagaattggccgaggccgaaattagtaacagaaattcaaagttttctcggtttagcagggtattatcgacgttttgtcgaaggattttctaaaatctctatgccactgaccgagttaactaagaaaaatcagcaattcgtgtggtcagataaatgtgaagcaagttttcaagagttgaagcaacgtttaataacaactctggtgttagcgttgccatcaaattaagaaaagttcgttgtttacagtgatgcatccagacatggtctgctttgtgttctgatgcaagctgacaaagttatagcctatgcctctcgtgaactgaaggattatgagcagcgctatccaacccatgacctagagcttgctgcagtagtattttctctaaagatatggcggcactatcttttatggtgaaaatgtgagatttatactgatcataaaagtctcaagtactttttcacccagaaagatttgaata

SEQ ID NO: 348391 - DNA, 937 bp, Cannabis indica
ctcgggatcccgacctatatgttaataaagttatattatattaaaattatcttttgaatttagtaaatgataagtacgggcgttacatatatacaacttaaatttaagcccaaaatattgcagtggtagaattattcaaaaagaaataaaaattctaattttcaaaaccccaaattttataaataaaattattagaccttcaattaattcatcaattgttaagatttataaaacactcaaaaaatacaaataagcagagatctaatcatattttaaaagtactttaatgtagaaaattctatattaaatttctgtaaaatctttgttaaattaaagaagatgataacggtatgagccgaagcaatacactacaaaaaaactatctttagtgaaatttttagtcacaaaataattttttttgttattatatgtgacttttaatcacaacaaaaaattacttgtgactaaaatatagtatttagatacaagttgtcactattttattttagccacaacaagtattgtgactaaaaacacaacacatttagtcataacaaattgtaatttttgtgaattatatttagccactgactttttaatcacaacatatgaattattatttataattagtcataactttttcacttttagtcacaagttttgttgtgactaaaagagattttttgtagtgctaacctaaaactattgttggagattgcacataaggttatgatcttctaagaatatactattttttttaaagtattttctcttatagggaaagagaaaatacaggaaccctagtatttttttggagaccactacctatttatatagattgagtcttggatatttataatttggccttttacaaattataaattgacttatggtatctacacattatttctatgacaatttaatactcttatgatac

SEQ ID NO: 348392 - DNA, 821 bp, Cannabis indica
ctcaattttacattatatagactgtggctgtttcatcgataaaaaataaaaatatatatattattatgtcaaaaaaaaagattgaaaaaaggttgagttagagttagataattttttatatagtgttaaaatatatatttttttttaattaagtatacaaatttaatttttttattattagttattagattaaaattaaatggtttcatatttttaagatatttatagatattttttagtaaccaccaataagtattatttattgaaaaatattccatatataatatataattttggcttgataagtaaccttaactttatgggaggaaatacttcatcaaaggtgcaacacaatataagatattatgtatatgtcatttatatattattttgtgtttcattaattgccttcagtactttaatatacatgtcatatgggttatgttatcttactattataaaagtgtcttaatgaggtgatagttctaagacaattttgtccttaataaattgataactttatccttttattgactggtcaatattgataactctctctctttttctttctctccctcttttaattctgccaattttctttctctctcataataaagttcagatacatcatttcctttttcctcacctttttaacctctacaacaaccggtgtgcttcagagttttggtgtttcagtcgcccaagctcttcgtctcacacaaagctttgtcatttctatgaagctcgatcgatggaaatgtaagtcggttttcttttttctttttctttaatgaaaaccccttttatcttcttcattattg

SEQ ID NO: 348393 - DNA, 1026 bp, Cannabis indica
ttttcttacttaaattcaggttttaaatttgatgtttattgctggaaattatttgcgaagcttggctttaaagttcttagttgtgaacttgggttttgttgatctcgagcatgatttctagctttttgagcaatttgaaattcggggttattattggattttgatgcatgattatgtgtgttaaatccctagtgtttgctagtaactttggtttataatttggaaattttggttatgaatttgagtgagtttggttggggtttttgctgaaaattcgtggaaatgcatgctggtttctaggtttgaaacccaggtgccacgacatgctctgggcgggccgcggttgtgggaacctgggagttggccccaggtgccgcgcatggcttgggcatgccacggcccgcccttgtgattttaggcagttttgagttgaactttgaaatttcatatattttgattccaaactctgatttgggagttctatatatcgttggaaagctctttccgaggtctgtatgattatcttaattttaaatgccatgattgaattttatgagtatggaattaggagttgatcctatttatgaaatcccagattgtgtgactaggattaccggcacctgattaggagcacccggggattcggaatctctgactttacaagacattaggtaagacagtgattagcacgtagagtatgcgcagtggcacttatattgaaaatgatatgtatgattgtttagtaatcgggattagggttattaccctaatacaagcggttgatagcctaggatgattaccctagttgtatatgtgtgtaaatgccatgccatgttaaatgtaatgagatttagggattatgggcttaaggcataattaggttagactcagtaaccaaaaccaagatgaaccattctaagcccttactgtatttaaacttgtgagagaaacccgtaggtctacgccacgtggatataaatagatgtgtgagcacaacacataggtctacgacacgtagacataaat

SEQ ID NO: 348394 - DNA, 624 bp, Cannabis indica
tattttgcaggtgttttactagtggttcggaagtgacaactctcagttttgaggttttcttttctgatattatggttttattgtctagctctcctagggtatctctgcatgctcttaggatagacaatgaactattatagatggaagaaaatcctcctctggttgcgtaactttgttacctttgttatttaacctgtatcggttaccctaaacaaaaaaaaaaaaaaaaaaaaattaaggtgtacactatcatgtttgaggcataaggtgtaatattgcatatatattgtattaagaatagtgattaagacacactcaaattagttaatgtaacgtctagatttgtatgtaattaagggtaattacattaagcatttttatctgaccacatgtaattgcactataattgtataattggaaataattgtagggttctacctcatattttaggtacaatgacgtattatggggttattgaagaaatatgagggctcaattattttgcgttcgaatttcactttttaaaagttcttgggttgacaacaatgttggagtaaaaaatgacgagcttggttttactttggttgatttaagtaagagaggaagcaagaatgatccattcat

SEQ ID NO: 348395 - DNA, 607 bp, Cannabis indica
ttgtcatttaacaaaatagaaggtccaattggtaacttttgtaaaacacaaggtccaaaatagtatttacccttattaaaataataattttagtattttatgtagtggtaaatatttttaaaactcttaagagctccaaagtccaatcctttataactacataataaatatttctatagcaaatgtaaaagtaaaggttgtgaattgatctcttcacctctttagttaaaatcacactctttaccactacactaaatactatttttgtgtatttcttattattttgtattttatttatttactaataatatatatttttcacaatttcaggcccctgagtgtgcgaggagttgaggtacatgcctaattcgccttacctcaaggttggccctgcccaatacctctcaaaatatagcttataatccttctatcatattctattcaattttatcgtgaagcaagggaaacagaagatgataatttataaatgaatgtaaaatatatatcttttactatttttattgtaataattaaaaaattaaaacaaaaaatataaagtattatagaaaaaataaaccttttattctattatttattaacgtaaaaa

SEQ ID NO: 348396 - DNA, 691 bp, Cannabis indica
atccctatattacgacaatatttaaaatgaaagtctttattttaaatttaattaaagatttaaattaaaccacacttttccaaaatttatagattagtaataataagtttataaaagcacacacgtggcgtccctgagggtcagggcgttacaggtatattattttcttcatgtactaaactattttctacattattggtattttttttctttttaccttgtttcagttttacttaatgttgtatctttttatcactaacttttgttgaacttacactttgttatgcaggtttattttcttagaaattaacattttaattatgataagtacttttgtgtaatcaagttactatataattttaagtattaatgcaaaaattagctggttaattttttggggataatttttcttacttatttagtaattacatgatttatttaattataattctttactttttttttttttttggatcgtgtatttagttatagttacttttatagttatcgatcgatcgtatatagttttattgttatataaacgattctaaaatttgaaaagtacaagtaggaaaaattgcatgaaaatttgtaatttttccttacctacacctatgcttcattttataaccgacgcaataggtgaaaaaaaaaatatttgcaaaaaagttatgcgtcatttaagaaccga

SEQ ID NO: 348397 - DNA, 714 bp, Cannabis indica
tcaaactcaggatgatttttccacattaatatttaaatggcttcttaccaccatgccattgaggatacaaagttaggacaacaggtgtatgatcaaagaggccttcatttagaaaactagcttcaacagtaggatgattgtctaaccaagattgattcgccatgactttcaattttggagtagatacgatcatccccttgttgtttgttggtccagggaaaaaactccttgttgctttaacatcttccaaatgacattgcataatacaatccatgaaatcagttgcagcttgaaatttcaccttatgcccaattctttcatccttagccaaaatatcattgaagtctcccatcaagagccaactttcttttgttgctatcccattcaaatccttccataactcttgtctccctattcgatcattgtaagcgtataacatagttaaaaaactgttgtagtgagcatctgtagtggacacttttaagtgcataagtttacttgtgcatttaagaatgttcacattatatctcaaagggttccaagctataacaattctccctcctctatgccatgcaatgatgcagaatttccatagtcttccaatctatgattgaggtactgtttgctgtgtgtgggcacttctctctcacaagggatttcgaaattctctctttttttctctcgtgattcggtgtgatccaaaggcatacaaag

SEQ ID NO: 348398 - DNA, 615 bp, Cannabis indica
atacttgtgagtagatctaagttcctggtaaaataaattccaacaggttggtcctccattccctacgaacacgattattacgacgtctagagtgggttacctgattgttttctgtgcgagcagtgggggctcgagggggacgtcgggccctgttctgtccatccacctcggcctgcagggcgcgtagctggtcctggatcgcggtatactggtcggtggttagctggacgatacactcagacactaccgccggagtcatgggcggaaagttccccattgtggctgctggggtagatgtttctccaacttgtgggccagctgttttagggaatagattgaggggtctgacatttccccgacctacttcgccattgatgacatccacagggggtgttctaatcccagacaacggaacgttcatcattccgatgttgatggattcgttgttaacacctccgtttgctcggtttccagccatgatgattttccttcttgtatttagtaagaatgtacttctccgttcccacagacggcgccaaatgttgtcgagaaaaattcgcaacaccaaaaatgaataataatactaataataagaagaaattatgtgaagaacaa

SEQ ID NO: 348399 - DNA, 712 bp, Cannabis indica
tcttcatctccactccagcaccgattcacccccaacctgctcccatcttgtcaaccaaccaccaaaactcaccagccaccctcttgatctctcagctgcaccatctcaatcttaatcatccatctcctttgccgaaaactactccgagccaccagttgcacctcaaccatttccaagtgtccaagcctagaaattctctccccacctacgtctcatccctctccccttcggcctgcaacaaaattatgtcgtctctccccttcggcctaaaccctaaatctcagacttcggcctctcctctttcgtcgaccacgcccgagatgccaccaccacccagatttcttgagagagagaagtgaggctccgtatattgaagaaaagaattacggttgggctggcattgaggatcttcagcaggtttatcgcagacggaaacggaggtatcaacgtcgcacatgaattcgtcgtggttcgaggtctcggcggccgcgtcgagagctacgtcgtcctcgtcagggaagcgaatctttgtgattgaggctattggggctgtgattctggagccgtttcagcagctggtgttggctggttagaattaggattagggtgtagtgagaagacgaagaagaagaaaagaaagaaaaagaaaaaaaatatttttaaataatttatttatttatttttatttttaaaattaaaataataatttgga

SEQ ID NO: 348400 - DNA, 1045 bp, Cannabis indica
gccaacatgtgtcacatgaggatctcttagaaaagggtcgggtacataataatctatattatttggctgaatagtaggagggatgtcctgctcgtctaatcctcttctacgatttaaatcattcttaagatcatgcatggtgcctaatcgatcgaagaccgattctcctagaggtctttgcgtctggctgttattaataatgggtagactcagcatattcgtttgagaacaaatgttatgctgatcatttcctcccaagtaatgagttggaaaaaatttctcatctatcatggcccacagttttactctgtctcgaattagatagcccattaacttgggtttgctgagtgtgttctactggacgcttttctggcccgtgctatggcctagttggactgtaagtatctaccactaactgttggtcagtgacttaatagtctcctaattagtatagcgacctgcttggaacaattgtcaatcacttcttgttgggctctcatgatttccatctctcgatccctccactcttgaaactggcatctttgttctacaaaagaaagatttataactgctctggtatcctgctggtcgtaattaaaagttttattgtggccttgtattttcctcaatgaagcttgcaagttttgtagttcggtgtcatcactgattggccatagagaatttgtagcagatgggattccaatacttggggcaatttgcttggtccgagtactagtggttccagtttcttgcatgcctggagtgaacctagccagaggggtagtcactctttgccctactatttatgggcttgttagtggccgagtattagtcggatcagggtctaacttaactggatctctaggatttgtaggtgtttgcacgtttggatctgtagctattggatctgtagtatcagtctaatttcccgtccatgttgttacaaccatcttgtgtcttgaaaagcttaaaataagacttttttcattgctctcaatgaaagtacttaaatgttgacctcacttttagtcaacgacagtgagtc

SEQ ID NO: 348401 - DNA, 658 bp, Cannabis indica
aaaaacgtgaaaactagttaaaagcatatgacaacacatacaataaaaaaatcattaaaaaaaataatttttatcaaaacaacaacacctaaaatcagaaaacaaacaaaaacaaccagttaaaaacttaacttacacaataaaacatcaaaattaaatgaaaccagttacattacattacattgcatttagcaatgctacaaaaaaacaaaattaaaatagatacaacaataaatataacataaaaaaaacagttaaaacttaaaaaccagttaaaaaactcacctataacattgattctctaaatacaatttaaaaatatccggttaaaaaataaagaaagtcacaaattacaaaacataacagaaaaaaaaaaccggttaaaaaacaataaaaaatttaaaaagaataaaaaaaatatagcaaaacatacaattagaaaattaaaaggaaaaaaaaaccagttaaaaaaattacacttaaatttttaaaaagaattttctttgaaaatgcaaaatagttataaaaaacaggaatgacaaataaaaaccaaaacccagtaaacaaaaaccagaaaacaaaaaaaaacaagttaaaaacataaaacgaaaacaataacacctataattttttaaaaaataaccggttccaaacaaaa

SEQ ID NO: 348402 - DNA, 515 bp, Cannabis indica
ttttactatttcagtgattgcttatgtactaaaccatgctccctagattttgatatttaccaaatcatgcccttcgaactttgacatgtactaaattatggcccctgaactttcatccatgttagacttttttactaaaattagaagaaagtccttaaatctaacaatctcaatagttcaaggggcatttttaatgaccttaaaagttcagggggcatgatttgatacatgtcaaagttcagggggcaaaaatcataattagcctttaatttattatgtgcaaatttaaatgtgaatactataaattatttttatttttaattaaatttaagtaaaaaattattgcatttttttttgtatttttatcgaattttactgattttacaatattattacttttaaactaattaacaagtttatttaaattattatctagatataaaaattgttgtgattttagttaatataatattaattttttattttattaaaaaattaatataataataaagaat

SEQ ID NO: 348403 - DNA, 1198 bp, Cannabis indica
cttggtattggcatggtgaacatgaagcgtacattataaggggtaaacatttttcatacaaagtcaagagaggatgctcgagaggttcaaaatagtggcatacgtatcgtcacagaaaccatgcattttgcaagtgcaaaagatagaaaccttgttttaggtaccatgacgtataatggggttattgaagaaatatgggagctcaattattttgcgttctgaattcaactttttaaatgttcttgggttgaaaataatgttggagtaaaaattgacgagcttagttttactttggttgatttaagtaagaggtgaagcaagaatgatccattcattatggccagccaagcagtacaagttttttacatttttgatccggctaatgataaatggtctgttgttttatcgacacaaaagagggaggttcttagagaatgaaggggatgaggagaatcaatactacaaacatggtattttttgtcagtttgcaattgacatatattcttttagcatcagttgctaaaaccgacgtatatactgtagatgcaaaaattatattattttgcgtcagttttcaacagtcggtacaaaaaattagcgacacttgaaaatagtcgctaatagtgtaaagaaaattatttacaacattcttgtcaattttgtaccgacacaataaaaaaaatttaaaaaaatagatttagatattcatcccgagatacaccaaaatctaaagcaaatacccataaaatttaaacaacacttagatctacacaaataaacatacaaagaaaatttaaaacagattcaaatacaaaacacaatagccaccatcatgaaatcaaaaccaataaatagacaatggttgtcctcttcgtcttcgtccccaactcaaaaatctgtacaaaaaagatgtttcaaccacgagattgaaagaaagagagagcagagaaaacttacatggtaaccggcatggtgtcgagatgaaagagaaaggaagaggccattcatggcccatttggctcgtcgctgtgtgggtggcagagccggtgtcgagacaagataaagaaatggagaagaaggtagcacgggatgatcgaaggaggcggtgtcgagacaattagatgaggcaatgtcgagacgatcggaggaggcagcatggtggggttggatcgattgtcaagatatatatatatatata

SEQ ID NO: 348404 - DNA, 526 bp, Cannabis indica
cccataaaattcaatattctttcgatgattgtcagccactgcttggccttaagtacatcaggacctcccagaaacactggaggtgcttgcttcctgaacctttcatataaaggctccatacgattaccagcaacatgcagttctgttggtaccgtaggagctgcaggaaccgcagcagacggttgcgaaggaagctcagcaggagcatcccgctccctgagtcttcgaatctcctcatcttgctgctcaattctggcttgcatctgttaggttatatttagcctatgttttgggtctgtaaagttagcattttctcgtctattagtgtcttttggagcggttttatgcttgattttcattgtttcaggttctcggggtgtcaaagttcaaattcagtcaaatggtgaaaagacgggacaaactggcaaaaaattggaaaaatctgctcgagatgcattagtagtcgcgaccaccaatgagccaggtcgcgaccctttttcatgagtcgcgacttcgagattttggc

SEQ ID NO: 348405 - DNA, 1659 bp, Cannabis indica
tacattgaaatagagttttatgtagggcacaaagtccaacaataagaataactttgactctcgcttgaacgggacatcgttggattcttattttaattgaaattatcctttagtttttcctcttagcttttcattacgaaatttcttagatagtatataattagacaaaaggtttataaatcatctaattatgatttcatcatattttcttttatcaaattgaatggcgtagatgactatactctagaaattctatctcgaaattatataaatcctcgatcatagaaatctcctacttgtatatgcttacttaaggcaacttaaacattgagttagattactagtggtggtccaagctagaataaaactcaagaaatgtttggtataaatttaagtctttcactttaaattttagattccaaataaaaatttaaatttcagtttctgagaatgcattggacaatacagtatgactttcacaagttgttaatatctattttctttgaatggatccaaactgtacgttaatgtatgaattacgggttttgtattctgtgaccaggatctacttagactattctaagaactctttattgtaaatatacctaagtcgtcaaaaaaccacaaccataatacatttctatggcatttgtatcttgatcatagtagtttttgacaagattattctctacaaagagtcaatacatgccattatccacttgaaagtaggatcatttgtatttgataatatgaatgttcattcaggggtggatatgagttatcgttaaattcttaatacgatcactctagatcttaccttatcaaaagaaatttgaaatgttagagaaatttcatgaagttctaataatgttgaaaaatatcaaggtaaatggttaaagatcttgctaactgataggggtagagaaatatttggctatgcggttaaaagatcattaagttgaacatcaaattatatccaaacttacctccccagaaatttgatttgcatattgatgatagcaaaaggtctatgattagttacaagtagtttcctaagttcttctagggaaatgttgggaatattttaccaggtctagatttactaacaagtatgttgaattaacatcctaaatatgaattctctaaaacaatgaaataaacacataagggtttgagaaaaccttaaattgattgtagcagaatataatgactccttccgttaaagatctctagcctttgaaccctttctgtagcagagcattatcaagatctgaacctagatctctttctctccttcgggtttcgttaccactgtcttacttactatgattgagtacttcacttgctatgtgtgggcatggcactcattcactataggtttcgaatgtgaagaacaatgaaggaggtgaaatcactaaggaaggaactctctcatctaggtcagatgaatagtcaagttgacaatagtttgtcaaattttcaggaggatgagataagattatcatgttcctttttttgtgtttcaactagggcttatggctgaattatatggattaaaaaagaataaaatattgagcgaaattcacttcttggtcgtacacttaataagaccaatctctagttacaatttagccactttatttcaaccacttattcttc

SEQ ID NO: 348406 - DNA, 1001 bp, Cannabis indica
tttctcagagagaaactctctgctagggtttcgaggaaaaaacctaaaaaaggaagtgattgagaagcttctggagtattgggttttgttcaaaggcaaaacggagtcggtttgactcagctgactttgaaaagtcaggaacagggaaaggtcaaaattgaccttggtaaaactgatttgtttatttgttggtgtagggtaaagttggaaaagacttaaaatttcctacaatggtatcagagcttggttaaagtttgaaaattcaacattcaaactaatcaggaaggaagaaaactcaagcaagaaatcaagaaacacaaacaagaacttcaagaactcaatctgatcaaactgaaatctttaacaaaggatttctgtgacatttccttaattaatctttataactaaattgcttattatttatctttatctgattttatctgatttcattaatcatgagcaatttaaaggtagacattgacaaattcgatggttatggtgattataggatttagaggagaaagattaagtcactcttggctcaacagaagctgttgagagtgcttaatgaccctatagaatggccagaagggactactaagattcaacaagaagaatacttggaaacaacaactggtatcatgatattcaacttatcagatgccattatcagactgatagacaaggaaaaaacccctgcccagatttggaagaaactggaagaatagtttcaacaaaaatccttaaccaacaagattttcttgaaggaaaggatctttggatttaagatgagttcatccaaaactcttgatcaaaatttggatgaattcttaaggatgcatattgaacttgaaaattctggggaaaatgaggctctaagtgatgaaaaccaggctataattatcctaaactctttacctgaatcctatagggaagttaagactgctattaagtatggaaggacatcaataaccctaaaggaggtgatctctgccctaaaa

SEQ ID NO: 348407 - DNA, 1281 bp, Cannabis indica
aaccccgaaccaaatccatcaaggccaggggatttagtattagggatactaaacatcgcagctctgacttctttgagagaaaaaggttttaagagatgaacctgctgatcaagggtgagtttagggcccatggctatgcaatcagcttgtatctccatggtggtaggcttagattttcccattatgcctttaaaatggccaagaaagtgttgcacaacatctggaaagtgatcatttaggacaccttggtcggtagtaaaagaaacaatcctgttatcttccttccgtttcttcaacatagaaagaaaataagttatgttactatctcgtttttgaatccaattaaccttgctttcttggtggagaaagtccaagtacattttctcctggatgtgaaattggctagcagccgcttgctcgaattcaaggaaatggttgttgtttgggttagcttgacattggaattgagcctccttgtagttgtccttggccttctcataagcatctccaatgttcccaatcgagtgtctgttgaaagcttttaacttgtgtttgagtctcatagtttttaaataaatctccttcaacccaccacatctaagaggcttgccccaactatctagcacaatgttcttgtagtcttgatgatcaatccagaaattatagaaccataacggtttgcttccaatactttctgtagcaaccgaatgaaccacacaaagacaatgatcagaataggtctcccaagagaaatggacagaagtattcgaaaaatcatcaacccactccttgttgtgaaacacatgatctattcgagaaaaaatcctattatcttgcttattggaccatgtgaaatttgaacgcatgcgctttataggccccaccgaacactgggcaatccaattattagagtcaacaagctcaaagtgactaatatcattcccccccttcctgtcatcatgatgaaaaaccgcattaaagtcaccaagggtgatccaagctttagaaacatttatcatggataaggcggtccaaagatcactcctaccttctatggtgttggctccatagataaagatagcaaagtaatcttttttctaccctatcattttgatatgacgatgcacatgttgcttagattcctcaataatttcaacattaacaaaattgttcctccaaagcaggagaatccgaccttccaccttattgctagaataaaagtcccaacacaaaaagctacttgccatcattttttcaattttttctcctttaatcttggtc

SEQ ID NO: 348408 - DNA, 687 bp, Cannabis indica
gggaagaacctggacgagcagctgaaatagcaatttataagctttttgaaggcgaactaggatcaattttcctagaggcatggggatataatagggatcgacccttagattatctgccattagttaaatgttgatccaaactacccattgaagagacgaaaaaggaggcccttgaattccgagaggcaaggggcactaaaataggaagttgacaagttgttagtcaacgattttataagtgaggtattttatccctcatggaaagccaatcctgttctcgtcccgaaacctaacggaacttggagaatttgtattgatttctccgatctgaataaggcgtgcccgaaagattgtttcccacttcctaggatcgaccagttagtggatgcaactgctgggcacgagcttatgtcttttatggactcatattctggatataactagataaaaatgtatgtcccagatcaagaacatacaagctttggaaccaacatgggactctattgttataaagtcatgttgttcggactgaagaacgctagggcaatgtatcaacgactagtaaatgaaatgttcgcaaatcaaatagggcgaaacatggaaatttatgtcgacgatatattggtgaaatcgataaagagtaaggatcatacctcaaacctcacggaatgctttaaaatattaaaa

SEQ ID NO: 348409 - DNA, 578 bp, Cannabis indica
aaaaaaaaaagaagatacctgattagaatgaggagccattgttgaataagaagtcgttttttagattgtcaataaataaataaaaaattctgacctgccgaattcgaaccagcgaccgaaggatagccattaccaactacagtcctccgctctgccaactgagctaagtcggtttgtattaatgtcaaataaaattaatcaatatttctttaaataatctgcaattattcttttttatacaaaaatattaaaaattggtactttcgtacatacgagtctatgccattatatatttatattatgttctcaataaaattatttattgcattaaaaataaaatcatcaaaaagtaaattacacctattgtcagttcaaaaaaaaaaattaaacgttttttctattatataagaagtgttccatatctttatatattaaaagtacttatttaacaacaattttcggtttaacgatgttattttgtttcctccgttaactttggcagaatattcccaattaatttatattattttttaacaaaaaattattaaaaaaaatacacattccgttaacataacatt

SEQ ID NO: 348410 - DNA, 863 bp, Cannabis indica
gatgttttaattaaagtagataaattctattttccaatttatttcattgttcttgatactcaacctgttgaaaatgctcatgctcaaatacccatcattttaggtagaccatttttagctacatctaatgcaattatcaactgtcgtaatggtgtattgaaattatcttttggaaacatgactgttgaattgaatgtttttaatgttgctaaatctgttgagtgtgaggaaatacatgaagtgaacatgattaacacggaaaatatgtttgaaatggacatgaatgaatcttttgaaacttatgcaaaaatgtttggaatgtgcttaaatgttgatgattttattcatgatgttaattctttgcttgagtctaccccactaatggatactgaaaagtgaaaagccaaaattgaaccatgtattccaatagagcatgttgagtcaagatctataaacctaagatcaaccagtgatattgacttagaaagatataacgataagtttatgatatcttatctatgttcaatatcggtccaatccgatgtatactctatatattcgatactagtatacttttccaatatcttgaaaaggacataatacttatccaaggtgtaagtataccttattattgattatcatgtcagtctaaatctagtgtactgaaaaatcatgggacttaaacttttgaacatataatcatgattatattccactgtgttgacaacactataatcatgaataactatatgatctggacttaatagaatttatacattaaacatatctaatcatgaaataaatcatgtgaaccatgcaacataaaataatttttgatcttttattaattagtaaatctgatt

SEQ ID NO: 348411 - DNA, 806 bp, Cannabis indica
ataatattatattattatttaattattaaatggttaattttttttaattttacaataataataataataataataagatataaagataggtaaatactattttggacgctgtgttttgtaaaagttactaattggaccctctgttttgttaaatgacaaaatgattcttgtattttccaaaatggtaaaaataggaccctgggcttaatttttgacaatttttttttaatataaccaacttgaagacaattcctaatacaaacacatacagaaaatgtaaatagttttgtcataacacttttagatcgaattactattaaactttattttgacaaaaaattagttcaaaattctagttgtaccattttaaaaaatacagaatctattttatcatttaataaaacaaaaagtctaattattaacttttgtaaacgcaagatctaaaatattatttagcgttggatatgattattagacatttatacttagcattatttttccttcaacagtaagtaatatcatccattaaaatatgctaaaaaaatatatctatgagaggctaagagataggaatgctgcagttttctttgtctgatgactttctatacgtgtcaaatgatatgttatctatcttcttggctttcatttccagtcgattctttcttcttactgacaggacaacatttttcttctgagttttgtttttaaaaatattattttggatcttgtgttttctaaaagttaccgattagactttgtgttttgttaaatgacaaaatggaacctgtattttccaaaatagtaaa

SEQ ID NO: 348412 - DNA, 590 bp, Cannabis indica
aaattaataaaacaaaataaagaagaaagaaagaaaaagatacaattttggtataatagtactagtaaaatctgattgtttttcactctccaaattggtctatttatagagctaaaatgatcccattacatgcattttcatgtatcacttagtggagaaatggctaaattaactagtgaagtgggacacgcatgcgtcatttctgctggagagagggagagccggaccacgtaatgagcttagactgcttcaagtggaaattgatatgtgggttccaccactcttttgcttttgaccaaagacccgctcacataaattggttgtgatgataaggataaggaaacatatttattgatattacatttggacttttgtcatggatcaagtccaaaagcccaaaataacgtgattagtcttcatctccttatatatataaaattgcataggagaaggcatgggatagttggactttggtctcctcctaatactttgcagtttgcacaaatctgaaaaatgacacaaaaattaaagtaaattaaatatttccaataaaaataaatttaccattaaaacttataaaatatttaatt

SEQ ID NO: 348413 - DNA, 353 bp, Cannabis indica
gattttctaggttcatttgagttaaatatagcattgagcagctggatttgatgtttggttttagttttgtgcacatttaagcttcgagttcaaagctttgaacactaatggcataaactattcattaggtttttctgtgatatactggttggaaaatattgtgtatgcattgtttaggtactctggaaagtttggtagcatttggtggaaaattgagcaagaggtaaagggcttggggagaactggtgcaaaccggctagctagttttggtaggattcccgaacactttattttctcaattttcgtccatttcagtaccatggttgtgttggaaattaattttaccaggatct

SEQ ID NO: 348414 - DNA, 653 bp, Cannabis indica
actttgtccaaagacgatcttaaactctcaagtcccgagctccaattgtttagtccaatcttagatattactctcacctataccatcaaatggataaataattattatcattacattctacattcaaaatcgagtccaacgacatatcatatgactatatttaaattttggggttctgaagcctcacctaagcggtgcacattaactatcgatggcagtaaaaatcagtgtaccagaaatgtcgccaaaaataggggtagtatatatctaaacaaccacatcgacaagtagatcacactgatgccaactgtttgtcaaaacggtacacaatatcgccggaaattcgtcagaaaggggcggagctacaaaaatgtcaccggaaaaagtagtgagttaggcaaaatagcttagtgtaggttgttctcctcgacgagttgagtctagtggtgaagacaacctttcaaacggacaccggaggtggccagaaaattcgttcaaagtttgaaccgccaaactttgacttgcgatcgtgagctaacggcggcgaaagggtagcttggggggtgaggtcactggcacttgggttttgtgggtttcctttggttatggccttgaaaagagagagagagagagagagagagagagagagagag

SEQ ID NO: 348415 - DNA, 1746 bp, Cannabis indica
tggggaggaagagtttcccctctcgttacaatgcgtataaatagaaagatcgtgggatcaatgctgaatgtaaggatcgtgggattgacgctgaatacactgatagaaggatcgtgtgtatgccatatccatgtaaattgatccctgagttatagggattgtgtttggccattctatgcggattagtgaatactttgctctgggcatgccagtgaggcatcctgctcggactgtgcttccctagcatatgttccaagtagagtccacgggtcaccattcatgtgatgccacatcagagtgcaaaaattgggataacatttccccccaagtctgtgttggaaattattttaccaggatcttagatctactcacaagtatgttgattagcaccctaaatatgaacttctaaaacgattataaaattaaacacatataaagtatgagaaaccttacattgggtgcagcggaataatatgtctccttccgttcagatctctaacccctgtatcctttctgtcacagagtattatcaagatctgaaccttgatctctttctctccttcctttaatgctgaatctccttcttgttgctctatcactaagaggttcgaaaatattcaaggaagaagaagaggtgaaggtggcggctagctatagagagagaaggctcatgtttttctctgaaggaaacaagatgtgaaagtctatttttcctgaagccatcactatctatttatagcatgccacatagggttaggtttgaattattttgcattaaaataatgaaaatatcagatgataaaccctacaaaggtggccggccatggcatattggatttgggcctaccaattttaaatttaaaaatattatggctagaatatttataaaaatatctaagttaatttcaaaatttattaatgatttaatttatcttataagataattttaatataatatttcaaattaaaaggataaatttatcttttaatttaaaatatggctaatattaaaatatctgatcttataattaaataatatataagtattaaagaaattaacaaatttttaaaatctaaccataattaaaaaataaaataatcaatttttaaatttaaatctcaaaatatcaaagaattaatactaatctattaacgttaaatattattaatttaaaatgcatatttaagttttaatatattaaaaataatattttattttgatttttagtatttaaaattgggaaaatttggaaaacttgaaaaaatcccacaaaattcaaattttaggtgcaagtgcaccttgttgacctcgcttttagccaacgacaatgagtctaatttgtaagcgacaagtagtataatacgagtgtaatataatatagcaaataaagacacaagaattttatagaggttcagccccgagcaagtaatagcctaattctcgtagcttgtattgacttaagaataaaaagaatagttccttttcttagagctcttacaatagtgtctctgaatatcaattcttagacaagtttttcgaccctttgccaagtgagtatgaatcactatttatagggctataagcttgggaggggagtatttcccttctggttacaattgatataagtagaaagattgcatagtaaatacagaatacactaatcgtgggattcggacagctcgccatatctctgtgatctgatccaaaagttatagggatttcttcagtgactcacgatgcgaaag

SEQ ID NO: 348416 - DNA, 838 bp, Cannabis indica
atttaatttcaaaacaattgaataaatttttaagaaaaatctttcaaactaaaaacaactaaaaatatcaatgattcgtaaatgcatattttaaattaacataataataataataataataataataatataatgattcacatgtgcaaaatattataaataaattttctcttaaaaaacagttaataaacattcctaacaaaaattcataaacttataataaaatacactttaaagtgtgaattttattgacatatatatttttgtcataatcactttaattgttcagaaaaaataagtaccaacaaagaggagaggtctctttcatccaactaagttgatgttagaattatatttgcatattagagacttgtattttgtggtcactcttgtaatttgagtgctaaagtgctagcttaattattttatggctgatttagttaaaaaggatctccatcaaaaaattaatcttccacacagcatgcaagatttactttatttgattttttgtctaatgaattgttaaaaaatattaagaatatagaatatcaatatcaaaatttaattaacatcacttatcattagacaaattagaatatataaattataaattgcctctttttaccatgaaagcaatccatttaaattagaattactgcttctttataagagaaatcaaaggtgtatgggttcacttacaatctcttaaagaaaagttgtcacatccgaatgtggaatgtggaattctcttctatgtctttagggcaggaccacgatttgtgcattaagtcagagagattgctttcatcaatcgacttagaaaaaaaaagaaaaaaaa

SEQ ID NO: 348417 - DNA, 964 bp, Cannabis indica
aaggctaaggctaaacaaccgtgaggtgaagattgtacatgtcgagggcggttaggcctggagcgtacgatctttgggatatcagggcttttactgtatagtcgctaggggacaaacttttgaatatgaatagttaaacttttgtaaatatttttgtaaacgggatcccgaatttttttatgtctgatattttatgttttaatgaattaagtaaaattttaattaatcacgttttttgttaatctcattgattagaaacgagctccacaatacattaaaaaaatcacactaacaagcctaaattagttagggtgttacaatttggtatcagagcttccaggttgtcttcggaagatcgtcacgacatgtacaatcatcatcaacgatcagctcgtttaacagttcagtaagcttttattgctttagtagtttattttaatagtatgatttaagaaaagcctgttagcaagcatgtgagtagcctgatagtagaataggcacatggttttaatttccaaataagtggctattagtaagtttttacttgatcacgatctgaccagaatggctcttggttacgcaggctgttctaaatagtacggacgccaagcgaaacaccaggagccaaggtaatttggtttgatctagtggtggtcaaggagcttagattccccttaatattcgtggccggggtgatgctaacccgccacaagccgcccaagctgcccaagattgggaaaacaggtttgcagatttgcaagccagcattaatgaacaagatgaagagatccagcgtttgagacaggaggttgctcttacaatccctgctccagaaataccaatagctcctacccctgttgtgcaggcaggacctgtagctacagtgaaccaaatggaacccctgtatgaaaggtttcgtaagcaggcacctctagttttccagggaggtcctgatgtcatgaaa

SEQ ID NO: 348418 - DNA, 503 bp, Cannabis indica
gtaatgctgatgatgatgaagaagaaatacgccaaaatgatgcaactggtgtagaatttggagttgatgataatatagatggcgatgaggatgatgaagaaatagatgaatttgatggtgtctcacatactcaacaaccaactaatatgcgtcgtagatctactgagagtactactagtaaccaacaacgtggtaagaataaaaaaactaaggttatggatgaaatttctacaaatgttggtgcattagcagattctatatctaatattgtcccgaagtttcaaggattaattgatgcaatatctgataaggatgtagctgagatgcaaaccaatttattcacagaagtaagcaagattaatggcctaactccaatgcagtgtattcaagcaaccaacatattagctaaagaacccccattgatgcgagtgttttatacaatatcagatgagatgaaactgctatatatcctgaatatgttgcaaaatgatgcataattttat

SEQ ID NO: 348419 - DNA, 1720 bp, Cannabis indica
tgttctttcctcccgagagcggttttttgtatttcccccatcagggtacgtacgagtcctcgctctatgagtttgggaagaacgctggtgattcctagcaggtgatctccgttcccctggctgagttctaagatcctcctcattttcatgagggatttctcgttcatcaggtcccagttgtctcctttctggatgttcatcttgattctcagggggtgtctcattttccacgggttgttcttctcgagccttttcctgtctcctggttcgtgagccacgaggtttgcctcgtggtcttctcacttcgccgaggctgccgctcgtttgagctcagtgtttcgacgctgcgcctcttccagacggcatcttaggtggaggctttccatttcataaggtctttctcccacagattaggcacctccacggttgagctcttcatccctctccttcccacactgagttctcctcgaatgtgtcatccgtgtactagggccaacgttgggttgatttctctgaggacgtgtagtccgagcactgggaccatcctcaagttgggccctcctgaaacgggtggtccttctggacagcagattagttgatcttctagagcccataggatttattcaagaatgacggttagtttcctcatgtggggtgttaatattctctagatttttagccataaaggagaagatttttctttgaaagaaaggaaggcttttttggagtttttttatagaggctctcaatgaaagaaccaaactgttaacgcagatttttgttaaccgaatttgagcctcacgattatgattcaacacataaataataaaactatagaaaaataaagatatgaacaccagatttttacgtggttttgcagttaaaattctgcatagtccacgagtcaatcttattcagatttctgagtatgttttcttagggcctctcgtataagagttttttcgtcccttttttgagattgtctgccactatttgtaattgcatagtggcggttaattacaaggatggcaaaaatgtgattatagttattatcccttaaatcgtgggatctgattacatattacaaaatgtaaacgcggtgcatgattttgaaagtcatacagttgtgattttctcgcttaaactgggtcagaaatatcatgtattaaacatgtctttaattattgattctggagatgtgtcgacagaaacttgattgtagtgatcctaatggcgagttggaaccactcttctttccgagatcgacaagatgtgtcttacatcgatcgcggatatgagaaaatctactgacttgccagggttgtgagtctcacttccgttagttggatgaaactataggaagtttcctcgtagcgagatggtcgtctcacattcttgtattctgagctagtttgacttttatacttattttgcttattgcaatctgaggtatgtgttactcttctctggtgtctcactattatcccttagcgacatattgtttctcattaatagtctaagtaccagttcgtacattgattcctcgccatggcaccgattcacattccctttaacttgacacgtgtcctccagcggaatttcgggtataacaataacacagttacgaattttcttcagttgaacaacttttcagtgcttttcaaaagtaattaagttgtgtagtttcactgattgagcttaaattactatagatgggttt

SEQ ID NO: 348420 - DNA, 401 bp, Cannabis indica
aaataatttccaacatttatacccactaaaaactagggttgtacatgggtcggtttgggcggtttatcttatatattttctaacctaatctaaagtttgtgttgctaaaatttaagtgcaacccgcccaatttaaaaaaaaaaaattgtaaactgactaacggtttgggcggtttggtcgggttaactcgcccaaaccggccaaacttttttttttttttagtttcaaagtcaataaatattaaaaaaataaattaaaaatataaaattccaccaaagcacaacacaatatatatgactttgaaactaacaattaactatataattttatattattatatatttaattttttttttaaatattctaaccatataaaatatcttatttttcaattagtttat

SEQ ID NO: 348421 - DNA, 689 bp, Cannabis indica
actcagtaacactcatgttttctttctgggtcaattgagtgaactcctttcttttggcacttctgactgcctcgttataatacttggcattaaacagctcctagaatttatcccaggtcattgtggaaacgccatgaatcatggacaccatgtcccaccagaccagagcgtcttctttaaactaaaaaatggcacaagccaccctatcattaccagtgacgcccataaagttcaagatcctggtgatcatagttagccattgctcgactttcataacatcgggacctcccaggaaaactggaggtgccggctcacggaacctttcatacaggggttccatctgattcattgcaacaactagttcggcctgcatagcaggggcagcagatactggtatttttagagcagggactacaggagcaccatgctgtcttagccgccgaatcactttatcttgttcattcattctagcttgcatttctgcaaacctattttcccaattttgggcatcctcagtagcttgggcagcttgggcaacctgtggcgagttagcatcaccccgaccacgtgcccagcccctgggacctctacctcggccacggtcatttaggggaatctgagctccctgaccatcattggatccaactgaattgccctggctcctgttgtttcgcctggcgtccatacta

SEQ ID NO: 348422 - DNA, 580 bp, Cannabis indica
gtagtgcgtctaagaatgctgcctgaggtttagtaggtacgttttcattggcttgccggtatgccgcttgcacgggacgtggcctaaacctccaaaagacgtcgtggtgcgccttggccacaagtctcaacacgagatgacacgagtagtcattcatgggctagtttgcatacgctcatgggacggatgcaccatgatggaaagagacagaggtctaatgtatgcaactagtttggtggcttgtcttgagggcctgcctacatgcatggaggcatggtgcctcaagaattggtccatggaatagtatgggagtccttgggagatgagggagactgttcagacagtatcgaatggggcatgattagaagcgttggcatgtcagcttagtgttggcatcttgccgcacatgctaccatggtcacgagtgattaggtgagtgacggtgttgagattttcctaatcatagtgagaatctatggatagtgcgagtatcttggctaaagagcctcgatgcatggatgcactcatagatgcttgcgagcatgactcggtgggagttgttcgagagacgaaagtgtgc

SEQ ID NO: 348423 - DNA, 698 bp, Cannabis indica
acaaaacacagggtccaattgataacttttgtaaaacagagggtccaaaatggtatttaccctagaaacaataataaaatattatactagccatattactattttatagtttttgagttgaaaatcttgtttttgcaaagtgaacctgaggttgaagatgaatcgcagggagctcgactatgtcagttgagatagtgattttagtagagctcgactatgttagttgagattacagttttagtagagctcgactggtgtcggtctagatgacaggcgttagggtagagctcaactagatttgatcccaatttatatttttaattattaaaattttttcatcaatgtttgctaaaagagtaacattcaatagatatgataattctaatagagctcaactagcttgaccaaaaatggtcaagatagtgttaatactccattattgtgaaaactctttgatggacacattgataacacttaattagatttagttaaaaattggacttgttaattataatttcaacatcaatatattttaactaatatcactactacaaaaaaacacttttggtgtcagttctaaaatcatttaatttaaaaaattgacaccatagagtagctcaattttatggtgtcggtttataactgacattaaaaaaagcaatggtgtcagttacctaaccgagactaaagcctaaacc

SEQ ID NO: 348424 - DNA, 899 bp, Cannabis indica
acaaacacacactattttttttttaataaatcacactaaacataatgtttatttaattaccaaaaccctgtcatgagttttgtacgaggaaaatacacattttataggtttatttacaatgtgtgcaacttttcatcagagaaaggttattctaataggaaaaaaattaaaaaaaaaaaagggaaaaagatttgggtaaccacttattttttagggtaacgagttatcttcttaaaataactaatcaccttatagtatttttttccaaaatttttaacttttttttcccaataaaaaattacattttttcaaatttatatcttaaaaattataaaaatgaaaatttccctatttttgttttattttattttattagcatttattttttatatataattatgtaattataattaaaagaaagtaaaataggtgtttttttttcttgaaaaggtaagtaaaataggttagtgaaattgaagttagagaaaagtaacaacttaattatgttgtctttttttttttttttttgttgtgaaaattagcgtaatacttcattagataaaaacataattagacctcacggtcattacagagcaggttctccgacaaggcggagaccgaaatacatccatatatttagtggataaacgcccacttagccacattatgggcagcatagttacattgtctactaatattcataaagttacaactaataaaagaaagagtggatctcatacaaaaggagacatagttctcaaatgcccaatgagactccttcccattgagaacattgatagctagtctcaaatcactctcaataataataaactttaaccctaagtcaattgccagagaaatggctgaacaacaggccgctgcttctccgcacaaagcat

SEQ ID NO: 348425 - DNA, 585 bp, Cannabis indica
ttggtaagctcaatttttttaaaaaataaaaacagataaataattagcatcaaatatcagttcaaatattaatgagatttgttttatttttatttattattttattatatataaataatattttattattttattaaatataaataaaaagtcacccatgaatttctcacaaaccaagaattcagttatataggcacactttatatagaatagatatatttgtaaaatgtgattatttagtaataaaattatagtttttgttgcggtatcaacccaagtttcatattggaagaatagacaagttgtcttggatataagcgtttcaccttttcctttagtatgaggtgcccgaaaataaaaccgtgagggcttagacccaaagcagacaatatcatactaatataagagtcaatgtgaggtagcagcccaataagttggaaaaacggggcccaacagttttaacaaattttgttgtaaagtgattgtaatgaccgctctagtttatggattagtaaaggcaattagcactaatttttattattctattattatttgtgaattaaattttaatgtggaccccaatat

SEQ ID NO: 348426 - DNA, 516 bp, Cannabis indica
aaaatcatattgaaaaccataaaacaatatcaaacaatctccatctagaccctaattaaatgtttagctactcatgttcattgtagcaaattcacacatattaatttaagaaaagagaagagaatagagaagaaaagaatgtttaaaacccagttgaaaaagccttcgcaattgatttttatctctaattttcgtcctccttcattgcttgtcaaaaactattgaagtccaattcttatatagccgaaaaatggtaaaaaaaatataaaaaaaatgctaaaaaacttattttgcttaagattagaaggggcgggccacggcccatgatttccatgcctaggcgcgcccccctttatttgggcagtgagttttctcactacaagaattaccgtttttaggggcggaggggtccgctggtaataattaataaatccgccggtaataagttttagcggcggggtccgccggtattgctccgccggtaataccccgtcgctattaatgattaataccggc

SEQ ID NO: 348427 - DNA, 991 bp, Cannabis indica
agttcctggtaaaataacttccaacatgaagttcaaaatgccaacctggaaaatgtatacaagaaaagaagatcccttatcacacctaaaatattttgagatgtagatggatctacaaggggtaaggggtgatgtacggtgcagaatctttcttgccacactcgcaaaggccgcccagaaatggtattttaaattgcctccaagaaggtttaattcatggaattttttctcatcagagttccatgcacaattttcttcctcccgtcaacttccctcaaacttagaagacctggtggaagtgaagcaaatgccaggagaacctctcagagcttatattagaaggtttatgaccacagttacaaaggttaaggggttgactgaagagggaagactagctgtattactggaggcattgagcctctaggagaactatggaaggacattaaaagactaactgtgggatcaatggttgtattcctagatcaagcagatggattcattaagctcgaagaagcagtacgacacgtggacactgtcgggcaaaagaaaaatcaataacacgctacagtggcaggagtgtccgtcgagaatccataatatcccaacagttcaaattcaaataggaaaaggtctaacaacgataataggcagggtaacacaaagaaaggcaaatttactggcaatgccgagcagcattctagagaaaatgcctctaaatttattactttctcagtcctaaccgatgacatagaaaaattatatgcaaccacccagtctatggtgtcgtacaagaaaccatatcctatgaagaatgatataagcaaaagagatacaaccatgttttatctgtaatgaccgcttttttaattttggattactagaggtaattagtactaatttctgttaattttataattatctatgaatttatttatttgtagaccccaatatttagaaatgaataatagagttataatttctcaattccgga

SEQ ID NO: 348428 - DNA, 1198 bp, Cannabis indica
tttactagttgccgaaaacctcggtcaacactaacatttttctaattttataatttaatttaataaaatatattttaaaaataacaaattttgaaaaatatggttagtaatttaaaattctaactagatcatcttgaagttttattaatattttaatgtcaaaataagattatttcaaattttattaataaaataagtaaatatctgatcttataattaaaactaatgaaataaataaaaaataatcaaatttcaaaaataaccataaaggtaagtttgtggaaaaatcaattttttaaatttaaaggctactaatatctaaaactaatttaaattaattaaaaaattaataaaaattaattttaatctgataattagatttttatttaaaaatttagattttacacaaaaatctaccaaaatttgaattttatttcattgaaaaataatttttaaaacacaaaatatcataaaactaagattgcacatgggagtattgcacgcgcaatgggactggaatgggcgaggaaaaggctgctttcagcctacttgggggggatttctcagccaactggggcttcaaatagcccttgtccaagaaaactcggtcatgagcttgtctgaagctcagtcatgaccgagtgacacccacagctgcttgcgcatgtgcaccttcccttagatattttgttttcaaactttaaaaaattataactaatttaataaaaatctaaattaagttctataaaagcataaattcattaatttttcatctgctttccaaaaaaaaatactttcaggatgaaactaaaaatatttttcatcgaaaaattataatttacatacattcatcaaataagcatataaaccaatatgaacacatccaaatcatcacaatcattattttaaatctattattcatgaaattaaatcattaccatggctctgaggccagttgctggagattattttactaggatctagatacatgtatgttgattaacaccctaaatatgaattatctaaaataatggaattaaacacatataaagttaaaaaaaccttagtgccagcgaaataatatatctccttccatttagatctctaacacttattcctttctgtcataaaatattatcaagatttgaccctgattctccttctggtgttggattcttcataatcttacacactatga

SEQ ID NO: 348429 - DNA, 1011 bp, Cannabis indica
cgacaaagagtagggattttgttagggttttttctgagactgtcgcctcagggctttaaccatagtgaagctacaactttgtatttgagggccttttagatctgagaaggaagaagaagagtcggtgagagagagatcgatgagaaggagagagaaagaacgagagagagagagagaaaaacaaattagaaaatagagaattaaaaaaatatactaattttttatttattaataattttataaatttaaattattctttttaatttcaaaataaatttagaaaatactttttataattttgaaataattatagtaggtggtccattataaatatgccacgtgtacatgatggtacacataggcagtgtatgtcagcaattaactgagataaatggatggcaccttaaatttgctaatagtttaatagtttggatggttttaccactaaaatttgaggttagatggttaagtgtaagtaaaatgatagtttggagggtttaaccgttaactactcaataattaataaatttgaaattaagctagatatttttctagatattctaaccataaaattttcaaacttaaaattggttgtttagttaaatatttaattgtttataaagtataagttagaaaaatgatatttatgctattttatattattttagttatcagatatttataaataatattttaaatatttaaatagcctagataattttgtagaaatttaaaaaaggcttaatttgagatattttgttttatattttggataattattatttgtttatgtttattattttattcttaaaataaaaatttcctaaccatatttattttaaaattgatttattttattattttaattttattaaacttataagattagaaaatgatattaaaaatatctatttggttatttcaaatcatttatcttattagatatttaatttaatttgataaataaattcaaataaacctagatattttaaaattaatttaaattttaaa

SEQ ID NO: 348430 - DNA, 1318 bp, Cannabis indica
atagtagaaaaaaattctaattatatgctgatattttagtcttgagatttatcagtgcactgacatgataatcgacgatgtagtctacttacactatggcaagcggtatgtcttttctaggacattggtaaaatagacttgtatcgaatgtataggtttagatttgacttgacaaatattgaaaagcaaaaatattataatcttaccgttatatctattcttagttaatgtctttttaatttttttatagcggtatttgttatagttacagtatcattcctgtaaatttttgaaaaatttcaaatagtttacaataccgaaaacagagttcctgatattccagtctaccacgtacgttcaaaaaatttcaaatgtactttcggcattgtaattaatattcgaaaatttttagaaatttataagaatgatgttataagtataattaatactgccatgaaaaaaaatattctggcatatattttcggatacggagattgactaagaggttgtaataggaggttgacaataacactaatattttttctttgatgtactcttttgatttgggccatatttctcttcacaaaagataggaaaattataaataaaaaatcaaataatcaaaaataacatacgtatatatacaaaaataatttaaaaaagagatattttattttaatatatatcacgtatatattatgtgaaagaaaattttgaatgaaaatgaaaatgaaaatcatgtagtatggattttaaattataggaataaaaaattaaaaaaaattaatatataaaaaataaataaataaataattgaaccacactacacaaatatttgggttggccggtgtgttgatatagagaccaaaggttcaagcattatttaattggtatatatatatatatatatagggacatgattttgtcccgtgattgtactttcacggaatgtattatgtgatgtacgataaccgttaaatgagagagttatttgatttgagggctaagattgatctagaggtaattagggttaaaaaatagtatcgtaccctaacactcatttaatgtaccctgagacccatttaatgtaccacggaatacattccgtaaaagtacatcacgggacaaaattgtgtccctatatatatacgtgcaaaatcatatgggaaataaaaaaagcaagattaaaaaaaattaaatttaatctcaaaccactctatatttgtaaaattctcatatcaagatttgttgcaagaattatcaataactcaaaatttgataccctataaaaagaaaagctttgttgttgatcctcaag

SEQ ID NO: 348431 - DNA, 780 bp, Cannabis indica
atatgcctagagatggatctggtccatcttttcagctaatgggttttcagcacagcaatcgcagcagactcctatttcatttcagcaactactacaccagcctcatgttccttcatctgcacctttaacccctgaacaaatgtttcaaagtcagatgttccagtcattcttgcagatgatgtcacagtcgctaaacagttcgcaagtaatgatgcagatgaatgacatagtcacctcagacgtctcagatctcacagtcttggatgccacaaatgatgccaacacattaaatatcacagatgttgtaaattgttcagatgatgccgacaccacaagggcagcaatatggggagtagacattgcaaatgttgcgacacaacatggacaatatacatctcagatgatgccgacaccacatggaccgcagacatctcagatgatgacgagttcgtagatgccgccatactatccacaaataacagatgttccgagagatgatagtgatgatgacaatgatactacaaatttcttttaaaatttttattttcattttatgaactatcgattttatatctatttatgttttatgaacactcacttttagtaagtactcttaatttaacgatattgtaatatttgtgactcttaatattatatatgaaaatatttagtttttttactcttaattaaattattttgagggcgtttggtaacacttttgttttaaattttttaatcacaaaaaataaaagtaaattttgtgttttaaaaaaataaaaa

SEQ ID NO: 348432 - DNA, 654 bp, Cannabis indica
ttttcacaccctttagcttccctttttataaatgggattgaaaaactgcctctaaaggctaatattgtagagcaattgttatacccaaaattttgctggtacttcaaaggatgacacgtgttaaccttggagaatacaaaacaacaaatataatgagaattatattaaagaatattaaatggaataactcattaaatgcaaagtcaatagggtaagtttatgactcgtagactgtacggtctttagcaagacaaggatgtacgaactattgatttgcatattgatgagaaaccattttgcgtcaaagaacacagttgtaaggaggagatcgataatacgtagtgaggcatctacctcgcaatacgtagagaagtaatgacgagacgtgttggttaatagaacacttagcatataatatacattatactaactaagtgtaacatcctgaaggacatgaatggcgattagcaagacatccatctcgatataggaaggcataatcttggtaccttcactaatcagctccaaacaactttcagtgggctccactactctgtcacatcagctctctcataaagaagctgacattcaaatgatgttggctgctgaaattcatcttggcacaaggaactgcgatttttagatggagcatta

SEQ ID NO: 348433 - DNA, 761 bp, Cannabis indica
gccgcaagcttgatgtattccaccttctaatcgaatcttaatgaaactccaagagctcgaaatcccttcgatctccttgaagagtgcttgcttcctcccgatgcaagacttgaaaagcaatctcccgaaagctttgtaaaaccttctcccgaaggtagcactaatgttcttcttctttgtagacttgaattacagactcaagacaatacaaaatacatataaacagggtaagagtcgaacaagctcttctctacaaaataaagacactctttccttaagatatgaatacaattctaagtgtatgaaagagatactaaacctagctgctataaggtgtagttataatcaatatacacattattgacagcttacacacggagtgaacaagaccccagcccaatagctagaaaattcccttaaataaaatcttcaatcagcctaggaatttccatttctgtacacatagaatcgtgggcagaaagtacaacttttcttttatagaaaaagaaaatttagctccagttttctattcaagaaatatgatctaacaaaatgggaaactcacaaaagatcagaatatacttgctggttagataagaataaattgtgtaatcaaactcacaatttttacctcaattttcttaaataggaaagctagacaactttcctttcaagtttagatacacaaaatatggacaccaaattaaaacactccagctgaaatatacaataaataacaaactatttttgtcaattaaata

SEQ ID NO: 348434 - DNA, 538 bp, Cannabis indica
catctgattcctagagttgatacgagcttggcatagtttttctcgcagaattttccgttatcatgaaactcgagggccaatcatttgccctgatccattagttaggatatttcattcgtttgcgtttgccctcgtgtaggtattactcttggacactttgcctctgggcctaaatcaaatcctgaacccgaattggccatatctacacaactaacaaacaaaatttaaagttagcattatatatataactagtaatgtatatgaaatattaaatgcataaacaaattgttaagtattgagcataaacaactacaatataaagtaagctatatatcaagttaccaattagacatgttttcttttcattttttgtttatgtttgcctgaatcacaattgacccatattccctcattgatgtcgtttctaatgtattcagcgtcatcttcctcaaggttacgatcaattcccataacttgctcatgaattggttgtccaacaatgaagtcatcataacataagtcagcattctcctcatcc

SEQ ID NO: 348435 - DNA, 677 bp, Cannabis indica
atagaatcgtgggcagaaagtactaatttttctttataagaaaagaaagtttagctccagttttctattcaagaaatctgatctaacaaaatgggaaactcacaaaagatcagaatatacttgctggttagataagaataaattgtgtaatcaaacttaccatttttacctcaattttcttaaataggaaagcaagacaactttcctttcaagtttagatacacaaaatatggacaccaaattaaaacactccagctgaaatatacaataaataacaaactatttttgtcaattaaatatgccaaaattagaattaagaaaccatttaatattagagttaaagaaaacacgattaagaaagtaaaatatgaagaacgcactcaattttttatgtagttggagcattaacgagaattagtccatgagtccgtattattatgtattttgctaggaaagtcctagggaatacaatgaatatgatcactctataattgcctgagtaattaagccatttctctctaatgggataagttttggtttaacttgtgcagcctagtccgtggggccaatgtatatatgctgatgtggcagattaatcatggtcatagtgttaggttttataccctaaataaaactccatttcaatgtaatcttttttattcaacatcaataaacaa

SEQ ID NO: 348436 - DNA, 780 bp, Cannabis indica
ttaatttaattttaatttaatttatttacatatagtttaattaattaaaaattttaaaaaaattatcagtgttacttataattaaaacatataaaattataaatataaatttaattaaaaacattttttgaatagcaaaataaataaagaatgtatataaaagatgggaagaatagtatataaaggaaagataaaaattaaaaagaaatactaaatgatacttatggtttgtaatatgtttgtgggtaaaatatataatgagatttataagtggtgcttgctagcatgcccatagcaatgcttaaaaattaattagtctattcctctgcgtgtcaacgttctagactgtggtacaaaaacacagcacacattctgtgttttgctattgaattttgtaaaggaaaaaatatgtacataaaaagaagttcacgtttgagagtgttgagaccaccagtttatactaacttccgtgatatatgtataggtgtggccaagctagccctcccaccaccgtcaatccctccacgtgtcgttatctggttaattattttgtcaaccacaacctgggacttttcttttcttttcttttcttctttaatttgagggtaaataccattttaaaccttgtgttttgcaaaatttataaattggatcctgtgtttagttaaacgaaaaaatggaccctgtattttataaaatagtaaaaataagaccctaagcttaatttttgacaatttttttttaatacaaccaacttgaagacaatgcttaatacgaaca

SEQ ID NO: 348437 - DNA, 840 bp, Cannabis indica
gattatatgtaatagggagattagataattgactgcttcagcgttatctgcgggattaatagttttattggaaattgaaattacattcattaataggaattaagaatgattgttgagtgtggaaaaaaacctttaactatttatatcatgtcgtagtctcacttttaacttatttttatttttatttatgctattttattctaaacataaaaactcccttttctaacttttgtcactaatttttgagcatttaaataaacatagtttttgtgggatcgatccttacttataattatactaaaataattgggtattggaaataaatatcagtaaatttgttgtgacttacaacacgcctcactacactctaattttaccaatattattactctaattcactcatttttttattaaaataagtaaattaaaataataataggagagaatgaaagaaatgataaagtgtatttatctactctaaaatctgatgatttttttattgtcaaatgggtctctttttatagaggcaagcaagcctcagcaaaaataactgctagtacgtgtaaaaataaatggtagtaaacataggtaagtggggagagagaggtatgctccgtgtgaggaaagatgttggcaatccatgactttgggtcgtgtgatttaatggaattgacttgctgaaataaaagaaagagttgctgaacacgttatgattagttaaactggatggagattaatgagcttcatcaccagttagagaatggaaatccaaagctaattagcttgatgatggtggaaattacacttactataaaattttaaaaattcttatgataaata

SEQ ID NO: 348438 - DNA, 906 bp, Cannabis indica
tgacattgtcactagaaaaatcattgaaaaaattactaagaaaccgatttcttagaaaccggtttcttgatgaagaaatcgatttcttgatgaagaaactactttcttgatgattttttcgttgataatgccaattctgacgctagcagctactccgacgatttttccgacaccgacaacaaacttcggaaaagtcatcagaattggcatagtcgccgaaaaaattacaaagaaattagtttcttgatgaagaaaccagtttcttgatgaagaaaccaattacttgatgaagaaaccagtttattggtgattttttcggtgatttttctgacgacaatggcaattctgacgacttttctagcgttggtagcaactctgacgactaatacaccggcagctactccagtgacttttcagtaccgatagtaaactctggaaaattcgtcagaattggcaatatcgccggaaaaattaccgaaaaaatcaccaagaaactggtttctattcttcatcaagaaactaatttcttgatgaagaaactagtttcttggtaattttttttgtgatttttccagcgataatggcaattccgatgacttttttagtgtcagtagcaactctagtgactttcccggtgtcgacagcaacttcagcgactatgcaaattttgataacttgtttcagttaactttattgtttagcatttatatttcgctatgatttttcatagtgtcgaatctgatttcacagggttcataagttcaaaactagttttacaagttttaaggattctataataaggttgctctattttatgatgttattgtatattttttattttaagtttttttttattattttgtttctaggtttgaaactaacaattttcacacttatattttgttt

SEQ ID NO: 348439 - DNA, 688 bp, Cannabis indica
attgtatttggtgcggatgatatgaaaaaattccatccgcgctcgtagggagggattcgtatcgacgtttcacacacacgcatcctgcattgtaggattttcatggccgcatgggagttcgaaacaggggggctgtgcgaggttcttcggataatccctatcataatgtgcgtgcacactgagtgacactcgggtgttcgcgcgcgcatgtaggcacccgaatctttttttttttttttttgaattttcaaaaaatcataactaattaaaatcgaaatcgagttctgtagaaaaggaaattgctaatttttttcatactatccaagaaatataattccagaacgaaattctaattattttacataaaaattttgcaaacatcaatcaatcatcaataaacacatagatcaacatgatcacattcaaatcacaataacatcgttttaaatccatatttcttgagagtaaatcaattaccatggctctgaggccagttgttgaaatatattttatgataaaaataaatacatataaagtatgaaaaaccttacattggttgcagcgaaattaaatgaatccttatgctcagatctctaactcttgtatcctttgtgtcccatagtataatcaagatctgagcccgaaactccttcagttgtttgaattcttcacagtcttacacactatg

SEQ ID NO: 348440 - DNA, 733 bp, Cannabis indica
agaccgcattaaaattaaactcaaaggtactagcttaccaagtctagtttattatgccttaagcgcataattcataatctcaatatatacatatatccgacatggcatagtatttacacaacatatatcactagagtaataaccctaggctattaaaccgctcatattagggtaataaccctaatcccggttgcaattactcacatatatcatattcaacataagcgccaccgcgcatactctacgtgcaaactactgtcttacctgttgtcccgcaataacagagattcaaacccctgggtgctcctgatcaggtgccggtaatcctagtcacacaatctgggatttcacaaatagggttaatccccaatttcactttcacaaaatataaacatggcattcaaaacacagataatcaaatagagctcggaacgagctttccaacgatataaagaacgtcccaaacggagtcccgagtcaaaagttatggccaaaacaaaattgagaaaaacagaatttctcactgccaaacccagtcgcgacggccaaaaatcccgtcgcgacgactgggttcagaacacccaaaaactccatttttaaggtctaaacatgccaacttttccataattcgaacctcaaccaaaacatacccaaaattaacttcttacagataaaaaatcaccacaatagagagctaataacatcaattccaacattaatcaacaacatccaa

SEQ ID NO: 348441 - DNA, 612 bp, Cannabis indica
ttataacaacagctatcagacaataatcggaatggccccttgtgagcttttatatggaagaaattcactgggatgaagtgggtgaaagacatttcttgggtcccgaggctgttcagagaacgagcaaaccagttgataaaatcaaagcgcgaatgctcgcggttcagagtagacagaagagttatgtttatccaaagcatcgaaatatagattttcaggtcggggacatggtatttccccgatatcaccgaagaaaggcattaaacgctttggcaagaaaaggaaactttgcccgaggttcattggaccttttgaaatcctcgagagaatagggcaagtagcgtacaggttggctatgcccttagcactggcagctgtacatggtgtgttccatgtttcaatgatttggaagtatgtctcagatttgtcccatattctgagttatggagcattggaactccaaccgaatttatcatatgaagaacaacaggtgcagatacttgatagaatagaaaaagtcttgagaaacaagacgattccactggtaataatattgtggagaaatagtaaagtggaagaggcaacctaggaactcgagacggatatgcagta

SEQ ID NO: 348442 - DNA, 635 bp, Cannabis indica
tgtaatcaacttgacacgatgatggcacaattttagtggggttcttccactgataagaaaaaaacacattggcgaaaatggaaattccttttcatctgtggatgttgctaacatcttgaaaatccctttgtctttctctgctactactgatttatggatttcgaacaatactacttcgggtgactacactgtccaaagtggctaccactttgcttgttccttggaaaaccagcaccgtgctacatcatcaacatcagaatagtcatggtggaaagcattttggggtctaaatttaccatccaaagtaaggatctttgcctggagggtcattgaacattcaatccctgtggctgcagctttgtttcaaaggaaaattatcacctctgctgcttgtagcctattctctaatgcttgggaatctatagggcatgccatgttcagttgtaaacatgctaaaactgtttggagacattcagattttagttttgactaccaagcagctagtaggatggaagaggggaattttttgatgtatatgtcaaatattcacaccaaattagatatggaaaaaattatatgcactatgtggtcaatttggtcggacagaaataacatcatacataataaactctccc

SEQ ID NO: 348443 - DNA, 651 bp, Cannabis indica
gggcagatatctgggcgaactggattgctacattcccgcccacaacaattgtgccacaagccctgagagggggatgtgcgcttggtcgggtgctcatgcccagcaaggggcatggatgcctttgcatcaatacttcaaaaatgtagcggacttcttcggcctcatccagacctagttcactcctaagggcatcaaatatctatctgccctcttcgtcctctacgcttcccagaaatggggtatgccttttccccacgaagttggctggttctttgatttgaagtccaccaaaaagcaaggcaggtcagggtacttctacttctctcaaccaagcttcaagtggttgaagggcacggacgactcgaccaccaacaagattggcagttttgctgatgagtacttcatgatggatggcacgagcatcactcgcactcagttccagaagattccgacatatcaccgccctcccctctctcttgctcttagggatagagctcaaaagcttgctcgactgtcgggggaagaccggaatattatccatttgacctccgaggataactttattaagtaggggctctacccaaggacttcattcctaagtccatgacggggaagaagagaaaatccagtgctggacggaccgaacgagct

SEQ ID NO: 348444 - DNA, 1037 bp, Cannabis indica
cagttaaaattctgcatagtccatgagtcaatcttattcagatttctgattattttttagggcctctcttgtatgagttttttttcatcctttttttgatattgtctgctactatttataattacatagtggtcagtaaattacaaagttgactgcaatatgtttacaacaatcatccctaaaatcatgggatttgattacatatcacgtagtgtaaatacagtttatgattagaaaatcgtatagctgtgattttcccgcttttactgggtcaaaatgatcgtggtttagatcacgtctttaattattgtttttggatatgtctcgccagaagcttggtttcagtgatctaaatagcgagttggggccatttttctttccgaagtcgacgatgcatgtctgatgtcgatcgcgattcttaaagagttcttcgaggctcatttgaatgttatcttctggctcgccaggattgtaggcctcgctaacgctaactggatgaagcttataggaagtcttcccatagcgagacgagcacctcgcttacttggttttgagccgagactaccgttgcacttagtttgtactctaagggctttcacaattgaagtatgtcgctttcaccttctaatgtgttctgtccttgatgtctcgctattcgcattcagtgacatatggtttctcgctaatatacttagtgtcagtttgtacattgattcctcgcctaagaccttacagtcagcgggttacaaatatactctgatacttacgtaattaatgagttattccataagaagcaattgcatcgattcacaccctttatcctgacacgtgtccttcattgagatagcagccaaattttgggtataatagtatttatgccataaaaaagtaaactataccatcaattctcatatttataaaaattctcctatattaaataataatataatattattttaataatttttagagatgcttactattggatcattttagaacaaaaagtgccaaaagtgatgtgaaagagagataaaata

SEQ ID NO: 348445 - DNA, 705 bp, Cannabis indica
tgtagttaagaaataggaaaaaatggaaaagaaaaaattataagaggacacatagacactctttgtgcctttccttttataattaaatatgattatttaatcataatatcatgattatttatcttaactttgtttgaccatctaaattaatataaatattatattcttttttaaaatatttcgggattttttagaatatggaaattgaaacctaaattcaaatttaaatatgtaatatttgaaagagacaaatttagataagataatctcgaaataaatttaaattatttaaagaaattaaagaaatttaattatgtatataaattaaaattaggaaaaataattatatatttgtttgagattttttttatttaaaaatatatttccattttaaaaattaggtagttttatagtaattatgtaaaaataatttaatttttgaaaaattgaaaagtgtgtacattttagttggagcaaaattatttaaatatttaaaattaaataattaagtgtgttaatttctacactgcacctaaaaaaagtgtattgatgtatcaatatctatttaagtaatcagaaaaaaaaattaacttttttacacggtagtgtatgtatattatagttatttaagacaatttgcaaaattttaaaaaaatcgaaataatttacaatataaaaatcagtgttcaaacaatctatttcata

SEQ ID NO: 348446 - DNA, 527 bp, Cannabis indica
ctaaacttgttgagcattcaggatatttaatgtcttcactcatttcttttggatcagagattaagtgagtctaatcaagtgaaatggttgggattaaactcacttaacctgtcaattcagtaggtccatctatatgctcatcaaatgaatctgaagaaagttgctcacactttagatttagattcaagttagagagaaagacagtccaagatcatactgagtgtgtggaaggatgtaaagggagtatcattcttgaagtgattttcctcaatgtgagacatttttttgtaatactttactgtgttgagttgtaattttgggctcattctattgtgtactactaactattactattcaataaagatccattattcattcattattgagctaataagttttctttgtctaatttcaattaagttctaattttaattttgtgattggttttagctttgaattgtgtttcttgtacattgttaccgttgtaacaacctgttttgagggtgagaatgttggaaatattttac

SEQ ID NO: 348447 - DNA, 493 bp, Cannabis indica
tttgttccacgagagttcaacaagcttgctcataattgtgcaagggctggtttaggactagatagcgagtatatttggaatgactttttgccttcctcgctttcctaagggtctgtgttgtatttgtattttctttttctcaggttatgaagctatttttctcaaaaaaaaaaaatatatagcggccgcaataataaattgattttgtcatatccataaaaaaaaaaatcaattaaaattaaatatttaagacatacaatagaaactaaggacaattaaaaaagaattaaaattaataaaattattaataaaaaatagaatatcaaatgaacaactttgtaagatagagacgtaattacataaattgtatttttaactaatataattcaaaacaaaattggatctttctacgctattaagtacaactaaaagatacatctagagccttgattaatttatgttgaataaaatagggaaacttacaaaaatactg

SEQ ID NO: 348448 - DNA, 553 bp, Cannabis indica
ttgaataaaatagattacattgaaatggatttttatttagggcataaaacccaacagttgtgatctctggttgcctgggttattgggcagattaggcttgttttatccatcgccttgtcttttcacatattgccgaaagtgacctcgcgcaataagactttctatctagtctttcagctaacgacattcctctatcgtatgcccaatgtccttgtgatacttacaatatttggttgcatctctcttatatctcgcatgcctcatgggctaaggtttacgaaatgcaaccctgtgctcatgtgcaagatatatattttctcgagtttctctaagctcagtataaatagtgtagattggcacgtacttgtcgcgcttcttctatttttttcttgtccttggctgattccttggagtcatctttccatttaaagcctcctagaatgttagccttcatcgagacactgctgggtttactttccgagccagtttttaacaactttgtctcttttctcgcttcctcttttcgtacaaacacttgagccctctcattgaa

SEQ ID NO: 348449 - DNA, 612 bp, Cannabis indica
ggtgccaatggggcgtgggatatcactttgctctccaattatttcttgaggatggatatggatgtcattcttggcatcccgttgcggggtgggcggtgtgcagattggtggtgctggcactattctccgaatggttgttatacggtgaagagtggttatgctcttgctcttgatctggtgagggataggaatggtggctcttcggtcgatcaggctcattggtggaatggtatgtggaatttacgggtcccacaaaaggtcaaaattttcttatggagaatgtatcaccgggccctcccgaccaattcccagcttatcaaacgaaagctcccggttcagccgctttgtcagagatgtggtgaggactcggaaactccggagcatgcgttggttttttgctcggcgttgcggcctttatggacgaagcttaggatctggcatgtgctccaccatgggcggactgggtctttggcggagttgcttatttatctttttgatgtgcttgatcaccaaaattttgctttgttggctatgatttggtcgtggttgtggtatgatagaaattctgtgttgtttggaaagaaacaatctcgattagaggtgattgatgtt

SEQ ID NO: 348450 - DNA, 1906 bp, Cannabis indica
gcttccaataagttgaatcgaatttaccaattaaattccctaacttattaagtccttattgaatcaactattagaacttgaaattgcactctcggtgatttgtgcctaacttagcatgaaatttaatttctataagtatgctagatgaccttggtgttgtgagtaagattgagacaggtaccatgaaactaagtaaaagttcaatgaccataatgaaaggctacaaggaaggaggtctatactacctaaagggaaaaccagtttcacgttgtcacaacacaacaacagaaactcttgaagattctaaggcaatcttatggcataaaaggcttgggtacataagtgagaaaggttttcaaatcatgagtgaacagaatcttttttgcaaagataaagtaagtaaagttgatttttgtgagcattgcacattgggtaagcatcataggcttaaatttaaaatttgaacacataattctaaagaaattttagaatatatacatgttgatttatggggtccagaaaaaatagctacacagagtagttattttctatccattttggatgactactctaggaaagtatgggtttttcttttgaaacataaaaatgatgcctttgctaaatttcaagaatggaaaatttcaatagaaaacttgactaacaaaagagtaaagactcttaggaccaataacagtctagagttctacaacaatttgtttaacatgtattgcaggaataatggcatccaaaggcataggattgtaagattaaccccataacaaagcggagtacctgagaggatgaattagactattttaaataaagccaagtgcatgttgttctaagcaaggttagctactagattttggggggaggcagtactaacagcagcttatttgataaactgaagtccatcaagtactgtggagccctgaagagaggtggtccggaaaaccacctgatttatcccacttaaaagtttttggatgtgcagcatatgcacaccaaggtgatgaaaagatagaggctagagttctaaagtgtgtatttttgggatatccagaaggaacaaaagagtacagactttgggtaagagaaaaaggttttaaaactattaatagtagagatgtaatattggatgaaaatatttttccatgcattgctactaaaccaaatgttttaggttctttccctagtactaaccatgcaggtaactcaatcaactttgatcaaagacctataagtgatgaacaaggaaagaacattgttcaggtggaacaagtagagaagactgttcaggaggaaatgggagagaacactgttcaggtggaacagagagagaacaccatttaagtggaacagggagaaaacactattcaggtggaatagggagaaaacactgttcaagtggaacatggagaaatactgttcaggtggaacagggagagaacatcgttcatgtggaacaaggaaacctgagggaaagtcgggcagatgacatggaggactactagttgactagagacagagctaaaagagcacctagacagaatcctaagtataacttcaacatttggaatgagaacattgactatgcactgttaagtgctttgccaggacagaagaacataccagaaagttgtggataagctacaaagtgccagaatgctaagaagtggaactgtgctatgcatcaagatacagactttttgagtaaaaaaaagacttggctttgtgttccaaaacccaagggaaagagtgctgagaaacatatgtggacctttagacaaaaagaaagatgtcctaagacaaataaagagaaagaggatatgagtcagatcctcaactctaatgggattggtttaaagatgtatttcatcgttaagtaccataccagatacaacat

SEQ ID NO: 348451 - DNA, 800 bp, Cannabis indica
aaaaaaaaacttctctatctcaaacacattccctattgattgaaacacttcaaacacaatcaagtttacagttctcattaatcaatgactcacatcatttaacctcatctaacacacttaaaacaacacccaattcaactttctcacatatctccatataaacacaccaaatcctagagttgtaaaaggaacacctttttgagacatttcatcgaacaccttctgagcatgctcaaaataaccagcaaaaactaaagtagctaataaagagttacatattttgggtcgaaatttaatagagccataaatagaataatggagagtaactttttgagttttcacttgcttgaggagagcatcaatggcattgaattggggggaacaagaaagagatttgaggattgattggtaagttatgaaagtgtgactgaaacctggttgttgggctgcccagttgaagaatccaagtgcaagtgagtggtgaggaagaagaaaggggtcgatgactcgggcaacgagtgatggggtgagtgagttgcgacaacggagtcggtgcaatgtgttcttgagggaaggactccatgaacgagttggctttgtgtagttggaagcggcgattagagctcgacttctccgacttgcaaactcaattgccgaaccaccacccttcatcaatagtcggagacaaagaagaagaacgaaaatgagagaaactaaatggtgaatgtagtatttttgtaattataatactttttgagatttaaaaaagtaaaagtagttttgtaaaaatgtttaataaa

SEQ ID NO: 348452 - DNA, 516 bp, Cannabis indica
tgcatgcaaatcgttggactaattccttttatgtctgccatactccacccaacttgctcttttatgtttcttcaacacttctagcaacaaaccttcagctacagcttccaaccatgctaaaataattactggcagtgtttcattctcccctaaataggcatattttaggtgacttggcaagggttttagctctagtttaggtggttcttggatggaaggttttggaggcttgaaattgctttccttcaactctaaagactcaaaaggtctcttgaatttagggaaaggctgcattggctcaacccaagcaacttgggtttcttcatcttcactcaaagctccaagatcttcaagagaacttatcaccctttcatctttccacacttccttgtgaaaactttcagccacaatggaatcaattacactcaaatgcgaacattcttcaatctcatccgggaatctcatagcattgaacacattaaaagtacttttttgatcattcaccctcatagtgag

SEQ ID NO: 348453 - DNA, 713 bp, Cannabis indica
gcagacccccttactaaggattttccatctaaggtcttttatgagcacactgttcgtatgggtattttagagtatgaggatatctagattcaatgaaagtttgtcttcattattctttgtatttttattttgttatatgaaacttgtgtatttagatatttttttcttaatcataaattatgttattcaatttattttactttgtacattaagctaaagttttgatctctataaagcaaagtacgacaaattaaaaattaacatgaatagatcaatgtgcatgtaatttccataccatattatcataattgatctatgtcatttacctttgtcaacatatatgaccgttgatgggtttagttgtgattgatacaataaaaatcgcattgatcctatgttgatatagttagtggacgagattgcacatgcctacagttatgatgataaatttatgagctcaataacgttaacacatttatatgcatacatatgtggcccagtaggaaattgttagaaatttatttatttagggtcataattgtatatataaaatgtgtgtggggtcatcatataaatgagtccaagttatgtggtctattttagaataaaacttataacgtaaaagcatgattgtcatgattttaatatgtggatactataaggacaatttttaatatgctgaggagctaaataaaaatagtcaataaatatta

SEQ ID NO: 348454 - DNA, 911 bp, Cannabis indica
ccctagctttagaataccctagttttatgcgttaggggaattttagtaaagtggttaatgagggttaggtggcagccttggttgatgacacctattttatttcagcctaattgaatttaagagagaagtattaccttggaaagaaagtaaaataagaaaagaaaggaaaaattagagaaaatacccctttctctctcttggtgttcgacccctctcaaccagaaggaaaactcagctcaagttccctttttcttgtgattttgcaaggattcaaggttggtgcaagtgaggtaaaccctagaaacctttatcttttgagttggaagtttttagttgagtttactttggtttcaagcatgattttgaataatggtggctgttaggtttagggttcgaattttagggttcttttgagttgattttaactcctagcagctggttctagtgtttgatgttggtcttatgcaattttaagctttgagttcaaagttttgttcattaatggtaacttaagtttcaatggtttgttctgtgattttctggttggaatgtattgtgtatacccttattaggtactctagaaggtttcattacatttggtcgagacttgagcaaggaatgagaggctttgggaactctggtgcaaatcgactagccggtttgtagagccacaaaaaccggctagccggttttggcagggttccccgggcctttcattttcttaattttcgtctttgcggtgccttggttgggtatttccctatttccatagttataataacctatagaaagtataatagaacctagggttaaggttttgggtttcccgggattagggttttaatcatgtaacttaacccagttttaaaatgtgattagggcatccatctagcaccagatttccgttcagg

SEQ ID NO: 348455 - DNA, 813 bp, Cannabis indica
aaaaaaaaagaagaaaaaaatgacctttagtagtaaattgtgaaaatttatatgtgcatgtaattattataagctattctaaagccaccaagtttaatatttagatttatattccgttgaaaaaaatatatatataaacatgcttcaaataaaaaatataagtattgtttgaataattaatttcaatattaaataaaaagagactaaataaattggcaaaaaaaaaaaaaacaaaaacaaaaacgaaatacacacttaattaagattttatgattatagcaattaagattttatgatataattatatcaacatctacaatcactctactaattataatacaaagtggtatgaaaataagtaaaaagactaagaaatcaataagaagcatattaaaaaaattattttatagcttaacagtatacttcttaacttttatagtcttgccaataaactttcatttctttcgagaatgaaagtgttgtacttgaaattgcctccactccaagaatcttgcatttcatatgacaaaataaaaaacactcaaactcatatgatataatgttagagagattattgcaatggaagaaaatcaagatattacaactctattgtaatataatacagggaccaacaaagagattaaagaaatgttacaacacataatatacaatatatatattatatataagaaaagtagaagaaaatttacaacacatgtaatataatatatgtatatgtataacaagagaataatatatataaacactcactcattatttggtatttattgacttattaaatctatctatttg

SEQ ID NO: 348456 - DNA, 793 bp, Cannabis indica
gaagaacaaccgggcttttggacaggaaagaaaaggtgctgcggaacaagactatttcgctagttaaagtgttgtggtggaacagcaaggttgaagaaacgacttgggagttagagtcgcagatgcgagagttgtatcccgagcttttctggtaaatttcgaggacaaaattcctataaggaggggatagttgtatatctcggaaaataaataaaatttaaataggcatattttataaaatatgtaattatattggtaatgaagtaagattatgatcttacttagggtaattattgagaatttactcaatgaaataaatagcttaatttattaattacggagattattttgggatatgtaagtaccgagaacatcaattttgaaataagatatttttttattgggtcgacgattttggttagaaatgtcatgacatttatggaagaattattttgagaatattccagactaggttagaaattttagaatgtcggtttaatggaattagcaaaattacaaaaatgccctaggttattttaaagtttatatttttttcattaggaataaatttgtcttttgtttttttttttacttttagggccgcctactattttttaaaagaaaaaaacatgaaaaccctatttaaggtaatagcttccaaggcaagaaactaaacttcattcttcttctccccttcgtgcaaaccaaccagccagcaagagaggctctcctcaccatttccttttgtctttggagcatattattcaacctaagctcaacctagaagtgattg

SEQ ID NO: 348457 - DNA, 474 bp, Cannabis indica
atgacagcatttgttgttatacatacttataggtatagcctataggttggtcacttatatttatgagatgtctttttatgtattttgttaccataattgcttttgttttttttttttttttttagagaaaccataattgctattatacactaatgactaatagttgtgcttctaaatagttagtaattttttttagactaataatgatttttgtcccttgaattttgacatgtactaaatcatattttctgaacttttaaggtcattgaaaatgctccttaactcttgagattgttggatttaaggacttttgtctaattttattcaattttactatttcaatgattgtttatgtactaaaccatgttctccagactttgatatctactaaatcatgtcattcgaactttgacatgtactaaattatgcctcctgaactttcatccatgttagactttttttactaaaattaga

SEQ ID NO: 348458 - DNA, 598 bp, Cannabis indica
atgttgaggagtcactaaacaccgccgcgtcgacattaaccttaatactattgccaattgaggcactccattactcatcaccgtcccccgagatgtacctagtgaataacagttcattgcttaatttttgagcaatacaccattaattaaggtagttcgtagccgatacaacaatgctctcaactcctaatgtcttgttttgccataccttatcatttctagcgttccaaagtgcccaacagacagccaccaacgtgcatgactggtctgtattcaacacaataaaacgttccatgcaccagtcgaggaatgaggtctactgctggacaagacacaagggcatgtaatatggtttcagcatccatactgcatattggacaagtcaactcttttctttctttgttaagcaaaaatagaactcttttctttctttttctattgttttttttttcttttttttttctttgtttttttaattgtttttgtcatgctattttctttcttgatttcattacttttgtatttaggataaatatgattttggacattgtgttttgtaaaagttactaattggcttatttgttttattaaatgataa

SEQ ID NO: 348459 - DNA, 591 bp, Cannabis indica
atggaatataatatcactatttttgtaaatttttttgtctatttaaatattttgttattattttagtttttcataaatttagtttcaattttttaaatagtcaaaattggagaatgaattaagtgttttttgtactttagagataagttttttgtattttcatgtaataaatttatgataaaaatatgaaatttaaaattactaataaaattattaaatcctaccaaactaaccattggtcgttactactttaaaattaacacaaaagttaatacattttttataatacaataaaaagatatttgcagcataatataatataataaccgtaaattataaaaatatctaaaaaatatttattaattagtataataaccgcgtgaagcgcagttatcactacaagaaaaataggcaatttcgacacaccaatctcggcgggcccgcgtgtgtgtgccgagattggtctctatctcggcgggcccgcgtgtgtgtgccgagattagtctctatctcggcgggctcttaaagaaccgccataattgatcacaagaatatattttttaaaaaaaaaattataaattttggacccta

SEQ ID NO: 348460 - DNA, 518 bp, Cannabis indica
ttgaggctttttttcagttagataatgacaaagtggtgtgtgttttatatttgaatttgaaccacttagaaaagtcaaattattaatgttgactcttttccttttctatttttagttcaaagtaaatttagtttgggtgttgccactattctattagacaatgtttacaggcccggtcttagatatagacggataggttaagtttgtgcttagagtccacttaatttaggaactcaaaaataattttttccctttttaaaaatatatatttttttaattaattttgaaaaataccatattttgttagtaagggtttaaaaataattttttcttatgacccattaaattttaggactgtccttgaatgtcatcattttttaattttttcattatattgttttgaaaaaagatttacttttcattaaaaaacgagtaatttacgacataaatatctaagtttaactcccagttgtaaataaatacctaaatttaatttttggtggtaataatacttaagt

SEQ ID NO: 348461 - DNA, 545 bp, Cannabis indica
acatcttcttgtatttagtttcaaaaatatatatttttttttttgaaaaaaaaaaaagtctacttccctttaattttttttactttaatttttgtttagtgtgattgtttatactatcttttagttattgtttttttttcattagtgttttatttgtctttttcttagtactcatagcatttaagtcctctaaaaaaatcataaaaaaaaaaaaaaaaaaagtaagttataaaaactccttcataaaacgcttagtatttggtacaacagtgtaatattgtatatgacacaaaccaagattgttctgtctagaaagattggtttttaaataaggtttgtgttagtgtaccctccaccttacctgggaacctcggttctgtctaggcaaggttgggacgaagcggtaccttggcaacctttccaattggcctgggaacatttttgtgttaatcattgtaatattacatttttgtgctatttactataacaaaaacaaccttgttttatcaaaaataagcaactcatttttgcttagaaaggtcttt

SEQ ID NO: 348462 - DNA, 870 bp, Cannabis indica
actttatacgtgtttatttcattgttttagaattcatattaggttgttaataaaacatacatggtagtaaatctagatccttgtaaaatatttcgaacacctcgtcggcgcctcttcttccccgatttatctccgccacctgagattgtgatcgagaatgctaccccgaacattccgctgccaacttcgcgtccccctggacctccttcttctttgtcgatcttctcgacggctcttccaacgggatttgcacctatctcctcggttccctcagttttttcagctccgcctcctgtggctccgacgaactcttcctcttttccacctggttttggtttctatgacactcctcgggtgaatcttgatcgaccttccattgatgaacacaatccgtatcaccttggaactggagacaaccgcaattttctcattgtccccttccaattgactggccaagataatttccagtcatggaagcgcgctgccacgatcaatctggctgccaagaacaaaactccatttatcgaaggtactcttcctcgtcgtcctgttaatcatccatatcgatctgcttgggatcaatgcaatagtatggttatggcttggatattgcaatctgtctcacatgaaattgcagtgagtattatgtttaaagattcgagttttgctatgtggaataacctccacgatcggttcaaccaaagtaatggtccttagatctttcatctcaagacttctttaactcgcatcaaataaggtgccaacttcgttaccacctattttactcagctgcaatcgctatgggacgagctcaatgattttcaaccgttcacgccatgttcttgtggctgtacttgtggtgcgatgcaa

SEQ ID NO: 348463 - DNA, 733 bp, Cannabis indica
gtatacatcaaaggacaaagctggtggagttacaatgcctcattcactccagttggattggaagaggcttgttgctctcaaaaccagatcctttccttgaatgttagtgctgatttctagggaaataaatatgctatcaacgcaggatacaaactgttcagcaccccaaaccgaaaactcattggagaaaagaggtatggtcaagattgaatacacctaagcacttgattctttggcttgtgatgctgaacaagctgaagaccaaagaccggttgatcaaaataggtatcaaggtgcaagagaaatgcaatttaagtggtgactgcaatgagaacatacaacatctattctttgaatgcaggaaaaccaaccaatgcttggtagagatcaagtcttggctgggttggaaagctatcaccttcaatgtacagcagcttgtcaaatggattgggagggcaaaaatctcaaaattcaggaaagccatatacagtgttgcggttgctgccatggtgtacactgcttggaaactgaggaatgctgtcctatggcagggtgcacaagtagacaccaatcaaatgattgaagaggttaaatggagtctaaggactcgggtacagaagttccttccaaagaaactctcaagtgtagataaagagtggttttttgctctatagttaacatagaattcatttgtaagcaaatgtgaattgaaaaaaaaacagagaattgtata

SEQ ID NO: 348464 - DNA, 686 bp, Cannabis indica
aaaaaaaaaaaattaaatttctactattgtttaattcatattttacggtgttatgttttttcttcttcttctctaatagaattttatttcgtgaattaatgaattattatttaatagaaatatatcaactcagaattcaatgttcaacattattactgtttttggtgaagaaaaataatatgtgcatgttatcactgtggaagctctaaaggaaataggagagcaattaggtaagaaagactggaattttaacgtgaatccatgcagcaatgacacaagctggaaaccaccaaaagtcccacggatgcaactctacaacaatactctctcatttgcaattgcaacttcactggtggcctttatttcgttgttaaaatgtaacatatattactctcaaattatcttatcatttcaaccctatatatatcatacatttcattaatgtccagaaaggtagtacagagtaaatgctcgatagaaagaaaaataaatgctcaatagaaagaaaaaaatcaattgccaacaaattgttataaaataatataaagtagatgagaggaaagaagaagaagatgaagagagaaagagaaagtgaatgagaatttctgagttgtttattccaataaggtgaatccctatttatacaaatacaagagtgaaatattaagaaactaagaaaaagggaa

SEQ ID NO: 348465 - DNA, 964 bp, Cannabis indica
tattaataaataaatctgattatattgaaatgggttttatttagggcacaaaacgcaacataaggatccagcagctacgggtcctaacaagagattccaaggtaattaaggtttctgacgtggtggaaacaaaaattggtgaacctactcagagtgcccgaggtgcaagagacgccattagggtgaatgccaagctagagcatgcttccagtgtggagtagcaggccatacaacgaccagaacagaagaaagatgacactctagtgtttgctttgacccaagtagaggttgatgttggtccttctactgtggcagatcaactttctattgagggtaccttgttgactgttttaattaattccggtgcaacgcattcttatgtgtcgagtaaagtgattgaaaatttacgtaaacctagtgatgttttacccagtggttttggaaccttgctacctactggagaactagttatttctagcagatgggttaggtcccttcccgtgttcgtggagggaagggaattgttggttgacttgattgaattgaacctagaggattttgatgttatactgggaatggattggcttgcaaagtataatgcaaccatcgattgtaaaagaaagatggtaatttttgagccagatggtgaggactcattcgtgttcgtgggcaaggttcaaggatctcaaattctattaatctcaacacttgaggcaagagatatgttatgggatggatgtatcggtttcttagccagtgtggtggatgtcaagaaggaagtatcaatgggatcgaaacacgtttcggttgttcgagagtttttggatgtcttccaaaagaactactggggttaccactgaaacgagagattgactttgaaattgatctgatactgggggcagagcctatatctaaagctccgtattgaatggcacctgcagagctgaaagagttgaaggttcag

SEQ ID NO: 348466 - DNA, 748 bp, Cannabis indica
ccaagttgacatattgccaacccgggccatttccaaacatttctctcgagaagtcttctcggcatattttccattcacactataaaaattgcactttttggtgcatttggccaaatgcaccggcaaaattcgtcggcataaagtggctcaaccaatccctaaaattttcagcgaaaacttttgccggttacctataccagtgcaactcatgaattgcgccagtaaaagtcttggaattaattgccttatggcacaaaccatttccaagggctcataaacctttgtcaaaaggttaaaaaaattgggagaaatttcgctgcttaaaaaaatggaaaaacttttacgcatatgcatatctgtgctgactaaatgatttttttttcttcaaattgttagcgaaaaaattagacttctgcgccggtaaaagttccccaaaaaagtgggaaaactctcgcttggaaatgtggtaggtgagaagacttttttcggcgcaaatgtgtaccgccaaaattattttaaaatgttgcatttcaattgagtaagttataaaacttttgccggcgctatgtaaacttttatcggcgcaacaaaatgcgtcggttaaaatctcttaatataacaagttgaagcactccttcactattttcttcttctttcttcttcttcctttgcttcttctcttctccatcaccaccacaccatccccaccactgcaccaccaccaccacctttccttctctctctctct

SEQ ID NO: 348467 - DNA, 718 bp, Cannabis indica
ttaaaaagctaaaagaagataaagggaagacaaaggggtaagtccaccaacatctaaggcattaaatgccagtaaatatgcatccccaagtgtcgagacgcatcgagaaaagccatacacgtatgaataacgatagtaagggaaataaattaaaaatatcaattaaacacgaaatccttacaaaaccataaaaataaaaataaaccgtaaaaatagaaactgttctttaaaattgttccacacgtgcatataaaagatataaaaatataaaataaaaaataggataaaaattccctcccatttcctcaggccccgtcggcatcctcatcgtcactagcttcatccgactccgtagaagattccacaagatcctcgtccttcttgaacttggaatacttcttgaaaaactcgtccaggtcccaagtagcagatttatcctctctaaactcggagtacagcttgaaggccgactaataacttccactgaggaacgccttcttaacttggctcgtcagaactttaatctccttagtcagggaccatttcttgtcggccaaagctttttgggcctgggctgtcgccttttcggcctcagacaatttgtaacttaaggaagagagtttgtcctttgttgcctcggcctccgaacggaaggtatcgcgctcttgcaacaaggcagcctgttccagattcaccgcagacaaactagtctccaagg

SEQ ID NO: 348468 - DNA, 560 bp, Cannabis indica
ctaattctaatcctcatttgtgtgcttttgctgaatctaactttaagatgcagaaccacaacttaaaaaattttcagatgtagattggggctcttgtgttgacacccgaaggtccatcacagggtattgtgtctttcttggtcattccttggtttcatggaagtccaaaaagcaaccaactgtttcaaagtcttccgctgaagctgagtatcgtgccatggcccaagctacttgcaaatcacttggctccttgctcttttatcagactttggcatccattacaccagcccacatgtcttatattgtgataataccgccgctatacgcatctctgaaaacccaattttctatgagcgcacgaaacacattgatattgattgtcacattgtgagggaaaagctccaacaaggtcgtctcaaactcctacatgtttctacaaaggacaacattgccgatatcttaactaaacctctatttcccaatcaatttcaatctcttgtatccaagatgaagcttcataatttgtacacttcatcttgaggggggtgtattaggattgg

SEQ ID NO: 348469 - DNA, 611 bp, Cannabis indica
ccaaaactaagcttgccttgatccgtactcagagccgcaacaatattaagttgatagaagcccggtgtgacatgtcgtggctttccaggagcaagtaagggttgagatgggttaagcttcctcatatttagctgggctttattgtaatctgaaagataagagttaatccagtcaataacatcaacatgagacatattataatttgcaaatagttttttatttctaaagttccatattgcccacacagtggtcaacaaaagtgttagtttctctttattgagttgagaaaaaccagaaagtaaaaagtctttgatgtcaacatgtaggtaagtagcatagaagtgtctaaatggagaagcttttcaaatcttggcagcactggaacaatctagcaaggcatgagtcacagtatcattaggacagcgacaaagagagcaacaagggcttgggaaaaatttcttgagaaatagattaagggcagtaggaaggatgtgatgataagccctccaagcaaaagatttaactttaggaggaagattgagggtccaaagtgtagtccaccactttttaatgaaagatgaattagaggaagaaggtgttgggttttatgc

SEQ ID NO: 348470 - DNA, 723 bp, Cannabis indica
aaaacataaaatttattatattttatacagttttgttaaaaaaagttattgatgttaaggatttgataaatttagttagttaattttttaaaaaaataataaaataattaactaaaatatcaaaacataaaattcagtatcaaatgttttatacggttttgttaaaaataataaatttttagtaaaaatattaaaaaaagaaaaaaaatatatatttatgaagctaataaaaaattaaaaaaaatgagagaactaaggacagttcaaataatgctaattagagagattttagagtgtcacgtcaccgccttatatctctcttttatatatatacgagtgttgcccctgatttttcccaatatacgtggaccaaccagacaaggacacgtggatcaaacagcttagcattcaaattatttgctaagtctttatgtaataaggcagcatccgggacatgcgtcccggagaagacatagggagccccatacgctcccagaagcccaagtaatactaaggcatctccgcgaggtgtcaggcttcccctgagcaatcaagtcgcatttaatgccgcatgggaggaaacgtgttgggactgctacacgcaataaagtctgacggcacaacccccaatctgcagctacaaagtaatgatcatttaagtctatcgacggctacactgtgaagagtcacatcagtcaaaagacaataaggacattccacata

SEQ ID NO: 348471 - DNA, 557 bp, Cannabis indica
ccagataaagaacatttccttaattacaaggaaattgatggtggaactgtgaggcttggggataatagatcatgctcaatagttgggattggatctgtacaattgcaattatcagggggagccactatgaaaattcatcaagttagacatgtgccagacattaagagaaatctgatttctgtggcaatgttagacaaagaagggtgttctataagggttgaaggtggaattctcaaggtactaagaggatcaatggtaatgatgaagggttcaatgatcaatggagtgtatgtactacaaggaatcacctcaagcaacctggcttcagtagcttcaaaggaaataaccaattcaatgtccctatggcataaaagactaggacatgtcagcttgaagggattggaagtgttgaacaagaaaggactgttgggaaaagatgccctacaagatctggatttctgtgagcagtgcattttgggtaagtctaccaaggttaagtttgggaaagggagacatacaacaaagggcactctagactatgttcattcagatctttg

SEQ ID NO: 348472 - DNA, 672 bp, Cannabis indica
aaaatattaaaaattctgtataactgtatttttataatttttttattgttgttatatatttgtgaaataatctattttatttatttatttaaaattaatagggggttgcgtccaattttgttggacagactttggttggcgtgtctagcaaagctaaacaagaaagttgtacaaattaaaaacaaataacaaaaaaaaaattatatccattctatataaagtgtggctatgtaacaaaattcttggtttaacgataatttttttggtttctacgttactttaacagaataacctattactaaacagaatattttttattaattttataatattattatatatatttaaaaataaaaattatatagatattttatataaataaatttttaatttaatttaaaatacctaaaatattattgatatttttaatcttatttttaaatttattggttcaactttaaattaaaataaaatgaaaaattatgttaatattttatataaagaaatttaaatttaaaatattataaatactttaatcatatttttaattttattattatttattttatattttaaattagattcatacaccatatttttcataaagtttggaaataaaaaatctgtatatcaaatttacgaatccaacctatatatagacatactcaaatt

SEQ ID NO: 348473 - DNA, 790 bp, Cannabis indica
gagagcttcaacaacacaactaacgatgcaagaggcttcccgatcactactgttgtagcattcttgaggtccaaagtccaaaagtggtttgctacacgaaaagaaaaagctaacaagtggacgaaacccctagcaccagaaatggaggacttggctttgcattttcaaaaatctcggtatttgaacgttgactcatgtggaccttacacgttgtaggttcaccctggaggtacagttcagaaggatggcgtagtggacttgtaagaacagacttgcacttgcggcttgttccattgcatgaagtttccttgtcctcatgcatgtgctgcatcttaggagagaagtattagcatgtacgcactatgctcgccatattacacaacagaatattggaggaggacatatgaaggtacaattatgccagttggttacaaggatgattgggaattgcctgatgacataaagaacatgacagttggagtgcctgttgagaagcaaccagtagggcgacccaagaagcaaaaggttggaagaatcaagaacaaccgaactgcttgtaatggcgaaaggattatcaaatcacgaaattataacaagtgcggtgccaaggggcacaacataagcacttgcacctaccgaggttaaaaatgaatgttgactttaatattattatgtgttgtactattcccattatgtattccatgaaatgcttatactgttatgtgttaaacatggacttttagtttttttgaatctattattgtaattattcgttcagtttgcatggaat

SEQ ID NO: 348474 - DNA, 593 bp, Cannabis indica
tggctaagggcttcgtttggaacgtcgtattagatcgtattgtattgtattgtattatattgaattgtattttatgcaattatttttatgtaaaactatatgtgttattaacttttatagacacctaaatatataatattttattataaattaaattttaacatagtattatataaaaatatgatatatataatccaattcaatataatacaatacaatacaatacgacctaatacggcgttccaaacgagccctaaaatattaaaataaatagctatttttattattcttactccaattatactccccactttagttaattaatatttaattattttaataatattttataggttaaatactatttggatactatgttttgtaaaagttacagattggatcttctgttttgttaaataacaaaatagaccttgtattttctaaaatggtaaaaatatgggaccctgagcttaattttcgacaacttttttcaatataactaacttgaagacaattcctaacacgaacagatacagaaaatgtaaacagttttgtcataacacatttagatcagatttttattaaattttatt

SEQ ID NO: 348475 - DNA, 512 bp, Cannabis indica
cttaacttaatgcccttaaagactcccttcgcaagatcctcttccaagagtctcgacaaaacttcagcagcacaaataaagaggtagggagaaagaggatccccttgcctaagaccacaggagggtataatcttacccaccatccctccattaaggaacaccttgagcgaggtggtggagatgcactgggtgacccaattatgaactttctgggggaaaccaaaacaatcaagagcatgatcaatggattcccagtttagcctatcataagctttaacaagatcaatctttatagaaaagtatccctccttgccttttttcctgttaaaagagtggatgatctcctagacgagcacgttgttatcctgaatatttctacccgggacaaaagtcgcctgagtagggcaaattagagaaggaaggagaggcttcaatctatttgtaactattttagaaatgaccttgtacaacacattacacaaagatataggcctgaaatggttaggtctttt

SEQ ID NO: 348476 - DNA, 1195 bp, Cannabis indica
ttaatggttcaactatattacttactacaataatttttcgaaataaatatgtatatcatagaaattttttgaagtgtttttatttttacactttaaaccagtttttttttttttacatgtttacagaattctacacagaaactctcatagcaactaacagagcaacctaaatcgcaaccaaaatccgtataacaacccacatagaaactaccggagaaaccatcgtagcaatccaaattttattgggtttcttctcctcctgttagacaatagtcactctcttattttgacttattttgttgggtttcacatttttctattatttgttattctaaaattataaaacttgattgtttgatgtaaaaataatgtgttatggtagacactttattttttgattatcgatatgttataaacaattaatatatctctttttagaacttagactgaaaattattaattttcaacaattgttttatccctaaatttaatatgttgtagaaaatattatttatttatatatgtaattagttatacatattagttcatatttcataaagtgagttaatattaaatgtgtatattttaattattgtccaaaagtaataatttaaatatatatatatatctttattagggtaaatactattgtggaccatgtgttttgcaaaagttatcaattggactctctattttgttaaatgagaaaataaaccttgtattttccaaaatggttcaaataggaccctgaactgatttttgttaaaataaaacttaataaaaataatttgatctagagatgttatggcaaaacgaatttcattttatgtatttgttcgtgttataaattgtcttcaagttgattatattaaaaaaaataattgtcgaaaattaagctcatggtcctaccattttgaaaaatacaaagtctattttctcattaaacaaaatagagggtccaattgataacttttgtaaaatatatagtctagaatgatatttaccctatttattattatattttagtctgaattaatatatatatatatatgggtattacccatgggtgcactcttaatgggtattacccatgaatgggcaatattaaaataatttgagtttttatgcttaattaaactatttaattagaaaaatctctcattttttcattgtatgggctgaggttgttccatcg

SEQ ID NO: 348477 - DNA, 525 bp, Cannabis indica
attttctaattaaaatataatattttagtctatttattttaatcaaatcattaataaaaataactcgatttaagttaatctaaaattaattaacaaattaatttctaactttaatctaatttttaaaattgaaaatttttgaaatatctacatttaaaataaatgtatttctaaattaatgtgggaaataaatataaaataaaataaaatatattttgaaaattattctacttcaaattgatctgaaattaacatatttttgacttaaatataattttttatatatttaaattcattaaaatagaaataattaagtatctagaataaaatcaacttaattattaattctaatttaacatttaagaaaatattctaatttaagttggtctaaaattaattaacaaattaattttaaacttaaatatattttctaatttaattaaatttcttgaaatataaataaataattaagtatcttgaataaaagcaacttaattattaattctatttaagttctaagaaaaa

SEQ ID NO: 348478 - DNA, 1102 bp, Cannabis indica
taagtaagtttaaattaaaaaaaaaacaaagtttaatttactgtaaaaaaaaatagagatataaaatttacactaattatatatatttatataatattaaaagaagtaaaataaaataagtttagagaaaaaaaaattaaaaaaagaagagaatgacaaagagaaattagaaaaaaaaataaaaaagaaaaattagagagagagaagagaaagaaagaaagaaaaaagtcagcaactgaaattataaatgtgatgtttgaaaaaaaaaaaaagttagtatttggtgtaaatttttcaaattgaaaaaaactctaaaatgtaaatgtaaaataaactaaaaaaaaataaaactaattaagttaaaaacaaaaacatgaaatatgggtttgcataataggtttacaaaaatatggcatgtcaaataccataaaaagtcttaaatgtgaaaaaatgccatagaagggtggcaaacctataaatgccatatttttgtaacttttttacaaaatcccatagttcatgtaattttcacaagttttaattaataatgttttgtaattagacaaaatatagatatatattatggtaaataggggcataagtacctaaagtttcaagtttgtaagtggtataaatttaatgtttatttttaacggcatatgtatccaatgtttgtaaaattataatttttctctaatttcgtcagtacaaactctgttattgtcttaaacagtgcatatataaggctcgaattctagatcattggatctacatagaaacatgtagtataagttacttccaaatgttcttttaataaattcaattatattaaaccactctgtgcgtaaactggaagaaaattacaattttacaaatactgagtatttataaatattgagtttatgccacttataagcttaaaactttgaatacttatgccgctatttatatcatatattaatagattaaaaaacattagacttgtttggtctagtggtaagatgttgaatagttttaattatgtcattggttcagacacttttgcactcaaatttattaaaaaaaaataaaagggtttttttttcttcagttttaaccaaaa

SEQ ID NO: 348479 - DNA, 402 bp, Cannabis indica
gacttgatgatgaggggttcataaactggtttggtcaaagtaaatggaagcttaccaatggttctcttgtagtggcgaaaggaaagaaagtgaatactctttatgtcatggaagctaagctacacaaatgagagattaatgcagttcaaaaagatccaaacatcaaactttggcaccagaggctcaatcatatcagcgagaaaggacttcaaactcttgctagaaagcaattcttaccaaaatcgcaaggtatacctcttaaaacttgtgatcattgcttagctggaaaacacatagagttcttttcataggcatgcatccaccatctaaaagatctaatgttattgatctggttcacactgatgtctgtactatgcaaactagaactcttagatgtgcact

SEQ ID NO: 348480 - DNA, 746 bp, Cannabis indica
tttttttgtgttttaatataatatcgtaagaatgtaaaaggaaaactttgaacgtaaaagtgtaaaattttaagcaaaaataataatttatgtaatttttctaattttatttgtaaagtgtaagtttgtaaacatatgattttttttctcaaaatagttattttatagaatttaaaaaatatatataagaaaaaaatataaggtaattgattattgctctagttaccttaaaggtagctgattattctcacttgatttttttcatattttttaacttttttgatagtataaaaaattaaaaattcttaaaatttgtaatttcctcttgaattttagtgtttgaaggcaactagtagtgtaaacaagataaattctctttcgaaactattgttcatagaacttgcactatatgttagggtttttttaggaaaattctttggttataattttacttctatcatacagcatttcttattttttttggtgtataaagaaattataattaatttttttatataattgaatacatcatagctattttaggcatcctactagaagttttgaataatttacagtgttgaaaaaaaaaattaaatatttaattgcacgtgtgatcattttactttttactcgtgcaataaattgttttaaaatttattttcaacactataaaataatccttatctcccccgtattttagggaaatttgattttctatacttagaaaatcaaatttttttttccct

SEQ ID NO: 348481 - DNA, 788 bp, Cannabis indica
ttttttttctaaaagatgtgttttttttatctatttcttttatgtaggatttggctgttgagcctaatgttgcagttgataattttgttaatgttgatgagatcactcctcctgttgagaggagaataccaaagtctggtttacatttgcagtctccttctgcacagcagttgagttcatcatctaaggctgctgttgttaaaagtaaggttaaaggtttatgtgctttggatcaatctgttgtagacgatgccaataatgaagatgagaaagcctttgatgcttggttcaaatctggtttgcttaagagactcacgtatgttattgttatgtttatttctattttagttgtctataggatttatttatatatatatatatatatatgtgattttctattaattattttttttttattttttgttgtttataggatggatttgaatggttattccgtatattttggtcctgctgataataagattaagccaggttttgattttggttgtgaatttgttcagcgaaagatgtggtttcactcgttgcttcattgtgatcagtttcttagtgatttgtgtttgttttttttttttttttattttttatttgtttttattgttttttgtagttattgtttttgttatctattgttttctaatttttcagcgtatggatgtgttattttttattattgaagaaagaaagctaaatattctactgacaaacaacatgaaagtattacaactacagattgcttatttcaatagtagcatcaggtcattgcatga

SEQ ID NO: 348482 - DNA, 571 bp, Cannabis indica
gcatgtgattttgagggtagagattgattaagatgttgcacttcttagtgtctactacacatttagtaccctgtgtctaaatataggctcggtaccatgtgtttttaataatgcttattcggtatcttatattctaaaattatacatatttgctacttaaattttaatttttgaataaaatttttatctaaatattaaacgtctttaatttatgaatattgaattcaaatttatttatttgattacatataactgaaaattatttgatcaaattgataaaattgtatcattaccaataagtattgttgaaaacacagggtatcaaatatagggtgcttctacaatgcactttcttaaaaagggatgcactgatacactctttacctgtttcggcatccagaagaattttttagtctatttttttttcatattcgtgtatattatagttatttaaaatatcatataaaatttaagaaattcaaaataatatacaataaggaaaatagtgttcaaatatctatttcacatgcgtataaaataaaatagtcacgtgtgtaacacactatttgaa

SEQ ID NO: 348483 - DNA, 1147 bp, Cannabis indica
gcgtgcgtggaactagattttttgggccattttttggacaatagtcggttcagataatcttttctaaataagttgactatcaagaataagtgtcctctacctaggatcgacgacttattcgaccaacttcaagggaagatagtcttttttaagattgacctccgatcgggctatcatcagttgagaatccgataggagaatattccaaagactgctttccacactaagtgtggacattataaatttttggttatgtcttttggactaaccaatgctctggcaactttcatggatctagaatagggtttttaaggatttcctcgataaatgtgttatagtatttatcgatgacatccttgtgtactctcagttagaagcgaagcatgagcagcatctgtagatggttttgcagtgactaccagagcacaagctttatgctaagtttaaaaaatatgagttttggctatcccaggtgtcattcctaggacatattgtcggtaaaaatgggatcatggttgatccgaggaagattgaatctgttacggattggccgagaccgaagatggtcactaaagtcagaagttttatgggtttagctggttattactgccggtttgttgaggagttttctaagatttcaatgcccttgacagaactaactaaaaagagtcagtgatttatatggacatacaagtgcaaagctagttttcaagagctaaagcatcgattgatcacaacctcggtattagcactaccgtcagatcaggagaggttcatgatatactgtgatgcaactagacaaggtctggggtgtgttctgatgcaagctgatcgagttatcatttatgcctcccatcagttataggagtatgaacatcgatacccaactcatgatttagagcttattgtagtggtatttgccttgaagatctggtgacactatctctacgggaaaaagtgtgagatttacactaaccacaataacattaaatattactttactcaaaaatattgggaaatttgattttctatacttagaaaatcaaaaaaaaatttccctaaaccaaaaatttaaaacctaaaaaactattcctttttttcaaaaccccaaaaatacccccctcacaatattctctctctctgcatc

SEQ ID NO: 348484 - DNA, 535 bp, Cannabis indica
tgcatggtgagcccttaacgcttccatctctttgtctctccactcggcgaacatacacctctgtttgtcgaacgcgaggtttactgcggcacgtaattcctcctgatcgtgatgcaagttattgttgtgaccctgcatgagtccaagcacagcacggaggttttgcaattcggttgcatctccgatggtcgtcttggcgttgatgcgttgtggaacagtgatgttatgaacgtcctggctgcgtgcggaaccgttgtttccggtctctggcacaccaggtgcagttttagtaacatgagtttttccatcattcaccacactccccgtccgtccaggattgacaacgggtggaaccgtcgaactccctgggtcctgcaacatcggatccagtgtctatgagtttgttgggtcggacaggcctctacgagtttgcaccatcgtgtcgaaagagcgatctgtgattcttctctcaatgaaagcaccaaaatgttgacttcgcttttagccaacgacaatgagtctttttgataagcga

SEQ ID NO: 348485 - DNA, 1026 bp, Cannabis indica
gattataattaaaaatagaactagttctataacataatgaataaaaataacatagaataactcaaaactggttataattaaaataaaatcaacacaaaataactcaaactagatataattaaaatagaacttattctataacattgttataatgaataaaaacaagtaacaagaaataattcaaaccgattataattaaagaactgattctataacataataaataacacataataactcaaaccgattataattaaaaaaaacaaccaagaaattagctcctaaaatactgaaacataataattctcataaaactgattataattttttttttaaaaaaaaagcggggatcaatttcaaaaatactaaaagataaatataaataaaaccggttccataacaaaataaataaaaataaataataacatgcaataactcaaaatataatataaaaaaaccgattatatttatcaattagttaaaaatttaaaacaaagaaattggtttcataaagtaactaagataaaaacttatacacaaaaatcagttaaataaaaaattgattacttaaattaactaaataaaaaatcggttcccgaaataactaaattaaaaactagttctttacattaattaaattaaaaatcaatttttaaaataaataacttaacttctttaacttagttacatttttttttgctgaataacaatttacatgcattttgtatatgcttaacaataaaaagtataggcacggttttatgtctacaaaactaaaatctttccaggcctccaaaactatattatcggaggctccataccattataatataaaattttaaaacaaataacatacaataacttaaaatataagataaagaaacaagttatattatcattgttaaaaggctaataagaatttttgcccctgaactttgacatgtaccaaatcataccccctaaacttttaaagccattgaaaatgccccctaaactattgagattttggatttaaggacttttgtc

SEQ ID NO: 348486 - DNA, 659 bp, Cannabis indica
cgtgcacttgcgtagtaattaataattttcgcaacaaaaataaaacaaattatagtcattttatgtctccaacaacacattaaaataaataaaataacaaataacaaattcaaaagaaataaaaaattatgtttaaaaaatatttaattttattttaaatcgtatgttaagaaaaaatatataagaatagaatatacatttgatttattaagttttgcaatataattatattatatgtgttagatttttaaattactattttctatacattaaaatgatatctgtataaataatttttaatttttttttataaatatgtgtggattggattgtatcggttacttttgcatgccaatcaacatccaatccgcacaagtgcagatttcgaatttttcaatccaatccaatccgcactttgcgcattttgtgcacaagtgcagatatccgcactttgcggattagatatttaaccatcatagttacataagatgtttcaatggttacatcagatatttaaccatcatagttacatcagatattgaaacatcttccatatatatatatggaacacttcttaatgggtattacccatgaatagttactaaacaaatttaactataaatattaattttaaaaatatcaaaccatcgaattttgat

SEQ ID NO: 348487 - DNA, 849 bp, Cannabis indica
ctgatttcattcaaatcacactccagtaaatataaggaaattacattttgtattcactttttatttttatttattattcttaaatttatatgtcatattcttattatatatgttagggattctaatttttataaattatatgaggttatatttaatactttgattataagtgaatattatcaattaaaattatgttgtaattatatttagtttagatgtaatataaaatgataattattaacttatcccaataaatatctacaatatattaaaaaaaaacttaatctgttaaaattttatgaattcgaatttcggcccaagccttatacagaattcgaagtgggccttatcaccaattgtaaatcattctcctataatgtcatacttccctgtaatttgcaaaaataccatattacacttatacttggaaaaaatatcaggcacatgcaatcatctctttttcactaaactaaacacataaatataaataaattagatctggtgttatagttttttaagtgagtttttgatactgtaaattatttaaaatattacaaaaaattagtgtgttgtccaaaataactataatgtagaccgataaataaaaatatttatattataatttaggaaaacttacaaaaatactggaatttgagttaatttttacaaaaatactgtcacacggaaatattttcaaaaatactgtgtttttataaaacacccataacagaacaactcaaaacaacagtagaacaacaataaaacactagtagcacactagtgaaaacttaacacagtatactgcagtatgaaacttataaaaaaaatacagtaaaaaagtaaaaaata

SEQ ID NO: 348488 - DNA, 579 bp, Cannabis indica
atcaaaagttataactcgcgtacaaaattgaatactaacggttctcgcgagctaggaaagtactaaatgaggtatcacgacgccttcataaaagtacttaaacctaaaaaatggatagataatataaaaattcatatgagaaaattaaaatatacaaagtgataaaatcattaaagtatattttagtttgctccaatcattctccccatgtgctatcgggcataactgcgggaattaggacataacacccgttgtttaaggataataggttggtgaagagccctacccccctaagaagacaactcaagatgactggccacaacgcatgccctacttctttcttttctttctgtatctgctcgactagttccatcgacgtgattatggaaacaactttttcagtgaatagagcgcttagtctccctagttgacgaaaatggtcaacctgtcaaggcagattgtaattgctattgcgagacagaattaacaactgctcaaaaattaaaaagttttgtagatcactaactacttaaacaggaagagtacgagcaatggaaaaacctgttggaattattttac

SEQ ID NO: 348489 - DNA, 836 bp, Cannabis indica
acaattaatttcacaatctatgatattttttcctatttaatattagaaataatgactagtgtagaggtaaaaatttgcttaatatttgtgatatttttgagaagtccaatatgcaagtcagacgagcccatcaataatggatccaacaatattgggcccaataagacagtcagacggactcactaggccttgaaatagactaacgagtgagcctatgggccacaagccggatcgtcccgcaaccgggtccgagcccagccagtcagccaaacgggtgaaatcaagtaaatatggaaccagtcaggaagacggttactactccctaataattagggaagtaaccaatttgaacgagtccaacgggtgacgtggacagagggcaacgacactgagaacacacgataaaaggaaccatacgatagacgctggacagaacacattcgatactcacactactcactgactcaagcagacagtcgccttttctaagcttttctcttaagcctcaccatcggagttactcttttagtccgtctgtccgcttgtccactcatccgtccggctaccatttatattacatttattttccgttattattattttttactataatcgtactgacttgagcgtcggagtccctttggctgacaccccaccggtgctcccaattgaacttttgtctctctctttgttcttgacaggttgctggtgcccaaattccgtaattgtagatttcaccctctacaatttggcgccatctgtgggaacctagcaatcgttcattcgacaaagactccaaaggttcaccttgagcaccatggccgacgtaattgaga

SEQ ID NO: 348490 - DNA, 584 bp, Cannabis indica
atctgcgttaacagtttggtgctttcattagagcctctgtagaaaaagctcagaaaaaccctcccttctttcgaaagaaaaacaacctcctacatggctgaaaaatccaaaaaaatgttaacacgccacatgaggaagccaaccatcattctacgaaaagatcccatgggctccagaagatctattaatccgcagtcaagaaggaccacctgttctaggagggctcaacctgagggtggccccagtgctcggaccacacgttctcgaagaactcaacctgacgttggtcctagtacgaggacaacacactcaaggagaacttagcgtgggaatggttagaaccctagggcgaaggatgaagagctcaatcatggaggtgcccaatctgtgggagaaagaacttatgaaatagaaagttgtcgcctgagacgccatctggaagaggcgcaatgtcgagacgctaagttagaacgtgaggcaacctcagccagggcagcgtaggggacgaacgctcaaaatcaacttaaacctggagtaagaagaccacgaggatacctcatggctcacaaaccaggagacaggaa

SEQ ID NO: 348491 - DNA, 532 bp, Cannabis indica
aaaccctttgattagcaaaggaagcactgcatttgaaaagtcactgtagcgtgcctaagttttagggcattacaactttccaattctaagcaatcattattttttttcttggtcatttgaacccttctcgtcgtcgatgacaataaaatcaattaaccattgagaatctgattcacacgatggatgcgtggaattttagttgggtcaataccatgacaaatatagtcaacatcatgtaactgtgaaatttgaacagctaactgagtttcggttgaattatattcctatataaaggatgtatccccatcatcgtctgggaaatctcacacattccgcgggatgtactcgttcataatcagtcagtctttaccattctaaagatcagggatgtgatatatcaatatttcttaagatgcaagtatgaacgattcattttagtaccactcccggttaacacaaacgctagtaaaaacaccatcattatctattatactcccatttgttaaaaattataatatcactttattatatt

SEQ ID NO: 348492 - DNA, 765 bp, Cannabis indica
tttttacgagtgtctccaatgaaggggatcaagcatttggggaaaagaggcaaattatgccctagatttataggacctttcgagattctcgagaaggttggacaagtggcatatcgattagctttgcctccagctctttcagcagttcacaacgtattccatgtctttatgctgagaaaatacattttagacccagctcatgtacttagctatgaaaatcttgagctgcaaccagacatgttatatgaagaacagccagtacagatccttgacaaaaaagatatagtcattcggaataagaccatagctttggtcaaagtattctggagaaatagcaaggtggaggaagccacctgggagttagaaccagacatgagagcccaatatccagagttattcaggtttgatttcgaggacgaaatccttttaaggggggatagttgtaaagactgcttagcttaaatttataaattagcagataattaaggtttaattatggaaattatttattaattttaaattattaatttatgatgatttatttaaattcagaatgcattttatatgtcatgtatagaaatttcataattttgcactttcagtgcccgacaatatcggaacgcggtgtttggctattagaatcacatcttagtatttttagtatagcggggcggtatagttagacattgggaatgtcgagaatagttgggattttagaatttcccaaaatacccctaagtgattttaagatagtttagtgtgggc

SEQ ID NO: 348493 - DNA, 677 bp, Cannabis indica
aaccaaaataataatatacatatagttaacataatagggatataatgggtccataattattagttaattggtgattcttaattattaataattaggatatatacttattatttatgacaatattactatatatatctaacatttaatttttgtatgtatgtatatacatatgatatatatatatatatatatacgtgatcaagagatctttaataagaccataagtataaaaaaggacaaagtatatatagaagcatctataaagggtcatgtgaactcacgtttataaactatgttccatgcgtttgaatatttgatatattatgagtcggtggccgtgataagtgttctttttcccttgcggccaaactttgaatatatacatatatatcatacatacaccacaattaactaaagtaaaaagataggaaaaaaaaaaaaaggctaatctttcgatctcgatctcttgtctgatgatctgatcgatcttttttcttcttttttttttttttttagatgaaagttttttgagcacacatgtgtgggcgcatgaggcgctactatacatggacagttttcgtgtacctttgcatgcttccagttatgttttttgatttgggaaaaaaacagaaaaatactaaaaaggaaaaaaaattacaaaaatactatggaccggc

SEQ ID NO: 348494 - DNA, 809 bp, Cannabis indica
aatataatacaatacaatacaatacgacctaatacggcattccaaacgagacctaaaatttaaactcattacatacatttaaaaaatatcttccatcatttttttaccaaaaatatatacttctattattatttaataaaaataaaaaagtgtataatatttcaaaaataatgaaagtattaggataattaataaactaaaattataattaacactaaattataaaaataattttgtttattgaatacacacacaaaaaaaaattaattatcaactaaaatttacataataaaataaaaactaacaagataattaattaagtatacgtgcattcaagtaataatattaacttagttatattaaatagtgtctatataagagaaagtgttgttcacattttaaaacattacaatttaaatttaaactcactacctatatctcttttatttttattatttttttttttaatactgcacttcaaatttaaacctgttacacattctagaatacatttttctattatcattttttacccaattcaaatataaaaaactttttatttttattattgttttcattttaaccaataaaataaaaaaaaaatatttatatttcttaaagaatctttgttgtaacgttgtaacctttatagttaccaataaaatatatttttttaatttttgaaaaatcaaaatatgtaatgcttcaataaccattacagggacacgattttgtcccgtgatgtactttcacggaatgtatttcgtggtacattagatgggtctcagggtacgttactattttttaac

SEQ ID NO: 348495 - DNA, 537 bp, Cannabis indica
tagaagggaaatacttcctctcccagcttatagccctataaatagtgattcatactcactgggcaaaagggtcgagagattttatctaagaattcatattcagagatactgttgtaagagctctaacaacatgaaccattttccttgttcttaagtcaatacaaataacgaggattaggctattaccgaactgctcgaggctgaacctcctcaaaattcttgtgtctatatttgctttattatatttcattcatatcaaactacttgtcacttacaaaattagactcattgtcgttggctaaaagcgaggtcaataaatgtaatattattaataattatcttatcatttcttagtcgttaagaagtctatacttctagggctctaagtcaaatcccacatactcctaaataatccaataactatattgtcaactaatcgcaatattcccaccaattctatcaattaaacccattatgacatttctgtctcctgatcgagtctccaaggtcgccaaaccttaaaatattttattccac

SEQ ID NO: 348496 - DNA, 755 bp, Cannabis indica
gttaatttacaattactttatttttttttcattttcattaatttttctaactcatgtgttattttttttaatttttcttaaaaaatttcacattaattttttatttaatttttttgtcataatatttaaaatacactttatttttgtttgataggtatattttttaagaatataaattgaaagaaaaaggttaaaaaaaattagtacaattaaaaatataaattttatataaaataaaaattatcaaaatggggtgcttttagaactttttgggtgtaaataaaatttccctttttaaaaaatttcgagacatggctacccttgaatatatggtagctccgtcctcgaaacatcattctctttctttagcataggttttgaacaaagagttcactctatcaaaatgtaataatatcttttctgatattaaaactctattatttaatttttttttgagggcacatctctctaattatgtgtgttgtatactttttggctagacaataaattttgttaacgggtgtatattcttcctcttatatatctatattccaattccatttcactcgaaatagctattgttgtgtcctgaaaaaaattagattatatttagggatgctcattggaccatagctaatatttttaggtctatcatgatttgatacaattatatattgaatgttaaattttaccatccgtttgatgttaaattggatcggttatatccgtttgatgtattttatatatatatatat

SEQ ID NO: 348497 - DNA, 1660 bp, Cannabis indica
ttctcaacatgcatgacatcaatgttgtgttttaaaatattcgtgatccaatactccagctcgtagaaaatactttttttccaccaattagaagtttctacaactcttctacgtttcacgctcccaaaatcttcatgatgtccgaaaatttgcagtttgagagcattaacttgtgataatatctcctcacaagtaaatcgtgttggaggaggtcttctttcaactttaccatcaaaccgagtatcccttctcattgcatgattacttgacaagaacctttttatgagcaacatatgaggtcttcctgattactcaaatggacgttgtgtcttcattacaagtaggacaagctttataaccttgaccactccatccagacaagctactacgagcagaaaaatcattcactgtccacaaaagcgcacaacacattgtgaacatcgagttggtcgaactatctctcgttggtacgccattattccacaactcctttaattcgtccaccaacaatcttaaaaatacatccatgtctttacctggatattttgcaccaggaataaggagggatagcaaaaaataattgtctttcatacataaccaaggtggttgattataattagccaaaaccactggacacatactgtatgcaagagtcatgttgccaaatggattaaatccatcagcagctaaccccagtcgtacatttcttgggtcgcttgcaaactcaggatgctttgcatcaaagtctttccaagcacgaccatcgaccgggtatcgcatcaccccatcatcttttgatttaccagtataacgccatatcatgctcttcactgtaatcctcaaactatataatcttttgagtcgaggtgtcagcagaaagtatcgcatgactttgtaaggaacttttttttctttaccgttctcagaagtaacccaacgactaattctgcaaattggacaagcctccttagatgcattctccttataaaataagcaacaattatacgaatagacatggatatagtcataatccaagcctaatttcttcaatctctttttcgcctcgtagtacgttgctggaatattattttctttcagaaatgaaaattttaacaacttcaacaattcatcaaagatgttgttagggatttttcctctaacttttaaatgcaatagctttgctaaaaatttgagagacaaaatccaatcacaaccgggatacaattcagcttcaatttcctcaaataagtcatcaaaatgttggtttgtggttggttgttcatctgctccttgtacatcctctattgtcgaaggaaagaagtcttctagaatagggatcatttcatcctctgattcatcatcgccaaccgctacatcatcatcgcaatcctctggctccccgtgataggtccacttctcatatcctttcataaaacctcgatcaaatacgtgtgctctaaccctatctatttttttaaacctattatttaaacattttgtggactaacgtattgctcacacaaaataccttataattgtcacacatttatcgccacaggtatgtttgaaatctagcaaaatattcacttacctttgggctagttaatataagcatcaattacaaacatacaactatcctaatatttaaataaattaatct

SEQ ID NO: 348498 - DNA, 658 bp, Cannabis indica
gtcaatccgaatgacattaccagaaactcatagtgcccatatctatttcaaaatgcagtctttggtatatctacttcccaaattctgagttgatgatagccggatcgcaagtcaatctttgaaaataccatctttccctgaagttgatcaaacaaatcgtcaattctgggtaacggatatttgttcttgatcgtcaacttgtttagttcatgatagtcaatacacattctaagggaataatctttctttttaacaaacagaactggagcttcccagggcaatacactaggtcgggtaaacccaatatcaagcatcccctgaagttataacttaagctccttgagttctactggagccatcctatacggagctttagaaacaggttcggctccaagtgccaaatcaatcacgaagtcaatttcttgttgaggtggcaatctcggcaactcctcgggaaatacgtcaagaaagtccttaacaactctaactacctcaagcccaaatgtttcaggtctactggagtctatcaccactgctaaaaatcctacacatccactgtgtagtagattcctagcccatagcacagaaataactgggatccgagatccctgaactgatccaacataaacaaatgtatcttcaccttctggctgaaaag

SEQ ID NO: 348499 - DNA, 759 bp, Cannabis indica
ttattttgctttagtttagtcttttcatttgggtgttagtcgattaaataaactgaagatagttgtgtgctgctgttaattgtgatatgtcctgaaattttgaaactgtgtgcttaattctgttaactctttggattagtttggatgcttgtaaaacaagtgtatgaatccaatttgacgatctgtgaaatatgttataattgttttactatgtagtaagattgattgaatagctgttaggctatttttagcctatattttggatcaactttacgttcgcttttcgttgttttaggacggaattatgcgtgttttctatattttcaggttctgcggagcaatggaggcctcgggatgtaaaagttcagtaaaagatgagcggagccaagaaaaacgccatttttcagcttgacgcacttctggccacggatagatcattgtcgctgcggccataactcaaagacagaactgatgattttggttgtcccagtcgccgcggccaaatacccctgtgccgcggccataaagtcaaggcagaaccgtggttgtcaaaagctaatctagccgcggcgagacatcttgtggccgcggcgagagttcgtacgactgagggtatttttgtccaacgaaccctaaaaatcatatataaatagaaaactgcgattagaaatcaggggaagcgattttgagacctaaaacatagcagaaagcggcaagaagagcagaggaaatcaaagtgaagatccagagtcattccac

SEQ ID NO: 348500 - DNA, 846 bp, Cannabis indica
tcgacgtcctccattggttctacgattttttcggatcccacacggggatccaactcatcctcttccgccatttctggctcaataatttctcggaccatcaagacgggtaggtgggcagcaacgttataacactgcctggcctccccttggtttcccctcacggtccctatcccagcctcttgggtggggaatttcaggcacaagtgtcgtattgacgtgactgtaccaaaatctaccaaggccggtcggccgaggattgcattataagctgttgggcagtccaccaccacaaatgtgcagtatttgaaagtactttggggtgtgtccgggcacaaggtgactgggagcctcacttttcccattgggataagtgtcattccattgaaccctgtgagttgggaaccacttggtgaaaggtctcggtctgttaggcctattgcagtgaaggcctctttgaataataggttcacggaacttccgttgtcgatcaagacttgggccacgatcttattggcaatgggagtctctatgaccaaagggtcatggtgaggaaaacacattgttttagcgtcttcttccgtgagtgtaatgggctggtccattagccggggcctttgagctgggagttgagtaacctcccaaacctcatcatgtgtttacggcccctgcgtaccgtttgagctccttacgggtagttcctccgatgtggggtcctcccgagatcatggccactctcctgttaggtcttggtggtaggccaggaatatgctgggcatctccgtggggagcaactggggccaaagctcctgctgcaccccctggcgctccttgaggcagagctcctgc

SEQ ID NO: 348501 - DNA, 546 bp, Cannabis indica
atttaggtgcccatacacctaatcagcttatcagatgagtaagaatgttctaaacaaaagtacgacctttgtaccacatgcactaagtactcatctcgtaatagtgttggtagggctaatccataatctaatctcgtggtcattacaattatgctcccattaaaaggacttcgtcctcaaaatctaacctgaataactctgggtattgtgtcctcgtcttggactctagttccctggtggcttcctccaccttgctattcttctagagtacattgaccaaaacaatggtcttatttcgaagaacattttccttcctatcgaggatttgaattggttgttactcataggacagatctggttgtagttctagggcttcgtactcaaaatatgagtcgggtctgatacctacttcctcagcataaaaatatggaatacattaagaacagatgacaaggctggtggtaaggctagccgatacgctacttgaccaaccttctcgagtatctcgaacggccctataaacctagggcttaacttacccctctt

SEQ ID NO: 348502 - DNA, 1208 bp, Cannabis indica
agaatttttttttatattatataatttgagatacattttggttacttctaaaacttatttgtatgcattttagaaattaattagttattttaaagttatattacggtagcttataatttaaaatatatttgggtaaccttaaaagttattttcgaaactaatgaattgtcatgtaatacaagctaccatttttatataccaattattttaatacatttttattattttgaaagctaattagttatcatataatataatataattcaattaacaaaattataaaatgaatattaactaaaatttaaagaaattataatcagtaactaatcactatattaataactaaatgattttttttttctagaaataacaaagaaaaaaaagagaaacttacaaaaatactagaatttttgttaacttttacaaaaatactgtcccacggaaatcttttaaaaaatactgtatttttataaaaacaataatggaacacaaaacagaacaactaaaaataatagtggaacaagtaaagaacaaccgcagaacaacagtgaaaactcaacatagtacacaatataaaacttacacagtatttttaaaaaaaaaattccgccccacagtataaaagtaaaaaaattaaaaatttcagtatgtggtgtaagtatcctaaaaaaattgtctcccacatcttgaaatgttcatattgaataatagatcataatgatatttttttaaggtaaaccaagtaataatgtggtcagaaattatttttaaagttaacaaaaagagaaagaaagaggaaagaaaaaaaaaataggcaatgaaagtttgctaaaacttaggcaaacataaaaaaagtaaaaaaaaaaaaaaggtaaaattgtaaattagatctaattaaatgtgttagatgtaaattctcccaaatataatctcttccgtgagctcatgtgttgactctaaatctggaggaaattagactttattactttttttatatttttttatattgtcttattttattttatactcttttttaaagtctattatttttaccacttttattaaacactgtaccaattttatccctatcacttcaagatattttccctgtgattctctaatgtcagggtattttgagtgcagtacatattaaaagagctatgtttcaattaaatgtaaattaaaggtagatttagttaattgataaa

SEQ ID NO: 348503 - DNA, 1160 bp, Cannabis indica
ttctttaaactctctctctctctttgtctatatctctatgacttcagaattcatcatctattaatgaatgtaaggccctttaaatactgatgttgcagctgagttcaaagtgctcgatcaccaactgtcataacagacagttggttaatatggttaagtttggtaagggcactttaggaatttgatatttggccaactacttcaacaattatccaccttggacatatatcaaaaaaatgcagcagtatagagatgaattgcagctgttctggacttgagcaatctcaggcagtgagaatgcttagcaagttcagacaaagtctgaacttggcttgaggaacatatttggttaacatgtcagcaggattttctttggttccaatcttcttgatctgtatctccttccttgcaatgacttctctaataaaatggagcttgatgtctatgtgcttggacctttcatggtacattgggtttttcattaaatgaatagcactttgattgtcacaatggacagtgatgtcttctcctttgaaaccaagttcacttgtgaaacctcttaaccaaattgcctctttaatggcttcagtagcagccatatattcagcctctgtggtagatagagccaccactttttgtaagttcgatttccaactgatgcatccaccaaaagctgtgaatgcataaccagtgatagaccttctggtgtcgatactccctgcatagtctgagtcaacataccctgcaacctcagtttcaaattttccattgtctctgtacagcaaaccaacattagatgttccctttaggtatcttagaatccacttcacagcctcccaatgtgtcttgcctggatcagatatgaatctgctcaccatgctcaatgcatatgccaagtctggtctggtacagaccatgcaatacattagacttccaacacaggaagcataaggaacattgtccatgtatgttctgtcttcttcattatcaggggcttgattttgagcaagtttgaagtgtgaggcaagaggagtagtgactgtcttggactcactcatgcagaacttgtcaataattttctgaatgtaaccttcctgagataagaacacatagccaggtctttgtctcttgatttctatcccgagtatccttttagcttc

SEQ ID NO: 348504 - DNA, 632 bp, Cannabis indica
ccggttcctcacaggcagcaaactcaaaaatccataactcattcaaatcaaacccaattcataccaaaccttccagacctattctaaataccccaaagaatattttcaaagcattaaaacaacccagaaatcacagatacgaaaaatgccattaaagctccaagctttgagttcaaaactcaagcttggctaaacccctctaacatgcattcaaacctgtttaaatctacttaaatatgcataactaagcttctggaatcaatcataaacttcaacaacatcacagcaacagtttaaacaattttctttcaaaaatcatatattttacatagaaaaacatagctttgctcaagctaagattcatgcttcaaaaacaactcaataaccttaatctaacaagctcaaatctcaaaaaataacaaccaatttacagcagcaacaatatccaacaaacatgcatgcatcaaccattttcatcattttttccaagaaagtaaaggaataaaattaggaacacataccacaacaagagatcacccaaaacttcctgaaaactacaagattcacaaggaaaaatctccttttccttgctgcacaatgaagccgaaatggagagggaaagagagagagag

SEQ ID NO: 348505 - DNA, 563 bp, Cannabis indica
taggacataaaacccaacaataagatgatagaacattttggaatagaaaatatcttctactttactactttttttgtagatttagttatcttctcaaaaaaatagtatttgtgggaacaaatacttttctatcttaatgaccataggatggtccacccataatcacttttgaatagctatcaaacatgcaaatcttagttaacagttctatcttttcttaagttcatgatcaggacatccctgaatctagtaatggtgtacactaagtatacgaccattccatcattctaaaattctcctatcactaaggtatcttcctagaaggacataggcaactacctgtaactaatcatagactttatactttcatcaatatgcaaaccaaatttcttgaagctaagtttggatacaactcaaagtttaacttagtgacttttaaactgttgggttttatgccctaaataaaactccatttcaatgtaatctttatcttttaaatatcaataaagaaacagaagtattttcatcactttttgtgtcctttggttcatgttatcatttat

SEQ ID NO: 348506 - DNA, 1051 bp, Cannabis indica
ttaggtggcaaggttactttttgatttagcaagggcaaaatggtcttttgccatgttgatttgttttgtcctctagtggattatgtttgaattagtaacctgattttatttgggattttgttctataaacattttctactggtgaaaacaacctttatagtggatcaatacgcagagttatatgtgaaagaaatagtgaggttacacggggctccaaagtccattatatcagatagagatccaaaattcacctctaaattttggcagagtctccaacaggccatggtaccaaactgaagttcagtactgctttccatcctcagattgatggacagtctgaaaggacaatccagatacttgaagatatgttacgtgcctgtgtgttggattttgaaggctcttagagcaagtacctgccactgagaaagttttcatacaacaacagttatcagaatactatagggatggcttcctacgagatactgtatggtaggaagtgcagatctccaattcactgggatgaaattggagaaaaaaaatacctaggtctagaatcagtgcaaccgactaatttaggtatagaaaagatcaaggccagaatgctttccttttaaagtaggtaaaagagctatgtagatttgaagcgtagaaatgtagaatttttggtaggagatcatgtattcctatgggtgtctccgatgaaagggatcagacgttttgggaaaaagggaaaattttatcctaagagcctttcgagattctcgagaaggttagactggtggcatatcgtctggccttacctccagcacttttagcagtccacaatgtgttatatgcttctatgttacggaaatatgttttctgatcctactcatatgctgagttatgagaacctagagcttcaaccagatatatcgtacgaagaacaaccagttcagatcttagacataaaagataaagtccttcagaacaagaccatagctttggtcaaggtactctggagaaacagtaaggtggaggaagccaccttggagttgttcaggttagattt

SEQ ID NO: 348507 - DNA, 589 bp, Cannabis indica
agatcctggtaaaataaattccaacagcgatcattataattatccctccattaaaagaatttcgtccctgaaatttaacatgaataactctagatattgagctctcataccggactccagtttccaggtggcttcctccaccttactactcctccagagtaccttgacactatggtcttattctgaagaatctttttcttcctatcgaggatttgaactggttgttcctcataagataaattcaattgtagttctatggcttcataaatcaagacatgagttgggtctgatacattgagatatttaatacattatgtatagctgataacattaatgattaggttagctgatatgctacctactagactttctcgagtatctcgaatgaccctaacaaccaagaacttaacttgccctgctttccaaagcgctttacacccttcattagtgagactcataggaaaacatgttatcctacttgaaattctatgcctttgtgcttaggatcagaatcacttttctacgttctttgtgaagcaagcatccgagccttgatcttatttattgtaacacactaactagcataggc

SEQ ID NO: 348508 - DNA, 1135 bp, Cannabis indica
atcacttcccgagggcttaaactcgaaactagaagtctccctatcaataaataacatggaaataccctaaatgacacaaaaatgggaagaactatggttcccaaattttccccaaccggtagaccggttctaaaaccggaattccggttctggaaaattcctggaagcctcaaccggaatttcggttcctacaggcgtctctgaaccggaattccggttcagtgcaggaaagggttaaaaattcataactcatgcaattcaaccccaaatcataccaaatcctccagacctactatttagaccccaaagaacaattctaaagcaacaaaacaaagcttcatacacagaaatgcatttcaccattaaaggttcaagattgagttcaaaaactcaaaacttgactcaccttcaaacagccactaaatgcattaaaccacataaaaactcatatctaaactgcagaacacaacaacaataactacaacagctacagcaagctaaaacaacatatcactcataaaaccaaagtttgagttcaaaactctatacttgcttaaaattaaccaatcatgcatcaaaacctgttctattctatcaaattaaacatatttaaacttaaaaaaacaacaataaacaataacaacagccacaaccacaaattcatcaaacatgcaataattcatttttcttaaacttcaagaaaacaaaaaaaaagcttgaacaaagattacctcaacttgaattactctaagattgatggaaacttgctgaattgaagaacaaaaaccaaccctagcagccctagggttttcgagagagagaaagagagtttgagaggaagaaatgagactttgcttcctattccaatttttttgaatgaaatgaattataaaattgatttttcctaatttgtttcagccaaaccaaattaaaaaatcagtttactaacatatttaaaaatccataaaagacaaattacatatgggcaaaaatgaccattttgccctcacacactaaaatggcataaaaggggtacaaaggggtattttggggaattctaaatttctgaccaatcccaacattcccaatgtctaacaataccgccgcgctaaactaaaatactaatttgtgattc

SEQ ID NO: 348509 - DNA, 578 bp, Cannabis indica
agtaagtatctaccattgatagagttctcgtataataacagttaccagagtacaataggaatggctccctatgaactgttatatggcagaaagtgtagatctcccattcattgggatgaaacgggggagaagaaatacttgggtctggaatcagtgcaatagattaatgaagcaattgagaagattaaagccaaaatgcttacctatcagagcaggcaatagggttatgcagatccgaaacgcagaaatatagagtttcaagtaagagatcatgtgttcctgcgaatgtctccaatgaaggggatcaagcgttttgggaaaagaggcaagttatgccctagatttataggaccttttgagattctcgagaaggttggacaagtggcataccgattagttttgcctccagctctttcagtagttcacaacgtattccatgtttctatgctaaggaagtacgtttcagaccctgctcgtgtattgagttatgaaagtcttgagctgcaaccagacatgtcatatgaagaacaaccagttcagatccttgacaaaaaggataaggtccttcggaataagac

SEQ ID NO: 348510 - DNA, 690 bp, Cannabis indica
ataaataggcatgtgagtgtaacctacaggtctgtgacacacatatatgaatggcattactgtgtaaatagcatgatgagcatattattattgttatgatttatactgtcttgttgggcttggctcacgggtgctctattgtgtaggaaagggtaaggctttagttgattagccatgagtacaagagctgggtgaagaatgtacatgtccgggccatatcagaccaagcaggttaagggtctaccagtgttgaatttttgaaactctattttgccgcttaggccggctaactgaaagagacttgtaataaagtttgtaaatattttttttttggatcccaactgttgtaaagtttaaattattacaagttttattttcattatgtttattataaaagtttaaattgtgcgctattttgattagtaatcccgtttaggagattagagtttcgtaaataacttgagtagcgtgcctaattatttagggcgttacaaataagtaccaaatgagaaaaaaaatcgaagtaactaattgccaaaataattaaattagttatcaactaaagtgtctaaaatgtctaacataagatatatgcgattattaacttaaaaaaaaaaaaaaaaggttagaacaccaataatccctttaatataaaatttttccatatcatgttattattattattattat

SEQ ID NO: 348511 - DNA, 808 bp, Cannabis indica
agtccacgagtttttttatttatgagagtatttattacagagaatgttctttgtagctcttctctctatggttcttatgaaacccagaattctcgacccctaccttaatgtgtttcgggggtatttatagtatttttgtggggtgatccctcgaaccgagctacatgtctttctgtatttttcagtagaggcacacattcccaacgagtgtaacataggaaatgcatggtctatgccctaggtttttttaggggttaggtggatgtaatccattatcccttcttgactgatgtgattcctcataaagtagccgtcactaggctcattaatcatagtgtaatagctgcaaaagggggttacgccgtcagacttaatacttatggcatttccaatacatcttctcccatgcggcattaaatgcgaggtgactgttttgatggggtttgatacctcccgaaggtgctttgctatagctttgccctccaggagtacatggatccctcataccttcttcaggaggtatgtttcttgctgatcatcttgattaaaaaaggcttacttgaattatctcaaaaccttactcctcaaatccacgtgtcgcagtcgcgttggtccacgtattttggacaaaattaagggcaacatttacctcccaagccttgtttggtgggaaataaacgaggcatgcttaagtacctccggctgtcttattaacttcctgatacgtgctttaggcgcgtgggggtgcatttacgaccatcatcattgcagtttttactttttgcaggcaacgatttgtttcctatcc

SEQ ID NO: 348512 - DNA, 813 bp, Cannabis indica
ttcaagttgaacactcctgctgatgcatctctcatatttgcaaagactcatcttaacaccaagtctccaacattgaacagtcttttcttgactcttttgttgaagtatcttgtgactcggtgttggtatgcagcgttggtgatttgcgactcagttcgtttttcctcaagtagatccaaggacaattttaaaagttcctagttttcttcttgattataaactctcttctgtaagtcgatatattcaatttaataggcaacattgcttccgagccaaatgctagcgagaaaggagtgtgtcccgtggttgttttctcggtaattctgtggccctatagcacctgggtagctcgtcaacccatctgcctttggcagcatctaacttcttcttgatagtatcctttagggttttattaacggctttcacttgtccatttccctgaggcctggatactgacgagaagctttagataattttattcgtctcgcagaattcagtgaccaagtcgccatcaaattgggttccattatcgaatactatctttatgggaattccaaacctgcagataatgttcttgacgacgaagtcaaggactttcttgcaggttatggatacaaggggctcggcctctgtccatttagtgaagaagtcgactactaccacccatacttagctcttcctcgcccaatgcgtaatgccccaattaggtcgatcacccatatagcaaataggtagggcaaggtcatcattctaagtttggttggcggtaggcgaggtatatgtgaaaaatctctaacatttatcacatctctt

SEQ ID NO: 348513 - DNA, 790 bp, Cannabis indica
gtcggttttataaaccgagtaaattctttaaatgacatttaaaaactgacgagaattgtactttttgtagtagtggatgggtcaagcttcccaatatttgggccagttttgcgttcaccggcaactattttagggtttttgtgtaagtcttagcttattccttgatagtctccaaaattactattaatccgaaagaacttggaataggatgtgtactacctaatcttcttttgttaataaaaacaaaaatattagaaaaaataaaataaaaatacgtacggaaacaatgaataaataatactatattaatatttatttatatatattgatgaaaagtgttacacatttctacacttttttagaaaattctagtattaactacacaaaactaagaaaattaaagaaaactagatttaactagaaactatatttgtaagctaagaaaattagaaaattctagaatatcttagaatgttaaattgtaattcaaaataagaaaaatctagaaagttgtagtaacaaccttagatccctataaataccaagcttgggttgaggagctagtgtaacaaaacaaccaacaccaaaaaaccaaagttccaaactatcaataaaaatttactactttctcaaacaaccctctcttctaagccaaactcatttcttatactaaatcaacaactactcatcaacgtcactacttcactacattaccacaacaaaccattaaccacatatccacctattccaaatctaaaccaatacagatttattatcaaaccatcagtgg

SEQ ID NO: 348514 - DNA, 530 bp, Cannabis indica
ggaactcgattccgataaaaaattgaaaaagttatgatttttggaaaaattggatttcgggtgtccatgggtgctcaatcgcacgcattaggcttcggacaacgaagacgtgcgtgcgcgtgagcctcgcccgtgtcatccctgcatgtgtcgagtgttgccgcacatgcaccctgcaaacaccgagaaacctcagctgggtgcccctgctccgcgcgcgtaacaggctgcgtgcagcccctcctgggcagccaacacaaaaatcgttttttgtgggatttttccccaaaaatctaattttttatgggattgtttcccaaaatttatttttccaattttaaatatttccaattttaaaatattttcaatttgaaatttttccaattttaaatatttccattttgatatattttcaattttaaatatttccaattatggtaagatttaaaaatttgttaacttctttaatattaatatattatttaattataagattagatattttgatatttaacatattttaaattaaa

SEQ ID NO: 348515 - DNA, 990 bp, Cannabis indica
ttcatcatatgtgacatttatatctacagatagatagagagaaaaaggggtaaaaattagggattgaaaaaaaaaagtgagaaatacaaataaaaaaattagggattttatatttttgtgtgcaaatggagacaaagaagggtaaaaaacattagagattttgaaatgaataaacatacctggtggaggtctgcatgtcgacaatattgagctccgttatgaattcggtggtgctggtggtggttgccgccgtcgcaagccttctcttgtcattgatctaatgggtgttcttatttgttgtcttgatcatttcccaactatacacagtaattgcagagaaactgagagagagaagaagaggaagagataaatatttgaaaggaaacttccagaaatatcaagagagaattaatatattcaccttcaaaatattaggagaaagaattaaatagaatataatattggaaaataggaacatgtgagctgtgaatgttgactcttacactttttttaccttgaaaatcttaataattatattaaaatcattacattaaccaaaacgtgagctgtcaattgagtgttacactttctgagcttcaaaatatattggaaattaccaaaacatgagctgtcaattaaaagcattacattagccagaacgtgagctgtcaattgactattacactttttgagcttttgaatttcttaaagggtaaaatggaagatatttcttactattataaaagtgttacactttttgagcttcaaaatatattgaaaattatcaaaacatgagctgtcaattaagacagagaatcaaatagaggtgaaaagacaaatttgttaatattgaatttcttaaagggtaaaatggaaacgtgagctgtcaattgactgttacactttttgaacttttgaatttcttaaagggcccgtttggtactacaggattggactggattggactgaaaaggattggactggactgga

SEQ ID NO: 348516 - DNA, 552 bp, Cannabis indica
ggcataaaacccaacatccctatccttgacatttttcctacgagattcctccgactttatcttctcaaagtgatccttactacattcaaagatgtgcagatggagtaaccagtcatggtcccaagacctaacttcaaatagcaagttactttccttctttacatgtttgttacattgtgtttatttgctgcttaatttgtttgtattgttgccatctcatttggtcctggtagtttttagggttaaactatgtttaggtccatactagggttcagacaatacgtaggttttctcagaatctctaacttaccaccttcgggtttgataaaattctttccagggattgggactactttcttcttgcagcaatgtcccactctggttcaaattatttatcgtccagaagatttagaatttgagtttcctacaaaattagccatcccatataaacccaacccttcgaaacccacctccaaattagagataaacgatgctagggttatggaacacgtagtgagaacccaccaggaagataatgccaattcttatagg

SEQ ID NO: 348517 - DNA, 727 bp, Cannabis indica
atatattagttcacattccatgaagtgagttaatattaaatgtgtttatttaaattatttgcccaaatataataatttaaatatagatatttattattattttttggcttgacactacaagaattatggcttttaatgatgacaaatttcgttagtaaaaggtgggtatttcgtcagtattgaatatcaacggcgacatgtcgtcagtaaaatatcgttggtaatacttcgttggtgaaaggtattattactgacaaaattcaaggtcgtcggtgataaaaataattaccaacgactttgtcgttggcaaaaagaattattctttttttaaaaaaaaaatcgtaagcctatcaatgacgacttttcttcattgataatattatcaatgacgaaaaaatcgccattgatttaattattttataaaaaaattataaactaaaaaaataattttcttaaatattaatttttccactaatcaattttattaaatatttttttaattaaacaatatataaaataattaaattaaaagtaaaacataacaccaaactaaatatttttatatcacatatcaaatgtcaaatataacaatatccttcaataaagataatacttgctaaagagaaatattcataaaccataaataaacattaaagtaatagttcatataactaagataaaaaatactaaaagaaatttattagttgcgtcgtcatcatcattagca

SEQ ID NO: 348518 - DNA, 719 bp, Cannabis indica
tccaagagaagaaaatacaacggcacatgcgttagcctgattggcgagcagcaatataagtcacaaggcaaacctagtcccaatcgagtttcttgaagggcctagcatcactgtcacagaagaaatcgaaatgatcgacacatctccaaactggataacgccaatagcagcctatctcaactctggggaactcccatataaccgaaatgaagctcggaaaatgagaagaaaaatagcacggtacatcatagtagaagggatcatgtatagaagaggattctcaatgcattaatcagatgcgtcacaccaaaatgaagctgcacggcttctatatgaagttcacgacagattctgtggaaatcatgcagccggacagagcttatcaaagaaaatcctaaggcaaggctccttctggcagacgatgattgaagattcgaaagcttatgtcaagaagtgcgacaaatgccagagattttcaaagataccaagagctccgcccaacgagctgacacaaatgcaaagtccgtggccctttgccatttggggaattgacctagtcggatagttacctaaagataaaggcagagtgccgtacgtagtggtagcggtcgactacattactaagtggactgaagccgaaccactcgcaactatcacatcaaagaaggttcaagactttatatcattgattgtgatagttaattttagaaaaacactta

SEQ ID NO: 348519 - DNA, 479 bp, Cannabis indica
taacaaattcaatctcccgaacaggtggcaatcccggcaaatcttctggaaagacatcaagaaactcgcataccaatctcgtattttcaagccctgatgtcacaggttggctagtgtccactgcagtaactatgaaccctagacaacctctacccatcaggtctttagctttcaacaatgatattctcggtatgcgtgccccctgaaccttacccacaaacaccgctgggttagcactatcgggctcaaacactaccatcttccgtttacagtcaatcgtcgctccatacttagacagaaaatccattcccaggattatgtcaaaatcagacaattgtaactcaattagattggcggtcaactcacaaccgtcaatccaaaaagataaagaccgaatccaccttgtggacactatcaggtctcccgagggtaacagggatccaaaccccgaagcataaatatcacatggcttatgtaaa

SEQ ID NO: 348520 - DNA, 930 bp, Cannabis indica
agcgaagcaaacgccctcttcaaaaatttattcaaacaacaaattaaaacaataataaccttactacaattgaaattaaaaccctaacaaaacaaccaaaaactcaaattcacgtaccttggaagaggtactttgagatttcacgcctgtttttctcagagataatctgaataacaaagttagagttagatcgaaaacaaacatgaaatataggtagaacaacaagaagatgaagatgaataccattgttaatggtggagattgagatggtgaggttgatgacggctagagattgagagtagaaggttgattagggctccttcttctgtaaatgtaaaccctaatacacagattttatggtacgagctttattttgtacagtttcttatgggcttttaagccggcccaaattataaaaggaattatctcaaaaaaaaataacaaaaaaaaaaattacattgtatacccactttatttatttattgtaattttacctctatttatttttacctattttatagatgatgttctgattagaattcttaagttaatataaattatatgctagatttaaatagagtgtgagaatatattaggcaactcactcaaaaaatagttatatttaataaatattatataatggtatttttattaatgaatataaaaataagtattttcaacttatctacaaaaaattataaaataacgtttgtacgaatttaatattttactaatttatgatttattgatagaaatacagtctttgatgtattattatattgtacttttattaatttgttgttgtattttttattatttgtatgttattttttattgttgttttgattgttattttcctgttattttatgtagtttcttgttgttttgttgttatttttattagaactaccgtaaaaatgtaaaaaaaaa

SEQ ID NO: 348521 - DNA, 530 bp, Cannabis indica
aaatttaacacgccgaaaatacgatttaatttttttatataaatctctttttttttttccttttttaaaatctcaattttttatttcttttatttataaatctcaatttttttcctttttttaatcttgttatatttttataaatctcaattttttttaatgtcaattatatataaatatatattatcttaaaaaaattaaaaattattacatgaaaaatataaattgacactttttttacaaaagtatatccataaggtgtgaacaatatttatacctattatgtgcttttaattaccaaaatatctcttacactattacttacacaatcagacgaatgttgttcggtggttgaccgaaggttgcatcagacgaaggtttcaatcagacaaaggttgttgcgtggttgaccgaaggttgcataagaagaaggtttcaatctaaggaaacatggatcgtgagttgatgttgaaactgtaatgcaatagttatatctgttgcgagcccactaacatgcaacttaattgcaa

SEQ ID NO: 348522 - DNA, 1011 bp, Cannabis indica
ttttcgtaggcttattcgagtaacatcatgattagaaattatttttaaagtttgagagaaaatagaaaaataagaaagagagtaacctaaaaaaagagaaagcgagacaaatataaataagagtattgaaacattattaaacaaataaaaaaacttggccgaattatttttgataattaaattaaaaataagttatttctgacaatttctctaaaataaatatttttaaaaaaacaaccttaattatatcaaaggataaagatatgtacctcgatttgatcaccaatatgaatgtagagtgcatttggtatataatcaacagcaacccatttgttgtctttccatatttgaagaccagaaacttgattagggataagtatggtaatggctgacatgtctgtgtgaggctcaactcctagggcaagctctggttgtgggcatggtgggtacatgtttatcttcatttctaactctatttcatcttctcccaaacaattctttaaaccctttccctttgataatccaagaccttctgatagcacttcaagaatcttatcagttatcttcaacatttctttgttgtattcttcagtcacttccctattatattatttgttaattattttagtaactacaaattcattatgattcatttaatttttgttagttttctaatatcatgtcaaattatgtattatatattagtttgtattatattgtacaaatagggagtaacatgatgaatgatattttgtttttctaataagtatgcgattttgaaattttaataaaataattatgggatgtttccttttttatgtttttttaggattttttgagttaattagtatatgaggtttaaattataggaaatcttacaaaaaatatgtatatatatatatatttatatatattttttttgttatttttacacttattgtaaaaaaagatagataatgtataaatccgagttgtatagatagtagatttaaagaaagcttcaaaaataga

SEQ ID NO: 348523 - DNA, 722 bp, Cannabis indica
aataataggttttaataaaaaaaaaataaatgtaaatataattatattgatatttatatttatttaatttttttttcaaattaatattatgaataaatattagaattaaaattaacaataatttaattactacacacgttatgaattaaaatttatccatcataaaaattaaataattatcatccatacattatttaaaacttaaatatatccaaacataattaaaaacttaaataaatccacacataactaaaataaacataaactaattattattgtcttgatcaaacaaatcatctataaaatttgagccagtagtgtttaagttaagatcaggatttggtgcattgtcctgagcttgcgatactggcggtgatgggtaatatggttgctgggaagataaaatctccacaaattgtcgagtctgtcgttgttgtggtaaattcggagattgttgttgttgcgaaacatttaaagattgttgttgtggcgaaaagtttggggattgttgctgaaactgaccaagaaaaatatatggattttgtgaagcgaaaaattgacccggagaaggttgctgcattggaccaccaaaaaacattggctattgagatgaactcccaaattgaccaaacatcggctgttgggactgtgatcctccaaaaaaatcagagtagaaaaattgaggagactaggaggagtgtccaaacatgttcggaataaga

SEQ ID NO: 348524 - DNA, 604 bp, Cannabis indica
tgtgtctcgatggaagaataggaatatagaagtacgattggtagtaaaggtcacagttattcttggtaatgttttctctaaatgggccaaattaatggaagtggtaaaagccttgttctttgcagattggactcctttttaagtcataaagaaagtttatctcgtgaggagttagaataggccagttcctaaggtggtgaaatatgaagaaggtggcaagaatcctatagccaattggatttatctagtaagggcaaacaccgaaaaaatcagctatggatatgaaccatggatgcaatgacaagtaagcacccgcattcatgtggaactcaaccagacactacaacaagtgttttgggagcctttgggagcaccatgttgaggcttccagaaaacagcctcagaaagaccgtagtcatcctaaattattttagcgtgaagctcaatgagggtgttagacaaaagaggccttagacatgatctctcacatcatcactcttaatggtagctttgagaagctaagttgacatcaccttccaccatgggccttgtctaagttcttagacttaggcaaagtaagcttagctataatgaactgagacac

SEQ ID NO: 348525 - DNA, 684 bp, Cannabis indica
atattgaactacatatatttcatcacttatatataaatatttcatcacttatatatacaatatttatagtaaatcgcaattttgagaatgttttttatttgacttttccactatgcatttttttatagtgtgactttttatgatttaggcctattgtatattatatatatgatcagtttttgtttacacttagctgatctaacatagatataacatgggaagtttttttttttttttaaagtttagtctcaagggcatgaatcgttccagtaaaaatatttggattttggcgtttcatttatgagctgtttttttctttccagatttcactttccatcaaaatttatatttaggaaaattttgacagcataacatttctttttatttaagatttttatttttactttgattatgcacctctacattgacttattttctgaagtctagggaatcaaagagaaacataaaaatcatcgataataaatttgacagcataacaattctctttgtttaatatttttatttttgtgtttgattatgcacccccacatcgacttattttctgaagtctagggaatcaaagagaaacataaaaatttatgaagaattgggcagcataatggcatgaagaccttaaattctcttatttttcctttggctatatctcacttttgaagatctttt

SEQ ID NO: 348526 - DNA, 982 bp, Cannabis indica
aacccctgtttggtcataaaagtgtcaaaccgtttgttccattgtctcggggattgcttcaatccatatagagacttgtcaagcttgcaaacatggtcttccttgcctttaaccacaaacccctttggctgctccatatagatgtcttcttctaggtccccatgtagaaaagtcgtggtcacatccatttggtcaatctccatgtcaaactgagtagctagtgcgagcatcaaccttatagtcttatatttcaccactggtgagaatatttctgtgaagtctatcccttctttctgtgtgaacccctttgccaccaatctcgctttgaaccttaccggttcatcctcggttctcccttccttgactttgaaaagccatttgcaagataccacactcttgccatcgggtctaagtacaactctccaagtcttattctttatgagagagtacatttcctccttcatttctttcaaccaagccttgtaatttcggtctttaagtgcttcttcataagattgtggctcatagatctcagctttaagtttgcacatataggcataggcaatactctcatcccacacattgtaactgtacttttggttcggtttagggactcttttagctctatctcttgtaagctgatattctgtgaggtcttcctgattcccgtcttcttcatcttgaacttcatgttccacctgaactggttccacctgatttggtgcttcttgaggttccatttgaattggttccacctgatctggattcggttccacttcagttgggctggtttgagagactccaatagatgtacctgcagggttagtttctgtggaacctgcatcaagctcattagtatttttacaaggaaaatcattttcttgaaaaatcacatctctactgagagttttgaaacctcctttcccttttacccacaatctatagccctttacaccttcggggttgttggaaatttatttta

SEQ ID NO: 348527 - DNA, 906 bp, Cannabis indica
tgtcttctttccaaatcctcaaatttggtcattgattctggtgccatatatgacacgtaattccagtctcttttccacttttcagtcttatagtctcacttctattgttaccttagctgatggatcaacatcttttgttcttggatgtggcactattgttcctacccctctactcactttgtcatcagtcttacatttacctaatttgtaatttaatttgctttctgttagtcaactcactcgtaacctaaattgttgcatctcattctttcccgataattgtttgtttcaggatcttatgaggaagaagattattggtaaaggacatgaatctggtggcttgtatgttcttgacccacttccaccaacctctattgcttgttcgagtgttgcttccgcttctgagactcattgcggtttgggtcatccatccattcctttgctcaagaaactttatccctaatatagtaatctgtcttcattagattgtgagtcatgtcagtttgccaaatatcatcgtgttagtttgagtcctcgagtcaataaacgtgctagtgttccttttgagttaggccattctgatgtttggggtccttctcctattttgtctcaacctgaattcaggtattttgttacttttatggatgattattctcgtgtaacttagttatatttaatgaaaaatcattctaagctgtttattatattttatgctttttgtgctgagattcaaaatacatttaatgcatctgttcgtactttgagaagtaataatgccgaagagtacacatctgctcaatttcaatcttacatgacctctaatggcatgcttaatgaaacttcttgtgttgatactacaccttaaaatggtgtctcggaacgtaaaaacagacatcttcttgaaac

SEQ ID NO: 348528 - DNA, 572 bp, Cannabis indica
ataaaaataaaaaatttatataacataattttttatatagatttatgattatataaattagattataacattctcattattatagtagaatcttaaaaacttacatcactttaaaatttatatttactaaacactcaactcaatcttttgagaaaattacattgtatacccactttattttacttgttttaatttttactttcattttcatattctttaacatatacatacttttatagatgatgttaccattagactccttaggtcgttgtaaattatatactagacttaagtagaaagtgaggatatattagacaattcactcataaaaagtgggtatattttaataaaatatatcccaatttttttccataattctgctacaattgttttttctcatagctttttcctgctgtataccaaactggtccattgtctaatcaccctcaaaaaaattgcccatttaaaaaatagatatgatttgtttattaattttaaaagtactacatttatataagagatttttacacctcatgtcaaaattgacaccttttttacatttttatccttac

SEQ ID NO: 348529 - DNA, 685 bp, Cannabis indica
ctaataaactttaagtactcatgcatttatgcctttataccgctatttaccttttactttaattttagataattattacatttggtggtctaattattttgattgtattactcacatgatattatttaattatggattttttcccactgaattcactatgcaggttatcatgaattaaatttgatgatgttgaaattaatgttattaaagaaatcaagtggtgaattttgttcaagtaattaagtggtggatagaattattggactgtacatgtacataggttgaattgaatgaatgaaatcaaaatgggcagtcaattcaattcccccatgaaatgatatgatggaattgaaaagacaactcaatatggagtttaaagaagaaataaaggttgatgaggcaaggccacaaggccactcgccacttcaatgtcctatattttttttatgctatgctttactacaaaatatgaaatgtgagtatataaatatatagataattcatatatctagcatatatattaagagcatcttcaactggagttgcttataaagttatttttgccactgtgattattacttttaatataattttatcaatatcaatatctatatttaacaacacatatgtaatattactttatctttttcttttcaaaaaaattactttatggtattattttata

SEQ ID NO: 348530 - DNA, 555 bp, Cannabis indica
aaatagtaaattcaaaggaagaaaaaaattgtatgtgttatcccaatttttgtcctcatgacgtggcatgcttacatggacaaaatcagtgccacgtggcagtacagctcaccaataggaaggtcaagccagcacctgaacaaatagagatttcgacactcaaacatacatcaagtggcagaccaactccctctcaggagttggccggccagccttgggattgcaccatggctggccagcctggcctccacaggggcctaatctgtaaggaggtgctctgcgggatttcttgtgcacttctacacgtggacaacaagtcatgtgctgcgaattgggtcctaaagcccaacagaatggcttaataatatctagattcaagggcactttggtcttttataattatctaacaaactaagcaaacatctagggatttaaattgtaatctagggttttaggcctcctatatgaaggccttaaccttagcctagaaacctaagttgcatctaagcttgaaacctgcctccaaactctaagtgtttgacaaactctctctct

SEQ ID NO: 348531 - DNA, 446 bp, Cannabis indica
agatccaaactgagactggaactcgggcccggacatggtcgtgtacacagaccagaactgagacgcgaagctggacctaaatcttggacccgatcccaaacacagactttgacctagatagggatccggatacgaacttccactcggactaagagccagaatgggatcgaaatgctagaccttgatctggactgagatcttgacccagaccaaaacttggacccgcactcgggacccaaagttggacctggacccgaacctacacccagatcggggtctacacctagactcacactgggacaaagactcggacccgaactcaaactcccacacctagaatcagacaccaagctagactcggagccgacgcaaactcgaacccagaccagaatcagaaccaaggacttagacctagaattgaatccagactcagatcgggattggaa

SEQ ID NO: 348532 - DNA, 711 bp, Cannabis indica
aatcagattgtaaagggttttatttagggcagaaaacccaacaattaagaatagaataacttgtatatggcctaaaaatgtaactagtagtgaagagagttggttcaactcattgtaaagattatagttttttcttgaggccttttatgagggtgctctttcgttgtataaattatttgtttgatctaatacacttgctgatttacaaaaaataaaagttcaattttttgaattaggcttctatttatagttgttaaaaccctttaattcattcatatctaattatttaaataaataaatatcgacaatcgaatttggttactgatatgtatgagggaatctctcaactactggagagaatatctcaacaactttgaaatatcttcaaccactttttaaattcaaatatttatcgaattgaataattaaataattaattaatctaaaaagataaatttcatagggcataggcactacctagtcttgtttaggacaatgatgatgtcttttgtcctgataactttcttctcaacaaatattgtcttgacaaatttttgttgggatttttgtcctaaataaaacccattacaatataatcttattcgttattaatagaagattagaaaagtcatttatgttacttgtatttttcatatttatggtttattatacaatttttgttaaatctagaacatattgtaattcataatt

SEQ ID NO: 348533 - DNA, 1617 bp, Cannabis indica
agaagatcttcagttggtagactaagttttatcaaaagctggcaaagaagttttgattaagtcagtagctcaagccttaccaagttatgcaatgagtgtctttctcttgacccaagaaatttgttcgagccttgaaggaatgatggcaaagttttggtggaaatcccaatcgagttcttctagtaggggagtgagttgggttagttggaagaaggtttgtcagcataaagatgttggtggtcttggctttcgtgatcttcgtgattataacctctcttttttgggcaaacaagattggcgtttgcttactatggaggacacacttgtggcgaggatttataaagcacggtatttccctcatggttctttccttaatgccgaactaggacaaaacccaagtttcatttggagaagtatttgggcggctcaagatcttgtaaagcaaggtgctagaaaagctattgctaatggaactgcggttagtattttacatgatccttggttacccaatgattctaatccctttgttttgtccactaatccgggcctaattgatcaatatgtgtctagtttgatgataactggagagcggtcttgggatgttgaacttcttcatgatatgtttgaagagcgtgatatcaatttaattagaagtattcaacttagtcactcacgggctatagatggttgatattggagtatggaatcttcgggtttttactcagtcaaaagtgcttataagtttctccaagcatcgagaggaaattggttattcatgcaagacgacaacttttggaagaaactttggaagctgcccgttccctctaaagttcaccactttctttggaaggcttgctctggttgcctcccaacaaaggtacaacttcaatcaaaacatgttaatgttgatcttttatgtcctttgtgtaatatgcatgtggagacaatttttcatgtcttggtggactgctctttctcacaatcctgctgggcattatcggccataaaccagtcggctgctggtgttcatgccgatttctgtgactggttttttggtatccttgctgccggcagtgaggttgtggcgagtgaagctgctatgttgtgttggagtatttagaatactcggaatgaagtgcaatggcaaaataaaaaccgaactgctttggaagtggtaaaatcggctaaacatgtccttggccaatggaaaattacaaagtttgagtctcctaatgctttctttgctacgggggacactacaaacagtaattttggcgtaaacctgatgtttttacggtcaaggtgaatgttgatggtgcgacttttgaagctcatcaaaagtttggttttggttgtgttgcttgtgatagtcatggcaagcttattgaagctatttctgggagtagatggggttgtgtgtctgcagagatagctgaggtaattggtattaaggaggcgcttagttggataaagcgcaaagggtggggtgcggtggttattgagtctgatgctttggttatggtcaaagcgattaatagctcagttcatatgccatcccaatttagtttgttagttgaggactgtcgtactattttatctagtttaaatattgtcctt

SEQ ID NO: 348534 - DNA, 976 bp, Cannabis indica
ttcctactcgatgcaaatataaggatctttaattatttagattgaatcgatagataatttatagcttatctattcttggtgaatagagcattttatgtaatcaggagtacaattccgaatctatagtggagtcaggagaaatttataagatagagaatttacgcggtaaattctataactacttattgggagcttgattatatagtctcatggtccccatactagagataatattgtcttgtagactcaattaattaattttcattaatcgattagaattctaaataaaattatatcttgtttatgagtttcactaagcaagagcttctttgagaagaaaaagagaatttagggtttgtttattaattaagagactttgaaaggtctaattgataaataagttaaatggcagttttatttgataattaattataattattaaatagatagaattaatatttatagagctagaattaaaagatggcatttgtgaaaataaatataaattttaataaaatggcaaaattaaaatttaataggcccatttaagattcggccaaggtggatttaataaagctattttttatcttttttattctattttaaatcaaaacataaccctaagagctaccttataaatataatatgcttgctcttattttcagtgtataactctaaccctaattgactctatttgtcagacaaaatagaaaataagctgagccaccatcatattcgaattcttctcttcctcttcttgaaattttgaaaccctaagtgaatgagtaatttcccacataattcaaggtaatacttaagatagtgtggaagattgtgtagtttttgtcaactgaaggagaatccaggttcaaatcttgatcatactctgcaacagaaaggatcaaggattaaagatctgaatggaaggagtcatattattttgttgccatcattgtaaagttttctacaactttta

SEQ ID NO: 348535 - DNA, 775 bp, Cannabis indica
aagattgtgaagaaagactttcagcaaaaggagcttcagcacccctggtaaaatattttccaacatcttcttggataggctttgccccccagcatgattgccgcagaaggcttcatgtacttctatcattagtcgttcaactttggctttggtgacacacctcaagagaggcatggaaaagctccatctgtacattatcccatctaggatcaaatacctaggcttttcttctcaattttcttgctttatttttgtcttctggcaaggctccggtctagaggtaagctgcaataggcgtcatccatgttggattgtcatccaacatgttgacttcttttgacataacaatgctaggttcctttaggaaatatatggacactaagtttgctttgtcagcaatggtgttgcttgctagacaggcaagtgcatctattgtggcgttctattctctggggatctgcctgatcgtgtagcctttgagctgacttagcaagtctttgaatttgcttaagtaagccaccatcttcttacctcgagttgtgtattgacccaggacttgattcataactagttaagaatcgttaaatatgtccaggtggttagcctgtaatttatgtgccagcttgagggcgactatcaaggcttcatattcaactttattgttcgaggctttgaagccaaatttgattgctccgtacaattgctacccccaggtgttgtaagggcaatgcctacactggataattggtcaatgcaacttccgtcaacatggagt

SEQ ID NO: 348536 - DNA, 679 bp, Cannabis indica
cacttatcaccaaagtgatttatatcctatatagtatgcaatttaattttaaattggtagttaattatttatttagcccttagttaattgacactaatgtttaaagaagagcattgttattgggcagtactattagtgatatttcctaaaaaaaatattttcttatgctatatgagatccaatactaattacactaataacgacatgacaccttgtacaatttgttgtgctgatgataattaatttataatttgggaaattcgaatttgtctatagtatgtcttgttgatgtcccaatgcaagttttgacccttttacattaagactgtctcaaaaactgaaaccctaatttatgatgtcaatttgggcaccaggtgaaaccctaggtgcccagctttgcttttgggttgcatgttcgtatcatttcagctgtcggggcttggattaggttgctccatgtcttcatgatgtaaaataatgaaagatatatagtgagttggattcaagttattgaagtccgaacttccattctggagttccagaagtcagcctaggcgcagggctagggacccttaccaggtcgacttgctatgactcgggactaattaactccaaaatgtcatctttcttgccactagtcaaacattgatgtttaagtcatcaaggctactcttggtgt

SEQ ID NO: 348537 - DNA, 1824 bp, Cannabis indica
ttgtaaccaaacccgaaggagagaaagatatctaggctcagatcttgataatactctgcgacagaaaggaacaagggttagagatctaagtggaatgagtcatattattccactgcaaccaatgtaaggttttcttaaactcttttgtgtttaatttcattgttttagagatattcatacttaggatgttaatcaacatacttgttagtaaatctagatcctggtaaaatattcccaacattaatatctttaggacaaatcaaatgaacatttattaattatttctacattgtttatcatcctaaattctatccacctgacatggcatgtccacgtaagccaagactgaggaccataaatgtaacactcatatttgaaaacttactaaaccaaaattaatcttattataatataattatataaccttataggtcgagatcccgagatttaaaacatggttgaaaattacattatctatatataaagtttcgtaatatttttttttacaaacaacaggcaacatacaatgtgactccaaaatcttgaaagactgaaaccctccaggctgcactgccgcgatatgtaaaatcactgccaagctccaactcgggcccttagctttgcccttacctacacaaggtagccaactcatgagtcgaaagactcagtgagatatgcataacatatataaaggtaaagctgcactggccttatgtttaagccgtcccgagctcaacaaccgagctcaccagatggttaagaacgttcttaacggttggtgctattgaccttgatatcacccactaccagtattatgatcgcactgcgggactgacactatgttcgtaccgctacgatagcatcaatagcacccaagagtataattagccatgatatcactcttaaccaggactatgcccgtacgttcgaaccgaccaatggttgtgctgctatgatagcaccaattaatactctttggggtgaatatcactcttaaccagtacgatgcctgtactatagaaccgacacaatggttgtgccgctatgatagcacccaaaacatatacaatcacaacataacatgcatacattcacgtatatatattttatgctatcttacctcgtttcagtgctcaagtgtgtcggtcagtctgagtggaattgcagctcgacgctttacagggccctaaaccataatatttaaatctcgatgagagacacgctaaaacacttctcggggactttaaaatcaaattaggaataaccctatcgatgaaagacatgaccataccctaaaaatcaataatttgggaaaacaagggttcttgaaaaaaaaaacccaaccagttaaccggttcactgggtttcctaaggagacaaaactggtttaccgattatgcaaggaaaccaaaaattaatcccctgtacacaaatcaaccccaaactttccaataatctctagaatgcttgtatacactataatagacccaatctaagaaataaaattcaacaatgagtctagaaaaaaaaaaaaacaccatagagatcaagttttgagttcttaaactcaaaccttgccaatacctcaatacctagatcaacctaaacaaccttaaacaagttttagaactctaatttaaacaataattatcaccacaacatcaaaattcctaaaaccatgcattaaaacctagtttgagctaaagaacttcaaaaatatgaagtttaaaggcttatactgttgggttttgtgccctaaataaaacccattttaatataattagattttcttattaataaagatcagaaataacattttatgtt

SEQ ID NO: 348538 - DNA, 989 bp, Cannabis indica
agatattatctaagaatacatattcatagatttgttgtaagagctataagaaaaggaacatttctccttgttcttaagttaatacaaataacgaggattaggctattaccgaactgctcgggggtgaacctctataaaattctagtgtctttatattgctttactatatatatatcaatcgttataaactacttgtcgcttactaaataagactcactatcgttgtctaaaagcgaggtcaacattttggtgctttcagtgagagttgaactcaagaatcgctcttcattcaaaatctaaccacaagtacgatggtggtatagactcgtaggggcctagttgatccagcaaatccacagacggtggatcctgcattgcagaacccaggaaacgcaagggttccgccggctgttaatcttgaacagccggcgaacgtgggtcatggtgtgacgactcctgtatttaaaatcgcccctcgtgtgcaagagactgggaataacagttcagcactcaaccagggcattcataacacagccgttttggctactaccaacactcaaacgaccattggagatgatactaagatccgaaacctctgtgctgctcttggactcaggcacggtcataccaataccctacctcatgatcaggaagaactccgcattgcggtaaatctcgcgttccaggaacaaagacgtatgtttaccgagtggagagacaaagagatggaaccgttaagggctcatcatactgagattgaaaattgtagtcagcaagctatgtgctgatcgaaaagcctaccaaactgtcagatagcaactccgagtgtcattcccctgggtgagacggacgaagatctagtgatgaaagcggtaggcgggcagaccttgtctagtaattcatcaggagaggtcatacttcatagttccaaacaggttaacggtgccattccgcctgtcaaccaagcaaatcaatcgctaagatagcca

SEQ ID NO: 348539 - DNA, 695 bp, Cannabis indica
attgatgatttcagttttgccatgtttttagcagatcaaataatctttggcaggtttacttaccaaaaaaaaaaaaaaaaatctttggcaggaaataaagaccaaatcataatcttggacttgtatggaaagttttcttattttgctctatgctatagatttcaatcgtgttgcaacaaattaaggattattttagggaacttttgtacaactttgaaaatgtatatgtggctgtctctagggtttctatatgattataaataggacttagagagtaaacaaatgttctcacttctttgagcttcatttttcatatttttatctttgtaaggagagagtttcttttgcgaaaaccaagagtgttcaactatgttttagtctttgtttatcgttcttatactgttctaagaatagggtaaaggactttattgaacaagagaagggtcttcgggagaagacttgtcaaagccttacttggggaggaagtgtgcatatatcttcgggagaagatttgtttaagccttacttcgagagtaagtaagcacacatcaatagctgaaaggggagttcactactattggtgtggttcagagatcagattaactaggtggattacaaactgctgtagcaaatcattagagggagtctaaatttatttaagttaattgcttgtgtaatctttaatactttactaa

SEQ ID NO: 348540 - DNA, 624 bp, Cannabis indica
gctcatctttttatcatcttcttcttctttaatttagcaaagacatttatgatttagggttttctatattaaagcacttttaggaatatattcagatctatcatttatatatttcttaagtgttttataaatcctaacactcaataattaaataaaaaatgctaagggacaccttaaggtgctaagtactaaaagatgtggtatattattggtaattttaatattagattttacatattttattttaataaatgacataaaaaatcgttaactaactataaagtgtcacatcaatgtgctattagacattttaaagtactaaataacaatgttctaaatagatagataggattaggggtgttcacaaaatatccgatccaatccaatccgcacgatccaatccaatccaatccgcaaaatgcggatatccgcacttgtgcggattggattggattgaaaatccaaaatccgcacttgtgcggattggatgttgtttgacctcaaaaataaccgatccaatccaatccgcacttaattatatatatttttaaaaattataatatataatatatattaatcaagacacaaacttctaatttcctaatcatttttagtaatatattg

SEQ ID NO: 348541 - DNA, 736 bp, Cannabis indica
gggattacttcacggagtgacaaccttacaattgaggaagttcaagccttactcctctctcatgaaagccgccttgagcatcaccaatctatgacagatttggctgtcaaaatgcaagctaacttgaccctcgacaatggatgttctggtggtgttcgaccatatgccaattccaaaaactccaatgataccaatcagtctgcgtctggccgtggtcgtgggtatccaaggttcacttagcaacgggtaatttgtcaagtttgtctcagatctggccataccgctcctgtatgtcactatcgattcgataaaaattgggttgtgccaagaaacaaccaatttgccagggccaatcttgctgaggttgagtttgacatgaccctcaagcttactccactactcttgttcaagattttggggatgaatactcttggtatgctgacacaggggccacgactcatgtaacatttgatgctgtcaatcttgaaaatcaacagccttaccacggtaatgagactcttgctgtaggggatggtaagaaactccaaatttctagtattggtcagtcttttcttccatcatctaatccttcatgtcatttgcaattaaaatcggtcttgcaagttccttccatcactaaaaatcttgtcagcatttctaagcttgttgacgataatgacatttttctagaatttcatagaaattgctgttttgttaaggacaagcaaaccggggc

SEQ ID NO: 348542 - DNA, 1001 bp, Cannabis indica
ctagtttgatcacatgggtaagtttagaaccttatttcttagtgagattaatattggagaaaataaaatattggggttgagcgaggttatggaatttaaccattttacccgtagtattagaattgcttaagttgtaaattaaggggcattttagtcattttgcaaaggtgtgatttggtggctgccctaggaggtgacacatggcctaatatttattcagcaaggaataattaagttttttttaattctcattttagaaaataagggaaattggaagaaaaagtcaaaaaattgagaactctctctctttctctttcggctgaagcaaaccaaggggatttcatcttcaatctggtgttttctgaatattaaacaaagtctttgtgaatccaaagcaaaggtaagaccctagaacctttatttttgggtttttgaagctttgggttagtttaagtatgtgattttgataagtgggagctgttagggtaagaaatgcttagggttggaattctaagtttgatttgagttaatttaagcctctagtagttggtttggttgtgttgtgttgaatttatgtaagtttgagctttgagctcaaagttttgatctttaaaggcatattatgatacagtgagtttttctttgagttactgggtgataaataccctaattaggtactctggaaggtttggtggcatttggaggagttttgaccaagaaatggggttttttggtgaactggtgtaaaccggctagccggttttggcaggatccccgaatgctccattttctcaactctcatccattctagtgtcgtggttgggtgtttccctatttcctgagttagtgttatccctagagtgtatagtagaacctagagttgtaggttcgggtttcccgggatgagggtttcgataatgtgatttacccggttttattatgtgattaaggcatccatctaccacgaggctttccattcaggtcggccaacacacttgaat

SEQ ID NO: 348543 - DNA, 916 bp, Cannabis indica
acagttaattgactaactatattcagttagaaatttgttataatactggtagagtagttagtcattattggttagttttgatttagctgaggtaaagctcatggtatattgggatatttaaggtaaaatttttttaataattgtaagtgttacacacatgaccttaataaaaaaaaagtagcggcaaaactaccatcttacgaatttgttgcaattatactattttttggttgttaagtgtcaattaagcccattaagtgtgagctcaaaaatacatacatggcgatatatttctttaacttatttaatacatagtgtaaaaatatgtcgccacgtgtttctgagttgacatttgatggccaaaaaaagtacgactgtaataaaatcataagataagatacttttttcgccatttttttattagaatgtagggtcatatatgtaataattgtaaatattaagagagtttcgccccaaatatcacttgtatataaatactctgtaattgctttatttattctattaaatgagagaaatcatttcccaattcctttattctattaaagcatgttatcaaagttagaaagaactgctcttgatcttcgtctctttcactcttcatttcttgtttcgttcaacaattgttggctcgtcctcaactcacagagatcacgtctacagagaaccagtctccttcaagcattctctctcatccaaacttgatgaaaaccacctcctttcatggaaacattgaattcttattgttattcacagtcattgtctccaacgattcttcgaaccaaattgtgcaagaagagtgttatgggatttgaacctataactttaaacattatctaccttaacaaattaagctataaatatttgttgcttataatacacttaaattttacttaaa

SEQ ID NO: 348544 - DNA, 567 bp, Cannabis indica
agcaagaaatacaattaagaacggcaaaaaaaaaggcatctactttctgataacccaccatgagcttaccttggagttaaacatacttaacttgggtaatctcaagatgggaaatctttcggggagtcatcccagaaagcgtatgagtgaggacaaagtacgctagaaagattcatattaggatgcagaatcgatagtcgtttcagagaattctaagaggaaataatgtgttaacaagtaaagaattacaaggtatcaagatgagtttatgttagtgggtggcaataagaaaggctttaattgaatacctattagaaatgaatacttaacttgttattaagttaagtcagtaggtcagcttaggaggtcccataaaaggaatggaaagacataattatgaattatgtattgtgggatcttatgattttgaccgagtagtaacgattggacatactgagttaatatgttgtctatcagtatagacaatttatacaacaaataaggatatagaatttatacgaaggaatatcttgtgaaattccaaggttgatatctttggctatgatg

SEQ ID NO: 348545 - DNA, 1032 bp, Cannabis indica
aataaatgatgtaactcgcattagtgatgtaaactttaaacttcagttatgaatagagagaatcatttatattaagtaattacaaagtttcagtctttaaaattacttaaggggcatttatgtatgattaatcgaaattcatttagaaatacattgtataatgcaaacctgccatttcaaattttttgaaattcaaaggttctgtactaaacctcattgacgaaagtggagtcgaactgttacaacttcctgagcaagcctttttgacgagaaagatcgttataacaccttgatcaaatattttttatgaagaagggatcaaacaattataatttttgatttataacctatctgacgggagaggaaaatcaaaagttataactcgtgtttaaaactgaatactaacggttctcccgagctaggaaagtgcttaacgaggtatcatgacgccttgataaaagtacttaaacctagaaaatggatagataatataactattcatacgagcaaatcaaaaatatacaaagtgataaaatcctttaagtatttttaagtttgcttaaggcagattataaatgcaattgcgtggcagaatcgacaattgctcaaaaatcataaagacaattgctcaaaaatcataaagttcggtagattactaactacttaaacaagaagattacgagcaatggagaaatccaaaactgctgtatattggatcaaaatatagttgtttacattgtgaataaaaatgcaagaaaatacaattgtattaagttcaaatgaaaacagtacaaggcatttaagataagaaaaaccttagtctggttacaaacttgtctttacaaaaattccactaggaacaaaccattaagtcattctcctaagcaaaggatgagagggaagtcgatgaactcgagaaagtccatctgcacatagcatgagaaagaccggctacaggtagagagccttgatctctgcacaaacctcattcccctcatcatcagaagatcccatttcctgaagccgaaatct

SEQ ID NO: 348546 - DNA, 563 bp, Cannabis indica
gcataaaacccaacacctttaactcaagctctggaggtttttcagtagatggcagaagctcttttggtactactcccaactcttcataatacttcctggttaagggcccgtaggaatcaagccatttaacataacccattacttcttttccctcttgctccgtcaaatcatcttcaattaaactcagttctaaaggatcatctatcaactttttctcactcacaattgtatcaatcagatcaacaaagtaacagttatcacttgcctttaaataagtcatcgcctttaacacattaaaaatcacttcttctccttggactcgcagctttattcacctttttgtacatcgatcaaagcttggccaattgtcaagaatggtctcccaagtatgattgggacattgttatcttcttccatatccagaacaataaaatcagctggaaagatgaacttgtcaactttgactaacacatcctcaatgactcctctaggatgagctagtgatcgatccgccaattgtagagttaccatggtttgctttgcttccccaactgcaatctttt

SEQ ID NO: 348547 - DNA, 1050 bp, Cannabis indica
ttatatgaaatgagttttatttagggcacaaaacccaacagggttaacccctgatttcaaactcatataatatcatcatggcatgtaaaactcagataatcatacagagctcagaacgagctttccaacgatatatagaacccccaaatcagagttcggaatcacaagatatgaattttcaaagttgggaatccaatctgctcgaaaactcacaagcgggtcgtggcatgcccaagtcatgccgcggcacctgggacaaaacccaggttccaccaacaggggcgggtcgcggcatgcccagagcatgtcgcggcatctgggttccaaacccagaaaccagcaagctcaaacacgattttcagcaagaaaatccagtcttttcaccccaaattcacaaccaaactttcaaattaacaaataggattactaaccattaatagatgctcaaataacatatttcatgcaacactatcccataattaacccaaatttcagattgtaaaaaccaacctaaactcatgctcaaactccaaaacttcaagttaaaaacttgggcttagaatccttcaatccctaacattttaacaacaagtaagcaaatagagatcaaattcaagtattaaccctctcctagggttactttcatagatcaaccaaatgaatcaacacaaatcaagagattaacactcaaattatcaagattaaacatccatttcactaaacatgaaaaccaagatcaaacaacctatagcatgcctttaccacaataatttcagcaagaattcaacaataagtttcacataaactcagcaagaaattacctcaatttcaagcttaaaattctccccaaatcaagcttcaaaatcaagtaacaccaagcaaattcttcaattcaagttgaaattcaaaaagggttaaacggagagaggcggttcgggtttgagagagaacaacccagaaaaatttcctttctttctaaaaaattcaatctttaacaaataaagtaaataaaggttaaaagaccaaaatgcccttaggaccagtgcacac

SEQ ID NO: 348548 - DNA, 682 bp, Cannabis indica
catcggaaaatgaaactctttaacttttttccggtaacgactttgcagaacatcatctgttcctagaaattcagtcacagagaattagaaactaataataatttaaatataagaaaaggaaaactccctttgaagactaacagagagacaacggtggaatgagcgccttgactgccgaagaaatatagaaacaaattttgattcgaaaaggaaaacttatgaactattagagacttatgaaatatagaaacaaatgtaataattatatatatacattatgtgtataaaaatagtccaaagactatcagagttcacacggactgggagccaaaagaataataataatgaaaagaaataccccgatcaaggtttgagagtaattcgtaaacagtatattcagatcaggcaccggaaacatatgaagtctgaagccttacatggactagaataagttattatatatacaaaggcatgagacacgaaatataaacataaatgtaagagaaatcatatataagctttacctctctatctcttaaattacacttaatctcttaaatttaatttttaatggtaaaatttctaataattttttaatggtccatgtagtattaattattaaacaaaaaatttaaaaaattaaaaagtaattataaaaaaattatattttattttttttctt

SEQ ID NO: 348549 - DNA, 769 bp, Cannabis indica
acttgaaaataacacaccaacaacagaatcatacacattggaacaccaattagaagaaggaggagagtcaaaaacaagagaatttgaaaacgacaaattcgacatagttgactatgcgaagctggttgctaaaaaaatggtagaaaaacttgaaaacaacagtaaaaaactagatccagaaatcgacatcaacaacgcgaagctaataacagacaaacaccaaccagaagttgaaaaaggtcaggcatacaaagacaaggaaacactgaagaaagtttacagctactacgcaatcaaaaacaacttccaatacagtttttgaaaacatatttaattgggtttcagtaagaagttttttaatatcttcaataacagagtaataaccagagtttataactctggaatggtagtattccgatcgggtgtacttagattttcaatcctataaaaaacataaaaaaacactactaaaacaaccaaaaaaaaaataaagaacataaaaacaagcattaaaaaactctggaatggtagtattccgatcgggtgtacttggattcccaatcctataaaaaacataagaaaacactactaaaacaaaactaaaacaacacaaaaaaaataaagaatataaaaaacaagcataaaaaacaataacaaaatatgccataagagccttcaaaagatacaataccaccactcacaaaaccagagctaactataaccccaaaaaagaaaagaaaacataattagtaaaaacaacaaaaaccca

SEQ ID NO: 348550 - DNA, 788 bp, Cannabis indica
ctaaactcattcatgtgactctaatggccattcatcgcatttttcatcgaataccgaccaaaaattataaaaattgtaagtttcacatattagaataataatacacttaaagtttagataaaaatcttcagaattaaaaaattacaactctaatgtctattttctaaaaaatgggacccacaacaaaaatattcacatataacataaaatatagataattaatgcaaattgccacactaatctatatttcaatcatgcggtcattacaactataatgttgtagccgacgggtttttcatactcaactatgatttagcagacaacttaaaatatccaaagaacaattgcagtttagctaaacacaaagtaaataaaaaactataaaaaggaaccataatctttctttagatgattaagatagcaaaaatagtaactgtataaatgtctatacaaagtgataaacaagagaaacatcatcttctagtccaaataatcttcacaatctattacaatcctaattacaacccaaaatcataaatatttcttaaaccttaaacttttaaaggacaaacgataatttacacaacaacatagagcacaatcattctaaaccatcatcacacatatatacatcatatatacaatttatgcatagaatatataagaaagcaataataagacacacgaattttatagaggttcagctccgagcagttaggtaatagcctaatcctcgttatttgtattgacttaagaacaaggaagaagtttccttttcttatagctct

SEQ ID NO: 348551 - DNA, 844 bp, Cannabis indica
cacgccttgttgaggtcggtgaaatcaatacaaaactcgccatttcttgctcggcttgggtacaatcacatgattaggaacccaagccaggtagaaagcttcgattatgaaatggttaatccataccttttctacctcttccgttcaaggttagggctcgttccttgtccaacagtcttcacttttgctggaccagccggaactttggatcaatatttaggatatgtgaaattatagaaggatcagttctgaacatatcctcatgtgaccaggcaaaaatgtctaagtttgctctcaaaaattttatcaactctaattttacttcgagcaacaaaccctttctaatgttaagctttctagtcagaatattttagtcgatttcaatctcttctaattcttccactggtccaacaaagttgcttaggtgccaaagtcgaggaaccacatcttcatccctgtcttgggaggttccctacttagtaatgttttttaccttgtccgaactcttgctagaggatacttcgtgttgaccttgcttttagccaacgacaatgagtcttatttagtaagcgataagtgatttatagcgatcaatatatagtaaagtaatataaagacacaagaattttatagaggttcagccccgagcatttcagtaatagcctaatcctcgttatttgtattgactcaagaataaggagaaaagttcattttcttatagctcttagaacaatatctctgaatatgaatccttagataatatctctacggtaaagtctcaactaaactgtttgcgaccttttgcccagtgaacatgcatcactatttatagggctgtgaactt

SEQ ID NO: 348552 - DNA, 679 bp, Cannabis indica
tgattttgtccagattcaatgaatataaaatattcatttatcaaaaaatcatttatttatttatttccttaaatagaaatttatttctttaaatagaaatatatttccttaaataaaatattcttatagagcatgcttaggctactactgctcgacaacctacgtaccaactaaccccacaacctcactcatatatgtagatatggtaagactgttaattagtgcttggtttcaagatacaagactcaactacatagatgatcgattagtgattccaaattcgaattttagcactaaattttattccttaccatatatagctgtaaataattatgtctccggtcagttggacccatattttgaaaagtttgtagtaatataagttatgttgtgctggctcataaaaaaaatatagatcgtgtcgtgacaatattttaaagataggcccgacacgacttacaagtccatattttttatatcgtgcttagattcgtactgtagctatcgtacacgagtacgtcactctagttgcttcatgggctgatgaccgaccctagagacaaacacgagtgtttccatcgtgttttgtcctcactcgcacgtgggaaaactttctaagaagtcacccatcttgaaattacccctaggtctaagcacgctttaactgtggagttctttc

SEQ ID NO: 348553 - DNA, 929 bp, Cannabis indica
ttacagattattacaaagaaaatcgcgaagttttaaacttagattttctatctatcttctacagcaaagtcaagaacacatgtatgaaacccagaaattaaacatgcaaagtaaaatgaggaagaaatcgaaaacttactcactgtttgacgtctgagttcagtccaaatgaagcttctcggatgcttttggtaaagatctcacgacagacttgaagtaaaaacctttttttttctctgagtttgtttaatggagaaattggtaaaagtaaatttgtgaatgatgtttagccctatttataggtggaaagatgaaaaatgcaatcatttcaaatgccttagacgcatcgattccctcaaaaagcaaatattgggaaatcaaatataatcatgtgtaactgtcaaacgtggtgagagaaaactgggtttcaaggtattaattgagtcagaacattaattagccgaaaactaaagagacgcctgatcagtcacacatcgaatcgtgaacagacgcgccttacacatgtcacccattcaaatgcaagggcaacttggatgaagtctacaccaacttcgaaagtcccgtaaaggcttgggggcaaatgttatcccaatttttgcactctgaggtggcatcacacgatggtgacacgtggaatcaactttatatacctgctcgcagcagatatgccgaacagagcaacacatatattccctcggataaagccttcttaactgggcagtgagcaatctgaacagcacgccaacacttagcagtttcaactttcacatcataagtcacagaagaaatccctataattttggaaatcagatcacagagatatggcaagctttccaattatatcaattgtaaatcccgaagaaaaactttccctcaagcttaagccctataaatagtgattcattctc

SEQ ID NO: 348554 - DNA, 1568 bp, Cannabis indica
ctaatccaaattactaaagcggtcattacaacaatggttgcccctagtggcattatttcttgtaaagaattttccattgttggatggccaactttgctttttatgcatttatctttacttttaatgcctcgtatcttatatttgaattgaatatatctgttcattacattttatttcacaattttaaacatttatatttgattcaacttattgatactctaagaaatttttctgttatttctattttttcctttaatgtgtttaagtagttattagtctactatgtatgtgcgcaagcagttataatctatgtgtactttcgattcgcaagcagttttcattctttattttatacgagtagttttagtctgccttgttagacacgagtagtttataatctactaaacactgtactgagaagttttaatctaccgtatataacatcattatatattatattttttagagcaaatttaaaaatattttgaataattcacttcaagaactattttgtatattttttgattgctcatatgaagttaggtcttctattcatattttggcttaagtattatttttcaaggcattcttgtacctcgtttataatacatgccagaataatgtgagtcgtcgttaagtattcaacttcgcatgtagctttatgttgttttatgagttgatctcatttacaactgctacttttgactttttcctttctagaggaaaggtttttcaatttcttgactttatattgtctgtagacaattttaatcaattatcctttcctttgtggaaaaaatttaaaatgggtgggttgcattataatatgtatttctatataaattccagttattatacacatatatatatgcccctcaagtaattttaaagaatataatatttgtaattacttgaacaaactttaactgtattaataataaaatttacatattacagagataaatataggatttacattttaactttactggtataaggtcgtaaatgttcactattccaatggttctttattagcgagtcgttaagccgagctaatttataaacatcgattcccactactgcttaaataacatagggaccttcccagtttgggttaaacactctagtagatggatctcgtgtgtttgaaaatactcgtcttaacaccaaatctccaatattaaagagtcttttcttaactcttttgttaaagtatttcgtgattcgatgttgatacgctacattagttatttgcgactcattatgtctttcttcaagtaaatccaaggacaggttcagaagctcttggttttctacttgattataaaattcaggtctatgggtcgcaatattaacttctactgatagcattgcctccgagccaaatgctaacgagaatggagtgtgtcccgtcactgttttctctgttattttgtgagcccaaagtacttgtggtagttcatctacccatcttcctttcgcatccgacttcttcttaatagtatcttttaaagttttgttaacagcttctactagtccatttgcttgtggtcttgatactgacgaga

SEQ ID NO: 348555 - DNA, 1000 bp, Cannabis indica
gttggtaataccgtattatactcttgaacatcatacactataccaatgcattcagtatcgctatcgtactagtgttagtagcataagaatcacaaatagcatgcatatattacacatacacatattcatatataaatacattctatgctagtcttacctcgtttcgaatttcaagtgtgctggtcaacttgaatggaaaatcacgcgctggatggatgccctatgtcacattcacgtaaatgggtaaataacttgctaaaaccctttttggggacctaaactcaaaactaaaagtttccatatcgataaatagcatggcaataccctaaatatcaaggaaacaccaaaattaaggctctaaaaattacccaaaactggtagactggatttcttgggtcctgcccagtgaaacagttaactggttctatagtaccaacagaaccggttaaccgattcatagcagaattccccaaataattcgaacttaatcaatttttccccattttctctcaaactttcctaactcctttactaacatctaataatagtttacaagcagtagcaacaagaaaaatgcactgaaaccaaaagtgccattgctgagctaagcttgagttttcaaactcaaacttgctcaaccaccccttaaactaaccaaaccagtggtaatctattaaattatactcaaaataacctcaaaaattgtactagaataaaagctaaacctaacagcacctaaaaccaaatattgaatgttataactaactataatttagaaaattcaagaaataggggtttctgaggcttaccttggttagaacttcctcaatcattgatgaattctcaaaaatcagatgaaaaacaccaaagtttcccctggtttatcctcagccgagagagagaaagagagtaatcaagaaactagtttgttctaaatgtcctttgtcttctttcccctattatttaataactaataaaattgtaaagactgcttagcttt

SEQ ID NO: 348556 - DNA, 951 bp, Cannabis indica
ttaggattactctgcatgaacgaagaccttgaacttgctcatgatcccaaaattgagcatatttttagacaaaggagaaagaaataaagggctaagaaacactataatatggtcgatgagcttggacaggttgggggtgcccataatattgataatcccattactttgggacatgatagaacaagagcaataagtgagtatgttgcccatatgttcaacgagctcaatccatgtattattagacccgaaattctagcacctaaatttgagcttatgcccgtcatattccaaatgctccaagccgttggtcaatttagtgccaacagaagattctcatctccatatttgctcatttttagaggtgatcgactctttcaagctgaaaggaatgggtgaagaggctctaaggctgaagttattcccattctctttaaaggatcgagctagagcttggctcaatacccttcctcccgacttggtggcaacttggaatgacttgactgaaaaatttatgagaaagtattcccccaattagaaatacaagattttgtagtgagatcatgtcctttcaacagttggaagatgaatctacttctgaagcttgggaacgattcaaggaactattgagaaagtgcccacatcacggtattccacattgaatagagataaagacattctataatgggctcaattctactactcgcatggtgctggacacttcagctaatggggccattctttctaagtctcaatgaagcctttgagatttttgaaaggattgctagtaacaactaccaatgtccactattagagcccctacaagtaaaaaggaactagcaatatgattctctttaaataaaactcatagaattagtggaatctctcaatctcacactttttctatgtcatgcaattctaagtctgattttagattacctctctcaagtgtaa

SEQ ID NO: 348557 - DNA, 1215 bp, Cannabis indica
cttctttgggtgaggatggtggaataatttttacactttgaacataatctgccacccgttttgcttgggtctcgaatacggtcgaatcttgtgtcccggcttatgtttcttcgaccttatccaagtctatttccacactggggatctcaccctcacaattggtcttccaatagtcaacctcccaattctgaggatacaaaatttgaagaacaaccatctgaaaaaaaaaaccattatataaaatatataaaatcgcacaaagatcgcataaaagtcgcataacatcatagaaaataacagattagcaaatataaatatgtaaaatcgcataaaataatagcaaataaaaatatttaaaatctcacaaagatcgcataaaagttgtataacatcgcagaaagtaacagattagtaaaaacaagtcgagtcgcacaaaatcgcataaaaatcgcataaaataacagattagcaaataaaaatatgtaaaatcgcacaaatatcgcatgaaaatcgtataaaatcgtagaaaataacagtttagcaaataaaaatatgttaaatcgcacaaaaatcacatgaaaattgcataatatcgcataaataacagtttagcaaaataaataccaaaaaaacaaagaaagtaaaattgacataccctttctcaaatagtgcagccacattaggttgcttcacatcatgttttgtaaccgaattgggggtactccaattcaacattcgagggaatctagtccctctgcactgcccatacttcttccccaaatcttgcatcaccttaaaggcccaatattgcagcgtcggtgcatatccctagacattgtacttcgcctctggttgagttatttttttctccttcttccctttcttcttcgtcttatccttagtaaagaccttatcaatgtagttcttcctcgggtcaatcatacttttagttgtggatgacaacaacttctgataagaaaggaggtcccatggttactcgaagaatttttctacattttctactaacttcagcatatcagttcatatataaacaccctcaacccttgataacagcacaccttcaacaaatgcacacaaccccagcttgtacacattgtctgccacatcgcacgcctcaaaagctagccaaagggttttaaaagtgacccttttggcattattgaggtagtcctgcagtatccgatcagactcaca

SEQ ID NO: 348558 - DNA, 788 bp, Cannabis indica
cgttctatgtaactaagagtacaattccaagttctatggtggatgcaatgaggaattaataagttagtgaatttacttggtaaattatagatctgcttattggaagctcagttatataggcccattgtccccatactagttgagacaaactgcttgtaagactcagttaattgattttaattaatcaattataattctaaaattagactatgtctagtctatggattttttcactaagatatggcttgattgtgaagaaatagtgttttagggtttatttgttaattaagagactttatggagtctaattaataaatattataaatgacaattttatttgatagttattttaattattaaataaatagttttgacatttatagggttgaaactgtaaaaagtggtatttatgaaaaataggtaaaatagttgggaaaaatgacgaagcccaaacttgagtggggcccattaagtggttgaacatcaagtgtaattttgaccctattttattaatttttttattcctaataattcaacccaaatcctaagagaagtagtatataaggatagctaatgtctcttcatcaacctaatgcctcaaaagcgaaaaacctagctttctgatgagacctcttccttcttcttcgtcctcttgaattttcgaaacactaagcctttcttcacaaaatattattcagccattagtgattgagtaagtgcccacacacatcaagttggtcctcaaccatagcatgtaagactgtgaagaatccaaacacaaggaagga

SEQ ID NO: 348559 - DNA, 322 bp, Cannabis indica
taaaataatttccaacactctcgtgggtcgactgcgttcgttggggtcaaatgggttcgtgtgggtcgtgagtcttcctgggtcgactaggttcgtgggtcgtgtggggtcgactgggttcgtgggttgtgtgggtcgcctacgtatggtggttcgagtggtggtgagaatggtgcggtggtgagaatgagggggttaggtggtgagtttgaaaccgagaaaggaagagagagaggagagagagggaagttagagagatggggggggaattgaaatgataggggtatttttggaagaaaattgaaagattggtatatttttt

SEQ ID NO: 348560 - DNA, 1768 bp, Cannabis indica
ccctcgcgttgactatgaatcacagaaactctccggaggaaactccaaaggaacacttttttgggttatgcttcatattgtacttccttaatattttgaagcactctgcgaggtctgtagtatgaattccactctttacctactttaccagcatatcgtcgacgtagacctccatgttccgtccaatttattttgagaacatttcattcacaagtcattgatatgtttccccaacatttttcaacccaaatggcatgactttgttgcaataaagtctcatgttggttacgaagcttgtatattcctgatttgggacatgcatttttatttggttatatccagaatatgcatccatgaacgacataagctcgtgcccagtagttgcatccaccaactggtcaatccttggcagtggaaagcaatcctttggacacgcctttttcaaatcagagaaatcaatacaagttctccaagttccattgggttttaggacgagaacagaattggatatccacgagggataaaacacctcgcgtataaagtcattgaccaataagtattcacttcctctttgagtgccccttgtctctcagaatccaagggtagcctcttctatctcttagctgggtaattcggatcgacatttaagtgatggcagataatcttagggtcaatccctatcatatctccatggctccaggtgaactgatcttggttcgcctacaaaaagcttatcatctgctattttagttgttcattcaggttcttcccaatgtaaacacactttgtgggatttcctggatctaaaacaacctcttctagctcctcaattggtttcaataaatttctttcatcttaaatccgaggatcaagatcttcatccttcttctcaccttcttcagtcaagacttccattagctagtgaccagcttttctctactgcagctctatgtgatagcatttgcgagccagcatttgatcacctcgcactactcccacacccattgttgtttgaaacttcagggataagtgcttaatcaaactaactgcccctagttcgattaatactggtcgacccaccaatatattgtaagctgacgacaggtcaacaaccaaaaaatcttgcattattgtggtggataaaggtgcttcacccaaagttaatgggagctcaattattccttgactggcgacactgtcacctataaatccgtaaagatttaccatgcaaggtcttaatttaggtttttcaagccccatcttcttcaatgtttccctataaaggatgttcactgaacttccattgtccaccagcaccctttttactctcttattggcgagctggatggtgattaccaatgggtcgacgtgaggatatctcacgtctttttcatcttcctccaaaaatataattggaggttcttcagtctttgctttctttgaaggttctggagcaaaggcagattgctattcttcacttccttcacatacctcttttgggcattattgctctttgctgcaatatgtggccctcccaagataaccatgatatcctctccttcaacaggaggaggttgtaatcattggttgcctgggttgttgggcgaattaggctggttatgtccattgccctgtcttttgacatattgcttgaagtggcctcgtgcgatgagactctctatctcatccttcaattgacgacactcgtctgtcgtatgcccgatgtctttgtggtacttgcaaaatttggttgcatctctcttatgtc

SEQ ID NO: 348561 - DNA, 881 bp, Cannabis indica
atctaccaaattttttgattttcgagcagttgtcaattctacctggctatggcagttataatctaccttaagcaaacttgaatatacttttaatgattttatcactttgtacattttagatttgctcgtatgaatagttaggttatctatccattttctagattcaaggacttttatcaagacgtcttgatgtctcgtttaacactttcctagctcgcgcgaaccgttaatattttgctttatacgcgagttctaacttttgattttcctttcctgtcaaatacgtttttaatcaaaaattatagttgtttgatccgttctttgttagaaaggtttgatcaggatgctacaacaattcgacccctctttcgtcaaaaaggtttggtcagtaagttatgacagttcgacccctctttcatcaaaaaggttcggtcaggaagttataacagttcgacccctcttttgtcaaagagttttagtagagaacctttaaatttcaaaaaatttcatttttgaaatggtgggtttgcattataccatctatttctagatgaattctagttaatcatacattaatgccccttaaatgattgaaatgattctgtttatgatagaaatgattctctttattaataaccgaagttaaaattttacatcaaaaatgtgagttacatcatttttttattggtagtagggtcgcaaatgttccacgttctagtagttctttattagcgagccatcgagtcgagccaatttgtaaactccaattccaactactgcttcgatggcatatggaccctcccagtatgggttgaacactcctatagatgcatgtctcgtatttgcaaatactcgccttagcaccaagtctccaacattga

SEQ ID NO: 348562 - DNA, 1885 bp, Cannabis indica
aactcggtgttgatacgctgcgtatgtaatttgcgacttagctcatttttcatcaagtagatctaaggaaaattttagaagttcctggttttcattttgattataaaactctcttttgtgagtcgatatgttcacttcaacaagtaccattgcttccgagccaaatgctagcgagaaaggagtatgaccctttgccgtctgcttggtagttctgtgagcccagagtacttgaggtatctcatcaacccacctacctttggcagcgtcgaacttcttcttgatagtatcttttaaggttttattaacagcttccacttgtccattcgcctgaggcctggatacggacgagaaatttttgataattttgttcctcttgcagaactcagtgaacaagtcaccatcaaattgggttccattatcttcatggttattccaaacctacagacaatggtcttgacgacaaagttgaggactttcttgcaggtaatggaaacgagaggatttgcctcagtccatttggtgaagaagtcgactgctactagcgcatacttaggtcctccttgcccagtgggtaatgccccaattaggtcaattccccatatagcaaatgggtagggcgcggtcatcattcttagttctgttggcggcacgcgaggtatatgtgaaaacctctaacacttatcacatttcttgacaaactcatgggtgtccttattgatcgttggccagtaatatccttgtcaaatgatctttttagatagactttgccaacctgcatggtccccacaaaagccttcatgaatttctctgatgatttcattttcttctgtagggagaacacaccgaagtagaggcatcgagtaccctcttctatacagtttaccttcaattgttttcgtgcctcgttttttctagttggaagttgtctgtcgagtagataactgacaaaaggagtcatccatgtaggagagctgtctatcatctctacatcttccgtttcacatatacttggctcgcttagcatctccaccggaactaagttcaactcgtccaagtcgttctgcgagtgttggagttttgttctctcagaatttgttcgattttaagtaatcgaatctttccaagttctttcgaaccttctctaaatactttgccatttttaagcctttagcctggtaattcccgaggatctggtttacaattagcagtgaatcactatggcaaatgaggtttttgattttcaatgcttcggctatctttaagccagcaatcaaggcttcatactcagcctcgttatttgatgcgtcaaattgaaatctcaaagcatagtgaaacttaaagccttctggtgatattaatactacccgtgcacccaaaccttgctcgttggatgcaccatccacgtataacttccaattttccgcttcttcgtgtataggaagaatttcttttggagttacaccttctattaagaagttagccaaggcttggcccttgatggatgttggagggtggtatgttatgtcgaactaccctagttcgattgagcattttatcaaccttccagaagcatctggttttgataaaacttatgtcaaaggctgatcagttaacacttttatggggtgttcctgaaagtacggtcgtagtttgcaagacgcatggactaggcacaaagcgagtttctcaagagggggatatctagactctgcccctagtaaccttttacttacgtagtaaataggttgttggtgcttaccctcttctcgtactatagctgcactaatcgcatcttccgagatagccaaatagagaagtagcgtctctctagttattggttttgccaaaactagaggcgtcgctagatgcctttttatgttctaaa

SEQ ID NO: 348563 - DNA, 539 bp, Cannabis indica
atttcggacgtgaaaattaactatacatgagatcgtaataaaaaactgtaattaacatttgatataccgatacaccaataatattgcatttaccatgcatatacataattgtcactttattaagaaaacaaattagttttgtttgatcgattatttgttggattttatattattaataattagtaattttgtattttaaattttcgacaatactaattttgtctcttaaagtatacgacttgtttagaatttccttgaactttacatttataaaaatttagtcctttaggttatgtcctattatttcgtttaaatgctgacatgtatttgtaaattagcaattttatcatttaaactttgacaacttaaatcgtacccttcaaaataaaatgagaaagatttaatatttttttagtaaatcttaaaaaattaatttagatcttaagaaaaaatcattttaaatgattaaaaaaaattgaaaaataaattaaaatcttgaaactaattaagcaaattataaaattatttattttttatta

SEQ ID NO: 348564 - DNA, 549 bp, Cannabis indica
cgcctaagatagttagggtgttacaccaatagtcagtattcttatgtatttttaccctattagtgggtgagcttttgacagagaaccctaagcgggtcatgaatatgcccatacccgtattttagcctatataaatccatttatttcctcacaaatggggatcaaaagatttacgtagtcggggctctattaaaatactctttaagctttcatcttcttcaagagaaatctagagaatcagagttagaattttattgtaaacaccatttttaatacattttgtacgcctacaaagctaatatactaactcgtggactagggataattaatgcccgaaccacacaagatctttcgttttatttacttaacagttatttaatttctaaagctttcatttaattagttttcgaaaatctcagtaaacaaaaatttagaaaaataaatttaaataattttatatacacaattaaaattttaatgtatataaatttaagggaaaaaacaaaaaaatacaaaaaaggaaaaaaaattacaaaaatactttgggcc

SEQ ID NO: 348565 - DNA, 578 bp, Cannabis indica
aactttttaaaacgataataaacatatataaagttaagtgaaccttacattggttgcagcggaataatatgtctccttccactcagatctctaacccttgtatcctttctgttgtagagtattatcaagatctgagtccgaatgtccttttctttgatttggacccttcaccatcttccaaactatgattgaggtaccacttgctgtgtatgggcactactctttcactagggtatctcgaaattggaagaggaagagaagagatatagggttcggctatagagagaaaaggaaaggctcaactttctaaaagaggcagtttcctgaatggctgaatatttgtttaactgcttcatttggtgtgagccatcactttctatttatggacaactgctagattaggttagtaattaattggcattaaaataatgaaaataataattggaaaaatcttgaataagtggccgatcatggtgttcatgggcctcacttggattttgcagttttcacaattttcatttctattttctcacaaacgccaattttctaattctaaccatttaaatgccaaaactaat

SEQ ID NO: 348566 - DNA, 856 bp, Cannabis indica
ttggtattttctatacttaattctgtgacaaaaaagaaaaaaatggatggagaagagtatggagattataagaaattcatatttatcttctgctactttgcacaataagaggttgttttttcttttttgcctatttattatataacaatgtcatttctgaagagaataaaaaagaattaatctgtctttatttcttattcttttttaatgtatgtatatatgtatagttcacatgcattccttgttgatgatgttgtcatcccaaatgaagactctgttttagatatattgattcgggaaaatgcttgtttctgccctcgtgacctcagtgggaatacactttggtctgtgtatcatatttttcactttgtactctatattgagcaaacaacccaacaattatgaagtttatgtgcctcgtttgatggcctaagggaaatctaaaaggagaggtaattttaacttggaaaggcttataccttctactggtttgttgaaaagtgcttatatgctctctgaagaggaattgttgtcgtcctcgggtttggatgctgtcgtttttatgcatgttattaccttcccgtactttagttgaagtgtttgttgttcttgttggaatttatttcaccaagatcttagatctactcacaagtatgtttattaacaccctaaatatgaactttctgaaacgatgaaattaaacacatataaagttaaagaaaccttacattgggtgcagcggaatgaaatgactccttccgttcagatctctaacccttgtatcctttctgtaggagagtattatcaagatctgaacctgaatctctttctctgaatccttgatgctgaaactcct

SEQ ID NO: 348567 - DNA, 726 bp, Cannabis indica
aaaaagaactttttaaggggcaattgttatacctaaaatttggctgtacttcaaaggaggacgcgtgtcaagctgggagaatacgaatcaacaaatataatgatcattatattaggagatattaaaatggaataactcattaaatgtggagctgatagagtatatttacaacttactgactgtaaagtcttaagcgagattagaatatacaaactattgtctcgcgcgtagacgagaaaccattctacgttagaaatgcaaagcgaggcgtcaaccttgctacaaatgaagagatgtaaataagacatgttgaatcattagaacacttagcgtataatatacaatatacaaactaagcataatagttgaataaacttcccactatctttgttgtattaacacaatcgatgaggttaataccactaatgttcctagacaaaaagtcccgataccttctcgtagtgggaggattttaagacacccaccctattatgacttggaagacacttgtgacaaaaatttattgttagtttaaacaagcaatggatagtcagaataaggaactaagaagcaaagccaagaaaactatggttaaagctattcatatggagcaaccaaaagttttctattataaggacaagaagtgaaattctgattataagtctattcaatgcacttaacaaaacatcctgatcctagtatcataggtttaaaattatctaaacc

SEQ ID NO: 348568 - DNA, 536 bp, Cannabis indica
aaattatgggatttactttttagtgacactccaaatttttagtgacccacattacaggtcactaacactgaatatttagagtctatttgtgcatgtcactaaaaatgaatcctaactctttagtgacccgtactataatgcgggtcactaaatagtgtcactgaaagaccaaattgtagtagtagaaagactaaagaatgtcactgaagtttgaagttttcttgggttagcaggctactatcgtcgctttgtggaaaatttctctgagattgctatgcctttgacaatgttaacaagaaaggaattaaagtttgtgtggcatgatagttgtgaagaagctttcagagaattgaaggaaagattaacttcagagtctgttctcactgttcctaacagtgaggaaccatatgtggtattcattgatgcttcatgcactggctgaggaggtgtcctcatgcaaaatggcaagtgttggaaattattttacagagcattatcaatatctgaacctggatctctttctttgaatctttgat

SEQ ID NO: 348569 - DNA, 2295 bp, Cannabis indica
attgatcccagcttgggtccggctcattgttcggttctgcatcttgatctggtttgggtccaggtctaattccggttccacgatccttattccagttcttattcttatgtcgattctcggatctaagtttgggtttttgcctagtttggaagtggttccaagttcaggtcttggtacgattccaagatctagacgcccactaggggttgggtccaagccctgtgtcgtgggtcaagatccgtatcccatcttaggtcgcggtctcgttccgattcggatcttgggtcccagtccgtgtccgggtacaggtttgggaccgagaccggggtcggggcttgggtcacagtcccagtcctgggtcccgattctggttctaatttttagtttgggaccccaatctaggtccgggtcttggtccaagtccatgtttgggtttgggcttgtgtcccgagtcccgtttcgagttttaattcgggtctgcatcccggtaggggtctagttctgggtcttagtcagattctagttcctagactcaaacccaatgtcagactcggacccaagtctggggtacgggtgtgtgtttttgtcagggtccgagtccgagtctgggtttgggtccgggtatgggtcccagatccaaacactgactacgggtaagttccaagcaatgagtcaggggttagggtcctagtctaattccaatttggctccccggtcctggtcttggtcctaggttacggtccgggtttgaggttgggtctcggtcctaatttttattgccatgtcccgggtctaggtccctcatccaagcccgagtcctaggtcccagtccaagtccaggtcccggtcgtgggtcaagtcctagtccgagtttgggtttgggttccgatctcagtttgggtccaaattttggttcgagtctaggtccatgctcgggtctgtgtcccgatttctgatctgggtctaggttccggtgcccaagtctaggtccccaatgtaggtccaggtcctaggtcccgatctaggtccattcagctttgggtctttgtcccagtttaaatttcgattcagtcttttggttcgggttttggtctgggtctgggtcggggtctgaatcctggtccgagtctaggtcttggtttgggtccgattccagatcctggtctgggtttgggttcgggttcggtccgagttcaggtcctgggtgcgggcctaggtctgggtctgggtcacgatctcggtctgaatctaggtctcaagtttcaatctcggtctaggtctagtttgggtttgactcgaagttcgtatccgaatccctatctaggtttgagtttgggtctgggatcgggtcccagatctaggtccttctccgagttcgggtccaggtctcggtgacggtctgggtatacgaacgtgtttgggcctgagttttggtttcggtttgggtctggggctaggtccgagtttggttctaggtttgggtccgagtcctggtctgccagttcttgttcagtttccagttttgggtcacgaatttgggtcaaggtctcagtttgggtcttggtctgggttcggatcctggtttgagtcccagattcggatccctttcacgtgtctcagtctagtgttaaggtctcgtgtcccaggtccgagttgggttccagttttgggtcgcggccccagttctgtgtctcgagtctggttcaatttttgggtctgagttcgggtctaggttttggtctcgagtctaggtctgggttggaatccgggtctgggtcccagtttgggtctacgtctggatttgagtccgagtcctagtcaggttatggttctaggtctaggtcgaggtctggttacgcttccaggtccaggtccaagtcctggttcagtcctgttcctggatcccgatctacgtcgggtttcggttccaatttcgggtcatatggtacgggttcggttccaagtttgggtcagggactaggttcggtcctggtctgggttcgagtcagggtcttggtctaggttcaggtctggggctgggtctcaaattcagacaccgactgcaggttcggtccaagcctcgggttcaaattcggatccttatctcgggtcccaatctggttccattttgggtgccgagtcacgagtttgtacctaggttcatgtctgagtcttgtatccggtcttgggttccgatcctagttccgttgccgaagtccctatcctgattttgggtccaactcctagttcttgtttggtttggtccaagtctagttcggttgggtcctcgttgcg

SEQ ID NO: 348570 - DNA, 804 bp, Cannabis indica
tgttgttgtttttatgtgtattaagcagaaaaaaaaatgcaagaataggtatttggaaatgtttgggacaaggagaagaagaagcagaaaaaggcttattgctgactggcattgctatagcaatcatcgcgtagcaatttgtcagcccagtaagtatattttggcagaaagtccagctagcattaatgagaaaaaaggacctgaggtggcgaaaatgtggccaatgactcaactaataggtagaaaaggaagggcaagtggactatgacttggatttcctattagggtaaactttagtaccataattggggagcacaagagaagaaaggacataagatatatggtggctgcactttgaaaggagggagtacgaaaatttcataggaaacaaaaatctaagtacagaaaaaagagaagggagagagtacaaagaagaagactaagaagaaggagaagaaggcaacctacatgaacatttcattttgtactctcttaaactccatgaacatttcattttctggtttgatgtttttaatttcagctatgaactagaatctttgagatttgggtggttatgaacccttgtatggactagtgctttatttttgcaatgattgagtaatcttgtctttgttcaattagttgtgatgaaatgttgattgaataataatttttggccagctttaacatttaacaagctagatcttacttggaaaagtaagacctagttgaacccctctaattgatgcatgatttttacccttacttttaggtattaattagtagtgaaatagacatattttg

SEQ ID NO: 348571 - DNA, 613 bp, Cannabis indica
gtctttcatcttgcttattctaagcttcatgaacgttttttaccctaactcaagaaatatttttgacttcttgagttctgacttttctttaaacatagtcgttctttaatcagttgagtactcctggtcggcatatttgcttgtttattgttcgatattccgacaaacactcatctcgtgtgttgtcttttatagatgaactcgggtgagtcttgggaagtcgaacatcggatcgactaggattagcttcatcttctgcatgagcatcaccctcgtcttcgttctagtcctccttcctctagtgaaggacattcttctgtccttgtacccagcaataggatgatggctcgtacaaagaaacccacgcgtctggctgacgcagctgatcctcaagtgacttggctcgccactttgcccagccccgaacaggatctggccgtccagatggaggaggatcgtgaagggaacgctgtgttggaaattattttaccaggatctagatttactaccaagtgtgtttgattaacatcctaatatgaaatctaaaacaatgaaaataaacacatataaaatttagaaaaaccttatagttggtgcagtggaataatatgac

SEQ ID NO: 348572 - DNA, 864 bp, Cannabis indica
ctaaacaccaaagacagtacacaggtgtactcggacctaatggaaggaccatatcaagtggtcgaagttctcgaattaggagcatgcaaattgggtaagtatgatgaaaaaatgcaacttgttctagtaccacggtattggaatggggaacatttaagaaaatactaccaataaagtaccaggtcggatgaccatattaagtactgaaagaacatttacttttaagtgaatggcctgctggacgaactacgcccaaagtttcggacaaaaatgaaaaagtactcaagtcggatgaacaccatttaaagtacaatttctaatttctggaatttgttttatttcatgttaagctaaaagatcagattagatcaaatagctctgatgtaagttactatggtaacaaatacattttcgatcaataaatgaataaagatgtttatttcaaaattcaaattgagtcaaaattactaacatgttgttaatttaccatccagtacgtacagaaggtttggtcgaacccaaaaccccgagcagataaaaaagtgtacttgcaataaacaagtgaccaagagtcataagtctgctcggtcacttggggggcacctatacctgtacaaagcatttggtaaagataaaacaaacacaattgcacgatgattataaacagagaatgaaattcattaaagataacaaaagcatgtaataccgggattaaaaagctgcccggtcagcctattgtctgtaaaatgaaaaataattccaagtttaaagaccgcttggccggtcatgatgtcttaaaaaaggccttatggccggatagatatatataaaaaaagagataaaaagagaagtatttagacagct

SEQ ID NO: 348573 - DNA, 822 bp, Cannabis indica
tattaataaacaggtattgatcctcatttttgcattgcttcatatcgtattattctctcttgtatctccatcaccaagaaattaaggtttcagaaaaaaattttgatgcaaaaattggaagatcataccattccaaaatcgattctatagactccggtatgcatctgttaatctctaaattattattttattctcatgaattaattagggcttagatcaaacttatagtattttacaatatcttctatatattattggaaatgttgccggtcaatttggtaccatcattattcaaacattattggaattattatacaaatttattttgagttcaatactgcttctggttttgatatgctttttcatggcatattactagtttatctaattaactgtacggtatttaattagatatagtgtgagtgtgattattacactagactatagagaaccttccatttgaaatttgattaattcttgttcataataatatgaaacaaatgaataaacattgtaacataatatgttatgttaattaaattaaatagtgttattagatgtgtacgaaatcacaatgcgagattaagatataaacaataaattcacagttgactttatgaatattaataaatataatatattcgtgtttgtgaatactacaggctgtccaaacttgtttactttgttagcattgtgcatgaaaatttaattatataatatttacatatcaattatcatatggaggaggttctaatggttacatttttattgtaaccatcatggttacattttttgtagccattggattactattaaatggtt

SEQ ID NO: 348574 - DNA, 1521 bp, Cannabis indica
gacagctagagtcccaggctcttagttcaggtgttctgggccagtaagagctggaggatctgttgcctgagcggggggcacatcaacattctggccaaaagtaaaagtggtcccctcgggttcaccataagccacttgggaagcacggtactcgagatacatgtctttggcctcgcccaagtaatcaaaatttgcctgacggttagccttccaaaagtcataaaaaatctcgagaccggctatctctaaggcatgcactttctcttccagccttgtcacctctgctctctgttgttcaacctttgatttgtacttctcgacctcaactataagctcttcctccttagacttcttctctgcttccagccgatggaagacagttcgaagaactcccctttcctcttgaagactattcacttctgctgataaggtggcgatcgtagcttcaagctagttggaagcctcaaggtccttagtcaactcggttactttcttctcaacagtaaaaagcttcttgttgacttcacccagctccattcggacagctctgagttccaccctggcgtcatcagcatccttcctggccaagtccacctccaccctcatgatgtgggacatggcagcattcttggaggtagcagacttagctcgggaataggtgtaagccatcttcataccagcctacacagagaaaaaaaaatttgagtctgagccaagtaaagaaggatcaaaggaaactgtcaagaaagactcacctttgtaaattccttcaagactcctcccatcagtagctccaaggaagattcgttgtcagtgccggccagctgctcactcacctcaggaaccaatcggttcatgtagtgagtaagcatctccttgcctctctaggcttctggatgcaatggcaaaggtggagtaggagcccacatctactcagatccgctcttagccagctcaaattcgcccttcgactgttcaagcctatctgacctcgagaatctttggacttagcagcttttggaatagaagggttcacgacagttagctcctcagaaagatcaattacctccccggccagtgccttttccctggatggggtcgcctcaccgcccctggatttcttggccggaggagatgagcttgagcttcctccaactctcttcttcagagcatcgagcatctttaagacatgtctacacgggataaaataaacatggttagaagaacaaaggcatcagaagtataaaagcatgataataaagaagtttaaaaacaagacagagtatcctgcgcttcataagaagcatttgtccgagcaagactcgaaagatcattatcacctgacaagtctcttatctccgctaggacggccttcccttttcctggtacgggagagggtggctgagcaggtagactgggctccctgattctaataacatgttcaacaggcatggcttgggctggaagtttcttcctccttttgagcggagtcacctgctcttcctcagcctcatcttcagg

SEQ ID NO: 348575 - DNA, 884 bp, Cannabis indica
ttaaccaatatatttattatatttattacgaaaaagatattcaaaatatacattataaaatacaataaatatacaccttcatttaatccctaaatatatataacagaatataatatattaaattgggcctgatgagattcctttttgttttttttttcaatattttaataatcattttataatcttatataattaaggaaacttatcaataataccatactttggaatttccactacagtctcgtttgggtgccttcctatattcatttctttcctgagttattactttgcttgctatctcgttttaaagcattaatattagattgcattacttgttttcgtcaacacattgttttaaatattggatttcattgcttatttattacagatttctattacatagtttaaaaggaaatttaattttctttaaaagaaatcttccaaaataccattaatataaaataaaactcttttacctaaagcagtaaatccatgaagcatgcaatttatttaacttagataaagcattgagatttatggagatagactaatctaagcaacaaatcaatgaaacatataattcatttaacctaggttctattcttcatcacaaattgtaatttgtcacaaacacttagaatcctagactattaggtgaatagtaatcctaagatgacggtagattaaagtaaaacctaatttagtggccatctaaacaagattaaaacaataatcatgacattgaacatagaagaatagaagcaatttgatataatggaaactaaaaattaacattcaataataaaattaagaattcatgtctcgggttttgaaataacccttaactaaaagaaaactactcagaactagacattaataaaaat

SEQ ID NO: 348576 - DNA, 671 bp, Cannabis indica
ctcgcagaatgctttaaaatattgagaaattacaatataaaactcaatccaaagaagtgttcctttggagtctcctcaggaaaatttctgcgattaatagtcaacgagaggggcattgaggcaaatccagaaaaattaaggctttgatagaaatgccatcaccaacaaagccaaaggaagtacatgccttaatggggagaatggcaactcttaacaaattcatctcgaaatcaactgataagttcctaccgttcttcaatgtgttgcaagacaacataaaattcaaatggacagatgaatgcaaggaagcctttgcaaacataaagaaacatctatcaacccctccagttttggctaaaccaataacttgagagactttacttatctacatggctatctcagagaatgcgattagtgttggaaataattttaccaggatcttggatctactcacaagtatgttgattaacaccctaaatataacttttaaaacgattataaattaaacacatgtaaagtatgagaaaccttacattgggtgtagcggaatataatgtctccttccgttcagatctctaacccttgtatcctttatgtcgctgagtattatcaagatctgaacctggatctctttctctcctttcattagtgttgaatctccttcttgttga

SEQ ID NO: 348577 - DNA, 673 bp, Cannabis indica
agagttgaatggggttttcttagagctatgatggagagaatgggcttcgccactcgtttcgtggaccttgttttggctacggttaactcagtgaagtataaaattgttcatggcggtcatgtgtcagattcttttgtgccaggaaggggtattcgtcaaggggatcctttatctcctatctttttctcatttgtgctgagggttttacttctctcatcaaaaagtttgaaggtgatggtctcttgaagggttgtaacgtggcgaatggggcaactgtaatatcacatatgctatttgctgatgatagctatgtctatggtcgtgctaatgagagggaagcttctaatgtgctgcggctccttcaattgtttgaagcggctactggacaacaggtgaattttaccaagtcttcatcaattttcttcagttctaatactcctcttgttatttgtgaacgaatgtgctccatgctgagaatgcctatggctgatgaacaaagtacttacttgggtcttccttgttctatggggaagaataaagatgcaattttgggttttctcaaagataaaatgctcaagcgagttcagagttgggaaggtcgtctgttatcaaaggctggtcgtgaggttttgctcaaacggttgctcaagctttgcctacctatgcgatgtct

SEQ ID NO: 348578 - DNA, 800 bp, Cannabis indica
aatacagaggagaatataagagtgagctcatcacaatggtgcttgcaccttacaaatcaactcacttgagggagatgtgatcaaacatcctctttaaccctcctcacttagcgtaaatataattatcatctaaatttctctctagatcgtcacctaaagaagtagtacacgaagccttatataggtaactcaaaataaggggtacccgagttagttataactaaaaaacaaaaactaactcaggagctaactggacaaacttgcaacatctaacaaatctaacaggtcattagaagagactaatagtagcagtaccaccaagttactaaaatcttccacaccaaaagagagtgatatacatttataaagacattaaggtggtgtttggttaggagaaatgaaaatataggaatagaaatgggaacaagttttgaatggaatcaaatttacaatgcataaaaaaattgataaaaaattattaattttttctcatcttgcattggaatgatcattctttctattttaaaatggaatagtcattctactaaaatattgaaaaactcattccattggaataacatttcaatacttcagaatgcaaccaaacaaaggaatgaaataaaaataatttttgttctattccgttctattttattacttccaaccaaacgctacctaagttaccaaagagcttagttaacacactaggggctcgtttatgtcatattatgtcgtattgtattgtattacattatattaaattgagttatatatatatatcatatttttatataatacta

SEQ ID NO: 348579 - DNA, 1722 bp, Cannabis indica
atgtatatatatttattttattagatgtatttataaaattaagaatttaattttaaaaaagatgtactaatgtattcttatttgttttgacgttggatagacttttttagtctaattttttgtatagtcatgtacgttatatttatttaaaacatcctgcaaaatttaaaaaaatttaacacgccgaacataatgtaactgtgtattgatgtactcctacctgtttcggtatttgagagatgtttttagtttatttattttttttttatagttgtgtacattatagttatttaagacatctcgtaaaaattttaaaaaatttaaaaaaaatttaaagttgaaattgtacgcttgactttttttatttagagatgtccattataaaatataatgataattttttatttaaacgggtacaaaaaatattgataattgtgttctttagtaaaaaaaaatataaagatatatatcattagaatttttttttttgtatgtatatctttatatttttctcaacattatttctctctaaattgataattctgttctttgtacatctgcaatgcctatataaacaaaggactcccttatgtaatattcattcaatttcatcaatagaataacagaccttttctctctgtacatataataataagcacataacacaactaaatagaacaaaaacttgaagagaaatattttcatctcgtttggcagtgccagtggctggaaatgtaagtgacacagcttaaacaaagatgcgtagtagtagtgtaacagtgagtgagtcaagttccattaacaaaaataaatgatgaaaagttttccagaaatgaaaaacattcgatctcagtcctatcacggaacatgtcgcatcaaaattatggtctcagattatttgtttgatgttggtaggggtaaaaccgtcagaacaccttaagaagaagggggtggaatgaaagaaaaagtacgagggtcattttgacacgtggcaccagcaagttgccaagtagctgaaagctcagaccccatctatccctttccctatccctaaccctaacccaacgtgcatatctatcataattctacaccacgtgtcagtctcctggcggacggtacctttacttgcctgccataaagagaaaaataaaacaaataaagcaccaacttgcagctgagagtgaccttcactgggtcccactaccctcactcactgacactgtagctgtttcaggattgtgcatggcccacacgtcacaccaaagatctttactttttttattacttttatttttaataaattctcaagtaatctctttctcttctaaaagagattgtatacttgagaatttttctaattcaattattcatctattaggaaaacaactttaaatctcctgacgaaaattttggattcctattacggaaaataatttatttattgcaaaatgtatcgtcatccaactcataaatatattatgtgaaaatgtaatattgcatttaaaaataattgtaattttggtatgaaatattatatatgaatgtgtaaattattaaattaattattattatttaattgtatttctttttaccatgttgatttagttttttattctttgagttattgttagaatttaaggaataagatgaattaggttccatcccaaaactaattggcaatgggaggagtagcccattcattttatatatcacaatttattt

SEQ ID NO: 348580 - DNA, 1087 bp, Cannabis indica
acgtacacttgcgtaataaacagaattttcgtaacatccgtagaggggcaaactccaaaaagggagtcttggccctcaggatcaagaggaccgaaagagtgtttctgtgcaccaggaacccggggagaaaggaagaaggaaccaaagataccctcccgttgatctaagacatcagatcaacagaaaacattgtgatctctgggatcacctagaccaaaagaaacatatactggcggtctccacgggaacgctgaacgagggaattatggctgagcttgccatactacgcaaagatattgctcgggtctcccggagacaaaaaggtgatgactcagactttgactacgaggaccaaaaaccgtgcgccagacacattctggaggcggagctccccaaaaactttaagatgcccgaaatggcaacaccggggactcggaccccagcgatcacttatctcaattcaaccgagtaatgacggtcataagagtcagcaatgacgccaaatgtttatgcttcccgctacagttgagtgggtccgcggaggaatggttcaagaagttggaaccaggattagtggactgctggaacaagctgcaagttagtttccggagatagttcgtcgccgcaagaaagataaatctcgaagttagcgccctgactaacatcaagcaactacccacggacattgaaaattttcataaagaggtttaaggaagaagcctcgaagactaagaaagttgatgacggacaacagcttgcacttcttcaggcagggatccgtataggaactccattctagaacgaattatagcaagaaggagctttgaaccttcaagatttccagaaaagagtccaaaaatacatcaacttagaagaggcccaaatagtggcttataggggatactatccgaccggagtggcgggatatgtgcccggagtccaactcccgagaaccttaccttcggctactccaccaataagcgatatacgattctccgctatcccaggatataatcagagccaggcattggctcccgcatcttcgcactatgggaatcctactgggatgagtggacaagtcccgtct

SEQ ID NO: 348581 - DNA, 569 bp, Cannabis indica
tttagtaatatacaaaaaaaaattatagaagtaacaaaacaataaaacaacataaaaaataatatacaaataacaaaaattaataacacaataataaaataataaagtacaacataaaatatataaaaaaattatattttatgtaaataaaatttaaaaaatcgtaaaaatattaaaaattcatataaacaatatttttgtatttttttgtttgttatttttgtgtttttttgaaatcatcccatttttttataattaactaatggtatgtttactaataagtaaaaatatctctcatagagtaacaaaaaggtgatgtattgttatattttagcacacttactactttaatagtattctaaaaaacgtgctaaatttggcatatgttaaaagttgtgtcaaatatgacaagatataatactctgacaaatttagcccacaataaatgctatttttttatttgggttaatttcacaaatgcacaaaaacaacaaaaaaaaacaaaaaaatacggtttcacggaattttgaatatttttacgatttttttgattttatttatataaaata

SEQ ID NO: 348582 - DNA, 1078 bp, Cannabis indica
gtgaaataatccctaaaaaatattggtagggccaaccctacacacatatatttataacactattataatctaattcattctaatcacaaatatataaaaatctatattaatgcagattttcgttaaccaaatttgagcctcgcgatgataattcaacacaaaaaaaaataaaagttatagaaaaataatatatgaacacagggtttttttacgtgattttgcagttaaaattctgcatagtccacgagtcaatcttattcagatttctgagtatttttttatggcctctttcataagagtttttccgtcccctttttttgagattgtttgccactatttataattgtagtggcagttacttacaaagctaaccaaaatatgattacaatcattatccctaaaatcgtgggatctggttacgtatcacaaaatataaatacggtgtatgattttgaaaatcatatatctgtgattttcccacttttactgggtcaagaatatcgtgtattaaacacgtctttaattgttgaatctagagatgtctcgacagaaacttgattgtagtgatcccaatggcgagctggaaccattcttctttccaaggtcgacaagatatgtcttatgtcgatcacgaaaatcatctgacttgccagagttatgagcctcgctcctgttagttggagaaaactataggaagttttctcgtagcgagatggtcatctcgcattcttgttcttcgagccgatccgacttttacacttagcttgcttattgtaagctaaggtatgtgctacttttctccggtgcctcgctattctcattcagcgacatatgatttctcgttaatacactaagtgccagttcgtacattgattcctcgcctaagaccttacagccagtgggttacaaatatactctgatacttacgcaattaatgagttattctatagaaagatattgcactgattcacattccctttaccttgacacatgtcctccagccaaattttgggtataataattgccccttaaaaagttcttttttagtaaaaagagctttttaataattacagggggc

SEQ ID NO: 348583 - DNA, 1376 bp, Cannabis indica
tctctgtctgggttttgatctgggttcgggtttgggttctagtttcatttgcgattctgagttcgagtttggggttgagttcgggttagagttcgagtcctggtctgagtttgggttcgggtctggatttcagtctaggtccatatcaagctccgggtgtgggttcgcctcctggatcttagtctaggttgtgtctgagtccccagttccaatcccgatctgagtctggattcaattctgggttaagtccttggttctgatcctgatctgggttcgagtttaggtccgagtccgggtctagctttgggtcttattctaggtgtggttgtttgagttcgggtccgagtttgtgtccaggtttgtgtccagatctggaccccgatctggatcactgtcacgggtttccgtctagttctagttcatgtatcaggtcccatttctgagtttgggttcaggatcgagactgggtgcggttctaggtcccgaccctggttctatgtccctagtctggttccatgtttgggtctgaattcaggttcgggtcgggtcccgagtccaagtttgggttgggatccgggttcggctcccaattcaggtctaggtcagatttggagtccgggtccaggtctggttacggttctagatctacgtcaaatttcaattatgattccaagtccaaatcctagttctagtcccgattaacttccggttttgtttccaattttgggtaacaggttacaggtttgggtccacatttgggtttgggattgggttcaggttcgggtgtgggttcgggtcgttgttagtgttcgagtccttgtctgggtctcaaatccaggcaccgactacgggttttgtcccagcccttgatctagatccggatcccaatctcgggtcccagtctggttccatttctggtgccgggtcacgagctgggtcctaggtccaagttcgcgcctgggtcggttactaggtcccgatcctagttctgtttcccaggtccctatccttattctgggtccaggtcccaattaatgtgtgggtttgggtcccggtctatgttcgggttcgggtttaggtctctgtctaggttttgttctgggttcgagtttgggtttaggtcgtggtcctggtcctagtcctagttcggttctagttccatttgcgattatgagttcgagttttgggttgagtccaggtcggagttcgagtccttgtctgagtttgggtttgggtctggatttcagtctagggtcagatcaggctccgggtgtgggttcgcctcctgggtccttgtctaggttggatccgtgtcccaagttccaataccgatctgtgtctggattcagttctgggtctaagtccttggttctgat

SEQ ID NO: 348584 - DNA, 751 bp, Cannabis indica
agaaaaaaatggcatttttgttggagtccaaagcaacccaatccaaaaaggtcaagcctagcccatgaagcccatcatcaattttgtctcttctaaagcatgtgatgcaatgatgataagtctaggtcatcatcaaccctattttcctcttccacactcaaccttcatccaaagagtagaagacaaatcacaatgataacaaaattaatattaattttatttttgagttcaaatgtcaaatttgatattaatatttattttataatctcaaactttcatttatttatttttggtcctttaatggctctataaataggagctcattttagtagtgaagggtgtaatttttagagtaaagaaactatagcaaaatttctctccacttttcttctcatcttttctctttagaaattttatgagaatgattagcataatggtctaatcttccttggaaggttagggaagatttcatatgcaaagtgagattattttgtatttttgattcacatgtaatatttatttaagtaattacaagtttttattccacttttatttttatgttattcttccatctatattactatatatactattatatactaaatatatataaacttagtcatgttctttctatatatttttatttagtgattatcataatggtagcattgctcatttctatctcttatattcatttttatttactttttgttaaaggatatataggtttagtcatgctctctctatgtgt

SEQ ID NO: 348585 - DNA, 926 bp, Cannabis indica
gttgccaggagttgttttggactggatgtatttgctgtgtgttttgattttatgtttaaatggttgtcgaatatatttctttagcaaaactttttataacagggattcccataacacattttttatgtcgttataatgtctgtttttagtgttttttttagttaattttaaatattattacagtttttaataattaattatctattagtattaaactaatttataaaatcacacacatggcgtccctatagattaaggcgtcacaacttggtatcagagtaaccattgttttaaaggtcctgaagactggtcgaatatgtacatttgttgcaaggacaggtcgactcatggtatatattaagtatttatatcatttgctattagattacctgcctatgctattataaagtatgttgagaaaagtagcatagtgatgattgtgataagaatatgtgtatggtatatgcatattgatattgatgttcaaagtgaaccacaaattatgggatagaaggaaaggttctaaggtgaccataatagcggtcaaagtgagtataagagatgtgaccttatcttgagtgttcaagaggcaaaaggcgccatttgaaccaatgtagagccatatcttgttttattgtggagtagtgggtcatctaaaaagaacatgcccacaattaagaaagattaatgttaaagaagaaaagtgtacggatcctgtccaactgtcagttatgattcaaggggactcggatattggtccttcggccgactcaagctagaatttatgggcaatattataattgttttgatattaaacattgtacatttagttagagacatcaagaaatctgaatggactatcacagtaagactgtgaagaatctaatcaacaagaaggagaattgggctcaagaaggagagaaaga

SEQ ID NO: 348586 - DNA, 714 bp, Cannabis indica
tgtaaggttttctaaacccttttgtgtttatttcattgttttagacaattcagatttaggatgttaatcaacatacttgttagtaaatctagatcctggtaaaatatttccaacaactagccttagagccatggtaatgatttactttcatgaaatgtggatttataacggtgaatattgtttgtatgttgatttggatgtgttcatgttagtttatgtgattatttgatgattgaatgtgatttacgaaatttttccataaaaatatattatgttgattccttgtgaaaaactaagcaacttttgtttttatggaactcaattcccatgaaaaacgaagaagttatgaaggtttgaaaaatcaaatgcatatggtgtcgagcatggtgctcgcacgcaccagatgcttcggacaaggtgcgatgtgcacacggacaggggacaaaaccctgtttgaagcgtcggacacgtgcgcccaggaccctgcacctccacccacacggatcctgcacctgccaaggtttctcggccaaggatcatgcaaatccttcattccgcacacgtgtgaggccatttgcagcctgtgatggctgcacgtacagccttgctccaatccaacacccaatttttaagtttggtgggattttccccaaattttgaatttttgcaattttcaaaccctaaattaaaataaaattttatttttaaaatatt

SEQ ID NO: 348587 - DNA, 890 bp, Cannabis indica
agccaagagcaagctgtaggtcagcttctccatgagtgggtacaaaaaaataaacatcaattagtctcttgctgatgtagtatatagggtgttgtacaccgtcttcttctattgttaggactgcactcacaacatgttatgtgatagctaggtacatgcctagctcttcattgtctaggggcttttacaatacaggtggttgagccaattatttttttagctcttggaatactttttcacattcctctgtccactcaaatttttagttgcctttaagaatgttaaagaagggtacacacttgtctgtagacttggacacaaattttcttagtgcagcaatgcgtccgtcaagctttgtacttccttgatggttgtgggagacttcatgtccaaaagggcttggatcttgtctgtgttttcttctattcccctggcgttgattatgaagccaaggaattttcctaagcctacttcaaaagaatatttaagggggttaagtttcatgttgtacttgtggagtatcttaagccattcgtctagatcttccacatgcccccagcctttttggacttgaccagcatgtcatccacatacacctccatattgcagccaatgagatctttgaacattttattcacaagtctctggtaggtgtcccttacgtttttcagcccaaagggcatgactttgtagcattatagacctaagtctatcatgaagcttgtgtgtgttagaaatattttaccaagatctagatttacttctagatttactaccatgtatgtttcattaacatcctaatatgaattctaaaacaatgaaataaacacataagggttcaagaaaaccttacattggttgcagtggtataatatgactccttccattca

SEQ ID NO: 348588 - DNA, 613 bp, Cannabis indica
tttgaacggtgccattgttgaagccgagaagcacaattagaaatattactcaacacacaactggtgggatcagaatcagcagctgaatgttgccattgttgggagataatttcgagacattggtcctcttgaagccataacttttcgaaccgaaatcgtgatttgaacttagggactggtgcagcaactggtgtggaaataacagctcgaatgactctatgatctgagccaaaaaaatccaaatggtcaatcgtaggagtaagaaaaatatcagcccaagaatgattgatgaacccataatcaagcctttctttgacattagagctttgagcatgcttattatgccaagtaaaacggtcacccatgaaatctaattcatttaagccacagcgatcaatggtagatcggaaagcatcaatttgatgttcatcacgcaaaggtccaccaagtttgtcatgattcgataaaatttcgttaaaatcacccatgaccagccaaggaaagagcggagcagtgtcttttaatttgttcagcaactcccaagtgaaatgtctttgggaagtacaaggagcccataaaaaccagaaaaatgacaagagggaccatcaacaaa

SEQ ID NO: 348589 - DNA, 731 bp, Cannabis indica
ttagtcacaacaaattgtgatttagtttactgctgatgtgacttagaatctctgatcgatgagtaaaattctactcaagttttcttgcacacatgattatggatatcaagtaagaaaaatattcagatgcacatatgcacatgtttagctacacctgtatggtatttctatatagctatagcatattatcgacatcggtatgaacatatagttgcatcaagatactgatatctagtatggtaggccgtattgaatagtatggattgatgctaccaacatcaatgggactagagtgctggaattaggttggtattatggttaatcatactataggtacgaatgttcagatctcaatttacgcgttagatgtggttagtagacttataataactgagtgtatgtgctctcagttacaagtcagatttatgattgtattatgattgcttttcttattgagttcgtcgactcgtagttatttcactatgtgtaggttatatgattgtatccaaaccacatagacactctcgtccaatgtcactcggccaaggacttctcacctttgcaaatcttcttctcagttttctatagcaacttgaatcgctcaaatcaaattaatattgagggagttgtgctcaaaatatggacatagtacaaggcgagcaagacccacttagcaaagaagccttaaaccatcctcaagtcaacaataaataattgaactcatatcacat

SEQ ID NO: 348590 - DNA, 688 bp, Cannabis indica
tgttcaagcgatgacacatgacctgcggagatattccgaccatatctgaatatttccgagcaaaaacatcaagattttgtttcaaaaagatcattagttgttctcgctgctgaaaatttagcttagaaccaatttttaaaactttgctattatctacaggatctataggtaccttaatggtgtcttccgcggcttgtgctgcggcggtatgatcgaggattcttggatccaaatctggttcgtccacgtgcggtacctcctcaattctgaggacctcttggcgaggaggtggtgcctctaacaggtagataacatttaccgaccttttctccgcgagcttgactgctgtgttgtagcattctcgcgagtctgcctggattcctcgcacagatgctactccagcaggagtaggaaacttcattgtgagatgatagatcgaggttatgatcttcatctccttcaagattggtcgaccaatcacaacattatatgctgaatactggccgattactgcgaagtcagccattgatttagctgttaccggggcggttcccaaggtgattgggagtttgatcattccttttagtgcgatgacgtcgccagtaaaaccgtatatgcttgacgtcacatgtcgcaggtccttctcctgcaatcccatttgtttgaaggcttggaagttcaacagatt

SEQ ID NO: 348591 - DNA, 560 bp, Cannabis indica
gttagttactgtaattaagttttttaaatattttttaacttttttgtgtttctttgttgtcttgtttcagcatatgaacactatattctattaccttaggaaaaaaggtgaatattcttctactgttacactgaatttcgcaacaactgattgctttttcaatgattccattcaagcgttataccacaagttcaacaaagccaagacaatgaaaacaaagttgttgcacatacatgctgctcacccaatatcgcattatatacgaggtttgcgaatttcgtgttctaagccttggtatgaagccgatcatgtcctattcatcataaatcttaggaaggaaagtcattgggtttttggttgtcttgatttgaatgaggggattttatttctttataattcattgaggactgccaacatgaattctgcagctaaggaatgcaatgaaggcttattctgtttgactccctttattttttgatctgcttggattttggaagaataggccctatgttcttgattttggttctgaccctaaagctcctctaagagttgtggagatt

SEQ ID NO: 348592 - DNA, 787 bp, Cannabis indica
gctgatttgctttaatgaaagttgcaatctttgtttcaaaaaaattacttaattctattatattattttgatgtgtattaattttattattattattttaagagcattgttatggagtatttgtggtgcttattagtatgggtatttatcaaattatccacactgcacaaacagtatattttacataaaagttgcagtttgtattttttttcaaatcgcgcggtgtagtgctgtttgcagttttaaatttaataattgcagttcaaactgtaccgcattatatatattagaaagttactaatttttacaatataatattttattttctttttcatataagaacatatatatatatatgtaatatacatatatattacattactttattagagataatttaatataataacttgataattagtatatgtgttatgatgttaaaactttaataagattgtttttataataaaactttatagattgatttataaatttttattataatgttcgataatgatggtagtgtacactgctcaaactgtaccgtaccgcactgtatttttgtggttttgaaatctcacagtgcggttgcagtttgagaaattacaaaaactgcatatatgcgatttggtttgaaaaaaatattacaacccgcactacctacaccataaatactcctagtgcttagtaccttttacttagataacgctccacgattaattagcgatatactttaaaagttatttttttaagttatatgtagatccgatatttaattacactaata

SEQ ID NO: 348593 - DNA, 1357 bp, Cannabis indica
acaagttacctaaaaaataacctaggagaaaattcttgggcctttcagcatcaatcgtccaagccatcgtgaatcacagccatcaaccgttatatccactgtcgctgtattggtaacaaaatagtttttggattgtattgctacttatctccaaattaattgttaaaaaaaaagtaaaaatttatattagcttatatatatattatttgttattatagaaaatactataatcaataattaaaacttacagttttttgatcttgtatgtaacgcttggggtttgcacgtgcaacgatgtcagtcatgtatttcaaaacataaaaatcacattcttggtatttaggttgtcttggacaatttgctagtgaaatttctcgccacgggccaagataatcatgtgtttcccctatatatctgtatgctctgtttaaaaaattatattagcatttcaattcattagttaattaaaatttgttacataaatagtcattaaattataaccttcccaacatttgagtaatttgttcaggaacttggtggtcacgtatagggtctaaatggataattttctttggtgcaacgacctctagcatccaatgcgcactagaaaattatgttgggattgttgacctcgcttttagccaacgacaatgagtcttaattgtaagcgatgaatgatatagtttggatgtagtatgaaaagataaataaagaacacatatattttaaagaggttcggccccaagcagttcgataatagcctactccccttaatttgtattgacttaagaacaaagaatacagagattcttctcttaaagctctgaccatgaaatctcagagtatactctcttagataattctttcgacctcttgcctagtgagaatagatcactatttatagggctatgtgcttgagggaagttttcccttttgtttacaatgtctctaattggtaagattacacattacatatatagagtacattgattgaggaatttggacagcttgccatatctctgtgatacgatcccagatttatagagattgcttttgtgcttcacgatgcaaatgctgaagtttctaagtgttgatatgatgttcggattgtccactgctggctgggaggacttcatacgtgcaggtatatgtggtgttatgctctgaacatctccttcaggcaaatatggggaatcaattccacgtgtcatcagcgtgtgcaaatatgtggtgtgcctcgagacagagttttttatgcacgccttgacagttacacttgattgcttttttattttccaatattaattttttgggggaaattgaaacgtctgtgagatttcaaaatgattacctcttt

SEQ ID NO: 348594 - DNA, 778 bp, Cannabis indica
tttctaagtatagaaaatcaaatttccctagtaatatagacacataagagagtgctaggtccactatgcattttagcatttctctaaattttaatatgatattatacattgtaattatttaaaaaaattataataatttaatatgccgatgtatattttctgtattttcaattattttaaatttctccaagtttttaaatattaaagctctctagtctctacatgtaaatattttatattgtatttataacttatatttattttattttgagaagaatttaaataatttaaagtatcaaaaataaaatttaaaataattagtgcacactgcaaaactaattatttgaattttattattaatatagtaaattatttaaggatttaaaaaaagttaagcattataaaatataaaatatatggtaattctacaatacacccccttaaaaaagatgtattgatacacccttgacttgtttcggcatctagaaaaatcttttaatctaattttttttcatattcatgtacgttataactatttaagataatctacaaaattttaagaaattgaataatttataatatagaaaataatgttcaaatagtctattttacactataaaataaaatagtcacgcgtgcaagacactgtttgaacgaaattttcggcgtgttaaacttttctaaattttttaaaaatttacaagatatcttaaataactataacatacatgaccataagaaaaaatttgactaaaaaattatttcgggtgctaaaaca

SEQ ID NO: 348595 - DNA, 1112 bp, Cannabis indica
aagtgataagagctacgctcaacccaactatccacttataaaataagtgataggagctacgctcaacccaaatattcacttataaataagtgatatgagctacgctcaacccaaatattcatttataaaataagtgacatgagctacgctcaacccaactaatcacttataaaataagtgatatgagccacgctcaacccaactattcacttataaagtaagtgataggaattacactcaacccaactattaacttataaagtaagtgataggaattacactcaacccaagtattcactcacaaattaaggataagggctgcgaccaacccacctatccatctataaactcaaatcttcagaattgcgttcaatcataactaaatataaaatttactccacaatattacggtcagccaagttcgatgtactcagtcaagctgttccaaagtctaagtcttagtgacactcactaagacttagactaggggatatagtatatggatcaatgcaaaatatacatcaaccgaataacataaaacatcagcaaaatgaaaaatgaagaatattaataccaaattaagataataagtcacaccaccgcaaaagcaacgttcatacatcaaagcgtcataaaattcaaaagggtcatcactaagaggatgtccgcacatcaaaaggatcgttaagcatacatacttaatgccacaatggcgatgttcatactttaaacaaatgagacctaaagtttaaatcaattgtcacttgtaaacaaaagggagaacttaaaagacccactatggagcaatggtaccatcttcagcaatggagaacatcacatcgtcaatgccactcccgccagaaacagaagtatgagcgtcgacacccatactagggacagaggtatgagcatcagcgccctcatcaaacacagagatatgagcgtcaacatccatttcattctcttgctcaagagccaaatattcttcatgaagtgcaatagcaccatcgacgtcccatccacgatggagccctttcttatactgtatcatcaactccccccttgtcttgatggcagtcttgagtgaaatatcatcaacctcctggtacaat

SEQ ID NO: 348596 - DNA, 1246 bp, Cannabis indica
tttatgttatgtagtatggaggggcaaattggtccttttgccccattgttattttgtcctttagtggattttatgttgtgaatatatgtgattttaattgctatttgttagctgaataaaagtggagttatgcatgttatcttttatttcaaatggaaaaaaaatagaaaagaaagcaaaaccaaaatttcctctcaagtctctctctctttcggtctctctttgagcaccaaggaggtggtgttctccttggattttcaagctgactttaacaagatttttgtgttctcaagtgcttggtatgatccttgtagatttattttagttttcctggtttttaagaaaagttgagttttgcatgcttgagaatttgtggctatagttgttgctaggttttaattttattttctgcagtttaattagggttcaatatgtggattcaagcaagtttttgttcgtatttagtttattttaaacaagtatgaagttttgagctaaatctgtattttagttgtggattgttcaattagcttgctgtacttgtgggatttgtttagtattattttctgcagttattatatgcatatttatgtagtttaaaccaggtttgattgcttgtaggtgagctttagacaagtttgagttttgaactcaaagcttggagctcacatggtgaattgtgtatttttgtatgaagctcggttttgatgctttggaattgtttaatggggtatttagaacaggtctggagagttttgtatggtttgggatcattttgagtgagttatgaatttttattcctttcctgctcagaaccagaattccggttgtgcaaccggaattccgaatggtgttccaagatttccagaactagaattctgcttgcagaaccgatgtgccagttgggggatttttgggaaccctagtttttcccatttttaggttgtttagggtatttccatgctttttatcgatagggaagcttttagtttctagtttaagtccctgggaagtgatttagcgtatcacttatttagtgttgtgattgttatggtttaggagcctgtaaatcgccgtgcagttcgttccactcacgttgaccggcacacctgaattcgcaatcgaggtaagataagtataatagtatgcatatgtatcacatgtttagcgtgcatgttaggaagcctgttagattacattagatatgtatgttggcttcgtatcatccgaccatatcacatcggtt

SEQ ID NO: 348597 - DNA, 892 bp, Cannabis indica
tctgctgaagcactaagtcccagttgttacagcattgcatcagcatcgcttcagcattttcaagcagggactctagtgggggaagagtccgaatcttgagggagtatctctttttccttagttagttaacctagttcaaatgttattgtgcttgtgtgtgctgaaataagtgtgttagtttaagtattgctactatttgtgtttgttactttgtgagtctatttttgttgttgactttagtattgtgtgtaataagcattatgtggattagatatgtattaatcatgttgttttgtcatgtttgtgatgttttgttctagcttgcaaatgagaaaaatagtgcttgaattttcagcttggtttagggtagcgctcgatgatgaaaaatatccattttcctctatttgtggagtgccttggtttgtgtgttaaaaatgctaattttaagtgttattcttgtctaaatgctagcctatgaggaatgctttcaacaattgtgtgattgtgttatcccaccatactttgagtttttagaatagctaacaccttgagagagtttaagcatctagaattggttagtgtaatccttgaggcgaaatcctagcgagctttataacttggaaatgatttaggccatttttggacgattgagcctttcaagccaacccgagaatatttaattgtcaatagtcacccctaattgagccaaaagcctagtttttcttaacacccatcaaagtcactatatccacacgtacacacaaaatgttatccttcacaacccaaacctaattgcttaagttatcaaggactaatcaaacattaatggggttagggaagtgaggatacaactttacaaaatgtggtgaaacaagttcacattagagatgat

SEQ ID NO: 348598 - DNA, 560 bp, Cannabis indica
tagaatattacgtaattgattctgtccagattcaatgaatataaaatattcatttatcagaatcaataattatttatattatattccctaaattagaaatattctaatatgtagtacatatcaaagatgagtagtgaacttcacaataaatctactaaacaccaattaaaatttgatgtcatttgagaaacttagaagaaatttcattaaagaatcacttattttcatatgaaattagagagtgagaaataaagaggaaataaaatgaacaagtagagcaattaatagatgtcataaagcattactacagtatatggagacataaatgagactttcactattcaattagtgtatttgtactatataggatatttttctttcttgtttcaatagatccaaactaatcactgttaaaacaagtggattcaagaccaatttagacatgttctattcagtgtatgctcctacctaaaccaaattcatattgcatactagagtaaacactgttggatatattttaccaggatctagatttactaacaagtatgtttcattaacat

SEQ ID NO: 348599 - DNA, 317 bp, Cannabis indica
ttttagtgagtaatcctccctaatggaggaacattcattagcaagttcgcaacgtttaatctcgaaagataagtattttttgtaagtgtttattttagtatagatcaccctaatggtggcgactattataagtcttacaaaagtatgaaacaatggtggttacttctgttttattgttatttgtagtgccaatatgaacaacccacaccccgacccactcctagtcaatgtcttagcaaatgaactctatagtgtgaaaatgcaccctggtagttgcataaactcgcacctattgatgatgaatctgagttccaaaa

SEQ ID NO: 348600 - DNA, 640 bp, Cannabis indica
gatttaggggctccatggagacgaactatctcctttacatacagttcaacatacggatccactaaatatgtaactttcacaagtagaaagtgagcttactttgtgaatctgtccactatgaccaatactaaatcatacattcctgtggttttaggcaatccagttacaaaatccattgcaatgtcctcccacttccactcaggaaggaccaaaggttgcactaaccctgtcggcctttgatgttcaactttgatttactggaaggttaaacatttgcacacgtagtccaccacatctctcttcatcccataccaccagaagtaggatttcaaatcctgatacattttggtggttcccggatgcattgaataaggtgtggtgtgaacttcatcaagtatccctttcttaagctcatcaacaccagtaacacaaactcgagctttgcaccacaacattccactattcgagactgaaaagtctctagggcgactagccataacttcatctcgaaccttaactagctcgggatcttctaattgtgcctttctaattctctctaacagatcagattgaagtgtcaagctgtgcaaccttccgactacaaactcaatccttgcactaaccatatcagaggctagtt

SEQ ID NO: 348601 - DNA, 1415 bp, Cannabis indica
gtaggtgtacttgtgctatcccatttttagaatgattaacaccttgagagagtttaagctttcagaattggtagtgtaccccttgagatgaaatcctagctagttttacaacttcgaaatgatttaggccatctttggacgattgaacctttcaagactaacctaaaaaaaatagtacactctatttgattcaatagcctaattttctttaacacccatcaaagttaatagacccacacacacacataaatttcatccttcacaacccgaacctaatagctaaaatttatcaaggacaaatcaaatattatttgggatagggaagtgaggatacaattttacaaagtgtggtgaaataatttatattggagatgatgatgaggtgtgagttcggggtggtgagagttttgattcacataacactaaagtccttcttttgctatatatgtagatatgtaagaaaaataaaaaaaaataacaaaaaatagagaagaaaattaaaaaagtatatatttatatatataacaaaagtaataaataaaatagagagaaaaaggcaagtttaaggctaagtttggggtgtaccacccctaatcaaagaaaaacgttgtttatctagttggttgaaaaaaatatatatattgtacatatagcaagagagttgaaattggattgagtgatcattgtgggttgataatgaaattttgggtgagtgtttgagaggaaaagaagagtccttgataaattaaggtaattaggttatgagcctaagaaatgtcatcttttaccaaaccaaaccctaaacctcacattacaagcccagtaaagttcttttgatctaggatgtaaagctaagctacattagtggagagggttgcactaattcaacttatggaagcgaactttttaaacttgaggatctagggtagttgttatagaaattcaaggtgttggtgggaagtatttgcacactttattgattgaattattcttggtaagtattaaggacatagatagcatgtaaaactcaattgaaacacacaagttcaaggcatattcactaccaccaattacacttccattccatctaattctaaaagaattttcgtcgctaaattaagtttgaatgagaaatatcttctctgttgcaaatatgttattattgctgtcaattattttcttttgttctttctatttttcattacttgaggacgagcaatactctaattttggggtgtgataactctatgttatagagttatgcttttcaactgaaattattgtgagaagagtagttaaaatgtgtttgtttgcttaattttaattagttttagttttattttctctttagtaagctagcttttaagtcttgtaaaaaattattattttaattgtgttttttttttattaaatgt

SEQ ID NO: 348602 - DNA, 718 bp, Cannabis indica
attccgctgcatcaatgtaagattttcttaactttatatgtgtttaatttatcattttagaaaaagttcatatttagggtgtttaaataacatacttgtgagtagatctaagatcctggtaaaataatttccaacacaaggtgcccgtctcgttgtgggaagacctcatataacttcatcccgttagcgtcaccgaggcccacaaccctggcaagtcaagaagtttacattcaaatgagcttcaaagaactctttgtaaataacaaccgcgatcgacacaagacatacatcgtcgacctcggaaggaaaaattgctccaggtcgctattaagatcactggaaccaagcttttgtcgagacaactccataaacaatagttaaagacgtgtttaagacacgatcattttgacccagtaaaagcggaaaaatcattgctatatgatttttaaatcataaaccacatttacactacgtgatatgtaatcaaatcccatgattttagggatgattattgtaaacatattacagtcaactttgtaattaactgaccactatgtaattataaatagtgacagacaagatctaaaaagggacgaaaataaatcatacaagagaggccttgaaaaataatcataaatttgaataagattgactcgtgaactatgcagaattttaactgcaaaatcacgtaaaaaaccttgtgttcatatctttattt

SEQ ID NO: 348603 - DNA, 513 bp, Cannabis indica
aaatttaaaatttattatatatattgttttaaattattttgtcaaaagaaattatttttatagagtagtgtaagaaaaaaaaattaacgatgttcccataatgtattattttcatattttgatcatttaaaactattgttattattgtatctcacttattttcagcagcgtatctcacttgttgtcatcactatatctcatctcttgtcattaccgtaattcacttgtagttgtcactattgtatttttcaaatttatatcttaattttagatttcatctcaaattttaaatatttttttaactaagacattggagaaaatttattagtttgttctgttattattaaataatatgttttattatccttcatttaaatattttatatgatttaaaatatttttaaatattatatgattttataaataaatttctattcgattcaacttctacttttattcatctaaaaaaaactcatttttatattttatataaataaatacaagacttgaaat

SEQ ID NO: 348604 - DNA, 466 bp, Cannabis indica
tggatatttaagaccatttgtctttcaccaagctaaaatatcaaactctccactcctaggcaaaactgcttcctccaagtataagtctaactcagacttgtaagtttccacatttgaagtactacaaacatacaagtcaaaaccaactaaatcatctacacatccatcattatctccaccaactccagaagcattgaataaaggttcaagaagattttcttttccatcattcgatttatattctttcacttaatcatagcacaacattctaattcgcttaacttcattttgatattcaccaacataaattttaggaaagtaatactcaatcaatttcatcttgaaccttggatccaaaacagttgctatggctaatatgccatgaatggaagtccaatactgctcaaatttatccatcatatttaatgccataatcctaatctcatcatagaaagatgtaagacac

SEQ ID NO: 348605 - DNA, 809 bp, Cannabis indica
cttcaatatttaattacacaactatggagattgattaccctaaaccaccaccaatacaccaaacaatgtccaaagaaaaaggccagtcatcaaaacaaggttaggaaaatatgtaaattaattttctcttgttttttttagggatttttagtgctaatttgtgtatttatatctttcccattttatttaaaaggagaaagaaaaagtagaacacttgatagaattaaatcaatggaaaagtttgaagctttggataaagctaaaggttttgtgaacaaacctttcttcaaagttctaatgcaaccatcttatgtcaaaccgaagaatcctcgcttggtgagctttctttctctattaattaattaaacttaatttacattacattgtgtttaaaagaaaatttacacaatacacttaaattagatttattttattatttttacgaattttttataagtttttcatttgttttaattttttttaaaataaagtggtgttttcaaattttatgttgtgtctctgtatcaacaacgtgacaacaacactccgtatcttgaaaatatatatataaatagaataaagtatgaaaaattataaattttatcagtttttatactttctttgcaaaaacattgtaatgtccccgcttcaagcctccattgggtccttacacccacggaatgaatggcttttatacatgagtacgtcactctgactgcttcatggattgatgactgactctacagaccaacacgagtgtttccagcgtgctttgtcctcactcgcacacttcttgggaaaacttccca

SEQ ID NO: 348606 - DNA, 1073 bp, Cannabis indica
ttttttctggataccgaaacaagtagagggtataacaatacatctattttaagggagtgcattgtagaatcacccaatatcatatatttctagagtttaattcaagattataattagcaattacaaatataaaataccgatgtaaaatagataaatgaattattttcgtataatattttatattagactttaatttaattatttgtgacataaatattgaaaatttaattatgggttacacattatttttgatagtaataatagtagttaagttatatttctgaacttctattggtacttggctattaaatgttaaatcattatttacatgtcatttttttattagtatatttaaattaatttttaaattaaaaatataaatttaataacttggattaatcaaggactgtaacgtggctattaatttggcacttaatggtcaggtatttacagaaattttaggaatataacttaagtattattattattaaaaattaaacttaaatatttatgctacaaattactcattttataaatgataaaagtataaagatttcacggaattttaaatatttttacaatttttttattttatttacacaaaatacagttttttttttatgttatatacgtaaaaaaaaatataattttgtttataaaaaatagtgtgttatatacttattaagagaagctaaaatccaaatatcaaccccacttgtacagcccttgcgccaactaaggcgtgtgcttgctgagtccttaagttactaaatcaattaaacaatatatagattgatttcagctattaaaaaagaaatatataaagtttcaaataaataatcctctacactttttcaacaaaagttatatacatcttttcttttctaattagagattggttaaaagaactaccttatagcataagtacaatatactatgccctacacaagaaataccctatatatctattctatataaagtgtgcctatataaccgaattcttggtttatgagaaattcgtgggagactttttatttatattaaaaataaaataatttattattaaaaataaa

SEQ ID NO: 348607 - DNA, 1062 bp, Cannabis indica
accctatgtcaagcaacccttggagtttaattttcaattgtttaagttgtgctggagccattctgtaaggggctttagaaaccggttcttctcaaggtgccaagtcaattacaaaatcaatttctcgctgaggtggtaaacctgaaagttcatcgggaaaaacatctagaaattcctgaaccaccttgatgtcatctggacgaacagagtcaggccgagtggtatccaataccatggctagaaaccctagacatgcctctcgtaacaattccctagctgttattactgaaattactggcactcgagatccctaaactgaaccgacaaagaaaaatggttcttcaccttctggttggaagattaccatcttcctcttacagtcaatactgctgaatacttggacaagaaatccattcccagtataatatcaaaatccactaaattcatctctatcaaatcagcactcaactctctatcctctattctgattgggatagacctaatccaccttttagagataactatctctccgccaggcagtagggttccaaaccctgcttgataactatcatgcggtcaatccaacttactaaaaattcgggctgccacatacgaatgagtggccccagagtcaaacaacacagagaaataggagttgttgaccgagagttgacctgttaccacagaagggctggcttctgcatcaacctgagttatcgcgaacaccctagttggagtaggtttcgctgcagtcttcggtgcttcggttagttggggacaatcccttttgtaatgccctagcataccacactgaaagcacccctgccctttacacttccccagatggtgctttttacaactagggcactgtgggtaagtgtatcgagtttcggtgccactctgacgattgcctcgaccctggttcccccagaacctcttgttctgaccaaagccactggttgaagtatatgcctttcttttctgatcagtggtcgagccactacctcccctgctaaagcctgatgcaaggaggggtaggagtcctgccaacaaccggagtcc

SEQ ID NO: 348608 - DNA, 876 bp, Cannabis indica
taattttgactcaattggaattttaaaataaacatcctaattcatttattgatcgaaaatgtatttgttaccattgtaacttacatctgagctatttgatctaatccaatcttttagcttaacatgaaataaaacaaattgcagaaattagaaattatactttagatgatggtaatccgacctgagtacttttcaatttcgtctaaacctttgggcgtggtccgcccagtaggccattcacttaaaagtaaatgctcttttagtacttaatgtggtcatccgacctagtactttattggcagtattttcttaaatgttccccattccaataccgtggtactagaacaagttgcattttttcatcatacttacccaacttgtatgctcctgattcgagaactttgaccaccttatatcgtccttcccaattaggtccgagtacacctgccgtgttgtctttggtgtttaaaaatactcctcttaggaccatatcaaccacaaagaatttctgagctttcacttttttattgaaatatcaagctaatttttgttgatgagctatcaactttaagtttgttgtggttcgcttctcttcaatttcatcaagtgatttggccaagagtatgtgatttgcttcttggttgtacgtcaatcttctgtgggatggtggttcgagctctacaggcagcatagcttcatatccatatgccatggcaaatggagtctatccggttgctgttttctcagtggttcggtacgaccatagaacttcaggaagttctttcggccagtttcctttagcatcctcgagtcttttctttagtgtatccttcagggtcttgttgactgcttcaacttgaccattcgcctgaggat

SEQ ID NO: 348609 - DNA, 794 bp, Cannabis indica
tataattatatatatatttttcataaaaagcattattattagcgatcagtgtttacataatttttgttgataacccatcaagtaaatcgaggtaaacaaccaatttgagcaaactatctacaaaatatataggtaaagaaaataaattggcatgccaaacaattagttataataatataaagaatttttatattgaaataatgtatgcctaattattattttcaagaataaaaacacttatgttcgaagtctttctgattataagggtgtcaacatttgatctaaaaatttgtgagatgataatatgttttacaagtgaaaatattataggcaataaaatattattggagttgtctccttacttctttcaaaacacatgagaattggatgaaaatacggactaaaacaagattttgttaattgaactaaataactacaacaatgattataaaaaaaaattagattaaaaaattcgtccagatgtcgaaataaatagaatattaattaggatttttgcccctgaattttgacatgtgtcaaatcataccctttgaacttttaaggtcgttaaaaatgccctctgaaccattgagattgttggatttaaggaattttgtctaatttcattcaattttactatttcagttattgtttatgtactaaatcatgctccctaaactttaatatctactaaatcatgcccctcgaaatttgacatatactaaatcatgtccctgaactttcatccatgttagatttttttattaaaattggacaaaagtctttaaatccaa

SEQ ID NO: 348610 - DNA, 551 bp, Cannabis indica
acttgaatgaacaaaggcaaaaatgctaaagtaagcttaaaaattaatcatacccaacataaaagttcatagtcattcaagcctcaaaagtctagctcatattcaaatgaaaaactaaaatccaagctaaaaagctatcttccatggctgctgcccggttttacaatttaacacaacttttaataactaagtacaaacaacaagaaaagagaaagagaaagaaaactattaagagaggataaaagaaaaatcaaacactaaagcttggtcaccctttcttcctcctttgttgtacttttttcttcatttactgccccttccaaaaagttgcagctgctctcattgatggaaagatgatggtgttcttggatttttcctctttttgttgttgggtccctagggtacaaaaattacaccctaaaattagaagcccaatccattttgaactttggcccactagatttagtcctccctttacaaagcatccagctggtctgattttaagtaaccaacatgctcctgatgacgtggacactcaattttgtgttccc

SEQ ID NO: 348611 - DNA, 970 bp, Cannabis indica
tgcctcctttctattattgtatgtccactcttgcatttgtgctctcaagcactccattaatgttgtgactggtgtttcccttgctgctaaatttgctgagttcagtgcttcagctatgttagatgtcatagtagagtacctatcatttaaacagtttgtatcatcgttctattttttttatccaactaatatgcaacactaaaaaaacccaaaaacaacattttaaatatcaaaaactataaaacatgttctaatttttattgttttacctgttgttttttgaatgatatcttgaccatttctcatggcaaatttgttccagatacggtgttatgcgcttatccaagttgtctagctccctcatatgaaattcaaactccatttctgtgtaagcttttgtggctacaaagaatggacctctaaaatgctttgcatttttttttttaatttgtttttcaggtttgacaagaggtggaagatgcagtagccatgtcttatttcagggaacacttttcttgttgctttgatgatgctttcatgtctgtctcatattaggcattgatcttctcgaaccccaaatgtttcttttatttttttgaagaatcactcctatgatttatcattcccaaaatcaacaatacagtatgcatgtggaaatatattcgattttgcatcttgtgtgttggcagtgagcaacgtgcctccatacgcgacctttaggaatgtaccgtcaacaacgatgattggtttgcagtttggccaacctttaatagcagcatttaatgcaacaaatgcatattggaaactatgatcttcttgtttctctatgtcaattatcattcctgaatttaaatttaacagtaatatttagcaactgttactcaacaatttagcaacttaaaaacaacgttttcagttcaacaaatatatttgaaaaaaatattttctttacctggatttgttttctgta

SEQ ID NO: 348612 - DNA, 516 bp, Cannabis indica
ggtctaatccctaggttctgtagggattttatgagggtagtccttaatctcttttgactgatgtgattcttcacagagtagccttcactagactttattgatcatagcctagtaggtacagattgggggttgtgccgtcagactttactgcgtatggcagtttcaatacgcctcctcccatgcggcattaaatgcgagatgacagttcagatgaaacctgacaccacccggagatgctttgttgtcattttgctctccgggagcatacgagacttacatgccttctccgggaggcatgtctagggtaatcattcgctttaagaagacttagctgttttattcaaatgctaaatcttttccgtccatgtgtccttattcggttggtccacgtatttttggcaaaatcaggggcaacaaaaaaaaaaaattaatatcataaaaaatttataaaataaactatgaagaacatatttttattaaaaaaaaagagttcaaaccataaaattaaaaatttat

SEQ ID NO: 348613 - DNA, 497 bp, Cannabis indica
gtcaccggagtttactgctggcacaggaaaagttgtcggagtagctgccggtgctgaaaaatttgccagagttgccgttggcaccgaaaaagctatcggaaaagtcaccggagttgccgcaggcactgaaaaagtcgtcgaaattagcattgtccccggaaaaatcacaagaaaaatcaccacttttcttaatgaaaccagtttcttggtgatttttcttgtgattttaccggcgacaatgtcaattccgatgactattctaaagtttgttgttggtgtcggaaaagtcgccagagtagctgctggtgtcagaaaagtcactagagtcaaaaaagtcgtcagaattggcatcgtcgccagcaaaatcactggaaaaatcaccaagaaagtggtttcttcacccagaaaagtggttttttcatcaaggaactagtttcgtcacacaacaataataaagattatgaaaatagaacaaaaatgatatacaatgaaaataa

SEQ ID NO: 348614 - DNA, 1177 bp, Cannabis indica
agatcctggtaaaataaattccaacaggaatcaccaccacccctgccataaacaagagtaggaagggtggaggttccaccaacattcggagttacttggggctcctgaaggaattttactgcaccctcggctcgtaagtctttttccaccatctctgcatatgttgttgcttcattagtagtgatcaccagatcatgtctaatcttcacattcaaaccggccatgtactttactttcttactaaaatctcttgccacaatacccacggagagcttggccaaacgatcgaactttgtggtatactcagtgactgacattccctcaatttgtaccaattcagtaaactctttcagctttatactgcgtacggcttcattataatacttggcattaaataactctcagaattgttcccaggtcatagcagtaacatcccgagtgagggacaccaattcctaccacaccagggcgtcttcctgaaattgaaagtagcgtaggtcacccgatcatttccaaccacccccataaaactcaaaattcgctcaattacagtgagccacttctcagccttcattacattaggacctttcagaaacactagaggtgcttgcttacgaaacctttcatatagcggctccatatggttggcaacaacaggttgttctgctggcaccactggggctacagcggcctgagcttgttgtggaggcgcagtaggaagaccctgctgcctcaatatcagaatttcttcttcttattggcggattaaatcttgcatttccgcaaacctctgctcccaatccggaggagcttgtggtggatttacaagacggccagcttaagctctgccacggccacgaccgcgaccacagcaattctggggaatttgatttccctggccacctccgatcttaaccatattaccccgatcttaaccataggacttagcctgcgaacccattagccagacaggttaaacagcgatcataatgcttaatatcgctcttatggacttaaaggcaacacactgaaaataaataattataatctaatatgcttcctaacatactttaataatcatatataatactaaacaagtacggacttactgaactgtgaaccgagctttctctgatgaagattgtacatgccttggcaagcttcggtagacaaacct

SEQ ID NO: 348615 - DNA, 557 bp, Cannabis indica
aatgaaatctctgagtattttctcttaagtctctctcaaacaattctctcgatcccttttacagtgataatggatcactatttatagggctaaatgcatgagggaatgttttctttttgcttacaatatctataattggtaagagcatacattacatatttagaatacataaaatgagggattcggaaagcttgccatatccctttgatacgatcccatgattttagggattgttcttgagcttcacgatatcaatcctggaatagtcaagttcagatgcacagctcggagaaatgacttcatttgttgttcgaatcgtctgcccttgttctgctcggtcaggcagactttgtccgtacagatgtatggctaaagtctgtttggaacctttctccagccaagtgtagagaatagcggacacgtgtcaccagtatgcatttccacgtcatggtgcgaaaaatgggataacatttgccccccaagtctacacgggacttctgaaggcacacgtagacttcacttagtttgaatttgttggaattattttaccatgatct

SEQ ID NO: 348616 - DNA, 517 bp, Cannabis indica
agaagatttcgtcgcacgaaggagaagagagggttttgtcattctttcgttcttcagttataaacttaatatatatatatattacttaaccgatacatttgtaaaaacataatatatataatataaaataataatataataatattaataaaaatttaattattaataattgtcttaatatttcttagcttctaagaacttttttatttttggggtatctagtcaatttcgagtaccccaaaatatcccaatatttttaaaaggctaattaggatttttgctccctgaactttgacatgtacaaaatcatgccccctgaacttttaaggtcgttaaaaatgctccctgaactgttgagattgttggatttaaggacttttgtctaatttcattcaattttactatttcagtgattgtttatgtactaaatcatgctcccctaactttgataactaccaaatcatgtccctcgaactttgacatatactaaatcatggcctctgaactttcatccatg

SEQ ID NO: 348617 - DNA, 1495 bp, Cannabis indica
gagttcggttctagggtgggtccacttcctactcacggtcctagtcttgttcgagggtctcggtgttgcggttcttgttcaagttatagttttgggtcaggcgtcaggtttgggtcctggtgtgagtcccaaatctagttcgggaccgagattgggatgcggttctaggtcccggccccaattgtgtgtctcgattctacttccatgtttgggtctgagttcgggtccaggttcggcatcgagtctatgtctgggttgggatccaggtctgggttgcaatccaggtctaggtttcaattcgggttggtttgggttggagttcgtgtcctagtccggttacggttccgagtctaggtccaggtcttattacgtttccaggtccaggtccacgtccaagtcttggtttctaacctcgttctgggtcccggtctacttccagtttcggttctaatttcggctcacaaggtacgtgttcaggtccaggttgcgattcgggactaggttcaagtcttggtctagtttcgggtcctggtctaggttcgagttcggggctgcgtcccagatccaaacaccgactacgggttcagtccaagccccaggtctagatctggatcccgatctcgggtctcggtttggttccatttcgtgtgtcgagtcacgagttgtgtcctagaattaagtccgggttttggttcgggtcttgggtcccggtcctagttccgttgcccaagtctgtatctcgattctgggtccaggtcccgatttgggtcccattctatgttcgggtttgggtcctagtcaaggttcgggctaaagtctcggtctgggtttttatttgggtttgagctctaatttgtgtcttagacttggtcttggtcctagtcctagtctagttcgagttctcgttgcgattccgagtttgagtttgggttcgagtttgggtcagggttcgagtcctagtttgagtttgtgtttgggtctggatctcggtctagttctgaatcaggctccgggagtgggttagggtcttgggtctgggtcaaggttctggtccgagtcccaggttttgatctcaatctgagtcagagtttagttttgggtctaagtcttgggttctgatcaaggtctgggttcgagttcgggtccttgtgcaggtctatgtttgggtctgattctgagtctgtgtctgagttttggttcgggttcggctttggtcctggtatgtgttcgtgtccaggttcatgtcctagtttgggtccggggcagatttcatgtccaggtcttggtccgacttcatttttcccggtccaggtcaggtcctagttcaggttgaagtctcgaatttagatcaaggtctgggtttcggggtctaggtccttggtctaggtgccccatccaagtccggttcctaggtcctagtctggttccaagttcgggttcaggtcctgagtcttggtttttgtctaggtcgcggtctgggtttaggtccagggct

SEQ ID NO: 348618 - DNA, 831 bp, Cannabis indica
tagtaaatctgattatatttgaaatgagtttttatttagtgcacgaaacccaacaaactcccacttgcacaaaaaaaaaacaaaaagtgcatttcatataatctctacaccttgatatccagatcaagtgtagtatgtcgtatactctctgtaataggatctgacaagttgtattcaatacaaactttcctccaccattacatttccttaatcacaaaatacttgatattgtgaaattcctctctatatgtctactcctctagggatactggattctttacttttggcaactacttttgtgttagtcaggaagtaacactagtacttaataaatgttggtacaatgccaaaaatgtatagaactttccatagactgaataagtatttttcctgcaactttaacattcagtctctgtggtagacttagagactttatataggtttctacacttctcaaaaattactactccaccccaagagtaatcaccatctcatcagcaaactttctagcactaaggcaagtctaaaaatcttattcggtgtagtctaagagtattaaataccacccttatcgactaacatatagttcctcttcttaaacttaagattcacttgattgtcttccaatgtttctttcatggattaatctaatccttactcattagtcccactcaacagcaggtgtctggtctaatgcataacaaagcatatctaagacctctcactgttgattcaaggaattctttctttcgcctttatcttttctggaaaagatgaaacttttccttagataaataaaatctgtctagaagtcgagaagcttctatagat

SEQ ID NO: 348619 - DNA, 503 bp, Cannabis indica
agaagtcgagaagcttctatagattgccattagaaaatgcaccaggaacttacaaagtaagttgctcacactaaagtagttaaataaccaggtagaccacaaaccataggtttagataatctcaaacctataatacttggaactagaagctttgttaggtccattgaatagacttattttcaaaattttctttcttgtccttgtaatagaaaaacttttgttaactccatatgaatggttttaaccataggtctcttggctttgcttcttattttcttattctgacaatccattacttgtttaaactaacaattgatttcgtcacaagtttcttccaagtcataacaaggtgagttccttgaaaccctcccactacgacgaggtaccgtgacgatctgtctaagaatctaaatggtattatcgtcttcggttgtgtcaagacaacagaggtagtgggatcatcttatttagaataagatgatagaacacttttggaatgaaga

SEQ ID NO: 348620 - DNA, 542 bp, Cannabis indica
tacttcaacttgttattactcatgttagagtacaaacttgttcattccttgattaatcactttgttttgttttaatttaatgatatgaaatattatattattattatttattttatttgttgggacaaatttatcgagatctccaaaattataaagaaatttaacaaccccacaaagaaattttctagtaaaaatagaacataatttagtgaagggatttttatttttatgatttttaaagtataagtttataaaaatatggtttttttatttaatagaacataatttagtcaagggaaacttaggtcatccatcctgagattacctcaggccaaatacgcttaaccgttctttcgtgataggctaccgaaaaacaagatacaccttgttgatataggcggtatcaattaattcatttaagccatcttcaactatgtagttccatacctacacagtctcagaatcattccacttgaccttccccaagcaatgtgagattgtacagcttacccgatatttccccttacagatcacgagactac

SEQ ID NO: 348621 - DNA, 482 bp, Cannabis indica
tataaataattttttaatgtatatataaatgtaattagattggatcagtttttaattgaattttgagattgatatctaataactgatccaatctaattagaatctaacttttaggatccaatccaatctaattataattggatatccaattttttgtaattggattggattggatcggtttggttcaattggattagattggatgttgcccaccctaccctcattggtgtcatatataccactattggtgtaataagtattgagtctcatataatttaagacaataacttttaacaaatatcgagtaccaatcataggatgtcagctatagaaatatacccttcttttatattttatttacaaatttacggccttaaatacactttgcttagtaagaagtaaaaaaaaggattatttcacaaaaacataaaaacaacaaaaaaaattacaaaaatacggtttcacggaattttaaacgtttt

SEQ ID NO: 348622 - DNA, 601 bp, Cannabis indica
cataaacaatcactgaaacagtaaaattgaataaaattagacaaaagtccttagatttaacaatctcaatagttcggggggaatttttaacggccaaaaaagttcagggggcacgatttactacatatcaaagttcagggggaaaattactaattagcctaatctataatccaattatatatttaaattaggagtgtgcataaatcaatccaatccaatcacaactgagtaccaaacattagatattcaattgtgatcgtatcaaatattatttttgaatatccaaccgcggatcagatgttggatggggtgtttgttaggttatatttagcctatgttttggggtctgaaaagtaagcactttctcgtctattggtgtcttttggagcggttttacgcttgattttccttgtttcaggttcccggggtatcaaaagtcaaatccagtcaattaatgtaaagacgggacaaactggcaaaaaatcaaaaaagtctgttcgagatgtgtcagtggtcgcgactactaatgagccaggtcgcgacccttttctgtggtcgcgaccatggtcgcgacttggaagatttggcagaaactcggttt

SEQ ID NO: 348623 - DNA, 729 bp, Cannabis indica
gcgcaaggaggattaataaactagagaatttacttggtaaattctagttctacttattggaagtttgattatataggcccatcggtccccacactagttgagataatactacttgttgacctagttaattggttttaattaatcaattataattctaaaattagactgtcttatttatgaattttcactaaccaatgacttaattgtgaagaaaagagcctttacgggtttatttattaattgagagactttgtaagatctaattaataaataagttaaatgctaattttatttgataattaattataattattaaataaatagttttgatatttatagaattgaaattagaaaatatgacattattgaaagaaaagataaatagttgaaataaagtgacaaaattgtaactaatgaggctcacatgtgtggtcgaccacttagtgtattttttccattattttatctttttttatccatataattaaatcctaaaccctagttgaaatattataaaggaacatgatactctcattctcatccattctatctcaacctcaaggccgaccatagggtggtgcaaccggggccgaggccccaggccccacaattttggaggcaccgaaaaaaataaaatttatattacatatatgtatgtagaaataaaatataatatataaagttttttttgtttttttaaaggtaaaccgatacaggttaaaataacaa

SEQ ID NO: 348624 - DNA, 907 bp, Cannabis indica
agagaaaaataaaattatataaccgtgtagttttttttaatgttatatctgtgatttttatttgtttaactgaaattgtttgtttgttgtttctttatttcattcaaattgtttacattatttgttgatatctaattgatttacatatatataagtagtattattatgcaattattttttagttattattaagttgtttgaccaatacaaaattgagtatataattatttgtttatgggtacatatatatatatatttttgagttgtttgcacaagtattttgtagttacttttaatttttaaacttatttggactcgtttggtacgccgtattgtattgtattgtattgtgttgtgttgtgttgtgttgtgttgtgttgtgttgtgttgtgttgtgttgtgttgtgttgtgttgtgttgtattgtattgtattgtattgtattagtattatttaatacaatacaatgtttggtattaacttgtattaatagattgtgtaacgttataatatatttttaatacactcgaccccaacgagtctcgggtcccgggtcccaagttcgagtcccgagtccgagttcggggtccagttcgggttggggtttcgagttagggtccaggtctgggactgggtccgagtccgagtttcgggttcgggttgggatcccgggttagggtccgggtctaagtctgggtctgggtctgggtctgggtctgggtcccgagtctcgggtcctaggtccgcgttcgagtgcaggtcccgggtccgagtctaggttcgggtcccaagtcgggtccaggtccaagtttgagtctgggtctcggtctgggttcgagtccgggtccatgtcccgggtttgggtcccgagtcggggtcgaggtcggggtcggggtttgggtctgggt

SEQ ID NO: 348625 - DNA, 893 bp, Cannabis indica
ttttaataaaatataatatgatggtatatataaaaaatgtatttatcaacttatcccaattaaaatagtaggggtgagcaacattcaatccaatctaattgaaccgaaccaatctaattcaatccaattataaaaagttagagatgtgcaattataaatagattggattggaggttaaaagttagattttaattagattggatctgttattggatgtcattcccaaaatctaattaaaaactgattcaatccaattacatctatagatattaaataacagtttaatatatttatgtataaattttttatttttacttcaaaacaattctttttttatatttttatgaaattttacataaaacccccataagaactaatagagcaacctaaatcgcatccaaaatccacataacaacccacatagataccaccgaagaaactaccggagcaacccaaaccttatatttgaaaaaaaaaaataaaaaaatagtactatatgagataattttccaaaaaaatatatattttaatcatgttgttagtaggctttattttgtgttgaattagtaatatttagttattttgtctattaattttcatgatatttttattttattttattactttataatgttgttgttttacttttaaatttttagttgcattacactcataacaatgatattcttatagattattaaatttaaataaaaagttatttaatttttacatatttttttattatatatttatgttagtattaaaaatttggtgtgtaactgaatatctcattaaaaaatcgatccaatactaatttgattgggttgggttgtgttgagatacagagtccatacggttaggaagttagttaagggctgttatagttagttaat

SEQ ID NO: 348626 - DNA, 611 bp, Cannabis indica
tagaacgaagacgaggatgatcctcatgcagaaattgaagcaaatcctggtcgatctgatgcccgagttcccaagactcacctgagttcatctacaaaagacaacacacaagatgagtgttggacagaatatcaaacgataaacaagcaaatatgccgaccaggagtactcaacagattaaagaacggccatgtctaaagaaaagtcagaactcaagaagtcaaaaggttttcttgagttagggcaaaagttaatgaagcttagaataagaaagatgaaagacagacgcaatgcggttcagagacaagcccaatggctgtaaacccacatgaagacatgataaaagagtcgcagaagtttctaaccctagggtttcctaagcatttttctacagcatagttacattcaaagtgttaacatgcaaagaaaagcataaaggaaatcagaaacttactcaaagattcaaatgtctgtgttcgagcaacgtcaagccaaccaacagttatatgaaggcacttcggcaactttgaagccagaaaactctcttttcgctctggagtttacttagcaaagaagggtgataaaatgagtttatgtgccaatgctatggg

SEQ ID NO: 348627 - DNA, 778 bp, Cannabis indica
gataactaatcagattgtaaagagttttatttagggcattaaacccaacaccttcattagtacatcttcaattatcccacgaggatgagtcaaagaacgatccgccaattgtaaagtcactgttgtgggctttgcttttcccaatcctagccttttgaagacagacaagggtattaaattaatgcttgctcctagatcacatagagctttagtttccaccgaaccccctatagagcatggaatattgaaactacccggatgtttaagcttgggcggtagtttcttctgcagaattgcactacactcctcagtgattgccattgtctcaaattcttccaacttccctttcttggctaaaatttctttcatgaacttcaggtaagttggcattcgctccaaagcctccgcaaatggaatgttaatgtgcagtttcctgaatatttcaagaaattttgaaaactgcttgtcgaggttgttcttgcagagtctttgagggtaaggaattttaatatggtgatctatgttgatcggaggtgaagcttctttcggtgcaagaccctcagtagtgttcttttcctttggtgcatgtgtctgtgcccgtcgatcctgaaccacatcttcaactggttgcttgccactaggtccctcataactctttcgactcctcaaggaaattgctttacattgctcttttccttttgcctcactagtgctaggtgaatttccttaagcttgttttgccacttgagtagccaattgtttcatctgagtttctaga

SEQ ID NO: 348628 - DNA, 751 bp, Cannabis indica
atattatttaatgataaaaatgtatggttttatgtaataaattttcaaaatgtataagtttttcaaataattttttttgcacattttttgtaattattttatttttgttgtacatttataaaaaaagccctataaagaaattaatcacagccaatgacaactagacatgaagttctttaataatcgatctaattaaaaaaaaaaaaaaattatgccaaagaaccacaactcataatctggaaaaccaaaaccctattttttaaaaaaaaaaaaaaacttaccaatttttttttagaattaaaaaatccccaaatttctaaaatatgaaccctaaattctcaaaaaaaatcaatcaatagtggtattgataccacttgttagaattctttaacactaataaaatatgcaacaacaagattcaattcgatagataaacatattacatataattataagtgtataaccatagatctaaagaatacctttgttgattcaaagagaagaactgaaatagcggaagcataacttaatccatagataatgatgatctcaatccattgtagagatagtctttgtggtaattttaggtaatgatcttctaagaaaataagacttagggtttttctaattttctctcttcatagggaagataagaatagaaattgtcgtttcttgggaccattaccaatttataaccacatagctaggttattaattttaagtatttctaatttagctcctcaataaatta

SEQ ID NO: 348629 - DNA, 634 bp, Cannabis indica
ttcgagttgttggttattcagattcaaattttagcagttgtagattatttaaagtcaacatctggttatattttcaccttggctggtgctactatttcttgaaaaagtattaaataaaatttagtcacatcatctattatgtatgctgagtttgtcgatgttatgggtcatctttgcgaattttatggttaaagaattttattttagaggtacaactagttgattctatttcctttcctatactaatctattgtgattataatactgctgttttcttttcaaagaataatgatattagtagtgatttcaaacatatatatggaaataaagtatctcactgttggtcaagaaaagagacattgtgatagaattttgtaagatcaagtcgatgtttgcagattctctaaccaaaagattaagtgttgtgttgtttaataaacatgttattgatatgttattttataatcttttgttcctttgggttagtgggagtttcttgttctatcttttgatattacatttatatgtaatttacttgtggatgttatgaactacttggtgggccaataatttttttttggttatcaaatgtttatgctttcaattatgttttgttatattctcgagaatgatt

SEQ ID NO: 348630 - DNA, 348 bp, Cannabis indica
gatatatgtcaaagttcgggggatatgaataatagtctataagaggataattttgtagctataaatttatttgtattatgaacgtataagattgtaaaaaaataaaataaaaataacaaaatgataattacactctctaatataaattgataaatatatatatatatataataaaaaaaacaataatatagcatattctgaaacatgtaaacaaaaaaagaaaaacaaactagggaaatgaatccaattataggctagtgcctttaaaagtttgagtccggttcaaaacaacctacacaaatagatgaatgtacttaattgctgcattgtatttttatctatggtaga

SEQ ID NO: 348631 - DNA, 996 bp, Cannabis indica
gtatttgtgaaattatcccttttcttatttactggttgggcctataattattgggcttagattgaaaagcttggcctgacagaggttttgaatgtggacactggaaatgacatgaatcgggatagtagaaaaggttccctaaaagttcatttaagctttcaacattcttacttctaacacatcaagcaatcccattcgcatatagcagaatattcttgcaatttgtgcatttggaattttaatattttatcttgatggtacagttttagtaaaataatttgtaagatgatttcaggtttgctgctcctgaaggcttcttttgtttaagttacaagacagacaaactcaatctttgggtataaattgactaatgaaaatataatgttaggttgtttagtaaatttgatgaaactggtagagaataaatctatggagatttatccaaccacacaggaagggtttatgatgatacaaaagctgtagcaaaactttaccaacttctggttttcctttctcttgtactacatacgtacttaaaaacattactaacaatacaagcataataatctatgtaaagtggggccatttgaatacctggggtggaacaagtgcgatgtaattgaatttaaatttcattaattcttttatatgatcaagataagcttatcaacactaattcattagaattgctatttccatgagagagaacactaattcactagagcaaaatggaagttcaaagttaaagatactcatcctcactttcatctttgaagctgaaaattcaacaaagaaagcttatcaacaatacagtcaaaagagaaagaacccaattataattatcttatgaattaaatgattataatctcatccttgcacaatcagactacccttacaattctaaatatttcacaaataactaaaacctaagctgtcatcacaaaggaaaatcttcagtcctcaccacctaataaagaaaaaaaaaatatttatata

SEQ ID NO: 348632 - DNA, 500 bp, Cannabis indica
gtgggacactgtagacaaagtcatttatgaggatatgtttagtgttccattggagtaaatatagtgtgaaattacactatatttgatgttttagtgtcctattgaagatgacagacactatatgatggggatcatgagtaggagatatagcttttctaaattattgcttgctgatatatgatatttgagcaaggatctacatctttggagaattttaatattgattgatttgaaaatataaaaaattaatacataaaaatattatcttcattttttagccttaaactcacatagatttagttttttaaaaagggatattggcagtaaaattacttgaattttacgttttgtaacacttaaccacataaattcaatttttgacggcagaacctactgaacacccattctgtttgggaaatttgacaatatatgcttaaaaatagcatatattgttttaatatactaggtaaaaaaaaataaaaaaataccctccaattaac

SEQ ID NO: 348633 - DNA, 572 bp, Cannabis indica
tgccttgctattttgaatggtcaacaatcagtaaggaaatttaataagtccaatgtggtgttgattccgaaagtcactaaaccttctttcgttaaggagtatcggcctattagtctctgtagtgtcttgtataagattgtggcgaaggcggtatctttgaggctgaaaggtacattatcaccgttaatctcatcatttcaaagtgcgtttgtgccgggtagagctattcatgataatgttatggtgggtttcgagttgttacactctctctttaagaagaataatggtgttagggggtttatggcgttgaagttggacatgagtaaggcatatgatagagtggagtggtgattccttcgtgctattatgctgaagtttgggtttcctagccggtgggtggaccttgttatggattgtgttactacgccggaatattgttttttggtgaatggtaagccgaaggggtgtgtggtgccttcaagggggctgcgacaagggtgcccactttcgccttatctatttcttttttgtgctgaggcgttgtcatccatgattcggcaagcagagggtag

SEQ ID NO: 348634 - DNA, 2014 bp, Cannabis indica
aagcacacttaaaaaatgacggcttaccaacggcgaactgacaagatactttaattctaaggtaaaagcaaaagtcctgcggacaggagagctggtccttagaagagtaatgccaaacaccaggaacccagcgcatggggtgtttgggagataattgggaaggacagtatctaatcgcggaaaaaataggtgatgctacataccgactcgtagcactcgatggtactgcgattccccgagcttggtatggcgaaagcctaaaattatattatcagtagtactcgaattattaaattatgtctgctttgtacttatacttagtcattttttataaataaaaaaatcctaagtataggggagtataccataatgtactattgattatataaaggaaatgcctcatatttgttaattcttcaagtttaaacaagagattgtcaagtattgtgagattttctacttattacaccaggctataattaaaaccgaatatatattaaaacgcgagtacccgtgtactgcgaaaatgttaaacattgattatccccgcgaggatatgaatttatccaaaataaattgcaaatttgtctaagtacagagtgcgagtacccctgtaccgcaataaaataaaactagcaaatttaaaagaaatatagttcaaacatagaaaaaatcaagcgttgggagcagcaggaacagagtcatccgcgactttactggccacctcgttctcaacctcctccgcctccgcaacttcagtctcctcgagaaggatccctctaccgccttcggttggtgtgggtgacctagcgcgaaaagcctcggccatttttgcagcttccgctccaagaatcgacaagtcgaagtctggaactttggaaagagtagtatagatgtagtccgagaccgcctggtcgtactgtttcttgccgttctccgtctcagtttccaggtcgcgagacatctcttcaatcttcgccttggcttcaagctcgacctgctccttggccttgcgaagtccctctaattctttggccttggaagacgcatcttgcttcagcttcttaacgtcttcttgaagctgagcaatatgcttcttcgcgatttcaaattatctgggccctacagcaaaagccttcggaaatgtagccatgaactgcgaagctaactccggagtgcgaggaagcagctcctctgaagatgacttgtcaatcttcgacaaaaactcatcgctgacaaacctctcctgaaggtacagcacatgacgagctcgagccgctggatcgatcacgaccttcttccctttctcttgaacacccttagcaggcctcttggaggaatctacgacaggagtgacaaccacatcgattttcctcttcggagacgtaatgggagaggtcgctgctgtcccaggttttagtttgcggttgagcataggagcagactttaggaaagtcatttctgcgattaaaaaaaaaaacaagggttaatataactagggataaaattctaacaccttaagtttgcgtatgcaataaaatacctgatgatggtcgaggagtttgcttagaaaggtgtttatcaattcgctcttgctacttttcagaaggttccttatacaccggctctctccaaagactcgcgttctcagggatcagtttatgttcgcgaagtttagcagtcgtacataacaatcgccagtcgcgatcctgtacaggaaggcttccaagaatttctgctgtttctctgcgagtcgcgtcgagtgtgggacgagacggtctatctgcgaaaaccaaaagaaaagagcaagtcagattaaaacctcaaagcaactcagaaaaatgtctaagtcagaaaacatgcgacgtactaggtctacggttaaaatcagttctaatccctgggactttgaatatgtagaaccactttgatttccaatctcccatattagataccatcccttctaccccattaatttcagaagtcgcccatttgctaaagtagtagaaaccat

SEQ ID NO: 348635 - DNA, 505 bp, Cannabis indica
aagtagcaacagttggctatgcccctagcgctggcaactgtacatgacgtgtttcatgtttcgatgcttcagaagtatgtctcagacccgtcccatattctgagctatgaagcattagaactctagccagatctatcatacgaggaacaaccagtgcaagtacttgataaaagagaaaaattcttgagaaacaggacaattgcactgataaaaatgttatggaggaacagtaaagtggaagaggcaacctgggaactcgagacggatatgcatccgaaatattcagagttgttcaagtaaatttcgggacgaaatttctataatgaagggataattgtaatacccaaagattaaggaatcagatttgttagcccaagatatgttcccaagagggtggtgaattgggaattcaaactaatttcggtaaattaaaacttttaacacaaaatcaagcaattagtcacttaatcaaataaaagcaagtaatatggcaagcaatatatta

SEQ ID NO: 348636 - DNA, 497 bp, Cannabis indica
tgattagtggtgttgtttaaggttatggatttctcttttcaaaagtttagttttcaaagagaattttcgaaattggtggctgtagttattgcatgagttagagtttgttttctgcagtgttattatgcatgattttgtagttttaatctagttttgaggcttgtaagtgagctttagccaagtttgagtttgaactcaaagcttggagctcacatggtgatttttaattctgtgctttctgggctgtattgttgctttagaattgttcgttagggtctaaagagcaggtctggaagttttggtatagtttggattggatttgtgcattgtgtgaatttttgaaaaattcctgcgaggaaccggaattccggttgtgcatccggaattccggatgggtttaaaaatttccagaactggaattccggttgtgcaaccggcctgcgggttgggaaattttcagaaaccctagatttccttgtttttatgttatttggggt

SEQ ID NO: 348637 - DNA, 684 bp, Cannabis indica
aactctggccaaccgttttgcagccaaaacttcccattgtcattttctaacttcattggccatttggaaccacatggaagcttaacaaacactctttcagttaaagtttctccacatttttccacaaaatattgtggaacccgctgcaaagaaaatagaatttccttgaataaatttgagataatcaatcactaccatgtcaataaatttccctctgcataagattcacattcctaaaatttcaattgatggtttcaacaaataactttctttctcttgaacaaaaatgacaatccaacaatgtgaacaactcccatgttgtagtactactacctaacatttaatgtttttcagtcaaaggttcatcactctgtttggtcaaaagagtatcatacatgtttttcatataaagaaaaacagtaagagatgcatgcaagcttacaattttgttctccttgagagtctctgtcagaattatcttgaaaaaatgtggattcctcgatgaaaatgtgggcttttcacttagcatctttcaccttcaaaatcaaaagctttggcttgagactgaggcaacttatatatcaagactatgcaaagtaagtccaacaaaaacaaaatgtagccattatcaaagctattaaacaaaataaaattcaaagttatctttgatgctaaaatgaagct

SEQ ID NO: 348638 - DNA, 544 bp, Cannabis indica
tttacgttttttagcttaattattgtaaatcaatgtacaaacggactgacaatgaatgcaatccttgtgtaaatgatcggacacttgctttgtatataaaggagtgatccaccgtgaaattggacacctacagaatccttacaacagtggactaagcagaccgtgatctggccgaaacactatacacaagttcgagtactcgccgttctaggttgaatactcgcacttgttcatcatattattactactattattgttgttattattcatttttggtgttgtgaaattccttcaacaacaattaaatatcaaataagatcaataattttaataaaaatatcttcaatatcattttcaaatcttataatttaataaaattaaaataataaaataaaccaattttaaaatagatgtggttagataattattattttaagaataaaataataaataaataataattatcctaattatatgtcaaaatatctcaaattaagcattattcaaatttctacagaaatatctaagttatttaaatatttaa

SEQ ID NO: 348639 - DNA, 1194 bp, Cannabis indica
agatgttgtacacattaaaccataaacaaaaaatctacatgtatacataaatgaatcttctattgatgacaaatcagattaaatttaaatgaattttatttaggacataaaatcctaacagctctcactcatccatttgatgccttcaaccaaatcaaacttagttttctatgtcagacaactaatagatgagagacacattctatagtgattcaaaccctccttccttgttcttcatatttgcccacacatagcaagtcaagtagtcaatcatagtgagtaagacagtggtaaccaacccgaaggagaaaaagagatccagactcaaatcttgataatactctgcgatagaaaggaacaagtgttagagatctgagcgaaagaagtcattatattctgctgtaaccaatgttaaggtttttatactcttatgtgtttaatttcattgttttagagatattcatatttagggtgttgatcaacatacttattagtaaatatagatcctggtaaaatattcccaacatctggtattagagccatggtaatgatttactttcatgtaatatggatttaaaacgatgaatatgattattgtattgatttggatgtgttcgtgttggtttatgtattatttgatgaatgtatgtgatttacgaaatttttccataaaaatcattttatttttgttctgaaaatattttatttagattccttttgaaaaattaagcaattttggtttttacggaactcaattctgataaaaattgagaaagttatgattgtttgaagatttgagtgctcatgcttgaatcgcacgcatcagtcacttggacaagacgacgtgcgcgcgcgcatggtgcagacaatttcttgtttgaagccatatcttgcccaacccttcaaacatgcaagaccctgcaggcgtcgagggagagtatgtagctgatcgagatttctcggtcaaagaggctgcaaatccttgctccgcgcgcgtattggctgctagcagcctgtctagactgcacgtgcagcctcctactgggcagccacacaaaaattcaatttttgtggatttttccacaaattttagaatttttctaatttcaaatgctataaaaatgaaaataaaatattatttttaatataaatatcaattttaaattaataatatttaatttttaatagattatt

SEQ ID NO: 348640 - DNA, 1046 bp, Cannabis indica
gatgttaatgaaacatacttgttcgtaaatctagatcctggtaaaataattccaacaccaataacaaacaaaaacaaataaagttacttacccattgcttaaaataatactttccgtggttgctaaaaaaaagcgtaccacctccaatccaccttcgatctatgattggagcatcttaaatcttcacttatagtaaaatattagtgtgatttggttagaaaaaagagagagaaaatgagtgggattgtgaagtgagaaaagagaggaaaaggaaagggaagagaaaataatgttaacttatacaagaggtattttgagaacaaaatcgtaaagttagcctaaaatacatatggtgttcaacacagatttaatatattatttggaaaatttgactttatatacatttattagttcaaaatttattccctagtcactagtgtactaatattgttagattaggtcaatttttcattaaactcaagattacccctcctattttttaactctatcctgtctctctctccctcaattctcgctcgctctcttcaacagaactgaaccaccatgaccaccgccaccatctacgaccaccgttgccaccatccaagaccactcgacctgctaaaaaaccaattggaacaaattaaccctcccgactccatttcaatccgtccgagcccatgacaatttccttcctcaaccgcgaatggagagaccactaccacgaacataaaccacaaacattggccacgaatggaaagaacatgaacaaagacgttctttgtaattttttgtttttttgagtcggtccgatagtgttcgatataggtgtgacataggttcgataggaggttccaaaatttaagtttttgagtttgatggagaaaagctgatagtagttcgatataagttcgatggtggtctgatacatacactacaagaaatgtcacttttaccagcacagttcgctactctactagtaaaagtaacttttaccagcgcatttcgcaaactgtgctggcaaagaagtcaaagttttaccagcg

SEQ ID NO: 348641 - DNA, 663 bp, Cannabis indica
ggaaaagttccaggaactgttcaatgccaagtattacaacgaggcagttagaagtgctaaaagaaaagaattcacccagttgacttagaaagagaatatgaatgttattgaatatatgactcagtttgatcgcttggcaaggttggcctcgggaatcattccaaccaatttcagtaagaaagagaaatacctggatgggttgaatgcgaagatcagacacgacttaatgatcactactgatgacagcaccacctatgctgaaatggtggataaggcactgcgagctgagggtgcagtggagtgcacctttgagtctcgtgggactccggttgttggtggggctcctacccctcctgcatcaggctttagcaggggaggtagtggctcggccactgatcagaaaagaaaggcatctactacaaccagtggctaaggttagaacaagaggttctaagggaacgagggttgaggcaatccccagggtggcaccgaaacccgatacacttacccagagtgccccagttgtaaaaagcaccatctagggcgtgtaaagggcaggggtgctttcagtgtggtatgctagggcattacaaaagggattgttcccaacttaggaccgaagcaccgaagactgcagctgtaacaccctaactaccttaggcg

SEQ ID NO: 348642 - DNA, 828 bp, Cannabis indica
acacgatttataggatgatatttctgtatatttttcaaattgatattgggttaaaaaattagaaaataataataaagtatagagagagattttagatagatgtatgattaaaaaatttattaaaataaaaaaccacacaataatatatttttttttaaaaaaaaaatcacccaataatttctcataaacaaggaattcagttatatagtcacattttatatagaatagatatattaaaagtgcctatttaatgagaattcttggtttaacagaattctttatatattaaaagtgcctatctaacggcaattcttggtttaacagaatatattttaaaaataaaagaatattatgttaactttaacagagaataaccaaaatacatttttaaaattaacactgttaattagtatatttgatactaatcacgaagacccacaacaacaaggcctaacttacaatagcccaaatgcacaaattctgtaatcgaatcatcgttaaccatttttctctatcattcttctctaaatttgctatcgattccaatcccaaaagccctatcaaaaggttctctaaattcgttatctattccaatgccaaaagccctatcaaaaggtgcgattccagctgctgcaacaatatgtgcgactgaacgagcagaggtctatgaaatcagaaacccaaaggtgcgatcgactccagctacgacaatgggtgcgaataaacgggcaaaggtctatgaacgggctgaaccctcttcgttgctgcgatcgatttcaggtattatatatataatatcaatatacatatgaaagaatgtatatatta

SEQ ID NO: 348643 - DNA, 935 bp, Cannabis indica
gttacacattcttttaaatagaaaatataacataaagcaactaatgcaaactgtatgcatgcatgcgcagagtcatgaccccacttaaattttgataaattatattatataagaaaaaagaaaattactttatatattttctttattttttttttaatttatgatttatattttttctaataatttttacgtaaattgttgtgtaaattttaattgctatttaacttgttttgttaattattatagaaattttatgtagaattctataaaaataaaaaaatatatatattttaaaatataaaaataaaaaaactcctaaaaaaattaatttactccataaaattaattttagtagtttataattattttatttctaatattttatatttactcacataaatgtatatatttttttatcgttgtaaaaattctataacgaaattaattattttttcttattaactcctattttgtatatataagaaaaaaattgtcccaaaaatttttgcccgcttttctaaaaaaatttacaaatatctacactaacatatttgtaatgcaactaatttataattaggaaatttcagccacaactcctttgaaatttacaatgactttctttcatggacatgattaataattataattaccatttatatagggcattttacaaaaatactggatttggggtaatacttttcaattttactgccacacgggtaacatttatactgtcctcccttttttttttcttttatactgtcaataccaaaacaaaagtatgaggcctccatctttgacaatcacagacataaccaccacaacaacaccaggacaaccggaaaataaccattaattccgacaagattgaacaaaagcagtaaaatcgacgtcaataaataatcatggcaaaacaacggtaaaacaacactaaa

SEQ ID NO: 348644 - DNA, 897 bp, Cannabis indica
tttaaactaacaacaatagatttttatcacatgtgtctcccaagtcataacagggtgggttccttgaaatcctcccactatgacaaggtaccgtgacttttctttctaggaacattaatggtattatcctcatcagttgtgcctagaaaacagaggcagtgggaccatcttatatagaataagacgatagaacactttggaattgaaaatatctcctctactttgctactttgttttcatattaagtcatattcttaaaaaagtagtatttgttgaaacaaacactttttttatcttgatgaccataggatgatccacccctaattactttagaatagctagcaaacatgcaaatcttagttaacagttttagcttttcttaagttcacgatcaggacatccatgaagctagaattggtgtacactaagtatacgaccatattttcctagaaggacttaagcagctgctagtaactaatcatagacctttcattttcattagtatgcaatccgaattactggggaggtaagtttggatacaattcaaagttcaacttaatgatctttgaattgcataaccaaatatttctacacccatatcagttcacaagatttttaatcacttaccttaattgtttccaccattgctagaaattcatgaaatttctcaaacatttcaaatttctttattcaacgtataatctagagtgatcgtcttaagaatttaacgataactcatatccacccctaaatgtacatccatatgttcgaataaatatgattctacttccaagtggatattggcatattttctctttgcagagagtgatcttgtcgaaaccactatgaacaagatgcaaatatcatagatataatgtggtggtttgatgaatcttg

SEQ ID NO: 348645 - DNA, 963 bp, Cannabis indica
gtctctcctgctcagagtgcttttgtttctggtagggttatttttgataatatacttctggctcaggaagttgtacatgctattaacaataggaaaaaaggaaaattaggttgggctgctcttaaacttgatatggccaaggccttcgatagggttgaatggcattttttacacagtcttatgtcccattacaattttccccaacgatttgtgtctcttattatgaggtgtatttctactactcaaatttcttttttaattaatggtagtgttactggtagtgttaaacctactaggggtcttagacagggggatcctctctccccttacttgtttattttgtgtgctgagggattatcttctttgcttaggtttcatcaggctaggcagcatctgaagggtatttctattgctcgtagggctccttctttgactcatttgttttttgctgatgatagtcttattttttgcactgctactcgtgagtcttgtgatgctttaactggaatttttgatatttatactagagcctctggtcaggctattaattttcataaatcttctattctgttctctcctaatgttactgctcaggataaaaatcttttccttgctaatcttaatttacaggataaaccttttattagtaagtacttaggtttacctcagtgtcttgatagatctaagtatcactctttttctttccttaaagaccgagtttcttctgttcttcaatcctggcattctaaatgtttttctaaggctgggaaggaggtccttcttaaagcagtcattcaagctattcctgcttatgcaatggcttgttttaggttgcctgttaaactttgcaaggaaattgagggtgtaatggccagattttggtggggttcttcaggagattctaggaaaattcattggaaaaattggcaatctctctgtcgttccaagtttgtggggggtttg

SEQ ID NO: 348646 - DNA, 732 bp, Cannabis indica
gcacgctaaacatgtaaatacatatgcatactgttatactaatcttacctcgattcagaattcaggtgtaccggtcaacctgagtggaatagttgctcgacgaattacaggctcctaaatcacatcaatcacaacactgataagcgacacgctaaatcactttctggggactgaaacttggaagtaaaagtttccctatcgatgactaacaagggaataccctaaataacacaaaaatgggaaaaactagggttcccaaaattgccccaaccggtagaccggttccccaactggaattccagttctgagaaaatttttggaagccaagcggaattccagttcagtgcaggaatgactaagaaattcatatcttcaccaattcaaactttccagacctgttctatacagcctagagaacattatcaaagcaacaaaatcctggtacaatcccagaaacaagatttgccatgtgagagcaaagcttgaactcataagctcaaactttgaacaactctcaccacaagccctcaaatcaacttaaaacaacttaaataagcataatccaacatcaaaaaacaaacccaaacacaaactactaccatatcagctaaatcaccatttcacatttaaaaaccaaagttttgagttcaaactccaaacttgaataaaaccaaccaacaaccactagaacctgcttaaatccacatatctaaacacaattaagctttagaa

SEQ ID NO: 348647 - DNA, 613 bp, Cannabis indica
aagcttgactcatcaatggtgatttttttattgtgcattaagctgtgttttgttgctttgttattgacctttaggctgtttagaacaggtctggaaagtttggggaggatgggggttgaattggttgacctatggaatttttagtgtttcttgcattgaaccgaaattccggttcagagaggcctataggaaccggaatttcggttggcttccaggatttcctcccagaatcggaatttcggttgaggaaccggtctaccggttggggaaaatttgggaaccctagttcttcccacttttgtgttgtttagggtattgccatgctatttatcgatatggaaatttctagttttgaatttaagtctccgggaagtgatttagcgtgtcacttatcggtgttgtgattattatgatttaggagcctataattcgccgagcagattgttccactcaggttgaccggcacacctgaattcagaatcgaggtaagattagtataatgtcttccatatgcttatacatgtttagcgtacatgtcagttgccatcagattaacatattagatatatgttaggcaaattttatatagccatcagattagcatatcagggca

SEQ ID NO: 348648 - DNA, 677 bp, Cannabis indica
agacatagacctgggacccaaaattagaacctgaagaagaatcgcgaaccaggaccctagaacaagactaggatcgtgaccaggactcagaccctgaccaagaactgaacacagacctagcctcatacccaaattgagactggaactcgggcccggacacagtcgtgtacccagaacagaactgagaccaagacctggacctaaatcttggacacgatcccaaacacagacttggacatagatagggatccggatatgaacatggactcggacaaatacccagacttggatcgaaatgcttaacctagatctggactgagatcttgacccagacccaaacttggacccgcactcgggacccgaacttggacctggagccgaacctagacccagatcggcgtccagacctggacacaaacccggacacaaactcgggcccgaactcaaaccaacacctagaattagacccaaagctagacccgaacccagacccaaactcaaacccagacgaggatcaaaagcaaggacttagacccagaactgaatccagactgagatcaggattggaactcgggactcggaccaatctagacaagacctaggactcgaacccacacccggagcctaatctggacctagactgaaatctggacccgaacccaaactcagaccaggac

SEQ ID NO: 348649 - DNA, 931 bp, Cannabis indica
aagtgtgttccgttcttcaacattctgcgaggaactaaacaatttgagtggacggaggaatgtgaaaaagcttttcatgagctaaaaacgcaacccgcaaaacttcccatactctcaaaacctttgcacgtagaagaacttgggatatacttagctgtcacggagcatgctgtaagtgccgtactgatcagagaggaaaacaacattcaacatcaaatctattacatcagtaaaagactcattgaggctgaaggccgatatcaattgatagaaaaaatcacttactgcctgattctagcaacaagaaagctcaggccctattttcaagctcatcctgttcgggtatacactgaccaaccgttacgccaaatattgcaaaaattggatgcctctggacggttattcaagtgggcggtagaattgggtcaatatgaaattatctttcaacaccaaacagggattaaaggtcaggccttagtagtgatctccgatctaaaataagtctaggaaatgaaggtcgagcatattgagatctgcagtgattcacaactagtggtaaatcatgtatctagagaatacaagggtcaaggggaaaagatgatagcgtatctgagcaaaatacacaatttgctcgcacagttaaaaagctatgctctcaggaaaattccaagggaagaaaacacgactgctgacgcgttagctcggtttgcgagtagtaatgtaaatgatagtgcaaatccgattcctattcagttcctcaaagaacctaccatcactggcacggaagagattgaaatgattgatacatccccaaacgggatgacgctaatagcaacctacctcaatattggggaactcccagataatcgaaatgaagctcgaaagatgagaaggaaggctacacgatacatcatagtagagggagttatgt

SEQ ID NO: 348650 - DNA, 828 bp, Cannabis indica
tattggtgcctagcaccttctcgacatgtcgcgttgcgattggttagcggtattctctaaaaactattatattaaattatatgagacccgatacttagttggaccaatacgatattgacacataagagggtgctaggcaccactggtgccctttaacatttctcaatataataatagcattataagacaaatggaaatggccagttaaatagcacaattgcattaattaattattaattagtaactttaattatatgattatttttttttttttttgagtgtatgttaatgttaatgttaatgctgacagatgactacaaaattatttataattaaagccacaaagaaagatgactaaactatattttgttttgcattttgaaccgaatattcttcttaaatctatacatctatactgaagttttaataggtattacttaggtaatattaagaaaatttagtaaaattttgtgtaaaatcttatttttcaattaaaatttaattatcacattaaaattattttttattaatttaagatattagatgttaaccgactttaaatttaaaaaattaatttctcaacaaatttgctattatggttaattttgaaatttgattatttttattttatttattaattttaattataatattaaatatttacatatttaattaataaaatatgaaatgatcttattttgatattaaaataataataaaatttaaagataatctagatatttttttagttgcaaccataattaaactagtttgaagttacgtgcaatatgcacgtatatttagttatatattagttagatgcttttg

SEQ ID NO: 348651 - DNA, 1085 bp, Cannabis indica
ctattgagtcgaaaaaatcagcatgattataatttacctagagtgcatacaaaaggttcagtcgaacccaaaacaccgaacaaaaaaagcaatatatttgcaaagacaagtgaccaacagtcatacgtctgctcggtcacttggggggcacttatacctgtacaaagcatctggtaaacataaaataaaaacaattgcactgtaattataaacagagaatgaaatttattaaggataacaagggcataatgtaccgggattaaaagctgcccggtcagcccgttgtccaaaaaatgaaaattaatttcaagtttaaagaccgcttggccggtcatgatgtcttaaaggccttacgaccatatataatatatatatataaacaggagagataaaaagatcaatgatcaaacagctggagtcccaagctttggatttggttcttccgagtcgacaggagcaggaggatctgttgtttgagcaggagaagcatcagcagcctgatcagaagcttggccgaaagttgaagcagccacctctttcccaccataggcaacttgggtcgtgcagtactcgaggtacatttccttggcgtcgcctaagtagtcgaaattggcctggggattagcctttcaaaaatcaaagaagagctcgaggccgacagtctccaaagcatcaaccttctccctcaagcagttcgcctcgaccgtctgagcgtccttatcatccttcagccgaaggaggacctgccccagagaagtcctctcatcttgaagacgatcaacatcagcagataaggactcgatagttttctcaaagagatcagcagcctcgaggtccttggtcaacacggtgatcttcttctcagcggcaaacagcttcttattggcctcacccaactcatggcgaacagctgcagtctctgccctggcctcctcagcttccttcttggccaagtccacctccgccctcaaggtgtcggacagagccgtactcttggaagcagcagatttagcccgggagtaagcataacccagcttcaaaccggcctgcacaaaggaaaaggtcagcatatgaagctaagtatg

SEQ ID NO: 348652 - DNA, 1260 bp, Cannabis indica
aataaataaataatttttttaaatcgcttaattagttttaaaattttaatttttttaatcattcaaaatgattttttttttttaattttctaaaaaaaatcttaaatctttctcatttttattttaaagggtacgatttgatagttgtcaaaatttgaggagtaaagttgctaatttacaaagacactcgaacatttaaacgtaataatagaacagttcttaatagaaagactaaatttctataaatgttaaagtttagaagattcttaagaagtcatatattttaaaagacaaaatcaatattgttaaaagttcagaagataaaattgctaattattgaaaaacaaataataaaaatatctacgctatgtaagttattacaatttaaacttttaagcattgaacaaatcaaattgttgattttaccaaattgttcccctagatgcctttaaaaattctactaaattattaaaattattagatttaaaaactttcttccaatatgatactgtagcccataggaaaccggattatatctttttatgtgaaactttgtgtcgtaaggatgtgttggagcgagttcgagctaagttgaagtttgaaggtatgtttgcggtggatgcatgtggtaggagtgggggagttgctttactatggaggaataaggaagacgtcaaagtgttgaactatgccacgaattttgtggatgtggaggtgcggcttactgatgttggggagtggcgtcttacggggttctatggggaatctaagagaagtttgcgtggagcttcttgggagcaactccggacgttggctcgtggaaatactcttccttggtgtgtaattggtgacatgaacaatgttttatctcaagaggacaaaaaagggggacatccctatcctaactggttagttgatggcttccgggacactattcaagagtgtggattaattgatttagacattgtgggacatcagttcacttgggagaaaagtcggggaaccgataattggatagaggtccgtttagatcgtgctctggtgacagacagatggctccaactgttccctcgggctaagcttattaatctcgaggtatcttcttctgatcattgtcccattttccttgacttggttcggcataatatagctcccgggagtcgcaaatttcgctttgaaaattgctggcttcgggaacctctgtgttatcaggtggtaaaggagtgttgggaggaaaataatttagcgggtatccaagag

SEQ ID NO: 348653 - DNA, 939 bp, Cannabis indica
tttaaatttaagatattagtagtaaatttagaaacttagaaaataaggtaaaatctattcttttgcttagtttgttatcttattttaaatttgattatttacttatttttaaatttaaggtcacgtatttaatattttaagtttttttttaataaaatgaccttatttgaaatttaaaataagattattttaatcatgaaattttaaattgaaagaagatatttttctaacttttaaattttgttattatatttatattaaattgtaaaattagaaaaatgatatttttttatcattttattttattgaatatttaattttattttaataatattaaatttgaaaagttgttagcattttttttgaaatggatatttaggttagttgaaacctaatttttcaaatttataggtttaattttaaaattaattttttgatttaatttaattttttattccgattttttttgtttattttttttctaaattaataaattaattaattaatttaacattaaataaatcatatatccaactatccaactagttacacgtttgtgtattttatatattgtttaattattaaactaattttataaaacctatttgatctaaattgtcatggttagcttgttgacagatccaatgatatgattttaaccaatggttcaattgtcaataggtcaaataaataatttgtaataggtaaattttgcaatcttctttcatctgtgtataaacctagtaacatgataggatccatccaaattagtgtgcctgtgtgaggctatatgtttgctttgggcttagatgcatattagcccatttaattttcgtaattaaaatggactaggttgctaaataaaatggtcacttttgatagattttatttagtcccaattagtatttgggcctattcaattaataacagttgttcatt

SEQ ID NO: 348654 - DNA, 690 bp, Cannabis indica
gaatcgggcttagatcttggtgatactctgctacagaaaggatacaagggttagagatctgagcagatggagtcatttaaattctgctgcacccaatgtaaggtttctcaaactttatatgtgtttaattacattgttttagaaattcatatttaggatgtaaataacatacatggtggtaaatctagatcatggtaaaacatattccaacagataattactattcaaactcaatttttgggggtgtgtgttcaatcaactcatcatattactaacattcaaatcaattcatgcatgtcaacaatcaatgctcatctcaaaagaaatgtttgtttcaacgaaaatccactctataagcttaattatcaaaccattcaccactaatgtaattacacacaatctaaagatcaataagactttataggcttataacgtaagtttagggttaaacgtagatcaagaaaattaattttgggctcaaatcacactatagcataaatctacaacattctctcaaaataattcctatttgtattccccaatcacttccctcaaaaattcaatcttgtatttttttttttcataaaacttactatttctccacacttaaattgttgcaagtattcatttatttttcaacgtatttctcatcatttttttaaattttttttaatgaaatacttacaactt

SEQ ID NO: 348655 - DNA, 915 bp, Cannabis indica
agcttaccgcctgctttcaggcttgttcattttttatgtcgttaggaactgggccccgcccagtctggctgaaattttatatttttacgaactttatatgtcccaagaagggggacaagcttaaagacagatttttcaaactccagccccaccctgccaatgagggtccggtgcctttcaactttcagaagaatgtgaaggagtaccgtcaccgattcttcttctcctctgattttatagctgtcgatcgtctagagttgctcactgagtgggttaggggccctcctatgtaccgtaccgtaccgcccctactcaactctttcttcaacatgcaaaagttttcgccaattataataaggatgagttgaatgtcagggacttggtcacgactactaactgcaagagggctaagttgatttttgaaggccagtcagtagataaattcaacttatccaaggttctctaccctcatgtatgcaacattgagaccgagaaggcacttcgagaggacatcatctcctccgtggaagacaaatacaagaaatacatattcaagaaggaacaagagttggcctacatcaacgcccaagatgcttcaggaggatcctccgagtggaagctgggaaagaacaagcgtcctcccaacctaaattccatttcgcgggtcctaactctagggctcctaaagccagcacttctggaacttgtaagtctccattcactattcatcacattccttctgttcaagattactttggttcaaggccaatggaatttgatgaccggttgcataaattttgaatgccccattcacgattgggttataatggcaaatttttttatttttccaacctttgtcatttcttggattggtcccgaatgggtttcgatcctaccttatgttggaaattattt

SEQ ID NO: 348656 - DNA, 671 bp, Cannabis indica
aaaaaagtttctcaagtaacttttttttttctactaggatcataaccaatgccactttttgaaaaaccacatgattgacttcctagtaagagatcataaccttctttacctctagtgaaagtatatatgtcattctttaggatttttatataggcatttaaatcaacaatttctttcttatatgaagcatatgtagcacattgagatttagcataaagttctttttcatttattttcaaaatctcaatttcttttaaaagcatgttggtcttctctctaagggtttggtttttaacaagcaatttaccaaaatcatcaaatagttccttaaatgaattagacaactcatcatatgacatatctaagttatcatcatcattttcgctatcacaatcattttggttagaaatgcttaccccatcatcaagtgccatcatgcacatgtttgccacttcattctttccttcttcttcggagtcctcttcgtcactattgagccaatccgccaacattgcccttcctttgtatttgttcttctttctcattggacaatccatcttcatatgtccgggcttcttgcactcaaagcaaattggtggatcatctttgctttttctttcttttgagtcactccctctttgtggcttcttcccaaagttctttttgaattt

SEQ ID NO: 348657 - DNA, 431 bp, Cannabis indica
cattctctcgaatctgttatggctaatttctagtggggcgttaatgataacaaccgtcctaaaactcactggcaaagctggaaaaaactctgtcgctcaaaaaaggaaggtggcttaggatttcgttcgatggtccacttcaaccaagccttactcgctaagcaagcctggcgcatcccgaaacagccaaacacaacggtgtcaaaaatcttgtctgctaggtattttcatcactcatacttcttgatagttcgatagggcactcaccttcgttcgtctggcgaagcatttgctgggggaaagagttgctgcacaaaggattagtttcaaaaattggtaatgggcagaacacttccacgatccgcgatcattagattccgggtcttcatttctccttctttatcctgggacttaaatgttggaaattattt

SEQ ID NO: 348658 - DNA, 666 bp, Cannabis indica
ttacatacacaatgaagcaatgcttctgtaatttctatctctaatggtggtgatcaaatgaacaatgtcacaccagttttcagcactcaagacaactctcaatcaaactaaaattctctctttcctactgtgtaattcttctccaagatcctatcatgcagtgtgaaggaatagccccttaaatactgatgttgcatcagtggttcacaaggcccgaacaccagctgtcttaactaacagttggttaagttagttaagttcagtaagggcaaagatgtcatttgatatttggacaattatttcaacagtttgatgtctctttttttttataatgatgttcaacaatcttaatgttattgacactatataaacatacaataatatctattataaaaataataaaaagatgttagaatattatatagacaaataactgaataaatttattaaatataaataaaagttaattataattgaataaatacctaagagtattgtgttatcattaacacgtgaatcagtcaaaattagagttatgaattgaaacacattgattgaaatgttcactatttcttcttctagtctcttcactaaagttgcaactaaaaataaagttttatattcacttgaaaattgtctgtactcacatgtagttgctacaatttt

SEQ ID NO: 348659 - DNA, 631 bp, Cannabis indica
aataaatataaaattagaggtaaatttgattaattgattaataaaaggggtatttttcaacttaccctttttttttatataagcccgacccagtccatattataaaatggactgggttgggcttgacccatatttttgaagtaagcccagccaagctcataaacacatattatttaggaaaacttacaaaaataataaaatttgggttaacttttacaaaaatactatcacacggaaatcgtttcaaaaatactgtgtttttataaaacacaagtagaacacaaaataacagtagaacaactaaaaaacaccagtagaacaacagtgaaaacttaacacggtatactgtagtatgaaacttataaaaaaaaaatacagtaaaaacgtaaaaaatactgcctgacagtatttttgtaaaaaaatagcaaaagttagtataccatgtaaatgcccctattatttatattaggctggacccgtgctgggcctaaacgagccagcccattttttatgaaatggttgacccatatttatcaaatggcccctaaacgggtctgtagaaaattgtcattttttgtacttttcaaattaatttctaattttaaagcacaaataaattattttaattaaa

SEQ ID NO: 348660 - DNA, 588 bp, Cannabis indica
ttttataatttttgctcggcgacaacagaaaatgcgatggagggctagtttgatcacatgggtaagtctagaacattatttcttagtgggatgtgtattggaaaaaataaaataacgcgattgagcaaggttatagtttttgactattttacccctaggcttgaattaggctaaaattaagcaccaagggcatttcagtcttttgccaagggagtgagtggtggttgcctttggtgttgacacctagccttgttatttttcatcaaaggatcagttagaaaatcctttttcatttggaggaaaaatcaagaaaataggaaaattaaggaaaacactctcttctctttctctctctttgaaccagcaaaaaaccaggggacttgttgctaaattctgtgttttcaacaaggattaaggttgaataaagtgttcttgaaactaaggtaagccctagacactctttgactatgtttttctcaaggttttaattgatttcaactagtgatttgtgagaattggggctgctagggtttgattaggttatggatcagtttttatgttcattttaggttgattctaagttttggt

SEQ ID NO: 348661 - DNA, 912 bp, Cannabis indica
taggttatggatcagttttatgtattttaggttgattctaagttttggtagctggttttattgtatgctgttggatttgtgaatgtttgagttttgaaactaaacctttggtctctaatggcatgtttgaattcagtgggtttttctaggatttattggttggtatatgttgtatatgcactgtttaggtactcttgaaagtttggtggcaattggttgagttttgagcaagtttgggattttttagggaaaacttgtacaaaccggttaaccggtttgctagtgctgtaaaattggttaaccagttttggcaggttccccgaatattctgttttctcaaatctcgtccatttcagtgccttagttgggtgtttccctgcttcctaggctagtgtaattcctagtgatgataatgttggaattattttaccaggatcttacatctactcacaagtatgttgattaacatcctaaatattaacttctaaaacgattataagcaaacacatataaagtatgagaaaacttacatcgggtgcagtggaataatatgtctccttccactcagatctctaacccttgtatcctctctgtcgcagagtattatcaagatctgagcccgaatgtctttctttgttgaatctggattcttcacagtcttccacattatgattgaggtactacttgctgtgtgtggccactactatcccttagggatttcgaaacaaagaagaagaagaaagagagagagtggcggcttaggaatttttctctgaaaggaatgagatgcaattgtgttatgtttcatgaagccattactttctatttatagaataccacataaagctagggttgaattactttgcattcaaataataaaaaaattaaatgataaaacctatgcatgtggcc

SEQ ID NO: 348662 - DNA, 636 bp, Cannabis indica
tttaaataaaaagatgatgatcagaccaaaaatcttataatcagatatgtctatactcatatatgtcaaataaacttattagtttattttgacatattgaaataaattttcattctctgtttacatttttcgtatagcctaccatcatatttggtaacaaatttattagtttattttggcattattaaaataaattttcatttttctttttgtatattggaacaacaattcattttatttcatatagcctaccattatatatttcaacaagcatattagtttctgtttgttggaacaacattttatttattttttcaataacataatgatacacacctataaatctattagtctatttttcgtatattgaaacaacaattcgtttttttcaggggaggcatcaaatctgattgtatataaaatacagtactgtaacatgtcttgtagatttacatagtaaacttggataacaatatatgcacttattaaaaatttgaatatgatgagatatcttgctcatttaaaataccttgctcataagtttattttgcatatataactatactacgcctatactcatatacatgaaaaataaactgagtgagtagtttattttagcatattgaaacaaatttt

SEQ ID NO: 348663 - DNA, 965 bp, Cannabis indica
tgttctttagtactaatacctcttcagaaattagacaaatcattgtactagaatgggcattcaggaagcggctgagaatagcaagtacttgggacttccaagtacggttggaagaaataaaaatgttgtctttggctatgtgaaggataaggtgcataaacgaattcaaacttgggacaacaagtttctttctagagctggtaaagaagtgcttattaagtcagttgttcaagctcttcctgattacacaatgaatgtcttccttatccccgttggaatttgtaacgatattgagcgagctattagtcaattttggtggagatcttcttcaaagaagggaattcattggatgaattggaataagctttggctcacaaagctaatggtggaatgggatctcaggattttagagattttaatcttgcgttattggctaagcaagggtggagactcctcatgtggtgatagttgatggggaaaatttttaaagcttgatatttctctacaggctctttcctttcggctacacttggatctaatccaagttatatttggaggagtgttcttgaagcccaggaattggttcgggcaggggttaggaagatggtgggcgatggttcaacaacgaacattttgatggatccttggctagctgatgagttgaatcctttcattgagtctcgacatccagctcttgttggtaatttagtaaagtccctaatgaagcccgatgaaattgaatgggatgatgaggtgatttcgaatgtgttaaccgagagagatcaatcactagtcttcaaaattccactctcacagcaccatgtcaatgacacctggtgttggatgaaggaggaccatggtcttttcacggttaagaacgcatacgcactgcaacaagagatcaaaggcagcaatggtatgacagccaattctgggttttggaagcaactctggcagttgaaact

SEQ ID NO: 348664 - DNA, 650 bp, Cannabis indica
atatactttagtctatttattttaataaaacattaataaaaaatttacttgatctaagttggtctaaaattaattaaaattaattttcaattttaatctatttacaaaaaattcaaaaaaatatctatattaaatataatgcatttcgaaatttagtgggaaacgattaataaaataaaatatattttaaaaattattctaatttaagttgttttgaaattaaaaatttctaacttaaatataaatttctatctaactaaatatctttgaacataactaatatttatgtgtctagaaaaaatctacttaaataagtaattttctatttaattaaatttattaaatataagaaacaaataattaagtatcttgaataaaatcaacttaattattaattctaatttaatatctaagaaaaatattctaatttaaattattctaaaattaattaaaataatttattttcaacttaaatatatttttctaattaattaaaaattagaaaatataattagttactagaaataactatctaaaaaatatctcattaaactaagtgtttttctaaaaattaattttaaaataatcaatgaaaaataaattttatatattttaaactaattaagttgctaattcaattttaattaggt

SEQ ID NO: 348665 - DNA, 499 bp, Cannabis indica
tttttttagggtttttttaatttttaattaataatttaatatatatatatataaactataataaaaaataaaaatatgtattatatatttaaattgcgggttggcgggttcaacctgaaatccagtagccctaaaaaactcaacccgcgaactcgcctgaaaggtaccgagttgaacccgatccgcccgaatatttttttttaaaaaaaaaaaattacggattcaccagttcgagtttgggcgggttgctcggcttcgggtcgaacctactcgaaatgttcagtcctacagtacgacatacaatataataaatataccaaaatattaatagccaaacatacataaaaagagcatgactgtgttggaaatattttaccaggatctagatttactaccatgtatgtttcatcaacaccctaatatgaattctaaaataatgaaataaacacatataaagtttaggaaaccttacattgggtgaagcggaatataataactc

SEQ ID NO: 348666 - DNA, 878 bp, Cannabis indica
attttctgataaatgaatattttatattcaatgaatctggaaaaaatcaattatctaatattctatatatggtcagatttgtatattcattacccgatttcatttcctaaattaattgtcaaaatattctgacaattaatgtggcccagatgctgatggagtatctcacctataaatataaggtctcggttcccaagctcctcactcattctgtttattcagtaaattccatctaaagagagttgagagagcgagaaagcccgaactctaataacgaagctatagtagggattgaagctcaaagatcaatggctggaagtattctgatccttcattgaatatatattatcgatatgattatagtttactttccacgtttcatatgctgtattatatatactatatataatagtctaacagttggtatcagaacggttttatctctgtcttgattgtatttgagtttcattcatatatatatattcacattcagtgtttatatatatattcggctctatatattatttcatatttatatatatattttccatttcattacgtatatatatgtatattctgttcttatgaattcttatacatatatatatttcatttatacatttatatatattattgtaacgtccccgcttcaagcctccattgggcccttacacccacggaataattggctcttatacacgagtacgccactttggctgcttcctggaatgacgactgaccctacagaccaacacaagtgtttccagcatgctttgtcctcactcgcacgcttcctggggaaacttcccaggaggtcacccatcctgaaattgccccaggtcaagcacgcttaactgtggagttctttcgtgatgggc

SEQ ID NO: 348667 - DNA, 568 bp, Cannabis indica
gggcaaccacatcccaaattaggtcgactcacaattagtccaatgatgatcaaattcagcccgaaagggcatatggcaggactgaacgatttcaagccctgcccagagatgaagagaggagggaagacattccaccaaggcaatccctagtgttattttatttaatgcgatttcatttagccaaattaattcatcacaatcctttttatttttacgatcttcttaaatcagttgacgaaaatcgtatcaatagataccaattaaaaaaaatatatttttagatcatattaatttgactaaatttttctgagtactacaaatatttttattttaaattaatattctccttgcatattatatttataaccaaactactatttttatttcaattagtatattcactcaagttacctttctattccataaaaattagaaaaatttatataaccaaaaatttgaagaaatttacaaaaatatataaacatagaaatgtttttaatttattctttaaatttttttatttacaaaaatatttcttcagtaaaaataatgaactatttttttagtt

SEQ ID NO: 348668 - DNA, 601 bp, Cannabis indica
attagcaacgagctgcacatcatgtttaaaaatcacgtaatacgcctgtgttagttagggtgttacacaatacatataaaaagaggtatgtttcaattaaatataaaattagaggtaaatttgattaattgattaataaaaatggtatttttcaacttaccccgttggattcagtatatcgtacccactactaatggccccctaactctcacacaaggcctaaaagagggaatttaacctttcattaaataattgttattaattgaataagtccaatattaattgggcctaaataaaattatcattggtaatatttaattttagcaacttagtccatttaaatatttaaaaataaatgggcttcctatattcatttaagcccaaaagtaaacatataggcacacatatgtcaaattgaattggatgggccctatcatatttctaggtttatcatagatgaaagaaattacaaaatttacctagtacaaattatttatagaaatttttacataaaaaatacaaaatgcaatctttattacactaatacccctacacggctatatcaacttttttactcttcttttttattttattactattt

SEQ ID NO: 348669 - DNA, 544 bp, Cannabis indica
tatcagattaatcctagaaaggacattggaagataatcaagtgtcttaagatcaagaagagaaactctatgttaggttataacggtggtatttttaatactcttagactacaccaaattcaggtttctaaacttgcttgatgctagaaagtctactgatgagattgtgattactctgggggtggagcagtggttttggagaagtgtaaaaatcgatctgaagtctgtaactcaaccaatgagacttaatgttaaagttgcaggaaagatacctattcagtctatggaaagttctataaagtttttggcattatatcaataactaataactactagtgttacttcctacctaacacagaagtagttcccgaaaggtaaagaatccagtacccctagaggagtagacatatagagaggaatttcgcaatatcaaggattttgtgactaaggatatgtaatggtggagaaagtgttgggttttatgccctaaataaaactccatttcaatgcaatccattttatttaacatcaataaagaaacagaa

SEQ ID NO: 348670 - DNA, 804 bp, Cannabis indica
ctaaacctagagggcattctataaatagaaagtattggcttcaggaaactcatgactttgcacattgtttccttcagagaaaagccaagccgcccctctctctcttttcttctctaaatttcgaaattcccttgagtgatagagtagtgcccacacacatcaagtggtacctcaatcatagtatgtaagactgtggaaaatcagcatcaaagaaggagagaaagagatccagattcagatcttgataatgctctgctacagaaaggaatcaagggctagagatctgaatggaaggagtcattatattccgctgcacccaatgtaaggttttcttaaactcttatgtgtttatttcattgttttagaattcatattaggatgttaatgaaacatacttggtagtaaatctagatcctggtaaaatatttccaacagaaagttctacattgtgttatctctattcctatttttttttttggatagaattagagatatgtcttctgtttatccagatgcacttaataagcagtaaggaattcagtatccctggatgagtaatgcatatagtaaatgatgttgcataatgttttatgaacacaaaggaagtaacagtgggaaaagcaatagcttaccacagacttacagttccagcaatttgggtttatagtcaaagacttaaatttataccaaatgtacaatgagttttattctagcttggaccaccactactaatctaactctaagtctgatttgcttaaagtaaacatatacaagaaggagatttctaagattgaggatttatat

SEQ ID NO: 348671 - DNA, 618 bp, Cannabis indica
gaaattcactcgacaacatcattatttaaaaagttaacgttatttacataaataaaatacaattgacgtgtctgaatgtaattaatttatgatataatttaattaataaaattttaaaataaatattaactaagattaaaaaaaataaaaaataataactaattaatatatgattgataccatgagtaattttatagttttttttttattctagaaatagtaaaatatatatattctcacattttaaaaattttagattataataatatatttttttaactcaactgaataataatgtggctagaaattctttttaaaattaaaaataaaagagataaaaaaaagaaagagcaaaataaaaagatgagttgagtaaattgtctatgattaggaaataaatttaaagtaaataagtaaataaagaaatacaaatttaaaaaaataataaaaaaaagtaacaaaaaattgtaaaaggtggtagtatatgaaatatacatcattagttgatgttaacacctgtaagtaaaataattaaggaaaattctataatgcacccctttaaaatggatatattgatgcacccctatatgttttagcatccgaaataattttttagtc

SEQ ID NO: 348672 - DNA, 718 bp, Cannabis indica
tggtaaaattaattccaacaatgggcctactgtaaaatcccaagaaccacaactggccactcgccattttcaatggcatacggctttgaggcaatggtcccggtggaaacgctattcccatcccacaagagaatgacttatgatctaacaacaaactaggctttattacaagaagcgttagatcagattgacgaactccgggatgagtctcaaatacaaatggcagcttatcaaaagaaggtggctaaacactttaactcaaaggttaaaagtagaaaatttactattggtgatctggtcctaagacgagtattcccagccactccggaacctgaaatggggttacttgggcctaattgggaaggaccatacgaaattgaggacaaaattggctccgggacttagaagctcaaaagaatgtacggaaccatggtgcctagggcctggaacgctgatcacctccgaaagtattaccaatagtcgaaaaattattctcatgctctgtaaagtaaatttgtaccagacaagtatgtgcaacctctaaattaatatttaaagctgagtgcccttaaaacaattttcatgacactcaggggggtagtaaggcataccacgcggacaaatgtaaaacatgccaaagagtttaacaaagttaaaaagtttaacgaagttaaaaagcaaagtatgtattcaaacatagatataaaagatgttcaaa

SEQ ID NO: 348673 - DNA, 634 bp, Cannabis indica
tgcgccataccaactcattcctcaagcttaccgcctgctttcacgcttgttattttttactccgcccagggttggggctttcccagtccggtggagatattgtatttttgtgaacttgtttctgtccccaagaagggggacaaacttaaggacgacttttatggcttccgggcccacccttgaatgagggcccggtccccttcaaccagcaaaaacacgtcaaggagtatcgtcaccgcttcttcttctcctccgggttccaggctgtggaacacccggagcttctcacggagtgggttaggatcactacttatgagcggactacacctactcagctcttcctcaaacgggccaagaccttcgccacatatgacaagaaggaccttgacgtcgggggattggtcacaacggagaattgccagaaggccaagctgatcttggggcatcaatcggtggaggactccaacctttccaaggtcatctgcccgaacgtaagggctccggccgcagaaaaggtactccgggaggaaatcatcgccacggcggaagaaaagtaccaaaagtacctcttccaaaaggcccaggagcaagcttacgctaaggcccaggctgccgccgggaggccccttcgtat

SEQ ID NO: 348674 - DNA, 578 bp, Cannabis indica
tatatttttttttaataaaagtgtatataatatattacataaattacatttattagttaaactagtttgtatttaaagtttatatattttagtgtgtaacttaaaacttagactttatagtttataatttttattgtatttagatattgaagttgaagtttacaatctataccatattattactttttttattattattttattcaattattttatatttactcaattatattttttcttatatttaagttcttaaaattaatttaaactatagtattttttagcttgaaatataaattatatatttttatttttgtaatctaattatttgaatactagaaacttacaataataattaataaaaaaaaagtagaagaacggtttggatgggttaacttgacaaaaccgacgaaatcattggatgggttgaactttttaattttaattgggcgggttgcaatttaatatttgtaactcgatatttatattggattagtaaaaatatgctataacccgaccaaaccgactgacgtacacccctcagctgcagtctttgtgggaacgatctcacttaatta

SEQ ID NO: 348675 - DNA, 1457 bp, Cannabis indica
tctgttatgactaatgtgttgtgtgatccacacgtgaaagccagacttgtatgtgtaattatgatgattccaaaatttatgaagagtctcttactgaatcatacaaagtcatgtatgaaaagtggatacaagttacttctaaaaatagagtgttgatcaaaatgaataaaaaacggtctcatcaaattgaaacttttaagttaaaaataaaagattatgagacagatttttgtattaaagataaaaagattactcttttaaagaacgaacttgaaaattttaagaaaaatgtccaaatgcttaatcctggatcttatatttttgaagaagctcagaatgtaggtcaaagaggctttgctgacattggttcagatggtactggaagttctggaatcacaaaatttgtaaaatctagtattccaacaaactatcctgatgctgctaatttgaaggttgctggatcagattcaatgcctgtcgctgcagatgttgtattcgcagaagtaaagtctccaggtactacaaaaagtgtgagatcataggtaaggagatttgtgcctacttgtcatttttgtggtaggaagggacatatcaaacctatatttttcaccttgcagaatatgtataaataaattattttgttaatttgaaaaaatctcaaaagaaacatagaggtatgaaacaaaaatggattaagaaaaattgtgtagctggtttttctgataaaagtgctgcttctcaaatgtggtattttgatagtggttgctctagacatatgacaggtgacaaggactttttgattaacatcaggcctatgtagtgtggggaagtcacctttggcaataacttagctggaaaagttgttagaatgggaactctcaattttaaagggttgcccagactaaaaaatgtatgttagttgaagaactaatggctaatttacttagcattagtcaaatttgtgaccaagggtatatagtctcatttgacagtgatcattattatgtacttaatgatgataatcaatgtattttgcaaggattttgatccactgatatttgttataccctaacgcctgtgttcacttgtcattcaaccatcaacaacaccacggatttgtggcatgcaaaacttggacatactaattataaaaatttgaaaaagttgtcaaatgccggtattgttcgaggtctacccaaactgggtaaagaaagttttggtaagtgtgaaccctgtcaacttggtaaacaattaaaaatcactcacaaaagtgtttctgatatcaatactacgaaagtattggaattgcttcacatggatcttatgggtccaattcaagttgaaagtctaaatggtaagcgatatatttttgtgtgtattgatgatttttctcgttttacttaggtagatttttttaagagaaaagtttgacatatttgatgcttttaaaactcttt

SEQ ID NO: 348676 - DNA, 643 bp, Cannabis indica
gctgaaaagtcaccattttctgcttgcaatctattctggccgaatacttggacagaaaatccatcccaaatataatgtcaaactctgttaattccagctctatagggtcagcactcaactccctatcttcgatcctaactggcatcgacctaatgcgcctattggagataaccaatcccccactaggccttaaggttccaaaccctctttcaacaaaatcacatggcctacccaagagatcaattacccgtgtcgccgcatatgagtgtgtagctcccaaatcaaataacacagtataaaaggagttgttgacaggaaaatgacctgtcaccacagaaggactggctgcagcattagcttgagtgatggtaaacacccgagcagatgcaggttttacctctggcttctgctcctctttctttgcatgagggaaatctttcttgaaatgccccaccatgccacactggaagcatgtcttccggttgcactctccgggatgatattttttagaacgtgggcactcagggtaagagtaaccctggcgtcctcctttgccttggttcccacagaactgcttgcttttctccgggccaccagatgtcggggtaacttttcttttttgatcagtggtggaatcaccacc

SEQ ID NO: 348677 - DNA, 815 bp, Cannabis indica
aagcgagccactccgggcatacattaataaattcatgacggaggcgaccaaagtttcacgggtaactgaggatggaaagttatccacaatactagggggcatcgaagtcctcggtgaactattgaaggatataaggaagaacgggccagtagactcaatgagagatttccttgaccgagctgaggcttcatcaagcttgaagaagctattcaacgagcggaaggtgaacaaaagcctggcaagtcaaaggctccttccactggagcatccgcccaacttccccaatacccaaataattcaagctcaggtggtaagcactccattaacaaccacaagcaaaggaatgggaagaaaggaaattttactagtaaatccgaacaagctccccgggagaatcatgccaaataccctgaattcactattctgactgaagattagaatttgtatacatggcaacccagtcgctggccccgtataagaagcccgggcccatgaagaaagatgccaagaaaagggacatgagaaagttttgtcggttccaaggagattacggccacaacactaatgaatgccaaaacttgaagcgggaaattgaattccaaataaggaaaaacaattcgcacctacaaaagtatgttaagaccgaccaaggtcagaagaacgacaacaaccaagatttgctaccagtagatggacatctgcaagtcattgttggaggccctcacattgctggagattcgggcaaagctcgggagaggtatgcccaaacagtgcagcacgagcaagaagaagtcatcctggccgtggaagaaagg

SEQ ID NO: 348678 - DNA, 650 bp, Cannabis indica
agccataacataacaaatttattttttaattaaaattgtttggcttgtgggtgagacttgcaatccttgcataatgttccaggcttcaccggtttaccgttaaagatgcctagtttgcaacaacggcatccttcagggaaccctggtggtggagccggccatacatcagttttgcacaaatgtgcttctagttgcatcaacctgaactcgttctgatttcgttctctttcgaaagctctatggacgttaaaaactttctggatttcaggagtaattatgccatcatcctcctgcttcagctcttcaggagttaagattgggaatttgcccttgttctttcttggcgccatatttagaacttaagaataagagaaatttttaagagaaagagagaagtagaagacaagagcacttatgaataagaaagggatttgcttttatagagcagtatacatgttgggaatgtaggaaaatttaatggccattaaatgtgtaactgtacagatgaaacgcatgaaatggtgtatttgtcgactgaatatcgatactatgtcaatatgatgtcgacaacatgccactttaatggcacgacaaacttatttgtcgatgttatgtcgataggacacgtgtttgacatgcaacgtggcagt

SEQ ID NO: 348679 - DNA, 943 bp, Cannabis indica
caaagcagcaattcacaatcggcagcggcacttcctcgaaccaggatagctcattgtctaaccgagcatgttttgccaaaccatgtgctgcagaattcgcatcccgagccacatgggacaaaactgctcccgggattttagacaataaagctatgacatcctcaagtagcacacccagctcgttgaaaaagaccattcctttgtttatagctgtgactagagacaaagaatcagaaaaaacctctttaatttggattccgcatgaaagagcccaattaagtccaaccaaaagggccaaggtctctgcttgtaatacagagatactacctaaaaacataacaaaccagaaaacaccacaatgaaaaactataagtagaaactatagacaaaaactaccacgagaaacgcaacccaaataaacgataaaaccaacaatgcaaagaaaagatagaggaaaaaactagccaaagaaataaccctttggctagtgaaagaacaccataaaacataaaacaaacatttttctcaaaagggcaaaaactataaatcttgatacattctagcctgatacaagtgcgctccaaaactagcctaccaatgtctaactagtcaatctaaaaatgcctaaccacattatataaacaccaccaagtactactcaatcacttagctagaacatattttaaaacttgttacgttagacctaacccttttagcaattaaaatataatagtccctacatcatctgaaacatgtaaaaaccagacctaatactgttcaaacatgaaaccaccccatgtttatcgtttcgaaacctgttcaaaacactatgctataaaatttaaaggcttatacaaatcgaataaatttccttaaagataaagaactgtctacctttgagaggcttgcaaactgctgccctcacccttttatcttctgaaaa

SEQ ID NO: 348680 - DNA, 699 bp, Cannabis indica
tcatcaacaaaatgcccttattttgctgatggccttgtggtctttgccgctcaaccacttgaagcctggctgagagaagtagaaataccccgacttgccttgcttgggggtagacttcaggtcgaaaaaccaggcgaccttgtggggggaaggagcatcccatccttgggaagcgtagaggacgaagagagcagacaaatacttaaagccctttggagtaatctgggcccggcagaggccaaagaagtctgccacatccctgaagtacttttgcaaaggcatcagcgccccttgctggccgtgagcccccgaccaggcgcacattcccttatcaggatttgtggcgcgattgtcgtgggcgggaatgtagcagtccagctcgcccaggtacccgtcctggtcgagagtgcggaggcgtgcctccgaaatcttggacagaggacttacccacctggcgcccaaggcaccctgcctcctatgaggaaccgcctcagcaagctcctcactgacgtagtccacgccctcaaccaggacgtctctatcagcatcgactggctgcccaacctcattgtactccccgaagtcagggggtccaacctcttcctctccctccgcagcgggaggactgcccggacgcacctcgtccagctcctcaacctcctggacctcagcgtccccctcacggtcctcctccatcgg

SEQ ID NO: 348681 - DNA, 553 bp, Cannabis indica
cttctaatgacgaggcaagaaaactatacttttattattcagaggttctattattgagcttttatttatttatttttaattgaaagagaatgagttgtgtgtaggaagtgaaggttaaaaatgtaccaggtaggactacagaaggttcttgtatgattttgctcgacataaaaaacaaatttcttttgcattgagtacaaggtagtgaactcaatgtaaattctaccgatttgcgcctactggggtaagcaacagttgagccaattgagttgcgattgactctttcccttccttcgtttgacccatcgatttttggctctcgatctattttcacagtttgaatcaattacatgttgtaagcttaccaattttagaaaatgccctcttttaaattcaatatgtttcctctactttagtctcatttctttgtttatatgagtgattttgtttattagtataattcttcttttattgctactttgggcatattttgatggaatttatgtgtaaatgctttgttaggtaaaaataatttcaaaatataattaataaa

SEQ ID NO: 348682 - DNA, 576 bp, Cannabis indica
tatatactcagatcttactacttattcatttatacacttaactaaatcaatatcacccatacatattccacttctacctaaatcaataagatatttattgactactatttatatttctttgtccattgaattcctacaattttttctttctcctaattatttattttataattaataaatatttttcaacttctaatcatgcaaagtagtgtgtatataaatagaaaacaacacaaaccaatcttatattaaaagtaagtaatattgatcattattttttatttgttatatatacatataatttatatatatatatatatgaataattctctcttatatattgttaaaatagatttttattctatttgaaggttttctataaaaatacacatagagattcatgcaaaggaaaaaacacattgagaaaataaagattaaattctctattagatgtaaaacttaacttaattgtggtgctcttttaataaggaaattatatatatctttatatattaaaagtgtctatctaacgacatttcttggtttaacagaatatacttaaaaataaaagaatat

SEQ ID NO: 348683 - DNA, 941 bp, Cannabis indica
cagtcgtttaaagtattcatgtcggtttttataaccgtcgcgtatacgatcgtcgtaaaacgagcaaaataggcgacggttaccgtcactaatgtggacttttcgacggtttaaaatcgtcgcctataacagggaataggcgacggttttaaaccgtgccctatactataggcgacggttttacaccgtcgggaatgtaaagaaaaagagaaaagatacaggttttttgccattaatggcagaaaaatctgtattttcccctattttttttccacattagttttataattttaccaaaattaaaataaaacaactaattaattttgttacaataacaactaactttaaaacacattaaatttatacaataacaaaataatatatataataaataaacagtatataagtaaataaatgtatttataccgagctcggagagagagaaagagagagagggagacagatgagaggtggtggtggtttgacgtatgagacggagatgagagggacatcaacgagaggtggtggtggtccaacgtatgcgactgagaggagagggagaccgacgggaggaggggtgggtggagatcgatggacgagagagacgagaagaaagggagatcaagagagggaggaagacgagaagagaggagggcgatggtgtggaggcgtgggtggggttttggagagttgatttttcgttttatggtgtgggaaatggagaaaaaataggtgggcatgtggggaatagaaaaaaaagtagatggcacgtggaaaatgtggggagaagtaggtgacaattttttaatgggcccttacacccgacggtttaaaaccgtcggactacacttagcccgatggttttaaaccgtcgggtataaggctctcctaaaaatttgcattttattaaaaaacattgcctattttgtttactacgattt

SEQ ID NO: 348684 - DNA, 668 bp, Cannabis indica
agtcttaggcaaggaatcaatatacaaactggtgcttagtatattagcgagaaaccatatgttgcttaatgcgaatagcgagacatcaaggacagtacacagaagaaagcgacgtatatcaattgcgaaagcccttgatgtgcaaactaagtgttatagtcggatcggatcgagaccaagtaagcgaggtgcctgtcttgctatgggaagattttttataaattcatcatgttagcgttagcgaggcttacgaccctggcaagtcagaagctaacattcaaatgagcttcgaagaactctttaaataagaatcgcgatcgacacaagacatgcatcgtcgaccttataagtaaaaatggccccagctcgcaattgagattactagaactaagcttctgtcgagacaaccccaaatataattgttatcccaatttttgcactctgacgtggcattactcgatggcgacacgtggaatcaactccaagtatctggcaagacacaagccgaagaggacacttcgtacattcgctcggacgaagtcttccagaccgagcagtgggcaatccgcacagaacgccaacactaagcgaattcagctttcgcatcgtgagtcatcaaggaaatccctataactttgggatcagattacagagatatggcaagttgt

SEQ ID NO: 348685 - DNA, 831 bp, Cannabis indica
aactttcccacaatagagatatattatatcaaatattatttaagttagcaattatgtgataattttttatacggagataaaagagttaaaattgatattgtgtcaaaatttaaataatatatattttaaatttttgtaaagagaaaaggcctcattttaaattctgccctaggcctctcgataccttgagacggccttgtagatgatatataactaattttagatgtgtacatttgatacttaaatactacattgaactcaaatttttttatatatatatatataaataagatatatgaggtggtgacatgtcattttaaaatctctctaaataatactattagctaaaaataacctatccatctatctatctatctatttctatatataaagctaaatactctgttattaacggtaagagactttgttattgtcttaaataaaacacatatgcggttcagattctaaattattgaatcgggtttgcctaattttatgtctaacttcttatattttttaataatgttaaaatttaatgcaattttattatttagttattatcaaataaaatagataattcatttcatatatataatttaaaaaattctaaacaaccgccgcgaagtgtaggttatttactagtgtttcaataaaagagaaaaaataaaaaaataaagacccaaatcccacaaaatttgaaacaaaattaaaaccaatgaatttacccattccttttcccttataaaaaaaaggaaacaaaaaacaagtttcaaaaaaagaaaataaatgaaaaatatatcccctttttatttaattttttaatttttgcct

SEQ ID NO: 348686 - DNA, 1103 bp, Cannabis indica
gctcacagttccgccccccatcattcaaaggaggcaacaaaagacccttccttccctgagcaaatttgtattgatcatgcatgtttcttgctgatgttacaatatttgaagcaagccaactcttcttttgccaaacaaagtcattccgcgcacgccaaatagcccaactcactaccaccacttcgtccatttcaactttgtgcccctagtgagaattcccaacaaccagctgctgaatgttgcagccccagtccccgacatcaatcatgctgcaatgccaagcagcctttgcaaacgagcattccaccaacgcatgttgaatagtttcaatactagagttgcacaaagggcagttggcattgacaagaacatgacgcttttggagttgaaaaaaagttggaagcacacccgaagcatctcgccataagaaattactgatcttaagagaaatttttaatgaccaaagccgcttccaaaaatcagtattggcatcttggcaccaagaacccttagattcttgcaagaatttgtatgcacttttaaccgaataattccaacaagtctcaagtcattaactccaaccatcattagcggcagaatcactaagctgaatggacaaaataaggtcttgatcacgggcaacaaacaggtccctcacaacatcctcatcccacgcgcgagtactgacttgaaagaggcagctggcagacttattcacaagaacagggtggcgtgagacaacatagctgttagaattatgtgggagccaaggatcattaagaatggagacattttccccattaccaattgttctttgagcacaagcgtggatacgatcttttgcttcaagaatactacgccaaatgaaactaggattgtgtcccaatacagtagaaaacatattaccagtagcataatatttagccttataaagcctactaaccaaagaatcaacattaaccaacaaacactaatattgcaagagccaaattaaagtctctcacgctttggaatcccaatccacctgcatgtttatggaaacacgaccgctcccagctcatccaattaatacctttagcgctactcgaatctgagtgccacca

SEQ ID NO: 348687 - DNA, 718 bp, Cannabis indica
ccactcccggatatagtcagggccaggccttggcgcccgcatcatcccattttggaaatccctcaggaaaaaatgtacaagctccctcacactccactccaaccgctagccttgcaggcccttccaggggctcgaggagtaaaagatcctccaaaggcagcacccggacgcaggagaaacgtcaaaagagggggtacactccccagtacaccaagtacacggagctgacggactcccaaaatacgcactaccggagaccacatcctttgtacaaggatagctcccggagggatccaaacaaggatagctcccgattgggccacctctatgagtggatcaagaatagactgcctcacctcaatccgggccagccgacaggggttgtgccccagggaacaccggggggtgcagcaggagtattggtgcggtaggatgagcttggccttccgacaattctccgtcgtgactaggcccccgacttcaagttccgcccggtcgtaagttgaatagacctgagccctccggagaaagacctgagtaggcgcggtgcgctcataggggggattcctgacccactctgtgagaagctccgggtgctccactgcttggaacccgaaggagaataagaagcggtggcgatactccttaacgtgagtttgcctattataagggaccatcccatcattgaaaggtgggcccgaaatccgtaaaaaccatc

SEQ ID NO: 348688 - DNA, 858 bp, Cannabis indica
aaaaaaaaaaaggaaaaaaatgagaagaaggataacacttactcacaaaaaataccgatcaacacttaaaaaaaaaaatattgctcaagaaaataataaaataaaataaacaaaattacaagtattttaagaatgttcatcaacaataagtcactttttttaaaagaaatactattataaaagaataaaataaattttgataattttgccaacatgatgaaaaaatcaaacttgtacgaatatacataaattattttaccaagttaataaattagtgtaacaaagttacagattatgcatgaaaagaatttactcagttataaaaatattttaagcaatccaaacagtatgtaaccgttttataagataatttggtaattttatgatattatttttttaaaaaaaattgtgccaagtatatgtatgtcaatgtaaaagttggggacattgcccaaattgttaaaaagactttttatgagtatatgtaactaatggaggtactgttagatataaagtcaaaaaccaggtgaagtagcaccactataacaaagtagacggtgaagtagggagcgctggtgattatattcctgtgaacctcatgcttgtgactgcttgaaaatggcgaatgtcaagttttaagggctgcaaaaaattggcgaacacactccgagaacgaactccttttcggattctttcgattcagtctcagctgaaatcacattcaacaatgaaacaaagagaatgcaaatgagaaaggaaatacaaacccaagacgccattgtcgatcgaagctctctctctctctctctttctctctactctgttgattttgtttctctctctagcttctgagaaaag

SEQ ID NO: 348689 - DNA, 571 bp, Cannabis indica
agggggcaaaaatcataattagtctttttttaattacttatttgtcacttattaatactatttcttgactttgaataatatatatttataaaatattaaaataatataaataaaattacttattttatatattttgaaaataaacatttatggtaatattgatttttatagctaatttacattttatttattgaagcacaaatacaaaacaaaataggccaaatataattttatggtatattttagaccaaatttaatccaaaatatacaccagagatgatctaacgagagaaactttaaacaaaatacatattattagttgttgtattgaatattttaatacattttaattattattttgtaattaaaagagaaccaatccaattaaaaatctaattggattgaatcaaattaaattatattagatgataattcttataatttaattaggaataattacataaggcaccaatttttgtaaaatatttacatttttacgttcaaagaatgtttttttacatttttacggttttccaaaaaataacacgaaaacaacataaaatcaacaaga

SEQ ID NO: 348690 - DNA, 408 bp, Cannabis indica
ttaagattttgtttaataaaaagatcttttgatctgatagggatggaagaagttaagaataatatgtgcaattcaacgatctttttatatctattgaactctggattatattcataactccacatgatctctatatcacttaggggtggataaagctattgacatatgtagttcaatttgaactctagactatactcaatacaccacagtactctatggcacacacattttgattaaacgtggatgtaatataatgaacaaattagcaaaatttttttagaacatattcttgatcttatttttgttccaattaatatattactgtagtaatagaaattgatccaataaagttcttggacatagcatcacagtaccttatttgagtgggagaattttaaaattctaagc

SEQ ID NO: 348691 - DNA, 745 bp, Cannabis indica
atagttcgtctccatggagctccaaaatccattgtttcaaatagggatccaaagtttacattaaaattctggataagtcctcagactgacgggcaattagagagaataattcaagtactagaagatttattgcgagcctgtgtgaaggactttgagcgttcattgagtaaatacttgcctttgatataattttcctacaataatagctatcaaagtacaatagggatggctcccaatgaaatgttatacggtaggaagtgtcgttctccaattcattaggacgaaataggggaaaggaagtatttgggtcttgagttagttcaaagtaccaatgaagcaataggcaatatcaaggctcatatgcttgctttgcaaagcaggcagaaaagttacgctgatccgaagcgcagaggcgttgcatttcaggcaggagaacatgttttcctgtgagcttcaccattgaaaggtatgaagcgctttggaaagaggggcaagttaagccctaggtttatagggccatttaagatactcgagaaggtcaggtaggtagcgtattggctagccttaccaccagtgttgtcagctgttcataatgtatttcatatttcaatgctcaggaaatatgtgtcagacccgactcgtgtcttgagttacgaagccctagaactacaattggacttatcccataaggaacaaatagttcaaatccttgataggaaaaaaaaaaagttcttcgaaataagac

SEQ ID NO: 348692 - DNA, 571 bp, Cannabis indica
acatgatggtgcaaactcgtagaggcctgtctgaccctgcaaacttgtagacgctggatccgatattgtaggacccagggagttcaagtgttccacctattgtcaatcctagacagacgggaagcatggtgaatggtgaaacagcttctgttactgaaactgcgcctagtgtgcaagagactgggaataacagttccgcacacagccagggcattcataacacgactgttccgccttgaaccaatgcccagacgaccatcggagacgcaaccaaattgcaaaatctctgtgctgcgctcggactcatgcagagtcatagcaacactctacatcatgatcaggatgaactgcgtgctgcagtgaatctcgcgtttgacgaatagaggtgtatgttagctgaatggagagacaaagagattgaggcattaagggctcaccatgcagagatcgaagattgtagtcggcaagctattgtgctaatacgaagagcctaccagactgtaggtcagcaaacgccgaacgtcattcccctaggagaaacagaggatgatccgacgatgaatacctccta

SEQ ID NO: 348693 - DNA, 1146 bp, Cannabis indica
ataaaagattatattcacctaactccttagatacctacagtataggtcatgtatttcctattttatatttgcaaggaatatgtgcccctatgaagctaacacagcaacacaagcgatctatttttagggattcccctagaaaaatactacaaataccccacaaacagactaaaagggggtcgatcaattagattcaaggaatttaagagagaaaataggagagaaatctaccaagaacattctctgtaataaacactctcataaatacaaaaggctcgtggactaaggctcattaatggcccaaccacgaaaaatctcctgcattaaactttctacagctagtttcatatattatttaattggttgtcgaaaacctcggtcaatattttggtgctttcattgaaagctgaagaaagcgtctttaaacagacaacattcagaaaagctagatctacaatggtggaaactcgcaacaatacacgtcagccccgtcctcctcaggatgctcaaaacccagaaggcgaagaagtagcctcaagagtgaacgtgggctctgaggagcgagatgaggccaacgacgaagaatacgaagagaacttttatgagtacaacatttacggcgaaggtagctatacagaattactggtcttgaggcaaaaggctactaatcaagaacccgagatcgcagcccaaaaagagcagaatagaaaaatgcaagaggtgatggtcgccttgcaaaaagccatggaaacagcagggattcacacacaccctaaggccatcccggaaggactcgaggaaacactggaagagtcctcaccaagcactcaaaaacccaagaccaaggaaccaagccctatacggtacccttccgaggaaaaccatgggaaaaatcccacttcaatccctgggagaaagaaaaaggtgtaggatccgcgaaaagttcgctcagatttcccagaagggaaaggttcgcagaggggcaagctccataaagcgagtcttggccctcaagatcgagaggacagaaagagtgtatccatgcaccaggagcccggagagagaggaaggaaaaatcggagataccctctagtcgacttgagacaaaaaatcaacgaaaaacacggtgatctacgagatcaccta

SEQ ID NO: 348694 - DNA, 521 bp, Cannabis indica
aagaaaacaacgcgtatggtcgacgcgtctgatcctgaagtttcttggcacaccactttgcccagtgccgaacaggatccaaccgtccaggaggagggggatcatgaaggggacactgaggtccaggagattgaggggcatgacgacattcgtcctcgcagttcctccaaggcagaggaagaggaggaggttgaacctccaaactacagggagtacaatgaggctggggagccaatcgacgttgacgaagacatcctggttgagggcgtggactacgtcagtgaggaacttactgttgcggttcctcacaggaggcaaagttccttggacgccaagtgggtgagtcctccgtccagggttactgaggcgcgcctgtggactctcgaccaggatggctacctgagggaattggactgctacattcccgcccacaataatcgtgccacaaaccctgaaagggggatgtgcgcttggtcaggcgctcacgcccaacaaggggcattgatgcctttgcatcaata

SEQ ID NO: 348695 - DNA, 560 bp, Cannabis indica
agccgcaaaacctaaaaagaacataaatttgaatgcaattattaaaatagaagagataacaataaatgaatcatttaaaaatgtatctttcttactttttgagatgcaaatttgctaatcaagtcatcgtaatgaagtttatttagcaatttattttcgatagacaatatagctaacccactcaatcgttcttgcaacatagtggatcttaaatatgattttatcaatttcaattttgaaaaacttctctctgctgaagcaactgttactggaatggttagtaatattctgtaagcaataaatgcatttggaaaagaatcaactttttttatgtaatcaagtatttcaattgagttactattttcatttggaaaaattttcttcaacactttcaattctgaaaacaaatctaaaccatcaatatcagataatccattgaattttaaaacatcctcaacatttaaagagtggtcttttagaccatcttcatccaatgctttcagtttcttcatgctaaacaaaaaaccaaaaatattttcatacacttgaaattgttcaaa

SEQ ID NO: 348696 - DNA, 574 bp, Cannabis indica
tatatttaaaactttattctgatattggtctatgcgaccatgtgcgactacatgcgaccatagtatatttcaaaatatatcctaatattggtctatgcgaccttgtgcgaccatgtgaatagtatatttcaaaatatatcctaaaattggtttatgccaccttgtgcgaccatgtgcgattatgtacgaccatagtatatttcaaaatatatcgtaatattggtctatgcgactatgtgcgaccatagtatatttcaatataatcatttaatacattatatatatgataacaaattatttaactatattttctaagttatttcattaagtatgtatgtgtataatcatttagtataatttataaattataattaaagtatattatataattgtataagtcttggtgattatatagttacatattttaaataactcaatcattgaattacatggtataagagttaatttttaactacttaaagaattagagtacacaatatacaagtataaattcaaggttgttcatggtcgttaagagcaaagttatgtttttatcgaagaacataaaagacca

SEQ ID NO: 348697 - DNA, 539 bp, Cannabis indica
aaaaaaaaaaaaaccaaaaatccctaaatctgtggaactagagtcaggggagagagaaaatggtggcggctggacattcttctccgaccacgacccatcagcttctggcgagaccttcttctccaactacgggacgagccatcagcgccggggagagagaaagtgttgggcgagaccttctccgaccacgacagcgacggtatgttcgaggttcatcttctccgaccacggccggctgagaagcaaaaacacaattaatttcaacctcaaaaatccacaataagcaaaaacacaagacatgaaaacacatgtttcaatcaaatactcaaagacaagagaatattgtttctatgagagagagaaagagtgatagtactgaccttttctttttctaagcaataaacattgagggtataaaactcattatagactttctataaaactgagaaaagagcaatacccatgtggggttttaatcagggccagccctgacttttagtgggccatagaaaaaaattattttgggcccttatttagaa

SEQ ID NO: 348698 - DNA, 444 bp, Cannabis indica
tgatgaaatagggactttgtcatttgaagcatataatcacaatcacattccactgtgttgacatcattgtaattgtaaatgactatatgttctggacttaacagattttgtatatacattaatcacaaacatgaaaacaacatgcaaacataaataaattctaatcttttattgataacaaattagattagattgtaatgggttttatttagggcataaaatcccaacaatggggacataggatttccttggtgaatacctctacccggcataaacttcttcaaaggtctgccattaaggaggatggagtatgacactgtgcgtggagacgcaacacattatcatattgacaaaatgtcggctgaacccgatgttggaaatttattttaccaggatcttagatctactcacaagtatgttgttaaacaccctaaatatgaactt

SEQ ID NO: 348699 - DNA, 780 bp, Cannabis indica
tcacctatctgaaattaccctaggtcaaacacgcttaactatagagttctttcgtgatgagctatctgaaaacatgatgcactttgttgatataaatagtaccaatcatccatttaagcctttttcaactgtgttgtcccatacctacacagtcttataatcatcccacttgaccttcctcaagcggtgtggggttacacaacttacccagtatttttccttacgggtcacaagactattaactgtcacaaacagcacccgaagaaaataaagaaaccctaatgagggtctcgatagagaaaaccgaagtcttcttatgagagagaaaaaagtgacgaatattattaataataattatcatcagacaagatagtgttgggtatcactgatacttaacaataatatttaaatgtgatcaaaattcccaaaaaataatgataaaaaatttataaattaatggatgattatcgtattaaagacgacattatcgtattaaagacgacagtacactctcaagtctcaactcaatacacttacatggtctttccaaacataatacttcttataatttatctctagcttttactctaaaatattcccttattagaacttctcaatatttacctttattcatagtttcttttcccattttcagattgttcattttcatctctgcacacttaaaagcaaaataaggtgatatcatatgggaattttacaaaaatactgctttttgaccaaaactttatatttatactgggacacggcaaaaacaacttt

SEQ ID NO: 348700 - DNA, 864 bp, Cannabis indica
agcacccactgaattttaaatttaaaatcttgatacaaataataaaaaagcaagcacctcatactagcagaggaaagaagatttaaattcctaccttatgcctcttatttacctgcaataataaaataaatagaagcatgatattaaaaaaataataataaagattatttttttttagataccaaagtgtagtcttctgttaaaaaaaataatcccttggggattaatgagcaagtgtactttgttggcatttctgctttagtcttatatctcaaataaacaatacaaaaagaaaaataaaattcgtaacagctaaaaaaaaaaaaactaatttttgtggtggaagaaacaactatgagactttgaaagtacactgttggcgtaaattaaaaaggacatataaaaaacatcagcctcttttaaacgagcgaaaatccattcattttataaaatgctgtttatataaatgagatcaaatacacagtacgacaccattattttatagagcaaacaagaaagaacataatacatttagaaagaaacgacaaccattaattgacataactactcttcaataagaaatatatatatatatatgtacggaacaaatcaattgaataagagaagacatacctgtatcttcaagctctcaaacgtaaaaaaaaacaaagagacgagtaatgaggcggttaacgatgagtaatgtatatataatatataatatatactactttactattaatatatctttatatattaaaagtgtctatctaacggtaattcttggtttaatgattcttggtttaacgatttcttttttttatttagcctttattaacttaacagactgttaacgttaaacgt

SEQ ID NO: 348701 - DNA, 716 bp, Cannabis indica
atatagtagctaattagggtagggatgttcgtctaatttaatatgtattattttatttatagtgtattttatttacactaagtacaaatttatattttgaatctaaattaatctgtagaataatttaaattcaatcctgtcaaatctgcaaaagtacacattgaatcggttactttttaatattaagtaatttaatatcattaatttttttttttacataactaacaacaaaacaaaataaattattattcttttatgtctccgacaataaattaaaataaataaaataacaaattcaaaagaagaaaaaaatgtaatgtaaaaaaatatgtaattgtgttttaaattatattatttctatatataataataaaatataaatttaatctattaagtataattttttaaatgtatatataaatatgtaaattagattggataagttacttttacacattaatgaacattcaatctacacaagtgcgaattttaaattttttaatataattcaattttatacgagtacaaatattcacactccacaaattaaaattgaattaaatcgtgcaaattgaattgaaccaatattttataaacactcttaaattagagcacacataattaaggtagtcgatccataatatatgactttgtttttattttaatttttttaatatatatatatatatatatatatgttcatctcatgaagtcgt

SEQ ID NO: 348702 - DNA, 468 bp, Cannabis indica
agatcctggtaaaataattctaataggtactatcttagataaccaattagtaaccaggtacttatactttgggtaactaggtacttatattttggataaccaataagtaactaggtacttatagtttgaataacaagatacttatatttgttaggaaaatatgagatatcaatagaagaataacaataagatgaacaaagagaccaagaaaattacaactctatgcaacaaaattacaaggactatagattaaataaaagttacaatcccaaagcacacaatacaaataaaaagaaagaaagaatgaggacaaagttacaactcaaagtaaaatatacacataaatgtaaaaacaataagagaaaaaatatatataataaatagatatatatatatatatgtatgatatatagtagaaatatagtgtatatagaagagatataatatatgaatatataataaagagga

SEQ ID NO: 348703 - DNA, 486 bp, Cannabis indica
ttttacattaccaaatatctgtatactgatgtttattcgtggcagatgccagtagtaatttggatttcatcttatgaacaatgtgtgatggtttgattcttattgtgtatgaatgacaatattcaaataataaactattgattgttatcattacttttcttgctgagtccttatgactcacgggtgctatgtggtgcaagtaaaggcaaagaaaagctagatcaaccatgaggtggcagtcttctccagcaatgtacatattgacctcaccggcctgcgtgtcgagttgccaggagttgttttggactggctgtatctgctgtgtattttgattttatgtttaaatggtcgacgtatatatttctttagcagaactttttataacagggatccccggattacacttttttatgtcgttatgatgtccgtttttagtattttattttagtcatgtttttaatattatcacggttattaataattaat

SEQ ID NO: 348704 - DNA, 735 bp, Cannabis indica
acgatcactctagattttaccttatgcgaagaaacttgaaatgtttgagaaatttcatgaatttctagcaatgttgaaaacattaaggtaagtggttaaagatcttgcgaacttataggggtggagaaatatttggatatgcagttttaagatcattaagttgaactttgaattttattcaaacttacctccctagaaattcggtttgcatattgataaaagtataaggtttatgattagttactagcagttgcctaagtccttctagaaatataacctagtaataggaaaatatcagaatgatggaatggttgtggacttagtgtaaacaattactagaatcatggatgtcctgatcgtgaccttaagaaagctagaactgttaactaagatttgcatgtttgatagctattctaagtgattaggggtggaccatcctattgtcattgagataagaaagtgtttgtttcaacaaatactacttttctaagaaaatgactaaatctgaaagtagcaaagtggaggagataatattttttttttgattccaaagtgttctatcatcttattcatataagatggttccactgcctctattgtcttgataaaactgaagaggtcaataccacttatgttcttagacagaaagtcatggtaccttatcgtagtgggagggtttcaaggaactcatcctgttatgacttggaagacccttgtgataaaatccattgtttg

SEQ ID NO: 348705 - DNA, 710 bp, Cannabis indica
tatctcacctataaatatagggtctcagtccccaagctcctcactcattctgttcataacagaaaattccatctaaagagagttgagagagcgaggaagcccgattaccctcatcaatcggtttcttttgcagaacatgcttatgtgggactaaagttcaaagattcaatgactggaggtattcgatccttaaattatagtggatatgtgtttgatttaattccgcattttatacataaatatatatatttcagtttatacaaataaatgtctaacagttggtatcagagcggttttatctctgccttgattttggttgagctttatatatatacacatatacactgttcatatatatatatttgttttcagttcagttcgtgcgtatacatatatacttatattcataccatttatattatatatacattttcatcagtatatatatatctttattcataccattcatatatatatactatattcatacacgtaaggtatatataattttcattttttttgtatatttacatatatatgtatatatgtttatatatatattttatattatatatattttttatcgcaaaataatattaataatattaattttcatttatgtgatatatacatgcattaatatataacataaaagttatcggtgtacagtttaatttttttcagttttttcattttttcggtgtttattt

SEQ ID NO: 348706 - DNA, 622 bp, Cannabis indica
aaataatttccaacaggatttgcgaccagtagtttcgagtagctacggttttaccagagatacaatcgcatcaaaaggaatgattaaactaccaatcaccctaagaactgcacctgtcgctgccaagtcgatggctgacttcgtagttatcgatcagtactcaacatataatgcggtgattggtcatcctattttgaaagagatgaagattgtaacctctatctatcatctcaccatgaaattccctacctctgctgggatacgattcgtgcgatgggtctagttagactcgccactactacaaaaagggctattcccaacggtttataactgtcttttatatgatttcccaacggttcctaaaaccgttggctatgtgggtgtcataaaaatacggaattttaaatgacagtttataactgtggcaaaaagttactttaaatgacggttaagaaatgttggaaaaagtcactttaaatgacggtttataaccgtggggaaagacttccgtgatggaaaacatctctttaaatgacggtttataactgtggcaaaaagttactttaaatgacagttaagaaatgttggaaaagactttattcagactataactaacaaaata

SEQ ID NO: 348707 - DNA, 554 bp, Cannabis indica
tttttgttattataataaattaaacattagttcaacattctgaaataatgttttagaaaaattttgtacttttaatttcaaagcagctttgtagttgcccttcatcttcatctctgcaactggagtctaatttttgaatgttccttgtgccattttcctgtttttgcatgtccattcacggattaaagtcctcaaagcttccattagtgttgttattagtagttctcgagctgccaagtttgctgcatttaatgattcaacaacattggatgtcattgtactgtatcttttgtgtttagaatacaaccttaaccatttctcatatccaatattttgtagatatggtcgaacccatttgtctaaggcatcgagctctctcatgtgtatttgaattttttagcagggtatgcctttgctgcacgagaaaatggcttttcaaagaaccttgcatttttcttaaatgttgttttcaggttgttgagtaggtgatacacacaatttccatgttgtatttcagggaagacttgttgagctacctttattatactttcatg

SEQ ID NO: 348708 - DNA, 1008 bp, Cannabis indica
actaaaaattatttcggatactaaaacagataaagatgtatcggtacatcccttttaaaagggttcattatagaattttcctataattaattatgaaatataaaaagtagggtgattctacaatgcacccccttaaaagaaatgtactgatgcgcccttaacttgtttcggcatccagaagaattttttagttcaattttttttttcatattcatgtacgttatagctatttaagatattctataaaattttgaaaaaatcggaataatttaccatatagaaaacaatgttcaaacagtctattttacacgcgtataaaataaaatagtcacgcgtgcaacatactatttgaacatagttttcagcgtgttaaacttttccaaatttcttaaaattttgcaggatttcttaaataactataacgtacataactatgagaaaaaaaattgactaaaaaattatttcggatgctaaaacagataggggtgcatcaatatatccattttaagggggtgtattgtagaattttcctaaaaagtaataccaaatacacaatttttgttttatgaacatcaaatacacaaattcatccttacccaaaaaaaaaaaaaattatatgttaaaaatggttatttgatataaaaaaaaataaaaaagaatcgaccttatgaatttaaatgttattgaatttcatttcaacagttaagagttaactgaatttaaatatatattgtggactctctagaaggtccgtctggtaataatataattaaactttcactgaggaagaaaattgtaagatacatatatatcattgtatttgtatgatgtaagcaaatccttattatgttgacctattattgttggacttacgaataagagtttagctagtaattaaatcactttaagaaattattaaaaatataaaacaattattatgacaatatatacttaaaaacaaacaaaaaaaaaaaaaaaaaattaaaattgtgtattacgtacgcaggt

SEQ ID NO: 348709 - DNA, 885 bp, Cannabis indica
aaaaaaaaaacaaaaatccctttctattgctggtatcctatggccaattgaggttttattaagaggagaaagatttatataatatatatctactatattaatatataaagggaaacttacaaaaatactacttttttaccaaatgttttcaaaaatactaggacatggcaaagttaacatttttattatccaagcccgtttttatttcttttatactgcccaggtccaataactttacttttatactgtaaacagtgaaaaaacacaaaaacgggacctccttcctggttagggatggaccggaatcggagataaccaggaaaaaaccattaaattcggcgatgaggaaaccctgctaaatctaaggacaatcgaagaacgaacaacaacatttacagtagattttttctaaaaacagaggtaaacacaacaaaatccatattagtttaatttttaaaaaactagaaaaaaaacaaaccagatttagatttgaagttaaaaaaacgcgaaacaaataatctgatgttgtttaatttatgatgcgaattgataaaaaaaattacatgtaaattatccttaagaaacgactacaattgttccttcaaaaaattagggttgttctaatgttgttttggcgatattaacacataatcattgctaattatatggatcagtaaaataataaataaaaacattaataaacaaaaagtgtacattattttgtattgttgttttactgttgttttaatatgaaaaaaagacacgtaaatgtaatatttgaaacaatggcaggtaatggaacgtataccagtactgataaaaaagcaatagacaatggaatgaagaccataattatgtcaactatgtggctagtggagaattcat

SEQ ID NO: 348710 - DNA, 522 bp, Cannabis indica
ggtaaaataattccaacattctaggctagcactcggtgaatcgtcctcccaagtgggaagttagttagcgggaagaagcatgaaaactctggggacaagatgtttaagtccttggatgaatccaaaatcaactacaagatgttaagactaacgtgaaggtttgaagtactgattcttggaatcgtgtactttgagatgcaaccaacccttaaaaagcctagcaaattagaaataaagctccaaaaagaaagagtaaaaggcctactactattacaactagcctctgcggcctgggcaaagataattgtctttgcaaatcaaaaagtatgacgatggggagaaatgttaaaaaaaaaacaacaaaaaccatgacaaaggaagtattgagattttatgccataaataaaacccattttaatcaatctgatttgttatcaacaaaagattagaagtcatttatgtttacatgtagttttcatatttgtggtttaatatatacaaaatctgttaagtccagaacat

SEQ ID NO: 348711 - DNA, 634 bp, Cannabis indica
aattagagttttatttagggcacaaagcccaacaagatggacatgcgatgccacatgagtcctgaaacatttcgtactcctctgtccttagagtacacttccaaaagatcataattccttagtaagttcggtctttggtctaattaccaaatggagtcgttgagtactctagaaattggagaggttgcaggagctttgcccttgtccttgttcttacggcatcatttaggtgggactgatttggaaggcccttcatctggaacaaggtctctaggattctcctttggaggagatatttcgatagatgatgcctcaggatcctcttcgaggttcagcaaggctaaatggaaatcactaccttcaccagacattgaaaaaagtgagaagaaagtccaagcagtcggtaccctacattcaaatggcaaatagggtacctggggaagcctcccccagaactacttggagaggtccccactggattcatcaccattatcatcactaccatacaacggcttgcatggtgataattcgggaaccctaatgcataatgacaataacagggcctagattttattttcaaagatgaagtgaaacaaatgtatatgacaggccaaagaaaaagtaaataaaagat

SEQ ID NO: 348712 - DNA, 538 bp, Cannabis indica
atttctaagattgaggatttatatcatttcgggatagaatgtcaggaatataatcatttgcgccattcaatttcttaagagaaattagaatgacatcataagacaatttctcaatgttggagagaggctgacgcaaaaatcttctggcacaggttagggtcttgagttgtctagatactctgatagaaaccacgccaacttccttcctagatccacctaaaaccatgccaatcttcctctagaattattcactagcatgaggaggatctttgagatcgttcacaagacctataccctctaggatcacttgtgaggatcggccatggtaggtgatagggttcccttggtttggattggtcagaagctcctcagccctggaatccatcgtttctggctccagttgaggcttgaagtctgtaggaacaaatggaaaatgattggtgcatctgggtattatgagtctggaaggataaacttttgaacttagaagacacattttggcaggaaggaagtaatccattctgagaatggatttcac

SEQ ID NO: 348713 - DNA, 794 bp, Cannabis indica
gagagagagagagagcttcagctaccgacggtgtgattgtcccgaaagctggagtaggtgctgaggcaaaacacatacccatgtgatcatggaggaccgccccatagcccaagtgtctagtctcacctctcaagccaacatcaacattgagcttgacatggccaatcgacgttagagtccaaagagaaaccatttggaggtaaacagtggacagagacccgatcacagtccgagaggaagacttattcgcttcttgaaatttgtgagcaaaagaaagcccaaccaagtgttggaatatatcttaccaggatctagatttaataacaagtatgtttattaacatcctaaatatgaatttctaaaataatagaatttaaacacatataaagtttgagtaatcttacattgattgcagcagaatataatgacttctcccactcagacctctaacactttttcctttctgtcacagagtattatcaagatctgagctcgattgtctttcaggttgtttggatttttcacagtcttacacactatgattgagtactagacttgctatgggtgggcatgtagtcactcactaaggctcgaaaattttatgaagagcactcaagatttcgaaaattagaagaagaagaaagaagaaagaggtctcaaaactctagttgtctaacaggatgaaaattgggtttaaaagcattagttgattataaaaccatcccattctttttatactgatttactaaggattgaatatggaataaaaaataataaaataatagcaaaataaa

SEQ ID NO: 348714 - DNA, 901 bp, Cannabis indica
agttgtttcctgttcatttttatgtaatcaatggatagcaagttgattttagatcattgtagtttacgttcgaagagttgtttctgtttttcaatttgttttcagttttttgtagttttattatagtttgtatacttgtatatgttatttattttatttgccatgtgtgttaaattgcaggtctaagattacaaattcaggccctctgatttttacagatcgaaatgtgtttgtactagtaatttctttgttattgataatatcaagaatactttatctgtcaatttattgtctatgttccgtgacacccaatttggtcattttttggatatacctgattttgttttccacccccaagtggtccatagcctacttttgagggaagtataccagcccaatccaaaagaattttgggctaaggttgctagccgttgtatacagtttagtgccgaggagttttacttgatcactgatattgattgttttggtgattgcaacaaactgttattttcccaggaattaaactagttgattgaggtttgtttccgtggtataaaaaccatagatcataaagctatagaggatgctttcttgggaattaggtgtggtcgggataaatctcttggtttgaaactatcgatgatgtatttcatccaatgtttccttcttagcaatactccaaataaagatgtttctaggtttgatctagatattgttgatagcggtcgttgggatgagtattgttggggtagggagtcctttgaatttactattgattcattcaaaggtagaatacagcatgggattaaaatgaaaaataaaaaagaagagaagggaggtcagtatgatggttggtatagagcgttgggctgtccttgggtgtttattgtttggtttatga

SEQ ID NO: 348715 - DNA, 564 bp, Cannabis indica
tgtgatcaatgcttgatcatgcacctcacacacaacacaaaaataagagattaatcaagaacaatacaaacagttgaatattgaattgtacaacagtaaacaataatcaataaaccagtaaaaccagtagcaagaaccaacaaaagaactaaagttaatgagcaattaaattacaggaataaaaggagaaataatcaaacacaaccaagattacgaggttcgaacaagtgatgatgaatcacttgcctactcctcggccagaacagccccaaaggcttgaatctttattgatgctgaaagagagaattacaaagttgttgtacaaagtgttcttgacacattcactcatgaagctcagcttcaattacaatcgactcatctcactcaaaactctctctgttacaactgaactagcactcaaaaattcccaaaaattgttgctgaaatgctacagcaattggctatttatagccttggtttaagaccagatcctaactgtcataactgacagttaggtaaaaccgttagggggcagaaagaatttgttagcaaaagatttctatt

SEQ ID NO: 348716 - DNA, 654 bp, Cannabis indica
agaaaaatatgcatatatataatcaggaaatcattccaaacgaacctggacagaaaacagaggcattcgctggttgttatgaagattaaaagtaccactttcctactactgttactattactatacttcatcatctatattattcatgataataattcaactctaatcatcaaattcattcatttaaaaatttctattaattgttagacaattactaatcatcaaagtatgggtttcacatcctttttgtacgaattaagaattgaattcccctttgttttttttttttgtatagggcatgggcgccttctctgggttcactcggctataggtgttgccgtggtactcgagactcatggattatgtgaatataactttgaataaaattgtttgggtataatttatttactattcaatgtaattgtttgagttggatatgtttgtgagttgagaatttgttgtttgaactatgaaagtttgtatatcctaaaaaatattgtaaacataaaacataatatatgaatttatgttttatgattcttatttcattaatttttatttatattattattgtaattagataataatttatatatattaaattagtttaaatgtatttttttttaatttatataatattttttccaacagtta

SEQ ID NO: 348717 - DNA, 529 bp, Cannabis indica
gttgccccagcatttttcaaaccaaaagacatgactttataacaataaagtcccatgttggttacgaagcttgtatgctcttgatcagggacacgcattttaatctggttagatccagaatatgcattcatgaacgtcataagctcgtgtccggcagtagcatcaactaactggtcgatccttggtagtggaaagcaatcctttagacaggccttgtttaaatttgagaattcgatacaagttctccaagttccatttggttttgggacaaggacagggttagatatccacaagggataaaatgcctcacgtataaagtcgttactcaacaacttttccacttcttgcttgagtgccccttgtctctcaggatccaagggtcgtctcttttgtctctgggatgggaaatttgggtcgatgttcaagtggtgacagataattttagggtcaatccctatcaaatttgagtggctccaggaaaactgatcttggtttgccctcaaaatacttattagttgctattttagtt

SEQ ID NO: 348718 - DNA, 708 bp, Cannabis indica
ttttcaactgagcctgaagtagtaggatttttggaggaattattctcaatatctttagctttccttttgccctgatctgcattactggagaaggatctccatgcaagtgacaatgtccgttcataagcagtcaattcatcatccagcttgtctatgttggacgagttctaattgttaatcacaaattggtcaaactcaggtgataagttgttgagaacaaaatgaactctttgctctccagataaaacaattttcagcatagctgctttttggaatttcatgttcatcatgagcaagtatgaagtgatactctgactaggagtcatcttcacacagttcattcctaaaggcatattctagatgaggattggggtgtgggttgtacattttgacactacaaatatcaataaacagaaataatttattagttcaatcaaattcgtacacaagttcagaaaataaaaagtaaagcaaatatgtttgcaaaaatacaaaaataaaacatattaattattttctaatttccaacaaaataaaataaagtgtcccggtaggcgagagtcaaagataacattagttcaatagagtagtcagctcatctaaaatggacaccattttagcaaccttttattcgttcaaaataagaatccaacgttgtcctgataggtgagagtcaaggttattctcattttatgagcttccaccatt

SEQ ID NO: 348719 - DNA, 829 bp, Cannabis indica
gaaagaacatagcacttatccaaggtgtaagtaaactatgttgtagattgtcatatcattaaaccctgcgactgataaatctaggaatatatatatttaatcacataatcttgattcctttccactgtgctaacgacacaataaacaagaatataaatgtgatatggatttggatgaatttataaatcaaataaatatataaatgataacatgaaccaaataacacacaaagtgatgaaaatacttctgtttctttattgatatttaaaagataaagattacattaaaattgagttttatttagggcataaaacccaacagttccctgtgcagccctggctgccgtggcttctcgctccaactcagcgttttgttagtttgattcagccaggtgttgtcgaagttgtctattctctaattctaccagtgggacatatttggtaggatcataggcatcttcacttcttctctctagaatttgctcaccaagaatattgaaattaccatcattcctccctgaacatggtatttcagacgtgttggttctctgagatcccataggttcttttccaggacgatgggtagtttcttcttgatggtttccttcatggggaatattatcatccattgatatggatttgtaattgtgtttataaggatggatttttttgagtttttatcaccaaggcttccaatgaaagtaccaaacagttaacgtagattttcgttaactaaatatatagcattttacgtaataaatttactacagaatttaataataataataataatgaacaccaaatattttacgtggttttgtagttaaaat

SEQ ID NO: 348720 - DNA, 529 bp, Cannabis indica
aatgatgacttgcaagtgtccatctattggtggaggcatcagatcctggctattctgaccttggttggccttgacatacttctgtagatgcgggttgttcttcttgatcagaagttctatttcccgcttcaagttgtagcattcgttggtgtcgtggccgtagtctccatggaagcgacattgtcatgtcccttttgctggtatctttcttcatgggcccgggcttcttgtacggaattagtgattgagtcgctatgtacgcactttctatatcttcagttaagattgtgaatgcagtgtgtttggcgcgatcacagggagtctgtccgagtttttcggcgaactttcccttcttcccgcttccttgcttgtggttgttgcctgaacatttgccacttgaattgctggaatattggggaagctgggtggacgttccattagaaggagccttcattttgtttggcttttgctcaccttctgctcgctgaatggcttcttcaagcttgatgaaaccttcggcccggtcaag

SEQ ID NO: 348721 - DNA, 587 bp, Cannabis indica
ctctctctctctctctctctctctctctctctctctctcgaatcttcttcctccccaaaccctctctttctctttatcgtctcttttctctctctctctctctctctctctctctatctctctctctggtcggactgaacgaaaaaaaaaacaaaggggagtcgaagaaagattgaaggaaagagagaagagggcagatcagggttgggattttttgggttgtggggttcagttctgtggcccgtctgacatgggttggtcggagaaggccgacgttgtgcatcgtgagagagtgtgtgagaggagagttggagaaggttgggtcgtggggtagcgactaggtgctaggatttttcagttaagaagaagaagaaaagaaaaaggaaaagtgttaaaatggaatgggagcttaggtagttttgccccaaaaaaattaatttttgtagttaattgttaaaaaatttaaagttcgggtggtttaaccgccactatctcaaaaagaaaatatttttaaaattattttttttctgatttttaattttttaaatatttataattattttttaaaattaatattacgtgggcca

SEQ ID NO: 348722 - DNA, 456 bp, Cannabis indica
ttcatattaggatgttaaaaacatacttgttagtaaacctagatcctggtaaaatatattccaacattatttaaataattattcaactcttttgctatagtgtaccttgatgataattattattagagcattgatatctcaatactacaatgatgtggcatcttacaatttgtttgtagtttcctatattatttatttaatcaaaatatatgagagtcaatattaaaatatacccataacaattccctaccaatactttaacatttttcttattattattgtttagcaagtttttcggcaaccgaataattatagagcttaaaaatgtaacaaaagaaaaaatggcaagaatattgacaatagatttttatgtggttgaggcgttaattatccttagtccacgagtccattttattaggctctttggccagacaatgttgtgttgggttttatgcc

SEQ ID NO: 348723 - DNA, 662 bp, Cannabis indica
aacaattatcacataatttttacaagtttttgaatacaaacacttgtctccattgttatgcctaaagccatttgaaagaatagcattgtcaaacttgacatgccattgtttcggagcttgctttaatccatataaggatttcttcaacttacacactttatgttcattgtttggtaggacaaacccctcgggttgttccatatagacctcctcatcaaggtcaccatttaggaatgccgtttttacatccatttggtgaacatacaagttgtgtaatgaagccaatgcaaacaacacccttatggtagttgttctagcaacaggagcataagtatcaaaataatcaataccctccttttgcctaaaacctttagctactaacctagctttaaaggtttgtatagagccatcagtgtgatatttctttctaaatatccacttacacccaattgctttgcatccttgcggaagatccacaacatcataggtgtcattggagagaattgagtccatctcatcatcaactgcttctctccaaaatgcactatctctagattgcatggcttctagaaaagtcttaggatcatcctcaataagaagtattaaaggaattttccttattacttcttctctagtcccttctaccacgtagaaagaaatta

SEQ ID NO: 348724 - DNA, 553 bp, Cannabis indica
atataatatttatacgtgtattaaatgtgaaataaaattattaattcgacataaataaatttataaaatatatgtatatattttattgagatataattattcttatatagaaatatactttgttaatatgaaacttaaaaagtacatttattttttaaaaagaataaaatcatttttaatttgataataatatcatcaaaataataaataaaaagttcccacagatatatgttataacaattaaggcttgaaaaattatataaatttaccttaattatatatattttctaaattctactttattgtaatatttatttatagttaatataaatataatatttttttttacaataattaagtctttacaaaataaaaatttaggtctgattatatatatatatttatttattgcaatttttttcgaaaataaattaaatggattgtacataataatacaattagtttttatactcaaatgataatatttagttttctattaatatagtagccatttatttaatttttaggctatgaaatattttaaataaatttt

SEQ ID NO: 348725 - DNA, 724 bp, Cannabis indica
gtaaaataatttccaacagggtgttcagataggaactggccgaggaacctcagacacgctatgtctgaaagtgtgtcctgatcgaggttcccttgtgtccgcgcgcgaaggaaatgatccccactccgattttccaaattttcaaaaaatcataactctcacaatttcaatcgaaatttatttccgtaaaaaagtaatttgcataattttcccaaactatctaaataaaataattccagatcgtaaatcaaattatttttcataaaaatttcgtaattctcaatcaatcatcaaatcaacacatagataaacatgaacacatccaaatcatacattcatcattttaaatctatatttcatggagataaatcgttaccatggctatgaggccagttgttggatgttattttatcaggatctagatttactaacatgtatgtttgattatattctataatataacatcttaaacatgaattttttaaaaaaataaaataaacacatataaagttctagaaaaccttagattagtggcagcagaatattatgactcctttcgttcagatctctaacccttgtttctttctgtcgtagagtattgccaagatctgaacctggatctcctttagtgatggaattcttcacaatcttccacactattattgagtactgacctaatttgagtgggcaaggtactcttcactaggggtttgaaattatgaag

SEQ ID NO: 348726 - DNA, 836 bp, Cannabis indica
aacaataagaataggattcaaagacatcatgtttctcctagttatacttcctaatttttgacaacgttcacagatttgcaatacatataagtgtcatgaaaaaatgtaaggccaataaatccacattgtaaaattttcaaagcagtttttcttaccactaaaatgtccaccacatgcatgatcatgacaaaaagatatgattttaggttaatcataatttggaatgcatctccttattatttgatcgggacaatatttaaacaaataagcatattttaggttgatcattgttgcccctgattttgtccaaaatacgtggaccaaccgggcgatgacacgtaggtggaaaaggtttagcgtttaaataattcagctaagtctttttaagcgcaggggtcaaccttagacatgcctcccggagaaggcatgacaatctcatacactcccggagagcaagactgcaacaaagcatctccgggaggtgtcagatcctatctgaacagtcatctcgcatttaatgccgcatggaaggaggcgtattgaaactgccatatgtcttaaagtctgacggcacaacctccactttgcagctactatgctatgattagtgagcctattgacaactactttatgaagacttacatcagtcaaaaatgataaaggactacatccataaaacccctacaaagcctagggattagaccgtgcatttcctatgatatattcaatgggaatgtgtggctttactgatagatacagaaagacatgtacctcaattctagggatcatcccacaaaaaatactataaactaccccccaaactcattaaagcaggg

SEQ ID NO: 348727 - DNA, 646 bp, Cannabis indica
ttcatggaaaattttgtaattcataaacattcatcaattcacacataaagcaacacgaactcatctaaatcaacaaaaataatcattttaaatccatatttcatgaaagtaagtcattaccattgctctaacgctagttgttggaacttgttttaccaggatctagatttactatcatgtatgttaattataattctataatctaacaccctaaatatgatttttctaatacgatgaaataaatacatataaagtttagaaaactttacattgatggcagcgaaataatatgactctttccattcagatctctagcccttgttcctttctgtcgcagagcattatcaagatctaaacttgaatcttctctccttcagtttggttaatcatcgtcttctgcattatgattgagaacttgacttgtattgtgtgggcaaggtactctatcgctaaatcttaaagattgatgaagaacatgatagacatttatttgtataaactgaaacatatgtatgtgtatataacatacggaataaatgaacatatacactatatgaatataggatcgaaatacctccagccattgaatctttgagcattagtcccacataagcttgatctgcaaaagaaactgattgatgtgggt

SEQ ID NO: 348728 - DNA, 681 bp, Cannabis indica
gtagatcggcctaaatcttgagttatcatgaactcttgttcatgttattagtttctttgattcactcgttaaagattctcagagaagatgattcttacaacttctgtcataagatcaatagtcatcaattcaatgctaatatgctgaatgaccactttattttccttaacacgttctataatagctaagtacttaatatcaatgtgtttgcttcaaattctaccttttttgtcttgccaagaaaacaacagctaaattatcacagaacattcttaattgcctagatatgtaatcaacaactctaaggcctaaaataaaactctttagccatacaccatgtgatgtagtctcaacacgaacttaattagcctccatagtagaagtagcagtcaaggtttgtttgttactcctccatgacacagcttcaccaagaaacataaacatgtaaccagttgttgatttacgtgaattagtaaaaccagtgaaattttaatctgagtagccaactaataatgtgaatggctgggaacatgagtagccaactaataggtgtatggtccccaaatcgccaccttaaaatactgtcaagggtaaggataaagagttctataatgtcgtttgagaaaatctattttgaattagcaaaatagtaattatttattttttgtaataaataaataa

SEQ ID NO: 348729 - DNA, 821 bp, Cannabis indica
caattgagagaatataatttttgattgtacagtagctgttggattaaattgggacatgatttaagggttggggttaaagtatgggtagttagggtagaaaaaatggtaataggttggtattttattttaaaataattattttttaaaaatggacaacaattgatgattgatgtactcacagtgaccatttttcaaaatacactaaacatttgtctttccttttttttcgtggcttcgtgggttcctttgttttagggcagagttattttcttcttcttcttcttcacatttccttcttcttcttcacattttcttcttcttcttcttcacattttcttttagtgaataaaattattttaaaatttgggggaggaaactgcagtactttcggacttagtgacttcgttttttgtgtctccggctccgtctccgaccgcggtgggtttgtacaagtaagtgtctccgaatgtacaaattttcttcttcttttgcatgttgttcgttctttagtttgggtatgtgaaaatttgtctaacattgttaaagaaagattaaaactttggtaaagagaagtgttgttcttcaatccgtgtatgtgcatttcattttttttttctgttccatttttggtttattgagtagttttaatcctttgtacaggctttaaatctgcttcgtgaacaaggtttgattcacagattgctgaaaatcgaaggtacattttatgttctccatttctacatacagagtactaggaagtagttacttataaatatccatgtcagttcctatattttgtgtgaagagcctgattcgattca

SEQ ID NO: 348730 - DNA, 583 bp, Cannabis indica
tttatttaagatagtatatttttattgtaatggacaaattaattttaatgcttaatttcttaattttaatgtttaatgcttaatttcttaattttgatgttttatttctaattaataatatatttatttatgaaataattattatatataaaataattattataattaatttaattatattaaataatcagaataatggttttttttaatatttaaaaatattattgccggcggaacaatgattggggtctgccggtattaatctatctgcgtgtaaaagtgcagacattaataccggcgtaccccaccgctattaatctgtcggtattaatattattaccgtcaaaataccattttcgtcgctaataaccacttatagcgaccaattattaccggcggaatctgccggtattaattattaccggcggtctggccatttaatagcggcagatgcctccgccgataatagacaaaactgttgtagtgtctatttatatacgtactcttattatttctagttagttttttaaaaaattatgttatcttttctttgaacaaaaaaaaaaaagattattatttttga

SEQ ID NO: 348731 - DNA, 802 bp, Cannabis indica
ggcccggggaaccctgccaaaaccggctagccggtttgcaccaggtttcccaaaaccttcatttcttgctcaattctcctccaattgcaatgaaaccttccagagctcctattcaatgtataaacaataaaatccagccagtaattcaaagaacaaaccaccaaaatccaagttgccattaaagctcaaagctttgaactcaaagcttaaaattgcataaaacttacaatcaatctctaaaccagctactagaaactaaaattaacccaaacaagccctagaattcgaactaagcaagcatcaaaccctaacagcccctataacccaaaatcacctcttaaaaccaaaatacaacttcataaacttaaaaggaaaggagctagggtttaccttaattatttttccttgaatccttggttgaaaacacagaaaaatataaggaaatggctgggttttccttctgctttgagagggccgaacaccaagagagagaaaggagaaatgatatttctctaattttaatttctttttccttaattttctttcaaagtaaaacccctcttttcattcaattatgctaaaaaagaataggtgtcatcactcaaggctgccacctaaccctcctttgtcattttactaaatgactaaaatgcccataaacccaatactaaggtttttcaaaagctaggggtaaaatggtcaatttctataaccccgctcaatctcgataattaatttcctataaaatatttcccactaagaaataaggttctaaacttacccatgtgatcaatctagccat

SEQ ID NO: 348732 - DNA, 1512 bp, Cannabis indica
atatcacttagttgatcttaaatacatagattcgtaatcctgagtatgggttatgtttctaacttgtactgtattatttgtgttctttgacttgttcgttaaatccaaccaaatagatatgcccaatacttacatcttgggaacatggtagtgcaattgagtgggagctctaatcatagagatagaatttatagcttctataactatttagaagggaaatgttgattttttctttgagcttggttgaatacagatagatggaagagctcttattttattaattatattattttactaaaatattatttataggaagctaaatgctttatggataaaatacattgaggggtaaaatggtaaatttgtccctactcgatgtaacatctatataggatctttgatgattttgattgaagtaatggctaattcatatcaaataaatatttggaacatatagagcattttatgtaatcaatagtacaattctaaatctatagtagagtcatgaggaattaataagatatgaaattttcctggtaaatatcaaatctacttattgggagcttggtgacataggcccatggttcccgcattgtctaagataatattgtcttgtagactcaattaattaattttaattaatcaattagaattctaaataagactatgtcttgtttataaactttcactaagcaagggcttaatttagaaaaaaaaaatagaggatttagggtttatttgttaattaagagacttgtaaggtctaattaataaataagttaaatagaaattttatttgacaattattaaatcaatggatttgacattcataaagttagaattaaaatattgtatttgtgaaagaaaaaaataagttcttaaataaaatggcaaaattgaaacttgtagtgcccactatagtttggccatttaagtgttcaataaagccattattttatcttttttaatccatttaattctaaacctaaccctagatgtaatcctataaatagaataatatgctcttgtttagatcttgatcatactctacagcagaaaagatcatgggttagagatctaaatggaagaagacattatattctgctaccatcattgtaagattttccataattttatatgtatttatttcattattttaagaattttatgtttggggtggtagatcataattctataatcaacatatatgttagtaaatctagatcctagtaaaataagttctaataactagcatcagagccatgatattgatttattttcatgaaatattaatttaaaatgatgtttggtcgatttagatgtgttcacgttggtttgtgttttggaaatattttatttggaaagttggtgaaaaattaagaaattttggcttttacaaaacttaattcgaattaaaattgaaatatttattgttgaccgagattttcggcaactaataaaatattataaaattattgagctgtaagaaagtgagagaaggatttttacgtg

SEQ ID NO: 348733 - DNA, 671 bp, Cannabis indica
ttaaatattatttattttttattcatttatttccttctgaactcataatataatacttaatataaaacatagcatacgtgcatcgcacgtaacaatatactagtatataaatatatatttagtgtatcgtgaccttaaaataatattcaagaactttaacaaaatatttatcttggggcttggtagaaactcgtgctgataacgtgttataaaataatatagaataatataaaatagataatttcttagtagtttattctaatggggtgaattcttatttatacaaaaatattgaccaaaggaatgagaaattaaattaatgtaataaaaaaaaatacaatcaaatattaatggtgataattaatatagtaatttagacatctataattaatatttcaaaacaattgattcttttattatgttttaatatttatagaaaaatgttgtttgtcccgagttaagtgaattgaactttttcccgagccacatgtcaattatatggcatcttattagttttagtagtgattattttaatagtaaacattaaacaggtgtcaatatatttagtattcactttttaatttctttttacacgttttacgagacacatacaaacccaaaaaatggaattctcaataaaataggttgactatgaaagatgttttcctcaa

SEQ ID NO: 348734 - DNA, 635 bp, Cannabis indica
acaaaaataaaaattactcaaataacaaattttgtaactacatatcatcattttacttaactcgttattaattatatattattattttaagcgtgtcagtgaaaaatattaatcacaaacattacaatacattagtgtaagtaaataaaaacaaatatatttaattgttacctattcaaaaaaatttatttttaatcacaataaaacattatgattaaatttttgtcatttaacataaactattattcctatattattactaaaaaatctgtgactagtattagttataaaaatcacaatttatcgtcatgactaaatgtatttttagctacaacatttgttgtgactaaaactaattagtgacaagtaatttttgttacgaccaaaaaagataatttagtcataaaaatttatattgtaattaaaaaattatcactaaaagtagcattttttaaaaaattaaggtttcccattcctaaattaacagctacaggaggttatcttttttctatggctaggcccccggccttccatgggcatacgtgcggcttggtcgggactgtgttttgctattgtgattcaatttttgctactgcgattagtcttgtctctgtgacatggttttgagtgtttta

SEQ ID NO: 348735 - DNA, 610 bp, Cannabis indica
cctcttagtttatgtggtatgatatcctcataattggtcccaatacataattaaactccaagctcatcacagatctaaacacttccttttctgtaaaagatcttggccctgctcactattttcatggtgttgagatctacaaaaatgttatgggaatgtacctatctcaaagtaaatgtatagcataatttttagtcagttacaactttatggtgccaaaggttgtcctaatccaacaagttcaaagtttctttatctgatggtgaatcatttaaggatattacattgtataggagcaccgtcggtgccttacaatacttgaaaattactcgccagatgtagtatttattatcaataaacttagtcaatttattaaagctctaactattattcataaatcatgtaacaataagtgaagttgaaatatttatacttatataattaaattattatttaaataaccactttattttgaaaatttagggttgtcgaaacaatcttaaatatcttttcaaaatttatcttcaaaactaatttcaaaatatgtagggtttattttgaattattttatcaaatttaaattaaatatctaataagataaatgatatga

SEQ ID NO: 348736 - DNA, 1209 bp, Cannabis indica
ggtcctgtaaacctagggcataacttgcctcttttcccgaaacgtttaatccctttcatcggagatactcgcaagaacacatgatcccccacttggaactcaacatttctgcgttttggatctgcataactcttttgcctactttgagaagcaagcattttggtcttaattttctcaattgcctcattggtatgttgtactgattctggacctaagcatttcttctcccctgtctcattccagtggatgggagatctacactttcttccatataacaattcatagggagccatccctatagtactctgataactgttgttgtacgaaaactctattaacggtagatacttactccaagagccctcgaaatccataacacagactcgtaacatatcttccagtatctgaatcgtcctttcagactgtccatctgtctgaggatggaatgctgtcataaatttcagtttcgtacccatatcccgttgcaaactttgctaaaacttggaggtaaactttggatccctatccgaaactatggattttggtaccccatgcagccttattatttctctaacatacaaatctactaactgatccactgaataggttgttttaactggtagaaaatgagcagacttcgtgaatcgatctaccacaacccaaatagaatcaaacaaacctgtggttctaggtaacccaaccacaaagtccatcgtgatgtcctcccacttccactcatgtaaagttaaaggctgtaacaaccctgccggtctctgatgttcaaccttaatctactgacaggttaggcatctcgacacgaattctaccacattcttcttcattccgctccaccagaagtaaggtttaagatcctgatacatcttgatggtgccgggatgtaggaaatatggagtggtatgagcctcctcgagaattttgtttctaagttccacactatttggaacacaaaccatggctttgaacaataacatccctctgtctgacacggtaaaatctctggcttaaccagctgaaacctcttctctgattttttactaactctgcatcagtcatcttagcgactttaattcgttctagtagattagattgcagcgtcaagttgtgaagtttgcctacaacaaactcaatgctagatctgaccatgtcctctactaactgaggtgaaatcttaatcatactagctacctg

SEQ ID NO: 348737 - DNA, 815 bp, Cannabis indica
aatcctctttgctcggaggtactggtatccgtaagagaagcaggacgatccatccttaatgcaaggtcaagatccatgcagccaagaacaataaaaatgttctccttccagtccttaaagttattaccattaaggaccggtaccgaattaaggttagcagatacactagcaacagctgaaaagaacaatacaattacataaataacatgctcatataagaatccaaataaaacaataaattcaaataatggttaatcccatctcaagataccaaacacaacattaatattaagtctttggacagtaatattaattgtaagcggtactcttgttgtagtgatcaaacattgacaataaattatgtcaaacaatatgcaatctttggactaacatattattcacacaaaataccttataattgtcacacatttatcaccacaaacatgcatgaaattcaaccaaatattaactcacctttgggttagttaataaatttatgaatcacatacacacaattatcataatatttttattaaattaatttacacaaaagagatcactttggtgatattttgtttcaattaatttaattaaatattagatatccttaataaattttaaaccaaaatttgaatttaattgttactgtattattattattattattattattatttaattaaaattttataataataataataataaattatcgcacaaaggattactttcaaagagaatcatatatactgtaatcattagtatatccaatatactatttatactgaaaagaatagattactaagtaatcacac

SEQ ID NO: 348738 - DNA, 598 bp, Cannabis indica
tttaaaatgctatatgattaagtgtttatttatatgaggtaaatggatgagttaggattttgggcaataagtgcataagtgtggtattggtgcttaactcattggggttgttgattacacgggtactagtaatggaccctctttaatcatccagacctcagggcaagttagtagagcttggtgtagaccaaaccaatccactggcattgcctccacctccgcagaatttggggaataatgcgatggttggcaatgctaatccttttgctgactggctgaagatgttttaagaaatgccaagtgtcatacttcgtcaagaagaagggttgcgacgattaaggcaaccggctgctggtgctgatcaagtgttaccaccagcacctgtggcagtggtgggtaactatgggtttgttatgtcgcatcgagactcggtatttgagcggttcgtgaagctgcaacctccgacttttttgggaggtattcacgtattaaaagccgagcagtggatgaagagaggactaattgccacaatctgtccggacttgaaggttaccacttcacatgacactttgtacaagaaagtgatagagctagcctt

SEQ ID NO: 348739 - DNA, 600 bp, Cannabis indica
gatatgaggatgaaattgaattttggagatccttagttgtttgctatgtattaggtgctaatccacctctatttgttttggatggatttgttagaagagtctagaaaggagaggtagacagggttggaatgctcacttatggagtgtttctagttagatttgactcaatccaaacaagggatagaatacttaatggtggctatgtattctttaacaaaaggcctgtgataatgaaagcttggaatcctgataccaacttcaaaaaagaggacattacttcagtcctatttggattcaggttaaatatttggagctaaaatactgcggtaaaaaatcactattcaaaattgttggccaaatggggaatcctctccaagtggatgctgcaacaaaggagaggaataagcttactttttctagagttcttattgaggtctctattcatcaacacttcccagccaacatttcctttaagaatgaatatggtgcgaatgtcaacctgtcaattactatgaatggaaatcattggccatgtacacactgcaaaggggttgggacgatatgcgactgaagaatgcaaaaaaaaaaaaaagaaggaaa

SEQ ID NO: 348740 - DNA, 644 bp, Cannabis indica
attatctattttagtatgaattaatataacttaaaaagttttttttcaataaaatacaatatcaaaattataaacattaatatatataaatataaacaattattttttttattacacaaagtaccatataatattaatatagtttaattttggcggtccacattacaaacaactatttttttattaataaattactatttcacttgacacgtggtaaacaactatttctttattacaccatataatattaatattatagtttaattttggtaaacaactatttctttttattgcacaaagcaccgcataatattaatatggctaattagtaatttttttttcctaaattttgacatatactaaattatgtcctttaaacttttttcgccgttaaaaatttcccttcaactattgagattgttagatttaaggacttttatctaaaactttcatctatgttagaatttttttactaaaattagacaaaagtccttaaatctaacaatctaatagttcaggagaaatttttttactaaaagcaccatctcacctggctaacggtccacgcgttgcaaacaactactttttattacatcactaaataatataaacaactatttttcttttattacacaaagtaccat

SEQ ID NO: 348741 - DNA, 544 bp, Cannabis indica
gggtggggcggccggggcataggccccaggccccaccattttggaggcccccgaaaaattaaattgatatatatacacacaaaagagtatatatatatcttttagttcaacaaatatcaagagaaagctgtagcacagtgggaagcaaggaagcataaatttgtagagactgttgacgtgctgggttcgattcaattctaagtccttttttgtttattttaaatttttattgtgttttacataatacatacatataataacaaatacatagtgaagaattaatttaaatttgtaaggtttattttatttatttatttctttaaaataagaatataatattttggaccaaatattatattttgtatatttttttatgaaattactttaatatataatgtacaatagtattttaaggtacacactggtacaaaaattagaaaaaatattataggaaaattactccatatactattattttattttattttttcaaatttacgatttgggtttctaaagtggttgtgctagttgcaataaggatttc

SEQ ID NO: 348742 - DNA, 938 bp, Cannabis indica
agcttataaagcccaataggaaaacaactaatacaaaggacccttgatttaataaaattcctacatggttagctttagaataaagtatctcatcaccattatcaaaatgtataaacaaagtagagagaccataagtaatcacaaaatcaagcgtcaaatacatatcacttcgtccactagacccctagctctgaaaaaccactcatatactactacaaaaatgaattttcctgacattttaaacagtcgtttaaagtattctcgttggtttctataaccgtcgcctatacgaccatcgcaaaatgggcaaaatatgtgacggttcaaaaccgtcgctaaagtggacttcctgacggtttaaaatcgttgcctataaaagggtatagacgacggttttaaactgtgccttatagtattggttacattttttcattataaaaagtttttttcagcgatgattttttttttagtcgttacattgggaaaatagggaaaaaataaatttttctacaatttcttccctgcattaatttttaatttttttacaaatctgtatagtcaaaataattaacgtaacgctaatatcatctaaatatatttaaaattctgtatagtcacaataattaaactaacactaatatcatctaaatatatttaaaaatctataattaagttaacgctaattataatcatctaaatatatttacaaacatatagtaacaataaatcgagatacatacacactgaatagcacgacaactattgttgctcggcttctgctttcacgtaatgaatccaccgatcacgcataaaattcatctcatcatttgtgtacgcagtggagaacctatcatgttgtgtcaacacgtatattggatcttttacggtcatgaaactttcaatgaatttcatgacgttgtatctgttggaaattattt

SEQ ID NO: 348743 - DNA, 537 bp, Cannabis indica
caatcagataaaaattaagtgagctatggctgttttactaaaggaagatcaagtcccacaaccagttgacatccagcgcccaggttgacattccacgcctagcctgaagtctaacgtaaacctggatgatgggtaagtataaaaaaggatgtcctttaagatgcctaaattatagtttgacctcacttagtccactaatatgttctggtgaagctggtcaccgattcttacagatgttgctattttgcagaaatgtgagactcaaaactcttcattactaggtgtgctggaaatgagaaatacaaagttgggaatttgattcttctaactttgtagatcttggattcgtaaaaaactagaccgacggtcaaaatgacatcagtgtcgaataagtagaacctagtgcatcaggccatttgttgacttgggcactgggcctttttaactgagctcgtgggattctacttttgatacttccaaggcttttgaaattaaggatggggtctcctagccagtttttgaccatgctagattcaa

SEQ ID NO: 348744 - DNA, 728 bp, Cannabis indica
gttgttaatccaacatacatgatagtaaatagatcatggtaaaataatttccaacagtatcttcaaaaaatgacagatctcatgcttgtatattccagtagagagttaaatcctactggatatactaattctgattttcaatcagacaaagatagtcgaaagtcaaaatctgggtaaatatttagtcttggtggaggagctagagtctggagaagcatcaagcaaacgagtattgcagattcaaccatggaagctgaatatatagcaactttcgaagtagctaaggaagcagtttggttaaagaaattttacacttactttggaagtagttcaagaagtagaaaaattaatggtgctctactgtgacaacaatggagcgatggccaattctaaggaaccaagaagcgacaagagaggcaagcacattgagaggaagtatcatctactaagagatatagtaaagagaagtagtgtggcagtcttgaagatcacattggaacataacctcgcagatccattcacaaagatgctaccatcgaaatctttatgggtcatataactaatatgggactaagggagatgcccagggattgatataaataaaataattgtctttatttaacatgacatttactataaagacctaattcatatcataacaatgatcaatagtagatcgacctaaatcctgagtaataatgaactcttgttcatgttattagtttctt

SEQ ID NO: 348745 - DNA, 751 bp, Cannabis indica
gtaaaaatgtcaccgatgacagtctccttgttatcagcaacagctgcacaaaatacccccattggaatcaacatcaatacgcccttagttagtagggaaaacatagaaaaatacacacaatatatatacgacaatagaaagtagtacacccgaatacccaaagataaaagaaaaaggggagggaaagaggttgaataataaaaagccccagtaatagaggtaaggaaattaccgggagccccccagcttcggttaataaacggggccgtagggtcgtcagaaacaaactcaatagggcctcgggcaaaaaagaacttttccttccaccctttatgggaagtctctaagtcagtaagcaaggaaggactcttcttaggacgaagatggtaacgccccggctctttttccatcaataataaaagtggatgacgccggatacttcccactgaacgcccgccttatcccttaatacaatcacacccaaaagaatagcccacacattagggagtaactgggcaggaacaagcgaataatgtataagaaatttcttaatgagtctaggaatgggtaacctcagcctaatcttcgactcaaaccagtatgagtgtaggcataccctcgacggaagcctaacttcgaccctcgacggaaaaccacacgaccaaaccaaggaatcgagttcacgctgggtgaggaccgacggacaactcgacctaacatccaaataggaactacccagggcatgtttttt

SEQ ID NO: 348746 - DNA, 556 bp, Cannabis indica
tttttcctttttctccacaggaatagacatagatcttgtgagcgatcttagagtaactcctcatgctgacaaggaatcccggaagaaagttggcatggtttcggatgaatccgggagggaagttggcgtggtttcattagagaatctagccaacccaagacccaaacctgaaccagaagacctttgcgccaaccttttccagtatcgaggaatttcttgaggctcgaaatagggtctcggctgcaggaaataggatcttctgatgaggagaatgaggtctgtgcagagactaaggctctctacatgtaacgccataactattataggcgtgttagcgtgatttttaacatactgtgcagctcgttgctaatcaacgaggttaatggaaatcgtgataattaaaattttgcttaattatttaaaacataaaatattacatgtataaaattctgggatcccgtttaaaaaatacagtttaaaaagtttactactcatatacaaaatatttgtcgcctagcgactaaaaacagaagccctgatgtcccgaggatcgtac

SEQ ID NO: 348747 - DNA, 551 bp, Cannabis indica
tccccaagtttacttgaatcttctttctaatgatggaaaaagttcttggaatactttttgctaaaattgattggaaacatcctaagttgacaaaatatcaacttggacactgggcctagccctaggtggtatttcctctcaatgtgtttacacctcttgtggcttcgaggctctttacttttggctatagcaccagtgttgtcacaaagtaaaacaagtgggttttacattccaggaacaacaccaagttctataaagaactttcttagccaaaccagttccttagcagcgtcatcagcaactatgtatttggcctccatggtagagtcagatattgcagattgtttgacacttctccaaactactgctccacccccaagagtaaagaacatcctagatgtagacttcctatcatcaagacaagcctggaaatcagagtcggtatagcctactagatttaaagcaccacccttgtagactaacaaataatgccttatactctttaaatatttcagaatatgcttaactgcagtccaatattcctctcctgg

SEQ ID NO: 348748 - DNA, 515 bp, Cannabis indica
agctcgcaaagtaaagaattgatctttagaacctcgcaggaagatctttgtagtccttgcatatatctcgatatacgtgactcttgaaccaatcttcggtcctacttcgtccgaactatacgaatgcgactagactctgtcaaggtcacatcatcctgcttagtctggttcaggcgaggttttcactcaagaggtctcctactgacatctcagccctcctcgaggagagtgagtccacaagtcatttttataggatcctggtctcgagtttctaggtgaaaaattctcactataacaataattaattatatgagattatttgagaattattgcatttaagatcacatttatgagttaggggtatttttgtaattttgacctaagaatggtaaaactataatgttaacatttattgtgctaatggactatattattatatagtatgtttatattatcttactgcaggttatttttgacaagttggcacggtttagtcacaactgggtattttgggc

SEQ ID NO: 348749 - DNA, 532 bp, Cannabis indica
tgctatttatagtgatcctttccagttggcagattcgaaaaaaaggaaaacagctttactggagggtcctcttgggcctattgggtcaacttctaaagagcctgtttctattggacctaatgaaatggagtttactgatggtgtcaatattgaaaataattcttcaactgtgattgatacggatacgggtaaagtagctttagactcaaaaagtgatggtatttcaaaaatcttgtttggggcgggttctggttcacaggcccgccagtcattatgaatgttctaagctggaattgctgggggcttgggaatcaacgggcttttcagttcctaaaagagattgtgtctcataagaaacccaattttgtctttctatgtgagacaaaatgtaacaagaatagaatggagtgggtgggtaatcagttgggctttgaaggtatttttgtggtagaggcccaaggttttagtgggggcttggccctgttgtggaaaaacaagatggaggacagttgtgggggttctcttcgaacca

SEQ ID NO: 348750 - DNA, 509 bp, Cannabis indica
ttatataatggatggaagagctacgctgatccaagcgtagatatattaaattccaagttgggaattttatctttcttcaggcggttcaaatgaaaggaaaaatcagaaattgattagaaagaggagttaaatcccaggttaatctgtccatttgagtttttggaaagggtaggtcgggtagcttatcagctagccatactccctgttttatttggagtttacaacctatacttcaaagtttcagatttacgaggtagaagcgatccatatacaaagttacgagaatattaaatttcaaacagactatatcactagttatagcactgtgaatgaactggaagattggaaaggcgatttaagagttaaagtcgcagttgtagaagttgtatcccgagttatttgaataaatttcgaggacgaaatttttataatgaggggatagttgtaatatcccagaaaaatatactgatattttaattggacatatttttttaaatatgtgattaagt

SEQ ID NO: 348751 - DNA, 357 bp, Cannabis indica
agacacgtcattagttatctattgttataatcctaatgtgatcaatgatcctctatatagatgatttacaatgtaaagggattaaattaccgtaacaccctacaatgtattttatccttaaaattggttaagctcgaaggaagtcatcctttactttctattcgccagatagaagctatagacactacaagaattaacgtttttaggggcggaggagtccgctggtaataattgctaaatcccccagtaatacgatttagcggcgggatccgccggtattgccccgtcgataataccccgtcgctattaatgataaatagcggcggatgacacgtccgccgctattaatcattaata

SEQ ID NO: 348752 - DNA, 731 bp, Cannabis indica
aaaaaaaagtaaaaaaaaaaattttaaaattattttcgatttttgtggttaagtgttaaaaattttaaagtttgggtggtttaaccgccgatatccaaaaaaaacaatatttttagaattatttttttctgatttttaaatttttaaatatttataattatttttaaaaattaatattacgtgggccactaaaaaattgccacgtgtacacgtgtgtaacgtgggcaatccactatgacacttaactgtgatttttggacggagtgatatagagcaaaacagaatgggagtttaggtagttttgccccaaaaaaattaatttttgtggataagtgttaaaaaatttaaaattcacaagtagtttaaccgccaatatcccttaatattttatgggataatgttttgtagtccaagtgttagtttgttgaatttactacatcaaaaaatagaaacataccatttaattgatcaaactttcacaaactacctacaatgaattgtcaactaactaattttacaaatgattctatgctcaatacaatgatataaaaatcacaaacaattaccagatatcaaacttatacgagtctcaaataaaacaattcaagaaattataaataacaataaacgaacaaaatgacaaataaaatacattttaatacctgtttgttaaaaaaaaaaaaagacaaatccaaatactagagcctgtttggtcattttaaaaatttaat

SEQ ID NO: 348753 - DNA, 620 bp, Cannabis indica
tttttttttcatacaagcaaaataaaataagaagaaaaatttagtttcccaaaacatgtttaagcacaaaattctcaaatatttgtgagcaagtttaaaaataaataaagaagagttaaagaagaactcccttagtcaatgatatgcaaacttgctagtgtcaaccttcataagtgcgttcaattccacttatgctcgcacctacaagagagaaaaagaaaagaaagtgagagaaaaaactacaatgcaattgtcaaagccatttaacattgcatgtctattgaatctaaaacaaaataaagataaattttagagagcttgggtttattccttagaagcgcttgatttaaagttgttaggtccccttttagcaatttagctgtcaaaatattttttaattaatgtgtatttttattaagcatttaaaatatttttattacattgattttgtgtatttaattactcttttctcctaaggaaagattccttctcaactggtctctttttggtttaagaaacttcttgtaagagaataaattctcttatgcaaagttgtctaattttgggaaacttgactttccctttttttaatagataatttcagttttgcctttattaga

SEQ ID NO: 348754 - DNA, 653 bp, Cannabis indica
ataacaagacatgaaccttgttattaaaatatacaaatcaatcataaatcaatttgaataaactacaaactattcacaaaatactaattttattaatcatgtaaaagagacaaatatatagaaaggctcggaaaggcattggatgttgaggttttaaaaaccctatttgtacggagagcgtcacagctaagctaagcttgtactctaagttaccggagaggactaaaccctagggagtaggcgaccacggcgacaatcacaggcggccagaaaaaggctcagatgcaaggaaaggcatcggaggttgagggttttcaaaatcctatttgtacatcaagctaacccacttttattgcagtaagttatttctaacactacaccaaaatatagaattggtgacatttggattggtaacatttgtaaaaaatgtcataataatatcatttaagtaacatttgataggaaatgtcactttaaagagaagacttgacattttaattaataacattttattaaaatgtaactatctatatactttagtgacatttgattaaaaatgccattagttttttcatatttaactttagtaacatttaaaaaatatcactaaaatatattaatactaacatttgtaaaaaggacacaaaatatta

SEQ ID NO: 348755 - DNA, 644 bp, Cannabis indica
ggctgtccaagctagagtggagagagtcctaaactcttgttatgtaggggagggattgccccctgtcaatcctattttcctttattaatttcataaactgaggttctcttaaaaaaaaaaaaagagttaaaagagaggtttgtttgagattttctcattttaaaagaaagaaaacttgtattgatgatattgattggttggagagtttgagcttaaatttcaattgagctctttctcttggtgtacctttctggtgacatttcaagcaaaccttcatgaagtttcaagcttcagaaattaattcaaagcgagggatgagagaaattagagctttttccttgttgtagcattggcataaatcaaatcttagatacttctagatcgttatcgttattattgcaataacaaagacaaaataatcgttaagtcaaagaatcagtgacaaatagaacaaaaacaaaacaaatgtatgatgatacatagagtgagagttaggattacaattaaggaaaaaatatgtaaagattgtagaaataaggttggaaaggagaagtacctacccatgcagaatagagcttgagactgatcgtgatgatgagaaatggaagagaacgatgaaaatcgaagagagagagagagagaga

SEQ ID NO: 348756 - DNA, 803 bp, Cannabis indica
taactccaggaaacttttctcacaccgatcagtccaaacaaacttcaagttcttttaggtcagttccgttaagggtacaacaatctttgaaaaaaccctcaacgaaccaacgataatacccagctaagcgcagaaagcttctaacttccgtaactgattttggtgttggccaatcctgaacagcctcaattttatccggatccaccatgatcccatctttatctactatgtgccccaaaaaagaggcacaagataactggaattcaccaagatgtcatcaacaaacacgatcacacatctatccaggtaatccttgaacaccaaattcatataatccatatcaaatatagtatgcatccttggcccgacactcactcggatggtgcttcttgcatttaggacactcgggataagatcggattgaggacccgcggccctgacgaccacctctgtttccccggaactttctgttaccccctgatgctctggaagcctcaaccttccgtttgtgatcagggttgccaccgtcggtccccttactgacattaccactagcaggaggattcgatgccatgatggcatcctttacagtctgcttcttcgcaacatgttgctcagcctccttagcaatcaagcctagctctaccactttcttttacaaagtgtcatgtgaaatggtaatcttcaagtcccgactgattgtggcattcaatcctctcacatatttctgtttcctggtgaaatctgtgggcaccagatcaccaaaaaaaaaacttagataaccgatcaaactccagggtgta

SEQ ID NO: 348757 - DNA, 1011 bp, Cannabis indica
ggtgtcttgtccgaagctcctggtgcatgcgtgcaccaagcttcgacacccatggcacttgatttttttaaacttccatcactttctcaatttctatcggaatcgagttccattaaaaccaaaattgcttaatttttttataaggaatccaaaaagaaaatatttttagaaagaaaataaaattatcttcatgaaaaatttcgtaattcacataccatcatcaaataacacataaaccaacatgaacacatccaaatcaacacacaaacaatatttatcgttttaaatccatatttcatgaatgtaaatcattaccacgactttgaggccagttgttgagaatatcttaccagaatctagatttactaacaagtatgttgaattaacatcctaaatatgaattctctaaaacaatagaaataaatacataagggtttaataaaaccttacattgattgcagcggaatataatgactccttccattcaagatatctagccctcaattcctttcggtcacagagcattatcaagatcagaacctagatctctttctctcctttgggtttggttaccaccgtcttactcactatgattgagtacttgacttgttatgtgtgggcatgtcactctttcactatggatttcgaacgttgaagaacaatgaaggaagtttgaaatcactaaggaaggaactctctcatctaggttagttgaatagtcaagttgacaagaggatgagatgagagcatcatgttcgttttatagtgtttcaactaaggcttagggttgaattatatggattaaaaaagaataaaatattgggtttaaaacaacactagggtcggccactaataagactaatctctagttacaatttgccactttattttaaccacttattcttctttcaataataccatatttccaatttaatcctataaatgtcaaaactatttatttgataattataattaattatcaaacaaaattgtcatttatgttatttatta

SEQ ID NO: 348758 - DNA, 446 bp, Cannabis indica
aatcaagagctagagatcttgaacggaaggagtcattatattctactgcaatcaatgtaaggtttgctgaaacccttatgtgtttattttcattgttttaaaaaattcttatttaggatattaattcaacatacttgttagtaaatctagatcctgataaaatattcccaacagcggctgggggatgcgacttggggaggagcagtgagcagaggaagaagatgaaaggggcggctgtaggagagataatttgttttaggtttatttaggttttgaaaataaagaaataataaggatattttgggtaaagtgtgaagttaataaattagtattgtataaaatatttaagaggattttccatctttaaatagatttactacctggccagatttatgtctcgatttattgcgtgattgcgctatttattgtatctttatggctgaaat

SEQ ID NO: 348759 - DNA, 796 bp, Cannabis indica
cttttacgttttttttttttttggtttaaaagggtactaatctaaaatatacatttttgtagaatataaaaataaaaataatgtgaagtataaaaaataaaaaataaaaaataataaaattaggtaggaataaaaaaaaaaatgtgattaaaattaaaaagataaattttatgagaataaagtaaaaacataggaagagtataaatagaaaaatattaatattatggtggaaaaaaataaaatattttaaaaaatgtacatataaaatttaatttatcaaaagtaacgaagtataatttctatataatatatgattcgattctcataagcattatattcactactaagaaaaagggctgggcattagttttcaacaaatcattatacttgagttcctcaaactaacgtatatgcaagtgacaaaaaaaaaaaaaaaaaaataggctactcacacgtttgaggtaaaaatataagaataataatgaaaatagtaataggaatagaataaaatttaaattgtataaaaaaattgataaaaaatcactaaattttttctcatgttacattaaaatggtttttctttctgttttaaaataaaatagttattctactaaaatggtcgaaagaatattctattagaatgacattctaatactttctaaccaaatgccaccttagtatagattacatatggacactaagagcatctccaatggtaatattttggagaatgcttgatgagatggaaggcttatggcaaaatatagagatgctataccattggagataaaagaat

SEQ ID NO: 348760 - DNA, 623 bp, Cannabis indica
agagaactactaaaatattatatattaaatatctaaattaataatacaaattatgacatacctcagagattacacaatgtacgtgagcgacatatttgcagtggccacagtaataaactcgaagtcgtggatctctctcttcttcacaaatgtcacagtaatagtccccaaaagtatcctcaatgcatgaatcaacaagatttaaacaatgcatatgactctcgtgctttatgactgaaggcaatggaccacataataaatggagtttgaagtcacaatccaaacatccaaatatggaggaatcagttttactgaattccttggaattagacttcatgactaattgcttcaaacaattatcatggacattgcatcgatcatgtgtagtgtgtattttgtctaaaaaacaaagaatatgtggatgatattcataactaatggttctttgccttttaaaaccacattccaaacacaactgaaaattacaattgtgaggacaatcaaaatataagcctggtttggagtatccacaaacattgcatttaccaaactgccatttcatatgaagggagagatgagtgtgattattaggatggtgggagaattggatttgttgaggtaat

SEQ ID NO: 348761 - DNA, 779 bp, Cannabis indica
acctcaatcatagattggaagactgtgaaggatcacatccatctaaaaggacattcggggctcacatcttgattatacactatgacagataggaatcaagggttagagatctgagtggaaggagacatataattccgctgccatcactgtaaggttcttaacttttatgcgtttttatttatcgttttagaagttcatatttaggttgttaaatcaacatacttgtgagtagatctaagatcctggtaaaattaattccaacacggccgcccttgaggtcttctatgaattttgaaaggctaaccccataggaaatttgattacgttggtcattccaaaggtatgtatcttgattactgtgcaggtcagagggcctaagaaaaccttgaggcaaccacttctacatttctaactgaccagagcaccgaaactcctactgctgaaaatgttgaacctctggcccatacagacaaaacagatctgtacaaagagcctaggacccctgctgtctaaacatttttattctttttttttatatgtgtctgttcggcccataggcattttttatggacaaaaataacctgccaaacagtttttaaacttgggttatatttttcattttaagataactggctaaccgggcagcttttaacctcgggtttaccgtgctttgttatctttttcaacgattactatcccttttcttgataaatatctatgcaactgtgtttgttttttttttttgagcttgttatttacttttaccaatactttgcacg

SEQ ID NO: 348762 - DNA, 1212 bp, Cannabis indica
attgagaaattattactctaatgcccatttctaacaatggggcctataaataattaaatttatatttaattataaaaatattagaaattagtgctaattgcctttactaattcaaattactaaagcggtcattacaacgcttattttttctttgtttttctcttgtttctttttccaattttcttcattcttcatcaaaaatataatcaccaccaccataacctcccacaatcccatgaccacatccagtcgtactcaaacacaaccccacaattcatatccagattcaatcaaccaaacaaaccacaaaaatatctcatatctcaaatttgatcttgttatacccaaaatttggctgccatctcaatgaagaacacatgtcaagataaagggaatttaaatcgatgtcattgcttttatggaataactcattaattacgtaagtatcagagtgtatttgtaacccgctgactgtaaggtcttaggtgagaaatcaatgtacaaactggaacttaatatattagcgaaaaactatatgtcactaaatgcgaatagcaagccaccaaagaaagcgacccatatcaatcatggagatgcttagcatacaataaacaaactaagtataaaaatcagatcggctcaagaataagtacgcgaggtgaccatctcgtaatgggaagagttcctatagcttcatccagctaacggtaacgaggcttacaaccctggagagtcagaatggttctttgtaaataagaaccgcaatcgacaccatacatacattgttgaccttagaaagaagtatggccccagctcgctattaagatcaatgtaaccaagtttctgtcgagacatctccagatacgatagctaaagatgtgttaattacacgattattttgacccagtaaaagtgggaaagtcatagttatacatttttcaaatcgtaaactgcatttacactacgtgatgtgtaatcaaatctcacaattttagggataatggcagtaaacatattccggtcaactttgtaattaattgtccactatgtaattataaatagtgacaaacaagaccaaaaaaattgatgaaaaacccatacaagagagttccttaaaaaaaatcataaatctgaataagattgactcgtggactatgcagaattttaactgcaaaaccacgtaaaaaaccctgtgttcgtatattatttttc

SEQ ID NO: 348763 - DNA, 526 bp, Cannabis indica
tctacaactcagagatatatccaaaatgagattataattaacttcccaaaatattttcttaagataatcttcattacaacacaaatcgttaatgaaatctgtcacattccgtagagggccaagaccattaaggcgagtgaatggctaaaaattaactaatcgcaaaagccaagtatcggtacgaggatgaatttgagtgccatgaccaacccactatctgtgtaacaccctactagtttaggcgtgttaacgtgatttttaacttaatgtggaaaattgcaaattattattaattttttgaaggattatctttctgttgacctaacactaatgtatacgaataagttgatgttatgcttctacaactgatatcaatttttctactcttgttaccatctcaacatctatttaaggcagtgtgaaaatgtttttcatgtcatatagtgcacatcacatgaaaatagaacattattgtcaaatatatggttttagagtatgtaatgaaaggtaaaaagatataaattaa

SEQ ID NO: 348764 - DNA, 1242 bp, Cannabis indica
taaactcttatgtgtttatttcattgttttagagttcatattaggatgttaataaaacatacttagtagtaaatctagatcctgttaaaatatttccaacataagtcccattcatgggggaggagagccttgaaatgacgccatcatgctgtagcaaactctgcagtgtactccgggccagttttcccagcctcgacaagcagagtttcaagggcttggctcgaggaggcgaaagcttgagtcattttggggataggctcatcaatacgtgtgggggccagaggaggggttggatcctgagtctcagttttaggtacctcgagattagcagcctgggaggctcacttcttattagcagtagtcttcttgggccttttttggggctccacgtcgacatctgatggagccttcgagatggtcaacctcttctttcccttttggtgaaagagaccctcgagattcatttctacgatacaagataaaatgttagcatttattgaaaaacaagttaagggggaaattggggcagaaattctgcctaaggaatttaccataatcataagaagacaaagatgaaggaccataatatcaactaaaatccctacatcctgtgatcctgaatatatcatagggataaattggttctaaatctcagctcgcatctaagtggcttgccctatccagcatggtcccgtactgctcagttattccatagtatgagtcagtacaactaatttggacatggaactttgggtaccgactatcaaacctatgtgcaatgcgatctacgagaaggggattctaagtgtaaaaattgtactgactatcgcgaaatgacactaaggtgttacgctcggccctaagcactatgggtgaccaaccacattgattacctcgggatgctccttcttcagcttcctgaggggcgatgttccgaagataatgcgcccgagccacgcagtcctgagcttcctcctcggttgggacaggaacctactgcgaagaagaatacttgggatatttataatcacaagtaaactccttgtcagttaggagacccacggacctcaagttaacctcgttcaaaagaaagtcacatgaccgaaggccaaatggaggacccaacaggagcctacgccgctcgaccatctcaggagttcgaactagtcttttcgagacaggtgtcgaaaacaaaggcaaaattaaagttagcaaaccaagagtaaaaatacatggaataat

SEQ ID NO: 348765 - DNA, 533 bp, Cannabis indica
tttgcaccttgatgtggcaatgataatggatggcacgtgtcccacatttctgatacctggatagaggaaagtattcctagcagcccattaatggttgcttgacatctgtgacactctgatatccaagcaggatggtcgagaagatgtccgaccgggatgctgacatgcttatgccgagcgaagcgtgtaagttggaagttctagagatcaatctcgtcgtttccaagacacgaagacaatccctataattgtgggattgagtcagaaaatagaagcaacccacttcagttttctatacattacattataattataaaattactgtagtttctaattttattcattatagattaagggaaaccattcttcatgtattaagcccttataaatagtgacataatctcactatggagggggtggagagaattaatctagaaatacactgaagagagaatagtgatttaagagagaaaataactcagagatccattgtaagagctttcgaaagaagaacactttattccttctctcaa

SEQ ID NO: 348766 - DNA, 550 bp, Cannabis indica
ctctatctcatattcaaatgtttttgagtaaagaagtatttgagacttttgtggtcgatataaatttcacacctttctccataaaggtaatgctgccagatcttcaaaacaaacactaccgcggctaattctaagtcatgtgtcgggtatcactattcataatccttcaactgacgggaggcataagcgataacccggtcggcttgcatcagtacaaaccccagaccctgtctggatgcatcacaataaacaccaaacttttctttgtcagaaggcaaagctagcactgaagctataatcaatctctgtttctgctcttgaaaactagcctcacatttgtctgaccataaaaaccgctaattcttttttgtaagctcggttaagggtgttgaaattctggagaacccttccacaaactgatggtaatgaccagctagacccaagaaacttgtaatttttgtcactgttttcggtctaggccaattcctgacggattctatctttcctggatccaccttgatcccatccttgctaacaatgtgccctaaga

SEQ ID NO: 348767 - DNA, 763 bp, Cannabis indica
ctaataaagtgattataataactaatgtacattattatatatttatttatgacaaactattttaaaaaataaataaagatgtcggacgaaaaatagtgtcccaattttcttattttcaatattttatatcatattgctaaagacaaacgttgtaaattgtgataaaacatcacatagttttagtaccagccgaaacctactttttatcttatttatagattttctttttctagaacattatttataattatattttgatttattcaacatcatattttaaattatatatttgtttttgtggtgaagatatttagaaatcccctccaaaagaaaaatgaaggaggaacaagaaaaaatatatttagaatattattttagatcatgtgttttgtaaaagttattaattgaaccttctgttttattaaatgataaaataaactctgtatttttcaaaattatacaaataggaccctgaacataaaattgttgaaaattgagctcagagtcttatttttattattttggaaaatataaggcctattttatcatttaagaaaacagaaagtctaattagtaatttttacaaaacagaaggtccaaatatttacccaataatcagtaacggacccagaatttttactttgtgggggcttatttatcataaaaatatatttatagctacattataatcactcttactaaatttatctaatttagtgggggcttttctactattttggcctataattattaaattaaaaaa

SEQ ID NO: 348768 - DNA, 516 bp, Cannabis indica
attttttagtaagaaaaaatctagaaataattttaaaaaatttgtgtcaaacattattaaatttttgaaatggcaaaaaattgttttctattcttactttcaataacacaattttaaaaactgaaaatacaaccaaacaggctctcaacttccatacttagttttactatctaattaaagaaagaaaaattctcaaaaatggtttaagtttcctttttggtaccttgtctagtaacatacatggtggtttctcatgtatggtaatttaagtcattaatttgttaggttcatcctaaaaatgatgtgaagtaattgtgaattctttagatttataatgaaaaatcatatcttaattaaaaattatcattatgttaatttgaattttatatatttatcttataggtgttgttggataaattcccatactatctgtcacataaataagttacaaggaaaaataaattagacctttttttttcaaaagtcctcaacagaccattataactcatagagttg

SEQ ID NO: 348769 - DNA, 795 bp, Cannabis indica
aaactttgaatgtcattaatggtaaaatttgaattggagaaatttgatggaacatgagactttgcgctatggagggaaagtttgaaaggaatcctagtgcacctgaaggtatccaaggttcttggagatgagaaactctttgccaaaaagaaactagaggaattagcaaaaatggaggagacgacgcactacacgatcatcatatatctatcaaatagtgttcgaagaaaacttatcgcagagaagatgacaaagagagtttggaacaagttggaagaactatacttaaagccatgaatttctagcgacattaatttgctagaaaagttatacgagtttagaatgatttcttctctttctttagattatatattgatagatttaatgagattattgtaggattggctaacataaatcacaaggttgatgaagaaagtcaggtcatcattttgttgagatcactctcaattgcatattaagaagtaaaggttgttatcaagtatggcagagacgtgagtgcattggagaatgttcttgccacactaaaatagaaagatttcaaactacatttggaaaaagaatctaagaaagaagaagtgtacttggcaagaggaagatcacctaagaaaggaagtttgaagagtaaacaccatcactctctatcaagatcgaagtccaagagaaggaaacaaggaaatttcacttctgtggaaggtcaagatacttccaaagattttgcaagaagtacaaggagcaatatggtttcaacaaatctcacaatggagataggaagga

SEQ ID NO: 348770 - DNA, 623 bp, Cannabis indica
aatttgcataataagtgtattttcaccaatcactccacataatagtgtaacaaaaacttgtgattctattccaacaatctatcatgagtaattgatagatgataatttttaacaaaaaatgacctttctagcaccttcacaatctaacattttgttaagaattccaaatactttgttaaaaattctcaatactatttggattctagagaaagattattttgcaaacaattatgaaaagaatgttattttgcaaaacgatttttaggagggtctattattaacaataggctaattatgatttttgccccttaaacttttaagatcgttaaaaatgctcttgaactattgagattgttggatttaaagacttttgtctttaattttactatttcagtgactgtttatatactaaaccatgctcaccggattttgatatctaccaaatcatgcccctcgaactttgacatgtactaaatcatggtccttgaactttcatccatgttagattttttaataaaattggaaaaaatttcttaaatccaacaacctgaatagttcatgggtcatttttaacgaccttaaaaaatcagggggctatgatttggtacacgtcaaagttcagg

SEQ ID NO: 348771 - DNA, 682 bp, Cannabis indica
atcgataagcacgttttggccaagaaacactataactacaaccacatctaaggtttgaaacaaatacaaatccaaaaataaaaaaaaaacaaataaacacgaagatgaaggcgaaatctggtgagcatctagtcgggctcagagccgaggtcgccctctcagtatggatgacgctcgtagacgaagactgagacggaggttcggggcctttgtgttttttcgatgcttaagtgctatggaggtctaagtcttgggcttctagatttcgtctgggtttcttggtagatgaggaggttcagtggtggtggttaatagtctcggtgcctgagtctgggtgatctcggtggtgtgaggaagaggaagagagagcgatgaagagaaagagacagagagagagaaggaaaatgaaaaggagagtattttgagtaaaagttgaaaataataatatttaattgtataaattaattaagagtctaaattctattaaaagatatttatttaagtgtaaaatgaaattttccatggtaaatgagaagtctgctatgaataaacccagcacgtcagaggctagtgtcacgattatataaataatttgctttctttttttctgtatatataaaatggggtgattctacaatgcacccccttaaaagagatgcactgatgcacccttaacttgttt

SEQ ID NO: 348772 - DNA, 646 bp, Cannabis indica
ctcaacatggaaggggctaaaccagctgcaaatcccaccagttctacccatgtcctcacactggacagtggtgaaccctttgaagaccatactctgtttcgaagcacagtagctgctctgcaatacttgaccctaacccgacctgatatcacgttcattgtgaacaaacttagtcagttcattcatgcacccactactgtgcactgggaagcgtgcaaacgtttgtttaggtaccttaaaggtactatacatgagggaatccatcttagccaagccttatacttgtctctccatgcctactcggatgccaattgggcaagctccccagatgacaagcgctcgactggtggttatgcagtgtttttaggaggtaacttaatttcatggtccgccaagaagcaaaatgtagtttcccgcagcaatacagagagtgagcttagagccttggctaacactgtagctgaagtgaaatggcactgctatgttctctctgagttacacttcaccttacctgctgcacctataatctgggtcaataatcaagttgcagcatctctagctgccaatccagtttttcacgcaaggtcgaagcacattgaaatcgatcttgtaacaccctaactatcttaggcgtatacgtgatttt

SEQ ID NO: 348773 - DNA, 522 bp, Cannabis indica
acggctcagggtagcaacctttcaggttagactctatacatctttgtgctttttgggggaaggcatgctcaggagagcttggattttttctggattttcctcaattccccgttgactgacaatgaagcccagaaactttcctgacttaaccccgaaagtgcacttcttcgggttgagtttcattctgtatctccgaaccactgcgaagcattcttcaaggtcgtccgcgtggctagttcacgccattgacttgaccagcatgttgtccacgtataccttcatatttcgcccaagaaggcccttgaacatccggttcaccattctttggtaagttgcaccagcattcttcagtccaaaaggcatgaccaggtagcagtatacccccttatcggtcctgaagctagtgcactcctgatccgcgatgtgcatcttaatctggttgtaaccggcgtatgcgtccatgaaagacaatagcttgaatccggaggtggcgtccacgatctggttgatccttggcaaggg

SEQ ID NO: 348774 - DNA, 899 bp, Cannabis indica
tggcatttttttttcatattaaaacaacagtaaaataacactacaaaacagtaatttgttgttgatttagtaatttttttctcttttccaaattttatggttttttcttggtgtttctatgattccagtgttgatttgtccgtccccaaccacgaatgagagatgtcatttgtgttttgttactgtttacagtataaaagtaaataaattgggcctgagcagtataaaagaaataaaaataggtttggacagtaaaaatgtaaagtttgacgtgtcccagtattttttaaaaatatttggtaaaaaaacagtatttctgtaagtttcctttttttttgttgagcttatttcagtggcctaaatccactaaacgttaaaaataataattaatagtaaatgaacggtttttttaacaattagatattaaacgtcattttcataatttagaaccaaattaaggtagtatatgtaaaaattctaaaattaattaataattataattaaaattattttttgaaaaaattaaatttacgtagtattttataagaaaataaaatataataaaaaataaaaagagattaattaatatcaagttataggtaatatgttaaatatttttaattagtttcttaatcaatctcagtcaatagtaatctaatagctaaaattataaccattataattagagttttgacgtaatcattaagtaattatagtttaatattcataaagcatatagatagcaattatatggtggtctcattgagtgggttaagcagttgaatttattcttaaaatcacactaaatataacatttatctaagaactaaaaccctatcataccctatcatagaatataaagtatcaaacttaaatagaatctgttctctttacttttt

SEQ ID NO: 348775 - DNA, 840 bp, Cannabis indica
agggcataaaacccaacagcagtctcaatggtagctgctaaacaaccaggggacttgaaggaaattgcagagagcagcaacaacacgtttcatttgctgcaacaaaccgagagcatggtagaacatcaggtatctactgaacacaatgtgattatttttcctgatggagttaatggataacaataatatagggtgttggaatgtgagggggttggataaaatggagaagcagaatactgtctttgatttgtgttgcatgaataagtaaggagtttgtggtttgttggagactaagctcaagaataataaagttagtgagatgatggctagaaagttcactaactgggattactatactagcacgactgttgaaagtagaatcttggtgatttggaggagaaactttactcgagttattgttgttagagaagacccgcagtttattcattgttatgtgaagatgggaggctatactgaagcaatgaacatcacttttgtatatggctttaatacaggagaggagagaaaaggtctttgggagggaataatcaatcttaaggtcacttctatgccttggttaattacaggggactttaattctttgtttgacttggaggataggaagggaggcaaggaagtcactttgaatgatctaaaagactccactgagtggctggctcaaagtcatatggacagactccttaagactggttcgggttatacttggactaataatcaagatggggacaaaaggatctattctaaaattgatcacacctttgtgaatgaggagtggacagacaactttcctaagacaaaagctcactatagctgggagac

SEQ ID NO: 348776 - DNA, 781 bp, Cannabis indica
ccattgcgaatggtgtttgtccgattgccattttttccgttgtacggtatggccatagaacttcaggaagctcttctggccaatttcctttggcgtcttcaagtttttctttagtgtatctttcaaggttttgttgattgcctaaacttgactgttttccttaggatgcgccagtgctgagaaacttttgataataccatggtttgcacagaaatcagtgaacgattggctgtcgaactgcttgccattgtctgagactattttgtacggtagtccgaaccggcatatgatgttcttcacaataaagtattgaacgttctttgatgtaatggttgtaagtggttcggcttcagtccatttattaaagtaatcaaccgctaccactgcatactgcaccccacctttacctttaggtaattgtccgatcaggtcaattccccaaatagcaaagggacacagactttgtatctgtgttaactcgttgggtggagctcttggtatctttgaaaatctctcgcatttgtcgcgcttcttaacataggctctcgattcttcgatcatcattggctagaagtaagcatgccttagaattttcttggataagctttgtccggcggcatgatttccacagaacccatcatgaacttcagaatggagtcgtacagcttcgtcttgagtgacacatgtgagcaatggcatcgagaatcctcttctgtacatgactccctctactatgatttaccgtgcagctttccttctcattttccgagcttcattttgg

SEQ ID NO: 348777 - DNA, 557 bp, Cannabis indica
ttcatttttttttaaaaaaaacacgataagaagagaaaattcgaattaaggtacaacatgttacgtataagtctgtttattatttgttgtggttgccttatagttgcattatcgttttatatagtttaaatattatgcaggttttttagttgatgggaaccaacaaataacagttatacatggtaagttttatgcaaatagttgcatattagttttacaatggttggaaaaatgatctgattcaaataaaactgatgaaaaacacagggttcacaattagtaagaactgatctaaaataacgaaaagattaggaattcccaatcaatccaaatcatgtataaccaatacatataacttacattcagttgcatagtcgtttttttttttataatttcaaaataaaatcaagcaacaactatgttaattggagttaagttccatgttttgtcaagttgatttacagttgcatcatcatttcataatagttttattcaattttgcaggaattaattttggacagtagaaaaagagaaaacacttggacaaatggttagtt

SEQ ID NO: 348778 - DNA, 650 bp, Cannabis indica
taaaggatacttgttcttaatggtaagcttgttcaactcccggtaatcaatacacattcgcagggttccgtctttcttcttcacaaacaaaaccggggcaccccaaggtgagtagctcggtctgatgaatctcagattcaataactcttgcaattgtatcttcaattccttcaactcagctggagcaatttggtatggtgccttagatactggatccactcccggaaccaattcaataacaaattcaatctcctaggtaggtggcaatcccggcaagtcttcaggaaatacatcaaggaactcgcatatcaatctcgtatgttcaggccctgatgtcacatgttggctggtatccactgcattgactatgaaccccagacagcctctacccatcaggtccttagctttcaacagtgatattctcggtatgtgtgccccctgaaccttacccacaaacaccgttgggttagcactattgggctcaaatactaccatcttccgtttacagtcaatcgtcactccatacttagacaaaaaatccattcccaggattatgtcaaaatcagataattgtaactcaattagattggcggtcaactcacaaccgtcaatccaaaaagataaagaccgaatccaccttgtggacacta

SEQ ID NO: 348779 - DNA, 1069 bp, Cannabis indica
cccttttatttaaaaaataattttaaaaattataatattctattttttggaaattataatattctattaattttgaaaaaataataaaaaaatattaaaaaaaacctgacaaaaatattaaattaattaaaaaatattaattttacttaaaaaaaattatattattcttaaaaaatatttttaaactttattttatttataaatacgtatcttaaatcaaacaaaaattattgacaatcttaataaattatttaaataaactaagattttttgaagaataaaaaatcaaacttatttatatttataaattcatatacttaataaataaagaaaaataattaaaaattcaataaaaatataaaattattttgaaaaaaaaaactataaattaaactaaaaaaaatgtcatgtttacttaaacaaacctacatttttttgagaaaaataaaatatattcaagtttattcccataaaaataaagcgaattgtatgattaagttggaccttcagaaagcctatgataccatttagtgggatttcatagaagagatgctctatggattctatttcccaccaatattcatcaacctggtaatgacttgtgtcagaactcctcgatgctcattgatgataaatggatcattacatgattttttcgaagctacgcgaggattgaggcagggagatccaatgtcaccacttttatttgttctgggaatggaatacctttccaaaatcatgaggaagattgggaagaagtcagactttattttccatgagagatgtggaggtcttgaactgaaccatctaagctttgccaatgacgtcttattattttgcaatggtgacttcaagagtttttattacatgttgcagggactaaagctcttctccaatacctcaagtttggttcctaacccttctaaatcaacggtatactgcagcaacatgtcagaggaagaagttcaaagggttctagatgcctcaggttttcaaaagcagagcttgcctttcaaatacttgggtgtgcctatttgtgcaaaaaggatatcttcagcagagtgcaagc

SEQ ID NO: 348780 - DNA, 982 bp, Cannabis indica
cacgagtcaatcttattagattggtgatatagttctagggcttttttctcttataaaaattttttgtccctttttcagtataaactgtcctatttataactacatagtagggcagttaattacatatttgactgatattttacaaccataatccccttaaattgtgggatttgatcacatcccacgtaaaataaatgccattaaatatttgaaattcacacagctgtgattggtctgcttttactgggtcaatgtaaacgcgtattaaatacgttacaaattgtatcgttctgggacgtctcgttgggaacatagcaacaataactctagtagcgagctagagcttttcccacatcttttcaaggttgataatgtaaatctcttcacttctgcgctgaagacatacgctccatctgacaattgcagtttttggtgacaaggtgagcttcaacagtcaacataacgctccatctcagagaattaactcgacgagatgtgaatctcattgaaagatgtctggagctgattagtgaaggtaccacgagcgtgccttcctatagcgagatggacgcctcgctattagttgtttggatttacccgactgctatacttagtttgtatattgtgtattatacgctaagtgtcctaatagtcattatatcttgcctacgtttcttcatgcgtaacgagattgatgcctcgccttgcacatccaatgtcgtatagtttctcgttgatgtacgaggtaacagtttgtacatctttatctcgtgtaagaccttatagttagcaagttataaatatactctgtcaattccgcatttaatgagttattctattttcaaatataattttcattatatttgttgattcgtattcttcctaatttgactcatatcctcatctaaagtacttgtcgaatttcgggtataacagaaagaatgtaagaaattaattatcgaaatcaaatatatattttttt

SEQ ID NO: 348781 - DNA, 617 bp, Cannabis indica
cacacaatcccaataccttttttttaattaaatgagagatattattatttcaacaaggttgcaacaactttatatttatctctttttttttcaagttgttgctaatcaatttttttttatatatattctctcaattttcacactttttttcacacacatacaacaaacttcccatccaaattcctcaaaactaaagatctacttatggtatgattatgtttgaaatttttgatatgtatgggtttatctttttaggctcaatatgtgtagaaacaaaaaaaacaggttaaggcttaaaaatggccactaggataaaattatatggatggcttgaaaggcacaatcgatccaagaattgcctaaatcacttttctagtaacgcataatttattatttcgcctcaaatagcaagcaagcaagttcaagaatttatttcaaacaactctccatatttcacaattagcatacataaatcaattcaattactagaaaattacttaatatgattccatgttctttcaagtataaaatttaaattagtcaagaatgtaatatcaccaagcacacggatttttaaaaaaatatataaactttcaaatcatgctgcctacctactt

SEQ ID NO: 348782 - DNA, 636 bp, Cannabis indica
tgcgaaataccattaaatttacaaaactgatcacatatagtattttcaaattcttttcaacgatcactcctaatccgaacaattttaccaatgttacaatctttttcaactcttaatttcaaacacaagggttgaaaagcctcaaaagtatcagatttttctctcaaaaaatacacccatgaaaatcgagaaaaatcatcaacacacacaaaaatatacctcttaccattcaagctttcaacctggattggatccattaagtccatatgtaggagttcgagaaccctggaagtattcacatcaggaacactcttgtggaaaaattttcagttgcttaccaagctgacatggtccacattttcccaaagactccttacctaatttaggtaatcctcgaacaattcctgcattagacaatctccttagatttttaaaatgaatatgaccaagtttttcatgccataaatcagtaatattatcaatgacaaaatgacaagtagcatatgtagtgagagtataacaattgtcactagatctgagcccttgaaagacaatttcatcaagaatattatacacataacaatgattactatcaaagctcatagtataaccctgatcacaaatctgactaatgct

SEQ ID NO: 348783 - DNA, 1112 bp, Cannabis indica
aatcaaattttcaaatgtctaaacgttgttgattaactcgtgaaagttaaatgtcaacttgttcatgacataatttgatgtaaatggcagaaaagatggagttaaactatttaagatcaaggtcacttgagttttctgatctataatagctccatgattcttagcttatgggaaataactagccatttggagaatgtgatcatgcacattctgatgaggtttcatccgtgcattgataaaatttttggtcgcctcaaaacgagcttcatctgacgccatcccaaatagttcagttaactggttaatgatttctgcggctgtgagagtgttggcgaaccttgttttcaaggtatgaaccacgctagacaacataaagtatcaagctttatttttagaattctaccaacgctcaaacttttccttaactgcctttttctcattctcacctggttgctcaggagcttcttcaattaacagacatagggagtttttacctatgagagcaatatcaatattctctttccatttgacaaagttagctccaaagagcttgttgtcagccaacagtgacacaattgagttgttcatagtcatattaaaagtacaattattaataaatagaaatcaaataagggttaatacaaaatcacacatttagaaattattaagcattaagcaagtaggagtgacatgtgaaaataaaaaaacaaacaatcttaaatgatttccaaggtttccaaccatcttatacagtgttccgtttaggtgagagtcaaagataacattcattgaatagaacagtcagcttatctaaaatggccaccattttagcaaccttttattcgatcaagatgagaatccaacgttgtcccgtttaggcaagagttaaggtcattctatcttatgagcttccaccattatttcatactttgcaagccctactcttagcagtctctattgtggttatcgttactaagaataaaagatttacaataatacttatatctcgagattctacgacgtaaattttgctaatgaatgaacatgtattagggatgaatctcgctaaaatcaaaactatgtagaaccaacgatggagatcgaatatcctt

SEQ ID NO: 348784 - DNA, 912 bp, Cannabis indica
gacaagcttctcacccttggccagtattaccaggataatcatttgatcaacaacaaaataccaattctgaaacacatcactccagtttagtatcagtcacgaataaccccttacccacgattaggattgctactacttcacctgactttgttttgtccacaaggaatgttcagaataatgccactattaatttgtcaactacaacaaatgttatgttcgcaccagcattgctaaataatcctaccaaccattcgactggaatgttgtccactaatatggcctcaccaatctcagcatcacactgtcccacaccagcaacggaaattccagattttgatgacttgactgaaatttatatgccaaatattggtataaaaaacaataccattgcaacctactcgcccatgcctcccattgttaatgctcctccaagtgggattggctcccaacacgcaacattgaggtaaatcacaactactgatgctgtcattaacacaacattgcagcaaacaattgatacagaaaattgtcctccaaatggacagccaaaaagacttcctgagaacacctcgatcaggaaaatactcaaaagatgtaggggtccacaacactcagaatcatctccaactttgtctactggacaggaaacaaactagaacacttccaattctgaaatggatcaatctggttttttggacaaatctgcggtggctaagactcagccccgcaatcaatcatgaaaatcgtcagttggaatgcgcggggtctggggaatccgagcgcgttccatcatcttcgattgcttgtcaaggagcaatctcctcatgtattatttattatggaaactaaacaatgtcctaatgtaatttctcattttagacaagctttaaattttaataatggacttgaagt

SEQ ID NO: 348785 - DNA, 557 bp, Cannabis indica
ggttccttacgcagagacgtttttaaaattgcacaaaacgaaaaaaaacagtcgctctacctcgaccttctggaagaaaagcgcgatcaggctcacctgaaaaaaacaggacttaccagcgacgaaccgcaagatatttcaattccaaggtcaagacaagagtcctgcgagtaggagacttagtccttcgaagggtaatgccaaatacaaagaacccaacgcatggggtcttcggggataattgggaaggaccgtatctcatcgcagaaaagattggtgacgccacgtaccgactcgcagaactcgatggtactgcaattcgacgggcttggaatggggagagcctaaaattatattatcagtagtactcgcattttctagtttgtactcgccatatatttatacttggggtatatataccattatgtactattgattatttatgaaaactatggaagttttttaaatttgaaatgtttcatgtttctggaatattctactttaatacttattgcaccaagttgtaattaaagtcgcaaatcaaaatattattaatg

SEQ ID NO: 348786 - DNA, 643 bp, Cannabis indica
gagcagatggttggttagtactttgattgggtgagcatgaaagtacggtcttaactttcttgaggctattaggaggcaaaaaactagcttttcgatcatcgggtatcgtgtctccacccctatcatgcgtttgctaacatagtacacagtgtgctgatttttttctcttcccgtactaaggccgcgctaatcgcattctcggagacgaccaagtatagaaacaagtcttctccgaggatagcttttgataggattggaggtttagccatgtgttcttttagttttttgaatgcctcctcgcattcgtcggaccattcaaatttttggcatttcttcaggatgttgaagagggaatgcacgataaaccggctcagggcgacaaccttttcggttaatctttgtacatctttgtgcttctagggataagtcatattcaggagagcttggattttttttgggtttgcctcaatccctcgttggctgacaataaatcctaaaaacttccctgatttgaccccaaaagtgcacttcttttggttaagcttcattccgtatatctgaaccacttgaaagaattcttcgaggtcatctgcatggcttgcacatgcctttgacttgaaaaacatgtcgtccacgtacacct

SEQ ID NO: 348787 - DNA, 562 bp, Cannabis indica
gcggccaattctaaatcatgagtcgggtactgctgttcataatcttttaacttacgggaggcataggcaataacccgatcagcctgcaccagtacacaccccagaccccgtctggatgcatcacagtaaaccacgaacttctctttattagaagatagggctaacactagagctctgattaatctctgtttcagctcctaaaagcttgctttgcacttatccgtccacataaaatgatgattctttttagtgagttcggttaagggtgttgaaatcttagagaacccttctacgaactgacgataataactagccagacttaaaaagttctaacttctgtcactattttcagtcccgaccaattcctgagggattctatcttccctagatctaccttgatcccatctttgctaataatgtgcccaaggaaggacacctgagatagccaaaatttgcactttttgaacttggcatataacttatgttcccgaagtcgttgcagaaccatctggagatgttgctcatgctcctcctctaattgagagtacacaaggatgtcgtc

SEQ ID NO: 348788 - DNA, 974 bp, Cannabis indica
ctctctggtagacttagagacttgagataggtttttacacttctccaaaatcactacaacaccccagagtaatcaccatccttatcagcagactttctagcactaaggcaagtttagaaacctgatttggtgtagtctaagagtattaaataccagccttatcgactaacatatagttcctcttcttgatcttaagatttacttgattgtcttccaatgttcttttcctggattaatctgatactgtaaagaccacttagcttaattagaaaaattatcacataattagggcttaattatgaaaattatttattaattttgaattatttatttatgatgatttatttgaattcataatgcatttttatgtcacatatagaaatttcataattttgcatggtttgtgcccgacaacattggaatgcggtgtttggctattggaatcacatcttagtattttttttagtatagcgggaaaataatttagacattgggaatgtcgggaatagtcgggattttagaatttcccaaaatacccctaagtgagtttatgttggttttgtatgggcaagggcatttcggtctttttgcccatttgtgttttgtcctttagtggacttagtttatttaataaaatgattttttattatgagatataggccgatattaatatgttattaacacctcatttatctttttttttatataaaaaatagaaaatttggaaaaaatcaagagaaaagcctttctcgctcaaactctctctttctctctttcggccccctagagcagctagagtttgggtgtgattttctgaatttcaagcaagtttctttaaggattatgtgttcttaagctctaggtaaattcttgactttatcctcttaagtttcttgagttttaaggaattgaattcatgcatgtctttgttattttggttgctgttcttgctgctggtgttgagttatgttttt

SEQ ID NO: 348789 - DNA, 647 bp, Cannabis indica
ttcgagtcccaggtaaaacatgatgtaatatataaacgcttgaatacaaaaaaaaaatactccaaggaaaacaagtttcctttataactttgataactatttttgaatcactttctattatttcgaattgatactatttagttgtcgtcgtttcaacaacaaacaagcaagccaatcgttacttatctaaagagaggattagaaaattgtagccgcctagtagctgctactaggggtgcacattgggtgagttttattgggtttcgagttttgaagtttgggtgtatagaattagtaaaccgacctcgtccgtttgtgtgatcgggtttttggatttcgggtgcgagtgggttgtgcttgggttgaaccaggtccgagtgggttttgattgggttcgggatgggctaaccttttttttttggaaaagtgtcacttttttatacattttttcataaaaaaaaccaaaaaaataaaaagaaagaaaatagaagaagaataaaataaaaatgatgtatcattctgtaacgtccccgcttcaaacctccattgggcccttacacccacggactaatggctcttatacacgggtacgccactctggctacttcatggactgacgactgactctacagaccaacacgagtgtt

SEQ ID NO: 348790 - DNA, 1223 bp, Cannabis indica
ctatgatatcacccaaacatatatatcataaacatatcatgcatatatatcacacatacatacattcagatatatatatatcatatgttctacgctattcttacctcgtttctgaattcaagtgtgttggctaatctgaacgaaaaaccttgtacgggatggaaaccctaatcacataatataactgggtaaacgatgcgccgaaaccctaatctgggaaacctaaacctccaactaaaagttttgttatagacaactaaaactacaataccctaagcaacaaggaatcacccaactcaagctctgaaatggacatgaatcgacgaaatggatttttcaggaaacttgtcccagaaccgattacctagttttataggacctggcaaatcagttaaccgatttgcaccaggttttcccaaacaatccaaaacatacacaaaatgtgtccgaacctcaccaaaatttctagaacgcctattaaaacatcaaccaatataatccaagcaatagaactcagaaaaacatccaaaatcaaaacatgccatcaatgatccaagtttgaattttaaaactcaaacttggtcattgaccacaacacacaaaaaaaatcaatgtccgaaactcatctctaacccaaaataaacttagaaactcaattacaaatcaacgtaaccctaacagccaccaatttataaaattacacactaaaagcaagcttacaatacaagaaatcttaaaataaagatgattagggttacctcaagctaatactaaatctaacaccttgaaagaggtacatgaatcctattgaaatgaagaattcagcagcaatccttcttgaatcaagcttggttcgaagagagaaggaaaaagagagagaatttgttaattttctttaattaatttctttttctgtaattaattcattgtaaatcttaggctgaaaaagaattgtctaggtgtcagtcaacccaccagccacctaaccctcccttgccaaattaccaaaatgcccatggtgcttaaacttaagctaattaaagtctagggttaaaattatcaaaaaccataaccccgttcaaactcagtattctatttatctcaaatggccatcaatcgcattttctgtcgtcgctgatcaaaattcataaaaataacataattcacatataacacaaataatacatatagagtttgataaaatctccgaaattgagaaatta

SEQ ID NO: 348791 - DNA, 552 bp, Cannabis indica
cacctagggaggtaatcatctacattgatcaattcttaataagttcatatgatcaatcaagctaatcttatctataagactaagagagtggtgtgagagagtgaatttacaaaagaggaagggcttaagatcatttattatatctgagaccaaacatcaagactcaattaccataaacaaacacaagatgaaccaaagttaaaaactgaataaaaaactagcacaccaaggattttaagtggttgcactacaggcttttcaacaatgatttagttcactctaaaaacagttatgaaagccacataggctttgataatctttattaaatctctgtaataaaaaagaacattaaaatcaaaacacttaggtggcatttgattgggagaaatgaaaatatagaaataagaatgagaatgggaataggaatgaaatggaataaaatttataatgcataacaaaattgataaaaagatcattaatttttttcttattacattagaatggtctttttttttttttaattggtaatagtcattccaccaaaatagtgga

SEQ ID NO: 348792 - DNA, 530 bp, Cannabis indica
aaggaagagttagtacaggagcggtaaataagcattgctttaactccaggaaacttttctcacaccgatctgtccaaacaaacttcaggttctttcgggtcagccccgttaagggtacaacaatctttaaaaaaccctcaacaaacggccaataatacccagctaatcccagaaagctcctaacttcagtaactgattttggtgttggccagtcccgaacaacttcaattttagccggatccaccatgatcccatctttatctattatgtgccccaagaaagagacacaagataaccagaattcaccaagatgtcatcgacaaacacgatcacacatctgattaagtaatcttggaacattcatataattcatatcaaatataatatgcaaccttggctcgtcattcaccctaatggcaatattgcattttgaatattctagatatgatttgaaagaggatcctttaccttgagggccacctcaatttccctgaagctttctaatactccttgatgctccggaagcctca

SEQ ID NO: 348793 - DNA, 622 bp, Cannabis indica
tgtgagaggttttggccatctcctgagactgaaagcagttgggggtaaaagagcacctgccacaacttctcctgcctcacggactgttactatagaacaatatgatgccttacagaagaaagtggaggaggcacaacaagttagtcagtattcgaggcaacagtatgaaacacaacaaagtctacctcaagcgattcgcagatcagtttgagtatctctctcagactgtgcctgatttcaacttgcctcagatggatcttccgccattccccactcctcccagtgctagatcgtcatcgcatctacccgagactcaaaacaataacgacaatgatattacccgtctttagaacaatatatattttataattaactttagagcattactttttttttcgaacatcttttattattttgtttatttactattaacaatttttattacttactaattttataactaatcgaacatgtttgtatgttagttcgatcgaaatactttttaattatcaatgtaaatatatatttttttaattataattcttttaaaattaattttattatattattattataaattatcaaaatatattttaaaaaaagctttgccggtgcatttttt

SEQ ID NO: 348794 - DNA, 794 bp, Cannabis indica
taactgcaaaaccacgtaaaaaaccctgtgttcatacttttacttttatatctcttatgttttctgtgtgaaattgttactgcgaggctcaaattttgttagcgaaaatctacgttaacagtttggtgctttcattgagagcctctgtgaagaagctcagaaaaaccttctcttcttttaaagaaaaactaccttcttcatggctgaaaatccagaaaatgttaataccccacatgaggaaactaaccatcattttgggaaagagcccatgggctccaaaagctctaccaacccgcgatccagacgaaccacccgttctaggaggactcaacctgagggtggccccaacacacagaccacacattcctagaggacccaacccagcgttgttcttagtacgcggacaacacactcgaggagaactcagtgtgggagtggccataaccctgggacaagggatgaagagctcaatcgtggaggtgcccagtctattggagaaggtacttatgaaatgaaaaaccgctgcctaagacgccatctggaagaggcacaacgtcagaacgctgaattagagcgtgatgcagcctcggccatggtggcacaggggaagaatgctcaaaatcaacttgaacctggagtgagaagactacgaggcaggcctcgtggctcacgaaccaggagactagaaaatgccccggaagaacaacctagggaaaatgagataccccctgaaaattagaatgaacagccagatgagaggcaaccagaaactaatgaacaagaaattcctcatg

SEQ ID NO: 348795 - DNA, 1088 bp, Cannabis indica
tttatagtatttttttttttaatttttgaactattttataatatttgctatgctatatatataaatggggcttttttattttactttaaaataatatttttttttttgtatttttacggaattctacatagaaacccctattgcaactagcgctgcaacctaaattgcaaccaaaaatcgtacaaaaacccttattgcaactagcgctgcaaccactttagaaacctaaatcgtaaatttgaaaaaaaagaagtttaaaaaatagtatatggaataattctcctatataaatttaattttcaaaactcatatttaatctttagataaattgcttactaaaaatcatttatcaagaaactagttttttattaagaaattagtttctttattaggaaactggttttgattatatagaaataaaattcaatacgagtttttaagctttttacctattcggcgacgatcggtcagagcaaaactcaccaaagatcatacatcaaaaaattagtttcttcatcaggaaattgattttgattatataggagtaaaacttatatacaattttttaaagttttttatgatattccttcttgtctatgatgatttatcttatatatatttaaaaaagaataattagcatattttcctcctgaactttcggcactacttagttttgccccttaaaatatacggcttgttaaaaattctccctaaaatataaaatttacataattatgccccttctgttaggttttgttatctttaccgttaaaaattagcatttttactccctaaactttgattaatatgaaattttgcctcttttatttaaaaactaattttaaaaattataatattctattaatttgaaaaaacaataaaaattattttaaaaacctgacaaaaatattaattttacttaaaaaaattatattattcttaataaatatttttaaactttattttatttataaacacgtatcttaaaaaatcaaacaaaaattattgacaatctaataaattatttaaataaactaagattttttttaagaataaaaacttatttatatttataaattcatatctta

SEQ ID NO: 348796 - DNA, 504 bp, Cannabis indica
atgagtctaggagccatctgaaaaaaaaaaataacaaatcaatattactgccaaaaaattaaaaaatggtcgacaaaatatcgacatgatgtcgatattatgttgacatcatcaaacaaccaatataaattaaaacatgtcgacaacatatcgacatcctgtcgatattcaatcgacaatttcaagaggacaacaatttcacaacatgtcgacataatatcgacatcctgacgatatgcactcgataatacacttaaaagcaacatcctaatcttgtcgacaacacatcgacatactgtcgacaagctgtcgacaattaagggcaaaaaataagctaaaccctcaatcgacatcctatcgacatacacacgatattctatcgacatacaataacagcaatacaatgcaaacagacacaaattctatcgacatcctatcgacatacaataattgcaatacaatgtaaacaaacaccaattctattgacatcctatcgatattcta

SEQ ID NO: 348797 - DNA, 1123 bp, Cannabis indica
gaatagatgcagaaaatgtattcaattttatcataataactctaaatcgaattatttattaacttttattttgacataaaatcagttcagggtactattattatacaattttaaaaaccacagaatctaatatgatatttgttgaccaaaattttcggtaaccaattaaatgaaagaatgagaagagctatggaatctttaatgcatgtgatttttacgtagttcgggcattaatgagccgtagtccacgagtctttgttatttatgagagtgtttatacagagaatgttcttggtgaatctctctctctcttctttactccattcgatttcttaattcatcgatcccccctttttatgttctatgtttgggggtttttatagtgtatttcgagaaagtccctagaaagggatcactcgtctttaagtgttagccccttgggggcacaaattcctagcaaatacaaaataggagatacgtgacctatgccctatgtatcttagggattaggtgaatataatcttttatatccttccttgattgatgtgagtcttcataatgaagccgtcactagacttgtcgattatcgtgtaatcgccgtaaaagagacttgcgccatctgtcaaattctcttatggaggttctgatatgtttcccccatgtaggattaaatgcaaaatgactgctcgaacgatctccttttctctcagagatgcattgttacatttccagctcccggagagtaaaggcgtgctttatgcttctctccgggaggctcactccatgagatgcactgctctgtctatgacttaaccaatttctgtgagtgggtgttctttcagatctacgtgtcgcaggcagccgctgccacgtatttcgggaaaaatctgaggcaacaatattaatactatttttttttttgaagaaacgtaatcagaaactttattaaccttcaaactctactacaaaataagatagcaaatcagttgggacatcctcatactgaaaatacgagcaggataaaaactagaagatcttgcgaaaacgtgagctactgagtttgcttaatgttttacaaaataaatcaaaacattattcaagtccataagtaaatccttacaat

SEQ ID NO: 348798 - DNA, 801 bp, Cannabis indica
tttaatttaaatttttttatattttataagtgtagtacattataaacatatttttatatataaatatatataaaaattacattctgtaaatattttaattttaaaaataacttctttttaaaaaattataacctcttaatgaaaaaacatcttttatccatgaaagagtttttcctataagccaaaaataatatataaaaaaaaaatataaaaatacacattttatggttttaaactgtgtaaaaatatggatttttaaaaaaaaaaatatatattcatggaaaaaaatcaagaaaaaagtcaaaatatacgcgaaaaaaatacagtataccttaattaaatattgtgtttggctctgtttggcttagcttctataagttcttttttagcttttaaaattaaaaaattcattttaagtgtgttcggataaaaactaaaaaattcttttggaagaaactaagatttgtagcttctttcaaaatgacttttgagaagctatttttaaaagtaaaatactttacataattcttaatttactcacaaaagatatttttcaatgatattcaaacacttttgtggtataattccttcaaatgaaaagtctctaaaaaactattcttgctatggaaagttagatgacattcgaaagggaacgagacagtagaagactataggagtagaggcaagagtggcttggttctcaaaattgattttgagaaagcttatgaccgagtggaatgggacttcttagatctggtcttgtgtaaaagggttttggggaaacatggaggaaatggatta

SEQ ID NO: 348799 - DNA, 523 bp, Cannabis indica
acaaaaaaaacaaaaaaataaaactctattaccacacaatatataatgaaaaagataatgttaaatagcgatagtaaactaatccatatttaatataagaacttaaacttgaaatacttatttgtcaaaagaggaaaagtcgttgaaatagaaatcatgagcacaaacttctcttgccaactgaccaaaccacaaaactactctaaacaactagggacaagccataaaaatggcacaaaagccataaaaggcacaaaagtcgtaaaaggtatcaaaactattaaaaaatagtgcaaaaatgttgggctttgtgccttaaataaaactccatttcaatgtaatctttattattcaattatcaataaagagacagaagtaggggtgttcataaaatagccgatccaatccaatctgcacgatccaatccaatccaatccgcaaagtgcggatatccgcacttgtgcggattggattggattggaaaattcaaaatccgcacttgtgcggattggatgttgattga

SEQ ID NO: 348800 - DNA, 609 bp, Cannabis indica
agaataattcttccacccttagaataaccaccatctccaatagtttctgagttggtgtagataaaaggattctaacatacacccctatcatctgacatatatgtcactttcataattcttccttgattatctctcaatgttccttgtttgattacatcttagatggctcccactcaacagtaggagtctggttaatttcgtacacaagtgtgcatttaacctcttactattggtgcttaggctatgtttgttaggaaggatggagaatagggaggatggagagttggtggaggatgtagaataagagggagggagaggagagtagcaatccttttaaattgtttggtggaagtctggaagggatgaaatgatagaaggatagagagtatttatttatgaaattattatattatccttaaatgtaactttttaataatatatttgagggtatatttgtaattttaaataattaaagaggaagagtgtgaatccttccatttatggaagaattttaaattaaggatttgacaagatttactctccatccaactatcccttccctcccccaatcccgcttaccaaacaagtggatttgttgtctcttcccat

SEQ ID NO: 348801 - DNA, 501 bp, Cannabis indica
gacacatacatatagtagatgaggattaagttcatggaataaagaattttaccaacattatagagttgtgtaattaatttgtttattgttttgtattttttagagagagaacgttatagatttacattaattaattaatttataaaacaattaaacccacatctatctaaaaattttaatttcttaaagaaaaaaaaaatctataacgttctctctcataaccaattaagaatatatatctctcaaaactcattacacattcattgttgagaattgggttatattattatgtgaactttacatatttatacttaagaaaagtaattataaatatgttagtgaaaaaataatatacccaaattctaaaatttattattatatatgactaaatttagctattaggttaaataaaatattaaacactctaaaagtacgtactttccttatatatatatatatatatctttatatattaaaagtgcctatctaacggcatttctt

SEQ ID NO: 348802 - DNA, 713 bp, Cannabis indica
tttgggtacaatacatataaaaagtggtatgtttcatttaaatataagattagaggtaaatttaatcaattgattaataaaagtggtatttttcaacttacaccaataaagtatcaccttgatagttttatttaggcccaataagtattgggatcattcaattaataacaattatctaatgaaagttaaattcttctcttttaggccttgtgtgagagttatgaggccaatagtagtaggtaggacatactagatccagccctccctcacataaataactctaattgtgaaggtccatttgccttaggtaaataattgaattaagttaattatattagtttaacctaattaaaattgattagcaacataatttattttgaaacaaatgaaattaatttttcattagactatttgaaaattaatttagaaaaagacatttagtttaaggaaaaaaattctagatagtaatttttagtaactaatttatattttttaatatttaattaagtagaaaaatatatttaagttgaatattaaattttaaaataacttaaattagaatatttttcttagaacttaaattagaattaataataaaattaattttattcaagatacttaattatttatttctatttcaagaaatttaattaaatagaaaatatatttaagttgaaaattaatttgttaattaattttagaccaacttaatt

SEQ ID NO: 348803 - DNA, 444 bp, Cannabis indica
gcataaaacccaacaataagatcatagcatctctttctggtttctctctctaaaaattagagattctagacttagccatttttttgtgatccatctcatgagattaaaaactcgaagttgatatagctccattactgttacaacactgggagtgaactactataaattgttgtctctccatttatacttaacatttctcgccaatctagctagcaagtgtggcttaggaatcttttttccagatttttgagtcaacattttgtcttgcaattttaactagaaagtgtgaaggaagcaatgacttatgaagaatgcaatgcaagaagaactgaattagtatgttcgcaacaaggtttggattttgtttcaaagaccaaaaggtattaatgagattgggacaaaatagtttgttaaaaataaaagtgatgagtttggtacaattgt

SEQ ID NO: 348804 - DNA, 522 bp, Cannabis indica
gagcgacgtaatcctcgcagccgaccatcaagagaaaatgacgtagaattcgcctctccatcctcgcatggtcgtccacctagcaggtatacaaggtccggctctgtagagacgcagcagggaggacgttatcaggtacatagaggcgatctgcgtgatcacctcaatgcagttttcagagcgcgttctgccccccccccccccccccgccaaccgaggaaacaccccgtgggcgatcaaggtgtaaacactcacactaacccgcctagtgcaccggcagcgactactgtggtcaatatcccagcaaacctcgccgcagtagtcaagactcctacagtcgtagtagtcccgacttctgtagatggaggaattgaccaaagcatgcttttgcaagctttgaaaatgctcgagcagcagagaaagcccaaatacaagctgcatgggacctcacctttcactacggaagtgcgacaagctcaacttcccaagggatttctgttgggaattattttaccaggatct

SEQ ID NO: 348805 - DNA, 575 bp, Cannabis indica
gtacaattgtgagaaataaggcttagttggtggcacaatgctacacacaggtagaaggtattgactttgatgaacttgttgcttcagtagcaagattagaatctattcgtttgcctttgtgtatttcttgttttcttgatatcaaattatttcaaatggatgttaaatctgcctttttgaatggcattttgagtgaggaagtgtgtaacgccctaactactaggcgcgttacccatgatacttaagaaaccctaatcccctaaatgggattactaataaaattagcacagaaattaaactttaataacaaatggaatgaaaataaatttgtattaatttaaactttacaaactaaaagttacatgtgtcgggatcacaaaaatattttacaaaacactattacaagtcttttttcattggctgacctaagcgacaaaccagagtcacaaaatgcatcaatgatagaccccaacccgcttggtctagtgtggcccgaacatgtacatacaccatctagctcccatactcatggctaatctgaaacgaatttaccctttcctgcacagtagagcacc

SEQ ID NO: 348806 - DNA, 502 bp, Cannabis indica
aagacccaggacgcgaacccacacccggagcttgatctggacctaaactgaaatcctgacccgaacccaaatttagactcggactcaaactccgacccgaactctgacccaaactcgaactaagaatggcaaatggaactagaaccaaactaggactaggactaggaccaggaccaggacctgaacccaaacccgaacccagatcaaaacccaaacaaagacctaaactcgaaccgagactagcactcgaactcaaacctagaccgagaccgaaacccacacaataaccgggacctagatctagaatcatgatagggacctgggaaatagaactaggaccgtgacatagaacccaacccagaattgaacttgaacctaggaccgagatcgtgaccaggcacaagaaatagaacatgattgggacccgagattgggatccagattttgacccagggcttggacaaaacctgtagtcggtatctggatttgggacccaaccctg

SEQ ID NO: 348807 - DNA, 1019 bp, Cannabis indica
tgaaacatagatgacattaacatatattgtagttaataaaaacaaaaaaaaaaaaaaaaaaaaataaaaagaaaaaaaaaatgacaaatggataaagatctagtaacaatatctagcatattatatattatgaatcattaaatttctgcagatttaagcatatataatgtaaacataaatatataagaatggatagaataatttttcaaatgtattatttttatatttgataagtactatgaattttaaaattatctattgatgaacgattttatagtttaaaagtttttaactaattaatttttttttcttaaaaaaaaatttgtaacaatcaaatcaatttttttagtagtggagtaaaagtaattatttttgttattttactaaaatgtaaatatttattggggtgtagttattattattttatggtgtgtaattataactctccatatatatatatggaatgaggagaaaatagaaagaatgtataaaaaatgacttccatgtcattaggtaatagtgaaataagaaatattaaatttaaaaatttaattaatagttataaatatcaaccattagatttgatccaatgattaattatagaatacccattcataggtaatacccattaagagtatacccatatatatatacatatatacgcaagtgcacacaatcgacaacaagtaatataatgataagttgagtatagcctctgtaatatctcgataagcctaatggtaaatatttagggtttatatttatattatgggttaatcaggtaataagtgggattatgatcctactagtctatttcagcataaaatttaaatttttctataagtgagtaaatacgcgtaatttataaattatggagatttatatagcaagtgtgaatgtaatatgagctatatgtggaataaaatattttcaggttcggcgaacctgaagatccgataagtggataaataagcgtaatttgttaattacagagatttttgaaatacgttgatataata

SEQ ID NO: 348808 - DNA, 576 bp, Cannabis indica
aaaaaagaaaaaaaaaaagagaataaaaatatatatacatattattatatacatactataattacatatatataactttcaacttcctaccattactaatagttttgctgtggtgtggtattttttattgcaggtgcaagacatggaatgacagaaaatagactgttgcagtatggtgagaagcagatttgtgtgctgaagcagtaagtcccagttgttacagcattgcatcagcctcgttttagcattttgaagcagggactctagttgggaagagtctgaatcttgagggagttttctttttccttagtttaattgttattgctggtggtgtttaattgtttaattagtttacttttattgttgtctttagttgtgtgagtaataaacattatgtagagtagatgtgtatattaatcatgttattttgtcagatttgttatgttctgttttggctggcaattgagaaaaatagtgcttgtaatttcagcttggtttagggtagcgcttgtgttacgaaaattctgtttattacgcaagtgtacgtatcaagtagtatctcacgcaagtgaggtc

SEQ ID NO: 348809 - DNA, 977 bp, Cannabis indica
ttttctttctttctaatttgacttaattaaacactgatcataaatatataataatattttgtaaaaaaaaaaaccttaataggcaaaagaaaaataggaataaaagtacataaaatgaaaatacaaaccctgcaagaagtacatcaagtagaattgtagctccaatcgctatacctgctaacttccctacctgttaccaattcttaatttaattatttcattcatatcataacaaaacctaataaatgtaatcaagaaaatacaaatatgtattttttattttaaaaatcattaatatgagtacgtacagcgcgagtatctgtggctactgcagtgatgataaacataagaaagaatgtgacaatgaattcaagcatgaaaacttgggcattgctaattccagggctaggcaccgtaacaccaccggacataaagggatgaaacacggccttgagagcaaaagaggccgatatagaacccgaaacctggactattatgtaggcaggaacatgggcccaagggaagtgcctcaatgcagcgaaggcaatagtcaccgctggatttatgtgtgcgcccgaaaggtggcctatggcgaagatcgccaccatcgcggccagccctgcgcaggccgcgttgcccatcaatgtttccaccccattattgtacttgttattaagcaatggtcccccggctgccgagaatactagtatgaatgtccccacaaactcagctccaagttaagtatacataatacatcaaatattatataaatttatcaaaatattgccaaataaattatgttgtaacaaaattaataagttgtgattattatatgtttgtcaaattaataaatgtactgtcatattaaattggatacatatattaattctaaacgattttatctgatcaatgttggattaaaaatcctttgtgggcacatatgtataatgtatatgctattataaagtgtgatacaa

SEQ ID NO: 348810 - DNA, 968 bp, Cannabis indica
tagtcagggtggctaactaattgagttttcttgttttgtacagaaactatgtccaggtagaatcattgaaaggaatctaatttagaggaggaggtaatggagcaagaaaatactccaaatttaatcctgaatgacagtccatgggaaatgtattaggacgtcaacaagttcgggaattacaacaacctaaggaaatacttgacccttcgagggcttgaaagtgttctagggctattctggaatagactcttcgttcttagggagaggcctagcaagtgcgcagaaggaggcttcagtgtctggagctgggctcatatatctgcctttgaggtgcttttttttttctaacttctacatcttggctaggatagcacattttcaactcattccccaggcataccgcttgttgttagggtggtacgtcttttgtgttcaacacgacaagtatgtgccaatgctggaggggatcttatacttttacaagatcaagtctcagcccatgagaggccacaaggagaaggtgggcttctataggccgctataccaggagtattccttgccctaccagctctatgaagtacacgcacgactttagagactattgcttttacacctctggcttcccactaaaaagggttcctacccttagtttagacttcaacattacgagtaagtattgttcttttttctagactttagaaatctacttttcctcatgcttgatgtatattgatgccattgttcacatctactagactgccttccccaattgtctttgactccagagttggaagagaggaaaactttttacaaatccttctcatccaaagagttgcaagtagagaggatagttaccaccaagaacctcaaggaggtaggcctcattgttccacacatggatgtgagaataatttcgcactccaaatagagttttcgaaaaagaaccctaaactcaaacaatctttttt

SEQ ID NO: 348811 - DNA, 584 bp, Cannabis indica
ggtaaaatatttccaacataaacttattacttattattttgatctaatgtacacacatgtggagatccattggtatatggtacaataataatcagatcatacaaaaatcttccgctgtgtacctaatttagtaccatagaacaaatatcttaagcttaaggatgtgctctcttaccttaattttgaccattctgaagagaatgttcgaatgaaattttacatttgaataatagaaaacagcgcactaggttgattgtaaacctgggccctaggcccagcactaggtcaaccttggcgcagtgcccagcatcaagtcaacctgagcactgtgctcagctttgtggcccttgggtttgtggttttctcactgtgttcgcttgaatcttcattatttttgatgatagaaaaaattcccatacaactttttgagaggttgattggaaatatccaaggttgataatatttcaacctaagcactgggcccaacgctaggtgtaacttgggtgctggggtcatggctaaatgttaactgttggaatttattttaccaggatcttagatctactcacaaatctgttgtttaa

SEQ ID NO: 348812 - DNA, 597 bp, Cannabis indica
cgaaaagagagagagagagagagcttttgaaatttctaattttctaagttttgaaattgtttttgaataatgagaaaatgaaatgctattttatcactttacttcagccaaaagaaatgctacaaacacatataattacaccatataaagtccactaaaggacaaaataacaatggggcaaaatgaccattttgccccttcccactaaaatagaataaagagcactaaaggggtattttgggaaattctaaattcccgaccaatcccgacattcccaatgtctaaataactgtccccaaaatactaacatactacgttgtgattttactgagccaaacaccgagttccatgttaccggcaccggaaatgcaaaattatgaaaatcactaaatgacataaaatgcatttcagaattcaacaataacagtataaataattatttaaatagctataaataattttccataattaaacataattaactgctaatttccaaattaaactaagcggtcttttcagagttggtcgaactatctctcgttggtaccccattttgcacaactcctttaattcatccaccaacggtcttaaaaatat

SEQ ID NO: 348813 - DNA, 793 bp, Cannabis indica
gtcggatctgatccgatctgagtatctaatctagcggggcggggcggagtagatccttacatgatttggatcaggtcggatcatagccgaatcagatccgacctgacccatttacactcctacttaaaagtatatcatattatatatcataaatcaaaaaatattattattggtagaatctaataaatgacatataatataataaatatagcaaaataatgaatagcctaacttatataagaaaaatataattaaatttatataaaagatactgttaaacttaaaagaaaaattaaaacaatttaataaatgaaatatgaaaaaaaaaaaatcaatatcaataatagatataagaagtacaaaaattattctctaacctcactaatattaatactctaatttactaatttttatcactaaaataaataaataaaaataataataacggagattcaaaagaaaaagaaaagacaaagtatgatttttcgacgataaaatcttatgtattttactctcaaaatgatcctatttataaagaaaaattcctccaaaaataatatttttcgtgttaaacttaggagagaaaatgactaaaataagtgctgaagtggaataaatgttgcgagctgttaatgatttgagtaatgggcttcttcttcattcttgggagatgacatggtcgttgggatcattcccaaagtttggaattatatttgagggataatttcataaatacacaaaaatataaaaaaaaaattacaaaaaatatggttttatggaattttaaacattt

SEQ ID NO: 348814 - DNA, 712 bp, Cannabis indica
aaatgaaaacaataacagatattgaattgaaaacacctaaaaagacttacttagatttttgctttctaagaccattaccaagccaaatgtcaaactcagatttcaattggggatcaacaggttcaccaatcttgtcgtccaaggggcacaaaccacccacatatttaaccaccttataaacagacttatcaggagaaacagaagatgaacctgatttggaggcactagaagcaagctcaatttgtggagacttcaaaactgttactttcttctgatccctcttctgaggacgtaaaataggagtctcttaaaaaacaatcatttcaagatcattatgttgggattttatgccctaaataaaacccattacaatacaatctgatatgttatcaatagaagattagaactcatgtatgtttacatgtagttttcatgtttatggtttaatgtgtacaaaatttgttaagtccagaacatttatccaagtgatgtcaacaagtggaatgtaattgtgattatatgcttgaaaagacaatgtcccttgattcatcagtgcactggatttacactgatgtgatagtcaggaataaagtatacttacaccttggataaatgttatgttatttccaggatattggcaaagtatgctagttttggatgtatggagtatacattagactgggaaggatattgatcttggtaaagatattat

SEQ ID NO: 348815 - DNA, 491 bp, Cannabis indica
attaacttagaaagatataacggtaagtttatgatatcttaaccaagatcaatatcggtcccttccaatgtatactctatacattcgatactggtaacatatgttctggacttaatagaatttatacatcaaatataatcatgaaataaatcatgtgaaccatgcatcataaaatgcagtttctgatctttattaattagtaaatctgattatattgaaatgggttttatttagggcacaaaacccaacatagattatgttctcgtagtcgctacaaaaccatccgaagatgttgttcacgtcccgcttccgattgagagtacacaagcatgtcttcgataaatactataacacatatattgaggaaatctttgaataccctatttatcagatccataaaagatgccaggtctttggaattcatagtgcccatacctagtgcagaaagctgtaaagcccgcttagttaatttggaaattagcagttgttta

SEQ ID NO: 348816 - DNA, 659 bp, Cannabis indica
tacatatttttcctcagcaatttggttgatccatccattttttttctgtgtagtgagtttttttgaatgtttcaatctctccagctttaatagactttgattgtccttcatctacatccattaccggtgtagacttctgaaataattaagtgaaaaaaatttaaaacttatacatagtaatttaaaattaattagtaataataaattatttttaccgtctcatgtaagtgttgagtaaatgatttacttccacccctatgcataaattttacttttgatctattttttgagccagccacagactttttctgcaaaaaaaaaagtaattgacattaataattttttaagaaaattaaaaatttatatgatgaaatagacattatgataccttccactcttcgctggagaaacatgcagtgcacatccatttccagtcagcttcttttatcaccaaacccgtaggtcgatgctctaatggattttttccttcctcgatcattttttttataatgtcggtgacaattatgacgatgattgctgtatgcatttttgcaatattcatcacaaattacctcaagatatggatcttttgcaaagtctaatttgaatacatcctgcataagttttgaataaataaatataaaattacctaattaaaa

SEQ ID NO: 348817 - DNA, 2459 bp, Cannabis indica
atcactacttctcactatataagtacgtgtttagtggtttcggtaattaagttagttggagggtatcggtgtcactagtatccttacgagattattattcgctaccatagtagggttgcaatcactacttctcactatataagtacgtgtttagtggtttcagtaattaagttagttggagggtatcggtgtcactagtatcctcacgaaatcaataccgacactatataagtacttgtttggtggtttcattaattaagttagttataaggtatcggtgtcactagtatcctaacaaaattattattcactactaacattgtatgtgtttagtggtttcggtaattaactttggtattctattgaatggaataaaacttgtattgttttgactaaattaccgtttactcttcaaaaattatatttgttttattaaattatcattattttataaattgaacaaataaataatatttttaataaaaaatatatttatcatgtgatggaaatgtggacattcttagacctaattatttacaaataaaataataaaattacaaataaatatcaaataattagtaatatgatggaaatgaacatgtttacttttttaatttttcatttcaaatttaaataaaccgcccattttgttgggtttatccaaatgcatttttccaatgcattgacaaaatcatcttcattgataggttgtttagtgaagtcttatcaggttttaaatttaaatatttaatattaattttaccatatcgaaaaggccacacatcaaatccacaagtactatataaaggtatggctatcctccctcattcacaagttaagttagtcatttttttcttccctacaaaagttatagatatatgtatagcgtcaaaaatataagatattaaaatatgtattgttgttgcactgcaatgaagatggtaaaaaaaaaaaaaaggattggtaggtactacaaccgtgtgttgtaagtgcattaacggaattttaacaattcaataaatcatctcataataatttcgggtaataactctactctttatatttatttatttctacgctatatcactagtatttctttcgaaaaatttttatgtatgtactatatgtaaatataggaaatgttgacaaagacttcgaatgggtggagtaggctggatggaacaacttccaacacagctaagtctgccatccaactgaagctccccttgtcgctgtccacaatgccatcgtgggatgagcgttgttagatttgagggaccgaacacgggtacgccaaaccctcgaacaaaattaggacgcaagacggaatcataagatttgagttccacttaattatgcctagttgcaattttgtaatggtagttggttgtttacttttattattgaaaaattgtaatgttgattacattgttaagaaatatctattttgccctatcatgttactttatctctattggaagtattgattgtaatcaaagtgaggatacatagaagttactttatctcattacaatctatatttacagggtcaaataaagcatcatatggaaatacctcaaagcaaacatcacctaactttgtacccttcattacacacaaaaataatttccatctttatagcaaaagtggttccaacaaattaattagcaaatataaaagatttctttattctaataacgtatttctacgtaagtcttcaccttcccagcgtattttaatacgtttaaagttttgaaaatacgtacgtcaaggtctgtacacagtacgtcacttccaaatttgaataatgcgtgacctgctgagcatatttgggtattatgagaacaaatgaaaaaatattttcaatttaaaaatctttttgtgacatttaggttttgaaagtagatcgtacaccctactgatttgaccttatacggattgatgagaaaatattattaaaataattattttcatgaaaaactaaaaaggtagttgtcagttatttaatatcgtacttagggttttttaaattaccgcaaagactctaacatgtattgtttaaaaagtttattggaaacaaaaggcctttcgaggtctttgtcattttcaaggctatgtatagaaagttgacaaaagcttatgtgaagattgtgttgtattgggtatgtctttccaaccgtaaactcaaatttgatttggaataatactttgaatattgaacctcctagaggcagagcataaacaacataatcaattccatgaaaatatgtttggaacgtatttcaatgtacgtcagaagctggatctcccatatttcaataagtttaagtttaaaaataacgtacattaatatttgtacagagtacttcacatcataaatacagtatggtatcacttgtttactcaatatttggatataatgagattccttttaaaatgtaaactataatttcgaacat

SEQ ID NO: 348818 - DNA, 870 bp, Cannabis indica
ttgctaagaccacactttctaccccgagcacctcaatgaatttctttgttgagaacaagatcctaaacattcattaacacaattacccactcaaaatacattcaagtatgaatctctaaactcatacagaaacttacgtaaaaaaaatacgtaacacataagctaatttcacttgcacgacacaccatacataatcattcattattttgattcacacaaacatattacatgtactcaaataaacatttttaatgtaaaatatgaattcatacaaaaaacttttacgtaaaattttactaaaatactatttattctaattaaaactcaattaaataattaattaatcacaataattataataaatacctacagcaactaataaattataaaatctatttcattttatatcataaacagtaaatggtactacaaaaaatacattttactattttaacatcacttaactatttttcatcattaatttaagcattaactaaataaattcatgaaaaatatcaaaaatgattgaaaaccaaatctaactattcaaacactgtacaaagccacaaataatttactttgaattttctaagcaacctaggtatttttcataattaaaataagaaataacattaataattcatgaaaaatataaaatcgcataaaaattcaatctatcaattttataacagtttacatctcatagcccatcatataaaataaacctagattttttctgagtaccctaagtatttttcataatatatttatgaaatgaactaaataattcacaataattccaaataaattcagaaaaattatgaaacttcaccaaacaccttagaataaaataaggaatcaaaatctaca

SEQ ID NO: 348819 - DNA, 1121 bp, Cannabis indica
ggatcggattggatgttatttttgaatatccaattggatcagatcggatgttggatgaagtgtctaaaactccaatacatccaacatccaactaaactaattagtattttcatttagtttggatgagtaattagattttataatattatacgtaaaatatatatgtatacataaaaattaacattaaaattttactctttttttcttggattgcatggatccagtctaatccagtacatattggacctaaaatattggatggatccgatccgatccaaaaatactagtctaaaatattgaataaattcaaattgaaccaataaatatatatgaaatatatccaatggatagaaccgatccaatccaacatccaatggatgttggatcgattggatgactgaaatcaattggatcggatcggatggtaaaatctaacatccaatatataattggatcggatctggatgggcctaaaaacattggatgtgatccaatgaacacccctataactgattaataaaaatcagccatatccttttattttaatattataattaaataataatatctttaattaaataaataaaagataattaattaatttaatttgatttattttaataataaaataattaaacaaaattatcatgggcctatatatgtgaccctacacgtgtgggccatattttaaggtccaaaattaatttctcaattttatcacaaataatatttattgtttattataccaataaataataattaattaattctcattaatatcttattgcactaggattaaaatgaatattatttttactaaaataatatatttatctctttaatattattaagaataatattatatttaattatttaatatagttttatcaaattaaactaaatagttaaatactaattcattacacaattcataattattataatgattccaagaaataatttgtacaaattaatattttgctcttgacaatttatttgtcatagaaattactttttactcaaattttatcatcagattaaacttttccctgtacagttttgtatagaagtgacttggggaccatgaacgcatattttgaagctccaataaatacttaatt

SEQ ID NO: 348820 - DNA, 497 bp, Cannabis indica
gtgtttgttcttctttcttattttattctattctcaagttttatattgttctcttataattctctcctaaactctcctatatatatactatcatatatatatatatatatttatatcttgaatatatagtattatatattatttacatactatatatatactctctatataaactatttatatctctactatatatatcatctattatatatacatatattatatatactctattatatatatatttttatatagtttacatttatttacttgtatgtatctttaaattttgagttgtaattttttttcttttatttgtattctgtgctttgggattgtaactctttatttaatatattgtccttgtaatattttgtttagagttgtaattgtctttgtcttttattcatcttattttattctttcattataatctatctattatttctaacaatctatatactatataatttatatacatatttataaaaataaaa

SEQ ID NO: 348821 - DNA, 551 bp, Cannabis indica
aataagtagatttagaatttaccaagtaaattctctaatttattaattctgccttgtgccactatagatttggaattgaatagcactctcaattatatagagtactctatatgtaccacgatatagatacgttatcattatcaattgttaaaatcttaatagtcgaagatcctctatagatgatctacatcgaaacgggacaaatttaccgttctatctttcaatgtattttattcttgaaacacttagctacctataaatgatactttagtaaactaatatcattactgaaatgaggcctcaatcatttatctctatttagcgaagctcaaagaaaattttcgtttcacttctaaatacttatagaagctatggatttcaaatctatgatcagtgttcccactcaattgaactataatgttcccaagatgtaaatatctccaaaaacattgattagcatccacaaacaacttgaagaacataaataataaaactaagttgaacctaatcatatcaggattaagatccatagacctaagatcaaccattga

SEQ ID NO: 348822 - DNA, 578 bp, Cannabis indica
aagaaaatcattttaaattctccaattttaagttttggtactaatttaatgagaaatgctaaaagatattagtggtgtctaacatccttctacttgtcaatattattattaatgcaatcaagtatcaagtctcatataatttaagatgacatgtctaaaaggtgctaggcactagtgatacccaataacaatgctctaatttaattgatttgaaaattcattatattataacaatgattttgacttttaagggttgtttttttttttttaaacaattaaaacttttatccccttaaatttgatatgtattaaattgtatttaattttttaaactattcactcttaaactattgagattattgtatttaaagacttttattcagttttactaataggcggctaatgtgaataaaaattcaagagatacgatttgatatatatcaaagttcaaagggtacgatttgatatatattaaaagtacaatttggtatatacatagacaatctcttgttagtaaaattgtaacgaaattggacaaaagtccttaaaattcaacaatctcaataattaaaaaaaaa

SEQ ID NO: 348823 - DNA, 708 bp, Cannabis indica
gctttgaaatttcatgttgattcaaattatttcattgctctatttgtcattatgccaaacaaaggaaacttcctttcatttcgaatcataacattgatgaaaagtgctttgatctcattcatgttgatatttggggcccttacaatacttgtaccattgaagggtataagtatttcattaccattgttgatgattgttctagatatacatggatcaaactcatcaaacaaaagtctgatgctcagcatgctattcctcaattcattacccttgttcaaaatcagtttggtaagatcattaagggtatgaggtctgataatgcaaaagaattacagttcaaagacttgttcaataaacttggcaatttgcattatcattcttgtgtgcaaagacctcaacaaaactctgttgttgatagaaagcaccagcatttacataatgttgctagggctttactttttcaatcatatattcctttggtgtattggggagaatgtgtggctactgcagcctatttgatcaataggacacctacaccaaatctcaaaaataagaccccatttgttattcttcattctaaggaaccatcttatgaccatttgaaagcctttgggtgtctagcttatgcttccactttgagtcaatctaggtcaaaattctcacctagatcaaccccttgtatttttttaggatatcctccaggtgtca

SEQ ID NO: 348824 - DNA, 777 bp, Cannabis indica
tgaagcggggacgttacacttctcttgagagtgaggtgaccaagcttgaagaagcgtccagaggtgcaaagtctcaggaaagtactttaaagaagaacttggcggctactctgacgaaaacttctaattttgaagaatttcctcgtgatgccttggataagctcaccactgtggctgatgatatgagagaccaagtcaaggtcttgaagagaaaagtaaccacccttgaagatcaggcccttcttgatgtcactttctacaatggcttgtgctttaatgccatctatacagcttgggctgctaatggtagagctaggccgttcagctgggaaggctttcttgacacaaatgtgccaaacttcattaggcagtgtgagcagcattttaatgcgaaatatctcaaggaaatcgacttcactatgaatggtggtgaactggttgtcgaagaaactttaggagttcaagtctacaaccctaagcgtccagacttacctccttctattcgtgatgcacctcctggggagagtgaaggtagggaggaagctattgttgacataataggcttccaggaccttctttgagtccattcttcttttttatttttagcatttagctttagtgtgttagttggtcgttccagggtgacatttcactatggataagcctcggtaaaatgtgattagaattttgttttagttaaatcagaaattatttctaacttaatacaactttattccaatacttattatttttttttattttactttatctattacc

SEQ ID NO: 348825 - DNA, 585 bp, Cannabis indica
agctaaaagctctttaaacaacatagataaaagcttcgatggaagcctacccaaaccattacatgaaaggacaatgtcaaatgcaagaagatccttctccagtattgtaggccatgacaagaggaaagctgagaatattgagaaagattcctgtaacaatactgcaactttaggattagttgaaaagattggaggaagctcttctacttcctcagattatcttaaacaacagattgaacaagcaataatgacaatcattgcatagttaagtagacatactattcattgttctcattgtggacagaagggacattttaaatctaatgtcctagacttctcaacactaagaacgaaggtaatgctttagtttttgaatcatgtaatttagagaatgacaaatctgtttggattattgattttggatctactaaccatgttcgctcttcattgcagctctttaatgttggaaattattttaccaggatcttagatctactcacaagtatgttgattaacaccctaaaatgattattttaccaggatcttagaacttctaaaatgattataaataaacacatataaagt

SEQ ID NO: 348826 - DNA, 721 bp, Cannabis indica
ttaaaaaaaaaaattaaaaaactgtatattggataattccctaaattaataataataataataataataataataataataataataataatccttaaaatacatgagctaaacgaggcgtatagtaaaagtgctacatatttttgtaaaattctttaagaagagagaggaatagaggtgaaacatcagacttcggcccaaataaaaatcattgttaggttctatcattccatggttgtgttggttaatagaaaattaacctaaactactatttttataaaatttgttaaatttaaacatttttgtttatatttttacggtactaaaatcatctccaatggtaaaattcaaatttggtgttaaattaataccaaaaagctactattttagcactaatttttttttttcaattccaaccacaacactaaaaattacaccaaattttacattctttattattctattattttatcaatatatataataaaaatattttaatactaaatatttattaaatccaataaattatattaataaatattatttaatcattaaaatttaaaaataacaacaaaaaaacaatactaaaatttaaaaaaaaaatcatataaaaataacatgaaaaataacatttaaccaatgtcaaaattacataaagaaaaaactaatatacaaataacaacaaaaaaaaaagcaacaaaataactaaaatataacataa

SEQ ID NO: 348827 - DNA, 642 bp, Cannabis indica
gataaagcaatacagtcagaagaccatatgtgaagacataaaaatcaggaaaaaaaataaatgcaagttgaagtactctgcacgctgacgggagcattctcccgaacaattacggatggagaatatcatccgaagagtcttcttactcctccaggatagcttttccttttccttcaataggagtcgatggccaagcaggcacaccaggttccctaatgcagatatcatgttctattggcacctgctcattcgggagaattttcttcttcttgggcggcctctcctgctctgaatattcttgagccttcttctcctactttgaatattcttgagcatactgtttggcttcagcaccacccttcaacttagcctcatgcttcagttgaatgatgtctttcacttgctcgacatccttagcttggctcaccctggatttcttcttcttctccttcacgggcaggggtatgaaatctgccaggtaaaccttgtacttcacaaagttgaactctgtggtcaacaaagtgatatttcgagtagcctccgacagttggagaattttttgagcattttcctgaagcctcagcgtgaagggaggatagtcgtatgccggaatctgtgttggaatttattttaccaggatct

SEQ ID NO: 348828 - DNA, 1341 bp, Cannabis indica
gacagactctatttgccatggcatatggatatgaagctatgtttcccgtagaactcgaaccaccgtcccacagaagattaacatatagcaaagaggccaatcatgtactcctcgcaaaatcacttgatgaaatcgaagagaaacgaactgcagcaaacttaaaactgatagcccatcagcaaaaagtagcttgatattttaacaaacaagtgagagcacgaaatttttttgtaggagatatggtcctaagaagagtatttttgaacaccaaagacagtatgacaggtgtgctcggaccgaattgggaaggaacatatcatgtggtcgaagttctagaatcaagggcatacaaattgggcaactaaaagatgcaactcgttttagaccaggtattggaacggggaacacttaagaaaatactaccagtaaaagtaccaggtcagatgaccatatcaagtacgaaataaaagaacatttgctcttaagtgaatggccttctgggcggaccacgcccaagggttcggataaaatcatcaagtactcaggtcggaggaccatctttgaaagtacaatttttcattttttgaaatttgttttgtttatgctaaggtaaagatcacatcaagtcaacataataactttgatgtaagttactacggtaacagacatatttccgaccaataaatgaataaagatgtttatttaaattcaaattgagtcaagttcattagcatgttataaatttaccatccagtatgtagaaaaggtaggttgtacccaaaaccccgaacagaaaaaatatacttgtgaaaaataagtgaccaagagtcataagtctactcagtcactttgagggaacctatgcctgtacaaagcatttggtaaaaaacaaaaacaaaacaaacacaactgcacaatgattataagcaagggatgaaattcattaagaataacaaaagcattcaaacccgggataaaaggctgcccggtcagctagttgttcaaaaaatgaaaaacatagtccaaaagaaggcatattggccaaacagacataaaaaagataataagaagaaagcaattagatggcaagagtcccgggctctttgtacgggtcaactagatttggaggggctgaaggatcatcattctgggcagaaggagcatcaacattttgattggtcggagaggcggaagtggtcgcctcgggatccccgtaggccgactgagcagagcagtagtcgagaaacatgtctttggaagcgtccagataatcaaagtttaccctgggattagccttccaaaagtcataaaaaatctcgagactagctgtctctaaggcat

SEQ ID NO: 348829 - DNA, 481 bp, Cannabis indica
ttttcacacggtcagttatatgtagcaatatcaagagcaaagacatcattgacagttagagtcttaatccgacctgtttcaacttcccaacaagataagaattcgattaaaaacatcatgtagacagagttattagcattatcttgtttaaattaatctcttcaaaaaacttgcaaagtgaccgtgtaattagctttcttaaactcttgaatgtttcatatatcaatctaaatgcttttaaaatatgatttattattgttttcatattaatattatattgcattattattttattacatttgagacactgcttcttctcacaataagtttttaattttatttaaattataaaatataattattaaatgagcacatcagatgccgactctacaccaatcagtagatgacatcactccaaccacagttggatggaaaatgaaaatgacagttcaacataaatttccaccacgaacaagtatga

SEQ ID NO: 348830 - DNA, 583 bp, Cannabis indica
attggtttaaattttttttttaaaaaatttgttaagtatagaaaatcaaatttccctttttatttatgatctatcatggtgtatatactgatgtaaatatcattatatgtattttcgtttatggtctaagggatatataatggatcaaaaagatattcttgtgtaaatatgtattatatatagatagatagatactctctcatcggaactccataaaaattgataatgttgatgttcgatgttggttcaataatgttgatattcgatgttgttgtttcttctacaagggtaagacgacttttggaccaatggacatattgttccaagcatcacaaaagtaaaattttttatctattattttaatgaggctagagcattacttcatgctaagtagtgtcaaactattcgccaatttctttttattgaaaatttgtcaatttttatttaatataatagatcatagttgatataataatctttcccttttgattgaatgatgtaatattttatattatttagggtaaatactattttggaccctgtgttttgcaaaagttacaaattggaccctgtgttttgttaa

SEQ ID NO: 348831 - DNA, 921 bp, Cannabis indica
aaaagtataatttaaaacaatcttctcagacgtataaataaaaattaaattattttatttttgacacgtttgaatattttaaaaatttacatcatatcctaaataattatattttgacaattatataaaaaaaaattatatatatgtacataaaaagaaatataggtatataggtgcatcaagagaccctgtaaactttttgaggtagggtcatattttcttattatatataaacacacataacatattatgatgagtctaaaattggtgaggttgacaaaaggacaggccgacatagaagaacgaaacaaatgtaatttataaatatctttttctacatattaataaaccctctagaacttggatccatatatataaggccatgtataactcatgcgtcattggcttataccatttcgaagatcatcatctaattgaattggtccccatttctaattcggcgccgtgaaagatttttttcttttctttttttttttcttttttttttttttttttttcttgaaaagcgccgtgaacgagttgtttatgtgcttctttccaccacacattaatttactacctctatatttatatatttacgccaattaactacttgtaccttcgtttgtcaaaaaaaaaactacttgtaccttcgtgtaataatatggagaaatactaaatgatactattggtgattaacatcctcttatgtgtcaatattattattagtacaattaagtattaagtctcatatagtttatataatgtcactattagtgcaattaagtatcgagtctcatatagtttaatataataacttttaagaagtatcactaatcaatgataagacgacacgcagggccggccatgggcataggcgggctaagcctgtgcctagggcccacctagttcaggggccca

SEQ ID NO: 348832 - DNA, 503 bp, Cannabis indica
ctaacctgaataactctggatattgcgtcctcatttcagactctaactcctaggtggcctcttccaccttccattcttccagtgtaccttgactaaggagataatctttttccgtagaactttgtccttcctatcgaggatctgaactggttgttcctcataggatagatttggtgccaactctagggtatcataactcaagacatgagttggatcagatacatacttcctcaacattgatacgtgaaaaacattgtgcactgttgataatgctagatgtaaagttagtcgatacgctacttgtctaaccttctcgagaatttcaaatggccctatgaacctaggacttaacttgcccttctttccgaagcgttttacacttttcattggtgaaatttgtaggaatacatattctcctacctgaaactctatgtctcggtgcttaggatcaacataactcttttgcctactttgggaagtaaacatccgtgccttgatctttt

SEQ ID NO: 348833 - DNA, 515 bp, Cannabis indica
tatatatatatatatctaactatctgacatgattcattacgaaacgattgggcttatgtatatatataattcataaatgaaaagtttgaatagacaccataattcaattaaaaatgaaaagtttgaatagacaccataattcaattaaaagcaacggcatatataatataagtcgtacatatatactgcttgaataatatttcaagcgatatgaatagttactgaagccaatgaaattaaaaccaaagtgataaacccaaaatcatttatatatatatgccaagtatatacagactacatcaacacataattttaacatatatataattgaaactaaacattgcagcgcaatattatgtattcaaagaaaaatcaaaatcttaatttttaaaaatccccaaattttataaaccaaatcatcagatcttcaattaattcaacaaaggtcgctctggtaccacttgttagggtttataaaacactcaaagaaatatataaatcacagatctaaacat

SEQ ID NO: 348834 - DNA, 865 bp, Cannabis indica
ttagataattttttatattttacagttttctataaaaatgacacgaaaatcaccactacaaaaaccccctttagaggcggttttttagcccttttagcgtcggttttgacgaaattctctaccgacgctgatgagggcgacggtaaagggttttaaaatatcgacgccatatatacccctatggcattggttattagcttggaaccgacgccataggggtatgtatggcgtcggttcctagctaataaccgatgtcatatatggcgaaggaaccgacgccatatatgagcgtttttcagttttttttatttttatttaatttatttaaattatatatttattaatttatatattattttatttaatttaaatttaaactacatattaatattttaaaaggtaaattaaatgttatttaaattaattttaaaattggctaaaatacataatttcatttcataaaagtaattaaatattacacaaacattgtaaaattagtccaaccattaacaagttaataaatctaactacaagttaacctaaaataacatagggatgaaaaattcttgggcctttcagtctcaatcgtcatcgtgaatcaccgccatcaaccgttctatccactgtcgttgtattggtaacaatttagtttttggatcatattgccgcttatccccaaactgttaaaaaaagtaaaaatttatattagtttatatatatatatgtatattatatatttgttattataataaatactataataaataattaaaacttaccgctttttgatcttgcatgtaacggttggggtttgcacgtgggacgatgtcagtcatgtatttcaaaacataaaaaccacattctt

SEQ ID NO: 348835 - DNA, 497 bp, Cannabis indica
aatgtgaaaaatgagctaaggggctctcattttatagttgaacgaggccgaaaaaataggagaaaaatacaaataagatgttttagactgtacatgatgatctaacagtgaaaaaataccttctaatggtgatactcatttttccgagcccgggggacctgctgcgggtaacccggagcttatttcgtaactcccatggggtgaaatttgaggccaatagttttagaattacaattaaagtgtgagatatgacttgatagagcattgaattagctttgaaacccaagttgaatcacgtcaatcagattaatattgagtgagttgtggctgttttactgaaggcagttcatgacccagcgcctagattgacatctagcgcccatgtttacatcctcggacccaaggtgacatatgacatcaacctagacattgggcaagtgataaaacgtccaagggatttactttaagatgcctaagtgatcttttgacatcactta

SEQ ID NO: 348836 - DNA, 730 bp, Cannabis indica
ggtaaggtgagagggggtcccctcgaaggaataacatgcccaagggcaaggccattgatattaaacttgaaagttgcagtggacatgcaagtcataattaaggagataaacttagaggaaaagccaactttttgcataattttattcaggaaaattcattccactttgtcaaaggtcttagccatgtccaacttgaccgccatccaatcaatccttcccttcttcatatttttgatggagtggagaatttctttggccataagaatattgtcagaaatgagacgacctttgcggaaagcactttgagtaggtgaaatgatggagtttataaccaacttaagtctattggccagtaccttggagatgattttatagatagttgtgcacatgctaataggacgatagtctttcaaggtcaaggaatttttaatttttggtgtgagggtgacaaggatagtattaaagtgggatatatcaaactgattattaaggtaaaactgattgttgaacccattaatgcctggggatttatcattggccatttagaataggctctcttgacttcaaggggcgtaaaagcgtcttccaaagattgacagtggctagagtcaagggtggagaaaattcctgtgagggcattgtcaatcattgcacttattgtggctttattataagtttcgtttctatacccatttttttattttttattttctattttaattttaatttt

SEQ ID NO: 348837 - DNA, 646 bp, Cannabis indica
tgagataagagatgtcgtttctaatttatctctttctataaatggaaagttcaaaaaccatcatataataatccaaaaaacatttaaaaactcttacctagcaaaatatagtaccaatgaatgatgcagaaattatgttagatttgtcagaagaaaaaaataaataaataagtgcacatgttatattcaacataatttttagatagtataaattacacaatttatggatttttttttaaaattaactttttaatagtataattaaataagggataatttaaaaaaaaatacaaaaataacaaaaaattacaagaatacggtatgtataaaatatttaatatttttatgattttttagattttatttacataaaatatagactttttatgtacttttatgttgctcttgttattttgttattttttttatcaagaaagaaaaatcttcattaatcaacaaacaaatacaaccaatgggagcactacaataaacactgctccaagcccaacaaccaccctattacatttgaattctattcaagtataatctctccactctagatacattcccgtgtttaacaatttgtaatctataagtcactaaacttttaatctttttcactatatgagacactatattagaaaag

SEQ ID NO: 348838 - DNA, 606 bp, Cannabis indica
ggatgttcatttagagaataaatagttttactcttaatcgcatgtaaggatgctcatagaagaataaatagtttcactcttaatggcatgtaagcatggtcataagagaagaaaatcttttataatattacgagcatgctattgcaaaacttatgtaagtatgtatatgtaagttattatgatagagtacgttttggtatttaagtaatgtataaagaaattatgatacttaattaagttgtttctattatatgtgttgtggattgaccgacagacataggttaaatacatgtttgttgggtccatatagtaaataaggaggtaatgcggtaagtggtgaaagacatgaagactcaacaccccaagtgttggtaagttaaatttcgaggacgaaatttcttttaaggatggtagaatgtaatatctagattaaaatagtatttaatttttcatagcttcttgatgtggttggttgtgcaaaaccggttgaaaactcgagaaagactttacaatttcaatatcattgactcacccgattgtactctctgcagcaggtcacctaaaaatgtcgaacactttattttttaagtgtgacattgctcttga

SEQ ID NO: 348839 - DNA, 2026 bp, Cannabis indica
taatactaaaaataacttaacagctagttttagcccaacgattagagcttcgtactcggcttcgttgttagatgccctgaatccgaacttgactacagcgtgcaggtgttgccccacaggcgtgagaagggcaatccctgcactagatagttgatctgtagccgacccatccacatgtagtttccagttcagtttttcttcactgttacttggcttagttgcttgtaccggctcgggttgctttctggtatgctttcttttttgcctgtgcattctaccctaaagtctactagagcttggcctttgattgtttttcggggtaggaaagatatttcgtactgaccctactctaccgcccacttgagtaaccgtccagaagcatctggcttttgaagtatttgtcatagtggttggtgagtatatacccgaataggatgagcttggaaataaggcctcaacttccttgttgctagaatgaattagtaggcgagtttttctatcaacggatatttgccctcggcctcaatgagtcttttactgatgtaatagactgcgtgttgtacgtggctccatcgttttttagaccaaacttcatgactttgtagcaatagagacacatatatgttcggaaacttgtatgttcttggtctggtggatgcattttgatttgattgtagcctgagtaagcgtccatgaagcttaatatttcgtgccttgctgttgcatctacgagctgattgattcttggaagtggaaaatagtctttggggcatgccttgttgaggtctgtgaaatcaatatagagttgccatttcttgttcgacttaggcactagtacgggattcacgacccaagtcgggtaaaaagcttcaattatgaagtttttgttgcacaacttttcaacttcatccttcagggctactgctcgttctttgtccaataaccttcatttttgttgaattggccggaaattgggatcgatttagaacatgtgagataatagagggatcaattccgaccatatctgcatgtgatcaagcaaaaacatctaggtttgctctcagaaattttatcaattcttattttacttcgagcaacaaaccctttctgatctttagctttctattcggaatagctggatcgatctcgatctcttctaattctacaacaggtccaacattgctgcttgggtcccaaagtcgaggatccacatcttcatcctcgccttgggaagttccctacttgggaaagtttttgtcccttgtctgtgctctagctggaggatacttccttcttagccttggccattgcaaggttataacatttacgtatagactgctggtttcctcttagacaccttaccccattctttgttgggaacttcaggcaagagttaaatattgatgtgacaaccattaagtcatatagggcttgtcggccaagcattacgttaaaagttgaaggaacatccaatattaggaactgtgccatgatagttatgctcgtcggagcttgtccaatagtgaggggtagcctgaattgtcctacaggtgcaactccttgaccggagaaaccatagagaagctggaggcatgaagttagatccttgagttggagtcccatctttttgtaagcagtcttgaacaagatgttggaagaagctccattgtcgatcatggttttggccaccattttattggctatctggacttccacgaccagcgggttgttctgcagaaatctaatcttggcagtgtcttcatcgttgaaggttatggtcggctctcctgctcgtggaactttgggcttcctttcttccacggccaggatgacttcttcttgctcgtgttgcgctgttcaggcatacctctcctgagctttgcccgagtctctagcaatgtgaggccctccaataatgacttgcaagtgtccatctaccggtggaggtagcaaatcttggttgttctgaccttggtcggtcttgacatacttctgcatgtgttgattatttttccttattaggaat

SEQ ID NO: 348840 - DNA, 929 bp, Cannabis indica
agtggagaaatatccccgatgatattggccctatgtcacaacgacagtaaacaaataagtatttatcctaaaacattgcttaacacttacgtaagacaatttagggttttttttaccaaacttcgcggtataaatacactaaaaataaaacttatattttggctctaaagcatacaccatattttagagctcgtcgaaagcttcgaaatggtatatagaatgtccaaaacgaacaccccagtgaaaagttataagaatttccaaaaacagtttggtacgaaaatcccaaattttgcactcaccgaaacaccaccgaaacttatccaaatcattcccaacttcacagggaacatatataccataaatacaacaattcttacgtaacaaaaattaaaatcaagcccttaaatggaaaatgccattaacgttcggactaagccttaaaaagtaccaaactcaatttctaactcaaaattacctcaaattcaacaagtaaacatcaaaactagtctcatagctaccaaagaacaattttacgaagttgaaatcgccataaccactctaaatcacaaagccactatataaaaataattatttttaacttaaaacgaaacaaatccttaccttaagctctcattctgcaatgatctactatcccgctactattggagcttgaaaaactaggttttgggttgaaaataaaaaaaaaaatagattaagggaggaaagggtattgtcgtaccaaaggagagagttttgtcgttctttcgttcttcagtttataaacttaatatatatatatgggtacactcttaatgggtattacctattaataggtaaaattagaaaaatttgagtttttatgcgtaattttctatctaattaaaaaaaatctctcacttttacatcatatgagctgagattgttcc

SEQ ID NO: 348841 - DNA, 512 bp, Cannabis indica
attttgtatcaaattaaacaataaacaactaagagcatgtttagtttagtgtaatggaaattgtaatagaatcattattaccattacattgtttgcttttatttttaaaactttgtaatgttgattacattgtttaaaaatatctattttgccctttttgttacttttatttaaatttgaaatattaaaagaaataaactcgatagtatttttgtcaatatacaacttactttatttcattacaatgtatattacagtgtcaaagcaaacatcacctaaatttctacccttcattacacaaaaaaaagtttatcatttattttttctaaaacatatttcaataagttgaaagttttgaaactgcgtacttcaaggtctatacagagtacgtgaaaaactaaactggtggttacatttattaaaaatcgtgcttgcaaggtttttaaaaaatatataagtcaaatcagcttcattatttaattactttattggaaatacaaggtcatttttaa

SEQ ID NO: 348842 - DNA, 1228 bp, Cannabis indica
aagtaccccaacctgccttgcttgggggtggacttcaaatcaaagtaccaggaaacttcgtgaggagaaggagtaccccactccttggaagcgtagaggacgaagagggcagataaatatttaatgccctttggagtgaactggggcgggcagaggccaaagaagtccaccacatccttgaagtattgatgcaaaggcatcaacgccccttgctgaccatgggcacccgaccaggcgcacatcccccttttagggtttgtggcacgattgttgtgggcgggaatgtagcaatccagcttgcccaagtatccgccctagtcaagtgttcgaaggcacgcctcagtaaccttggacggagggcttacccacgtggcgcccaaggcaccctgccttatgtgaggaaccgcagcagcaagttcctcactgacgtagtccacgccctcaaccaggacgtctccgtcagcatcgactggctccccagcttcgttgtactccccgtagtttgggggttcaacctctacctcttcctccgcctcagagggactgccaggacatacatcgtccagctcctcgatctcttggacctcagcgtccccttcatgatccccctccatctggacggctggatcctgttcggcgctaggcaaagtggtgtgccgagccacttaaggatcagatgcgtcaaccaaatgcgtggttttctttgtacgagccatcattttatagctggttacaagagttggagaatgtccttcactggaggaaggtgggctagaacaaagatgaggatgatcctcgtgcagaagttgaagcaggtcctggtcgatctgatgtcttttttcccaagactcacctcagttcatcttcaaaagacaacacacaagatgagtgtttggtcggaatatcgaacgataaacaagcaaatatgccgaccaggagtactcaacagattaaagaacgattatgtttgaagaaaagtcagaactcaagaagtcaaaaattttctcaagttatggcaaaaaagttcatgaagcttagaataagcaagatgaaagacagacgttacgcagttcagaaccaagcattatgactataaaatcgtacgaagacatgataaagaaggatcgcagaagtttttagcctaagggttcctagacatttctacagcaaagtcgaaggtcaatttgaaatgtaaacatgcaaagataagcataaaggaaatcaaaaa

SEQ ID NO: 348843 - DNA, 762 bp, Cannabis indica
gctgtctttgggacgggctttatttaaatctgtaaagtcaacgcatgtgcgccatgagccgttaggcttgggcacgagtacgggatttgctaaccagttggggtaaaatgactcccgtataaagccgcaggctaggaggcggtcgacttcttcttttagcgctgggtacctcgtggggtccattttacggtgcttctgtcggacacctcgcacctcagggtcaatgttcaagcaatgacacatgacctacggagatattccgaccatatctgaatgtttccaagcaaaaacattaagattttgtttcaaaaaggtcgttagttgttctcgctgttgaaaattcaacttagaaccaatttttaaaactttgctattatctacaggatctataggtacctcaatggtgtctttcgcgggttgggctactgcggcatgatcaaggaccctcggatccaaatctggttcatccatgtgtggtacctcctcgattctgaggacctcctggcgaggaggtggtgcctccaataaatagataacattcagtgactttttctccgcgagcttgactgctgcattgtagcattctcgtgagtctgactggactcctcgcacagaacctactccggtgggagtagggaattttattgtgagatgatagattgaggttatgatcttcatctccttcaagagtggtcgaccaatcacggcagtgtatgccgaatactggtcgactactgcaaaatcagccattgacttggctgt

SEQ ID NO: 348844 - DNA, 798 bp, Cannabis indica
ttcaataacttcttgggagcagctgtctagggatttcaagaaatggttctagactgctagggatagacgacccgaagcggccttgctaaccaatataaagcagcagcccggtgagacacttaaggtgtacttaagtcgttttagcacagctgcgactagggttaggaatttggatgacagcacgcaacttacagcccttcaggcggggatctctactaatccattaaccgtagggggcaagttatgggatgacttacaaggtcatccagtaagaagcatcattgagttcaacaaaaaagcttaggtattcgttcggaaggaagacgcctgaaaggaaatgaacttgttgaaaacaagctcgagaagcaaacccagtaatgtttcaacaagtactgtttccatgagaattgataacttgggggcttctggttcgaagagaaaggacggtactaaggaattgtcgaaggataaaaagaaacagaagaagcatgacaagtacgtgccagtgtatactatttataccgagcttaatgaaactcgggagaatatttacttcgcacatgagcagaaggttgcctttggcaagtccgagcccatgaggaattggaggagaaaaagagatcctaacaagtattgtaaattccataaggatattgggcatacgaccgaagaatgccactgaaatgcattttgtgtcatatagtaaatttcatacttttgaatttccagtgcccggtaacatggaactcgatgtttggctcagtaaaataacaacttagtatgttagtattgtgggac

SEQ ID NO: 348845 - DNA, 718 bp, Cannabis indica
tatggtgcagccggaaacatttttcgtgttcttagtcttgtaccgctgtagagaggtcattagatatcgaaagctagcagtcgcccaattcttcttcttaattgaccttgtatcaattaaagaatgcatgtaggtagtgctgaccttggtaccattcttgggcagcaagactgttccaatacgaaacaagcagaaacttaatgagaaataagtaatcgctctcgttgctttccttcagatctttctccagcagagtcagggaaaacctatagtccttacccttcaaagttttctcaaactcaagcaggtcacagtcactttctgttaccacaagttctctcccatccctgattcccatgacatcctcaaacagcttcaacgatagttgaatcgttcttccaaatatctcaagccgagaagtggttggatccacgtgatcgatcagccaactaactatcttagcatcaacgtacgggccatcctcccttacgaatgtcaagaaaccagcatttctgaccatttctttttgagcgtcgttgagaagtgggactattctacccaaacgttcgaaggagaaacgaccagatacttgaacatcccctaccctttcattgttctcaattcttggctcagtagatactgtctcctttaacttcttccctttccctctaacaccaaccttcgaaggggaagcctcaacttcatatgaagcccaatt

SEQ ID NO: 348846 - DNA, 1018 bp, Cannabis indica
ggtttcaattggatattcaataacccaaaaagtaagatgttaatgtttgaggttgacactactttatagaagatggatgaaattttgtatgaagagttggatatagaccctcttatgtatgaactaaaagtagaggtgtgttacatgtacacgaaaggcaatatgatactgccggggttttagtgaaagatagtcaagtaagattgttcttaagaatgaaggcaaaaatgcgtgtggagaagttgttaccactgtttgtgactaatgttaagaggcatgcgaatttgggacctactccgccaactatccccccacgaagtgttgttggcagtattgtcccagaaacagatcttatggtaggtttaaatgagcaggcccctactaatatagatgaagacagagttgacaattcatttgatcagtttgatgagtttaatgctccctattacaataatgatcccattgtagatttgaacaagaatggtgagatggaattgtaagttgataaagttgtagaggtacctactttgaggttagaactacctccaacgaactagcgtacatagtaagaaagaagaacccattgtagtgaaaatcaccaaacaccaagcactagtagcagtcagcctggtgctcctcgtcgtaccgtgccatcatattttgaagtttatacaaattcaaacctcttgtctggacaagggaagacatagaagaaaatagtgtctatacaacttctcttagtggtacacttttgggggaaatacatgttggaaagttgtacacaaacaagactcaattgaaaaacgtagtgggaaggtttgcattgaaaatgaattttgatttcatggtgaggaagtctggcaccgatgtattttacgtaacttgatgttgggttttgtgccttaaataaaacccatttcaataaaatcaaatttactaattaataaaagatccaaaattattttatgttgcatggttcaaatgatttatttcatgattatatttaatgtataaattc

SEQ ID NO: 348847 - DNA, 908 bp, Cannabis indica
  modified_base (787)..(787): a, c, t, g, unknown or other
ccgccaatatccctattttttataaccccatcccactctatttatgaattattttaaacaccccaaaacttctcattttgagtttttattttattttatttatttatttatttttttggaaaaaaaccctcaaagaatggaaggacttcgcaccactaaattttctacgttgaccaaattgtctctcaacattcaccaaatccacgatttttcattgtatgattaatgtaaaggcacatttgtatataaattggtgtatcaaataaagatatgcatatctattcaacatcacaatacaaagtcaaaaacaaaaataaaatcccaataaaacactatttacaagagtatatgtataataaatttacttttttattcattcttccaatgataaaatcttaaatttttgaaagaataacaacagttttttttagaagttgtggggtgcacttattaagaaataaaataataaatgaaagaaaaaaaattaaagatatctattttggtcattttataataggtcaaatatgtaattaaatttttgggatgtaattatagttggaaaattttatttactacaaatttctaaagacaccctattttaataatttttattttttttaaaaaaattatatctttaattatactagtttttttttaacttttttctttctaattcatattcttaaaaaatatatctatcaaacaaaaataaattatattttaaatattatgtacaaaaaaaattgaaaataaaaaaataatacaatttttttagacaaaaaattanatatatatttatatatacatttagtataaaaaaaatataaaaaataaaattaaaataaaatgtataataaactataaaataaatatagagattttttttttaaaaaaaaaatattttaaag

SEQ ID NO: 348848 - DNA, 750 bp, Cannabis indica
catataatggctaaagagaattctacattttttatattttagcatttatagtatattttattattgatttatgaatatgtagtattataattttaataattttttaattgtatgtatattctttattatctaaattttgcatcaacgttggtaaaatttaatgggttcgacgcagagtataaatttaaaatataatttacttcggtagtttataaaaaaaataataattttattatttaagctttttcagttgttctttttttttaatattattttggcatatttaaaaaaaatacatataaataaaaaatatatatttaaattgatagtatattaatataaaaatatttaaaataaataaataaaatatcatcatttaagagtgaagactttatattttcaagaaaagaaaagtttggggactaatttgccaaaaaataaaatttgaagaccaacttgtcaaaatttatatagtttgaggaccaatctaccaaaaaaactaaagtttagagaccaacttgtcaaaacatatataatttaaagacttgcagtacaaataagcctacatattgtttcattaacttttatgaatatatatatatatactaggcagaagttacgtgcaaaatgcacgtatacgtaattatatacttagtttagaaaagttaattaaaaatacataaagttttaagaatagtaaattagatgcaaaatatttacaaaatgagttaaaaagcaattacattttga

SEQ ID NO: 348849 - DNA, 1099 bp, Cannabis indica
tccttggatgaaacatgaacagttttgacaactccctcttggaccttttctctaactatgtgacaatctatctctatatgtttagttctctcatggaaaactggattggcagctatgtgttgtgcagatttattgtcacaatataataaaccaggtcctttgtgctctatctttaactcttttagaactgagaggagccacacaatttcacatgtagtgttggccattgccctatattcagcttcggatgaggaccttgaaactgtttcttgcttttccaagatatgattgagcttccaatgaaaatacaaaagcctgtagtagaccttctactatcgggacaagaagccagatccgaatctgtgtaagcatgaagctgaacctctgtgttggcagtaaaaaacaatccctgtcctggactacttttaacatattgcagcactctttgtgcagcatgaagatgagtaacacgaggagttgctaagaattgacttagcttgttgactgaaaaagagatatctggtctagtaattgttagatattgaagctttccaacaattcttctatacaaagtggggtcagccagcttctctttttcatcttgtccgagcttcaaatttgcttccataggggtgttaactggtttgcagccaagataaccaagatcttcgagtaattgcaatgcatagggtctttgagatacaaagatccctttgtttgatctagcaacttcaagacctaagaaatattttaaatttcctaagtctttaagctgaaaccggttgttcaatctgattttcaaggcttgaagttcatctagattattgcttgcaagaataacatcatccacatacactaacaagaagatgaaacttccattgaagtgcttaatgaataatgaatgatcagttgcggagtgatgaaatccttcatcaattagagcactagagaacttggcaaaccattgtcttgaggcttgcttaagtccataaagagacttttgcaacttgcatacaacattaggtggtaactcccccttaggtctatacccttgaggtagagacatataaacatcctcatgtagatctccatgtaagaa

SEQ ID NO: 348850 - DNA, 716 bp, Cannabis indica
gcaagagggatattcaaaacaatgttagttctttcataacagtttcttttattcttttcaataatattttgtgttgaaggatcccattgaattattatatggtataaagcaaagggctcccgaggcctgaaaagtattggattgcttgtatgtttttaggtccttctgcaataatattataaaatggtaactactgtgaatttagaggatatggtgattgtttctgaagcaggttctaatggcaatgtgagagatgtagtccgtacagtctacaccgaccattgacatttgggagtgataagacacatctcagtggtcggtcttagtttgtttccttttgtttttattattttaatttctatctagcaaggatacaatgtattataaatgtaacctaaatttagcttttccattgtatgtttttcactatgtgttttctgatgcaatcaattttgcctttttcattttcggttatttttcattatgtacaattctctctcttaatataatgattgatcattgttcaaaaataatataataatgattgataatagtagtataaagttgagtttttattaataatttttttaatataaaagtctaatatctttaaattttatattatgtatttattttttttgaaaaaaagtaataaaaattttctttccaatttcatatctttaaaaaatataactataaacaaaaataatatatat

SEQ ID NO: 348851 - DNA, 734 bp, Cannabis indica
ccgagcttgtaactccttccagaagtcggtcctacaaaaaaatacctgttatcaacatacaaacaagcgaagactcgggagccttctcgacttttgttacctctgcattaaaccgtttaaaatagtcttgtaaagactcaccgggttcttgcttgatgttggccaaagtcgtataaggtggcctataggtcatcgtggcctggaaatgcgtgaggaataagtcgacgaaggtttcccatgtcgatattgatgcctcaggcaattgggtaaaccaatcgtgggcgttttcctcgagtgttgccgcaagaatgcggcattttgcaagctgtggtacctgatccacctccattatagtattgaatttttcaagataatctatagggttagaggtacctttatactttagggattcggatagacgaaatcccttaggaagttgggcttgtcgcacttccgtagtgaagggtgaggtcccatgcaacttgtatatgggctttcgttgctgctcgagcattttcaaagcttgcagaagcatgctttggtcaatccctccagtcgcaggagtcgggactgctgcgactgcaggagtcgcaactactgcggcgaggttcgctgggacggtgatcccagtagtcgcaatcggtgcggtaggcgggttattgtgagtgttgacaccctgatcgtccacatggggatcacggacggagtgtttcctcgttatgaggggcgcgaga

SEQ ID NO: 348852 - DNA, 573 bp, Cannabis indica
aactcttaaaattgtccttggatctacttgatgaaaaacgtacaaagtcgcaaattactaacacaacataccaaaacagagtgacaagatactacaaaaggaaggtgaaaaagagactcttcaacgttggagacttggtgctaaggcgagtatttgcaaatatgagagacacatctgcaagagtattcaacctaaactgagagggtccttatgtgatcgaagcgatagtaggaaccgcggtttaaaaattgactcaactgaatggctcattgataaagaactactggaacgtggaacatttacgaccctactaccaataaactgatgctgtaactcatatttctaatgtaatattttgaacttcagttattaataaagttgaatcatttttcaagtaattacaaagtgtcatcctttaaaattacttgaggggcatatgtgtatgattaactaaaatctatttggaaatacatgatatattgcaaatcccctacttcagaattttcaaaatttttaaagtttttattaaataacctttctgacgagaaaagaaaatcaaaagttgtaaatgag

SEQ ID NO: 348853 - DNA, 519 bp, Cannabis indica
cacattgtccccaatgtgtgaaaataaaccaggatgagagaaacttacctgagccccttagaaggggtttggcggcggtggctgatcataagggttgaagcggggtggcatggcaaagtaattaggatcgtccacaccgacattcatcctcgtgacaagtgcgttcaattgggccacctgctgctcatcgaaaacactctgttgggccatgtaattctgcatgtgcatgttttgctgaatcagataattcagctgatcgtgagtgtactgcatggctgggtcgagaggcccggcaagacgtggtggttcaatgtcctcatgctcctcttgttctcttccaggaggatctctctgagctggcagttgaccataagggtgaggaggtttgaggcgaagaacagtggacaagttaatactgcgttgtggcggcgccttggtatcatatgagtactgcggtactccattgtttctcacaaaggtcgtgataattcgagcaagcccaagtccaccaccagaaga

SEQ ID NO: 348854 - DNA, 1040 bp, Cannabis indica
accattcattggatagaaataaattatcagaattttgaggataagataagaaaatttgcatactctatttgaatgacttggaaaaaatacctaatcttcaagaaatgttttatggtatctctaatgattacttaatctttagcaagtattgtacattaatgtttatactagaatgctatgttgacgacttagtctagaaggaatttaatgtttcacactaagataatacgtcacaacaagatgtccctgagtaacaatagtaagagattaaatgtacttctatgtatgaatttaactagactcctagtgttgagtgggagcaatctaagatgtaatcgaacaaggaacattaggagacaatcaagaaaaatctctaaaagagacctatatgttagatgataagggtgtatattagaatccttatatctacaccaactcatagcctattcgagatggtgcttactctgggggtaaaggaattattctagaaggatgtaaagacccatctataataatttaagctctatcagtgaagatacataacttaggtgcttttgaaaagcactagaaagttatttaactgaagaaagttcttagctgtgttatctttattccattttggatagaattagagacattgtcttttgtttattcagatgcacttaataagcagtatggaattcagtatccgtagatgagtaatgcatatagaatatgatgctgcataatgttttattaatacaaaggatgtaatggtggagaaagcagtagtttaccacagacttacagttccagtaatttgggtttagtcaaatatactacacttgatctggatatcaagacaatagattgattgaaatgcactacttgttttatgttagtgcaagtgggagtttgttgggattttatgccctaaataaaccccatttcaatgtaaattgatttgttatcaatagaagattagagatcatttatgtttacatgtagttttcatgtttatggtttaatgtgacaaaatctattaaatccagaacatatag

SEQ ID NO: 348855 - DNA, 625 bp, Cannabis indica
aaattcagggggcatgatttagtacatgtcaaaattcgccggggggggggggggaaattgctaattaacctaaaaataaataagacttatccctctaagactatgagaattttcgtagagtttttctttctaaactctttctctgttgcaaaaatttcttatgagttatagaaattattgtaagaatttggtcatttaattaaataatttattaatataacactaacataatatctaatctagtttaagagtccaagacaaaaaataattatataaatagttgtataataataaattatgagagaatgtatgtgcatttttagagtttgtttgtatagggaaatttgattttctatacctagaaaatcttaaatttttttccataaatacatacttaataatattagtaatatatgaccacattcctaatatcccacaaatacccctcccatttgaaaaaaatcaaaaaatgaaatcagccatggatgcctcatcccgaacctctctctcccatggctgcctcatcccgaccaccacgcccggccaccgacgactacccaccaccccgactacgcacgaccaccgtccgaaccacgcacgaccaccgtccgaaccacgcacgacc

SEQ ID NO: 348856 - DNA, 1104 bp, Cannabis indica
aattcgactgaggtatttaaattggtttccatatcttgcgtatttgacttttatatttggaaggaaaattgtctagcttttctatttatggaaaataaggtataaagggtaagtttggtgacacatcccttttccatctatctagctgtgttaaatttgatcttgtgtgattttcttattatgtttgatcagatttcttaaggtgaaaaccaaagcaaaactttccttttacataaaaggaaagtcgcacaactgctcacgattctgtatgtacagaaatgaaaatttctgggttgattgaagatctattttagggaattgtctagtgagttgtggtcttgttcagacagtgtgtgagctgtcaataaggtgtattgattataaatacaccttatagcagcttggtcatgtatatctttcgtacactttgaattgtattcatatctttagaaaagagtgtctttgctttctagagaagagattttttgtctcttactctctttatatgtattttgtattatcttaaaactataatcaagtctacaatggagaagaacaatagtcctaccttcaagagtaggttttacaaagctttcgggagattgcttttcaagtcttgcctcacgagaatgcaagcactattcaaggactcatgactatgccaaatccaacacatcacttggacactaaggtatatacaattatttggtaacttgttattttaagttatttttattaatttagaattaacttaaagaattcttctctttcttttatactagtatagcattgataccccgtacacactcgacaaaatcatatacttcgggatgaatgggcagaattcattcagtacgagctcactaaaccaacgcaacattgaagctttggaacttttttgtgtaagatatacttttgttattgtaattaattatagtataaacatagtactttgttatactaactgatttcagtataagtactttgtgaagttgatatttttatagtataaggattttagtatttaatttttgttgatattttctcttaattttgaaatcttacaatttaaatggggaatttgacaaataatagtaattttca

SEQ ID NO: 348857 - DNA, 371 bp, Cannabis indica
gtaaaataatttccaacattgggctcttcaatttcggtttattggactaccgccaaattctattacgtctgcttctgcgaaccttgccagaggatggatctctctccgagttttatcacgagtcaactgacaaccttccagacttgtctgtctaaaccctttttatacctctattaggtcttcgttatcttgttcttttggctccacaacagcttccgtctgtgcattgtctttcggttccacactatctttcgtctgtgaaccttcttctaggagctttgttccgtactccatttgcacacttattgtgtctttgttttctatttttcctacaccgcatggagacacactacccttcctaaaggtcaagt

SEQ ID NO: 348858 - DNA, 509 bp, Cannabis indica
gcatgcacgttgttttttgtgtaggaaagatcattaggggtacgatacatcttcaaacctccttccaagacttggaaggactgcttgaagtctatcctactcctcctgatgctttccctgtggtcttttcaagcgaagtctaatcttgaatttttatacaacttcagccttccttctcggaagtcgaagcttgtttcataaaaattcagcatgattctcgcatggaggtttttttttttttgtgcaagaaagatcactaggggtacaatacgtctttaaccctccttcctggacttggaatgtgttgtcgagtgaattttgcaacaccaaattatattattttactaatacgaatgaggattttaagagaaacgacaagtgcgagtattcaacctagaacggcgagtactcgactgggaataggaaaacaatcaacaaaattggaaaatatcaataagacagagaattatagtggttcagtcagattgtgatctgcttagtccactgta

SEQ ID NO: 348859 - DNA, 569 bp, Cannabis indica
actacatcaatgaatattgatactactgatgaatcaatatctgatcaaaaaatggggtttgacttggttatcagttgtctacagctctcccctccttatgtaagcacaagctttactccaagcccttccatggtgtcaagagaaattctttattgttgattttataaaatcggattgtaataagaccatctcaagaaaaattgtgtaaattttatgctaaatttaacgcaaaaaaaaataagtccatgttatatttagcttacaaattacaattatattcaagtggtaaaataaaattttattttaataaaaatattattttttttataagaagtatatataattttatattaaatatataaataaaaatataaaaaattattaattatggtgccgggtgccgtttagtaaatactttttttaatcagttttctgtttttaaaatttaaaaagtaaaaatatttttcaaaaacatgttctataaaactgtttttacttttcaattttttaattaaaaatcaaaattttaaaaacaaaaaaaaaaatcacttttcaatattttttttaaa

SEQ ID NO: 348860 - DNA, 1250 bp, Cannabis indica
atcacacgattcaaacatttatcgtttgcttggaagcaaattagacgaagcagatacctgtcacaacatgtactctcttattttatattcatgttgttagatttttttttctgcgtttttttttcctggtatatatacctaaatcttgctttgatgactagattgaaacttcaattaccttctttttcttaaatcttgctttgatcaacagactactagattgaaacaccgcctccctcacactcacctaatagtgtttggactacaccatttagattaaaagccccatttgcttggaagcaaatccgccattacgacaggtacgttctcttttagctattttaaagattattttagctctcatttttttttatcttattcactttattttctttaatctaagaattttgggatttttgtctattttgaatgtggaatgatattcaatttgttttttttttcctttcttctcttttattttctcaaacttgttttctttcttttatttttagtttttcataattaattttaatttgtatatacccatcatctttcttttttccctctcatttttctcttatgcatttttcttattactttatttgggggattttgtgattttcttattacaggaatctttgtagaaatctttgtgttttggaataagatgagttgaagtttttaggactttagcatcttattttttatttactatatgtaatttttctattttgacccattagtttatgaaacttttcatttatcctctaacttgacttggagtttcatctttttaatttgggtatgtgaaagaattttacacacttttatttgggtaagctcaatctatctctctatgtaaattatagcatttcacaggtatatttttattttatttttcttatattatcaatctgattttacataaattagtgggtttgaattacgatttgctaattttgtttttctaggttttattttctttatttaatttcttattatttattatgtcatgttttttgttgtttctttgttgagtattattttgggagctttcaccttgttcccttttgatgccctttatgtataactcttcattttgtttttatctccatgtggacttaagtagaggcagggccggccctgaaatttagtgggccatagaaaaaaaattattttgggccgttatttagaaagaaaaatgtaatatttttcaaaatcagtaaaaaaaaattgtataatttcaaaag

SEQ ID NO: 348861 - DNA, 564 bp, Cannabis indica
tgattcaatgacctataatttttatgaagaaacctctcacaaattcggaatctttctatgtccaaaattaacatttgtatacagtttgtcgtgagttatttttctcatatttctcgaaaaagttctctcagtaaaattggaatatcgttttcaattctagcccgtttttaataatatatatatcattttaaagcttagaaagttatctacattttcccttcagagagttttctctaatttggagttttccttggtcgaaaattatcgttttgttgctgtagtctaaagttcgtttgctttaagatttctaaaacactttttcggtaaaactatgataactccctccgttttaatccatttttagtgatctttgtatcattggaaagataatttaatttcctattatttgtatgaagttaactttcactgaattagtgtagttgttggtcaaaaatagtgatctttccgctgtattgtaagagtacgaattttaatgttagggccttgacccatgtgttgttataggtagtagtgacgagataacaagtcttaagcagcgggatt

SEQ ID NO: 348862 - DNA, 734 bp, Cannabis indica
accgtctgcacgtagagagccttactttgccagaccctattctcctcatcatcagagcccaccgagatctatttcctagcctcatgaaatttctcaacactagagagaggctgacgcaaagatctctgggcataggatagggtcttaaggttgctggtttctctgatagaaaccacgccaacttccttcctagatttacctgaaaccataccaatcttcctctggaattcttcattagcctgagaaggatctttgagatcgctcacaagatcaataccctctgggaacacttgtgaggatcggccatggcaggacacggggttcccatggtttggaatggtaggaagctcatcagccctggaatccatcgtttccggctccagttgaggcttgaagtctgtaggaacgaatgaaaatcggttagtgcatctgggtattatgagtctaggaggataaacttctgtactcagaagagacattttggcaagaaggaagtaatccattctaaaaatggattacactaaagagccagaaggtttgtgaaaaatgacaagcttgagtcgtccttttatacaccagtgacaagaaagccaaagattgagaaatctaatagccgggaattgtgcagaatatgaataggcgattcatgatgatcttcgaaaccatacaaccgccagaatcaaaggaggtgtcctttctaagaaaggattttggcgaaaatgccctccgtaatt

SEQ ID NO: 348863 - DNA, 660 bp, Cannabis indica
aagatgtggcggtcttgtattcttgaaaatgacacaagagaaaatggaagttagaaatcctgttgcacactatcaggccaatatcggacatctatcggacctatatcggaccaaaatcaaacatcaaataaactaaaaataagctatcggacataagagggcatcggacaccatcgaaccccatcggacaaagcatcgtgcacaggacagtgtcataaatcacaaacgcataggacctagtatcagacctcatcggacatagcattggacaaagccaatctcaatactctaaaaggcatcatcaaacaccatcggacagtattggacagcatcggacctaactaccatcggaccctaatcagactctatcagaccattatcgaaacttcatcttcaacctagaatttttctacaaacccacacccaccgaacctacatcggtccgccatcggacaccatcgggcctaaagaatttctcgcactgaatagacaacccaaaacctatcctaaaatctaataaaactttcacctatcatagatcaggcattataaatctaaaatataccctaaatcaatgaattataaatgaaaaaacatacaaaatccatgattttttaaagggatatcggcggctaaaccacctgaactttacggtttgta

SEQ ID NO: 348864 - DNA, 690 bp, Cannabis indica
cggatgaggagaccgagccatttatcctgaaattttgaattctgaattccctcagggatttaaaaaaaacacacgtctcgcagtatgatgggactacggatccaatcgctcacttgaataatttcaatactataatacgagccaacaatgtcttgaataatttgtgttacatcttattcccgacttctttaattggggtagcaaatagatggttcgacaagtttactcaccattcaataacatcttgggaacaaatatcaaaagactttaagaaacaatttcaagccgcaagagacaggcgacctgaagcatcatctctaaccaacataaaacaacaaccaagcgagtcgcttaaggcttacctgagtcgcttcacaccagcgctgcaaaggttagaaacttgaatgacagtatttagcttactgctcttcaagcagggatcacaaccgatctttcaacggctgggaacaagttgtgggatgacttgcaaggtcgcccagtaaggaacattaatgaattcaacgaaagagcgcaagtgtttatgcacaaagaagaagcaaggaacgagatgaagttgctgaagactagctcaggaaataaacccagcacaagtactgccacagcaagtaccgtctcaaccaaggtagataacccaagtggttcaaacaccaaaagaaaagatgactcgag

SEQ ID NO: 348865 - DNA, 536 bp, Cannabis indica
tcatttctctatgatctgacgtattctttctcattctggtgagcaaagtttgacagtcgatcatcgcataaccattaacacgggaagtatttatttatatttcttattttcttttttactttgtactataagtttactgacttgaccgtcggagtgccttcggttgccaccaccttggtgtcccaaggtttcacagttatcctttgtctttgttccgcacgctgtcgatgcccttaaatgttcatttcgatcattgtagattttagcatttacaatatgtatacataatttaatagtggtatatataattttgttagtatgatatatatattttttaagtattaatttaatattataattttttgtggtatataattttattactacagtatattaatttttaataatatgatatatcaaatactattgtatatatttaataatctaatatattcattcatttttgttacaatataataatatgcaatactaaaaaaattatataacttaatttaattattatatatattttaaaa

SEQ ID NO: 348866 - DNA, 587 bp, Cannabis indica
ttgcttgtttttcgtttgatactccgtccaacactcatcttgtgtgttgtcttttgtagatgaacccaggtgagtcttgggagcccgagcatcaaatcgaccaggagctgcttcaacttctgcatgaagtccaccctcgtcttcgtgctaactctccttctagagaaggaaattcttctgattctgtacctagccataggatgatggctcgtacgaagaaaaccacgcgactggctgacgcttctgacccccaagtggctcggcttgcaacgctgcccgacgccgaacaggatttcgcagtcccaacggaggaggaccgtgagggggacactgaagtccaggaggttaaggagctggacgaggcgtgtccgggcagtcctcccgatgaggagggagatgaagaggctgaaccccctaacttcggggagtacaatgaggctgggcaaccagtcgatgctgatggggacgtcctggttgagggtgtggactacgtcagtgaggagcttgctgaggcggttcctcacaggaggcaacgtgccttgggcgccagtttggtaagtcctccgtccaagatttcagaggcacgc

SEQ ID NO: 348867 - DNA, 573 bp, Cannabis indica
ggtttgttacttttatagacgaccacactcgtctttgttgggtttatttaatgagggaaaagtctgaggttgaacaaatttttaccgatttttacaaaatgattgaaaatcagtttcaaacaaaaatcagtattttaagaactgataatggaacagaatactttaatcacatcttgggaaattttttaaaagaaaaaggtattttgcatcaatctacatgtcctgatactcccgaacaaaatggaatagcagaaagaaagaataaacacttgttagaagtagctcgtgccatgatgttttatatgaatgttccaaaatatttatggggggacgctgttcttactgcatcttatttgataaatagaatgcctactaaagttttacattacactactcctttgaaatgtttcaaaaaattctttcctacttctagaattaattcagatttaccattgaagatttttgggagtactgtttttgttcatcttccaaaaaggtctagatctaagttagatcctagagctgaaaaatgtattttcttaggctatcctccaaataaaaaaggatataaat

SEQ ID NO: 348868 - DNA, 262 bp, Cannabis indica
ctcgtgtgttgtcttttgtagatgaactcaggcgagtcttgggaactcgaacatcgaatcgaccaggattttcttcaacttctgcacgaggatcatcctcgtcttcgttctagtcctccttcttctagtgaaggacattcttttggccttgtacccagccataggatgatggcttgtacaaagaaaaccatgcgtctggctgtcgcaattgatcctcgagtggctcggctcgccactttgcccaacactgaacaagatccga

SEQ ID NO: 348869 - DNA, 558 bp, Cannabis indica
ttttttttttttgaaaagcttgataattttagtgaactttttaaaattttaaggtaaacaaacaatttcattttaaaaaaaaaatatataatataaaataaaaagaaaaacagtgtgtaaagtttcaaaaataaattcttaatttttattaataatttaagataattataagaggtgtttctaatcttgtattgctttagtgactaatattattagtataatgaaataataatcaataaataatagtaaatattccagtaattaattcatttcattttcatgaaatccgctaagtacataagctcaagaatagtcctgttatataaaaatattgtgcaaatttgagaaataattattttcaccagtctctctcggcaccgacaagtcgaactttgttcttctcttccagtctaaccgccacttaccgttagataacatgtcctcttcgagagtacaagacaaattttcaaaatgcactctaagagacaatactaatatcccaattgaaccgaagttctattttctcatcccatattaaataatagctatacaactcaa

SEQ ID NO: 348870 - DNA, 538 bp, Cannabis indica
aatatatatatattttttcctttgatcgaaattaaagacaaactaagaaaatgttaaaatgataattttgaaaagaaagtagacatgggatgatgggggtaggaggagggactttatcgataacatagcggattacacgttttttaatttaattaatttgctggtttagagcaatgaaattatacgcatatttttaaagtgcattgttatgacgcatcagtggtgtctagcatttctcgacatatcgtgttgccattggttagcgatactccctgaaagctattatcttaaattatatgggacccgatgttagacaatttatatgtataaactgaaatatatgtatgtgtatataaaatgcggaattaaacaaacatatatatactatgaataaaggatcgaaatacctccagtcattgaatctttaagcttcaaactcaaaaattttgatctgcaaaggaaactcgttgatgtgggtaatcgggcttcctcgctctctcaactctctttagatggaatttgctgttatgaacagaat

SEQ ID NO: 348871 - DNA, 515 bp, Cannabis indica
tgtgaaaaattaaacaatttagtttttacggaactcgattccaataaaaattaaaaaagttatgttgatttgaagtttcgggtcatagtggtgtcgagaggctcgcatcgcacgcaccagtcactcggacaaggtgctcgtgcgcatgtgtgtgcctcagacatcacattgtctgaacccgctgaagccccacgctcagacacgatcacgcggagtgacaccctgcagcacgtcaggtttcctcaaaagatgacgctgcaaatcccaccagcgcgcgcatgagggctgcatgcagcttggtcgtgggcagcttgcatggtttcaacctaaacccaatttcagatttttcccatttcaaatcactaatatttaattaacattttatttttaatatttaaactttaatatcaaatttttacaaattaataacattaatttttaatagattattattaatttatgatatttagaggtttaaatttaattgattattttatttttaaattatggtcaga

SEQ ID NO: 348872 - DNA, 645 bp, Cannabis indica
ggcatttgccatagctcgataatctgcttcagtagcggatcgagacattgtctaatgtttttttgatttccaggacacaagggacctaccgaggaaaaggaagtaaccagagatcgatcttctagtgttaagtcccccaatcagcataaaaaaaaaaggaaatatgaacatttgatggggatagacttgttttagcataggctgatattgtaggagtggtgttggatgggaagtaaaggttttgtccaggggttgttttcaaatactgtaagatgtgatgagcagcatggagatgtggaactcgatgacaagttaagaattagcttaaatggttgacagcgtaggagatgtcaagtcttgttattgttaagtatattagtttgccaatgaggcttactaaaaactgtggggtctgggagggggttccctttatctttccttaactttagattggtttccataggagtagaagcaagcttggctcctatgtaccctgtttctttaagtaattgaattgtgaagggtttgggtctttgggaaaccgaaataccttgtttagtttgaccaacttcaagaccaagaaagaaacgaatggacccaaggtccttgagtttaaatttttcatgtaagtatgttttgaaatga

SEQ ID NO: 348873 - DNA, 555 bp, Cannabis indica
atatctacaccattaacaaacaaaatttaaagttatttatataatagagtaactacgtacataaaaaaaaattcctaacaagtaatgtataaaaaatattaaatacataaacaaacattatcacaagtaagctattacaagtaagttaccaattagacacatgttcttttctttttttctttatgtttgcctgactatgattgacccatattccctcattgatatcgtttccaatgtattcaacattgtcttcctcaaggttacgatcgattcccattacttgttcatgaactggttgcccaacaaggaagtcatcataacataaattaacattctcctcatcctcttcattctctaagaacctcctttttgatgtcgatagaataacagactatttatcattaaccgaatcagaaatataaaaaacttgaactgcttggctatccatgttgattggatcattcttacttgctctcttacttaaaccaaccaaagtaaaaccaagctcgtgagtttttactccaacattgttgtcaacccaagaacatttaaaaa

SEQ ID NO: 348874 - DNA, 716 bp, Cannabis indica
ttgagggaagcaattggggtggttgagaacttagtaattgtgtcagagagacatcaaagcattgaccatgctattgaccttgttttccccgaagcagtccactgtgcatactataatcacattgttatgaacgtgaactctaagttcaagattgatgctcttcacaaccaaatatattatgttgcttactcatggtcaaaaactgaaggtgatagaaaatttgagaatcttagaaagatgaatcctgccattgctacatatgtgaagagtataagatttgagaagtgggatcacccttattgtttggacgatcgatacaacatcatgaccaacaacgctgctgaaagcttcaacagtgtcacataagagttcaagaaatatccaataactactttggtttaatttatcaagtttacactgcaatcttggctcgctaatcgccttaaaaatgcagtcaaacgtacaatccctttagccacgctctttgaaaaaaagttggcaaaacatcataatgatggaaggttcaggcacgtccaacgaaatggagccaattcgtataacgtttgtaggggacctaacggtgaaagaggtggtgatgtgaacctagttgaaaggacatgcacctacgacgtgtttaccttgttgaaactctcttgtactcatgcatgtgtcgcagcattgaaaacaaatacgagtgtgtacacgcttttctcacc

SEQ ID NO: 348875 - DNA, 712 bp, Cannabis indica
acgtggttgactttgtggaaatcgtctcctccttcctccatcctttctttgaatttcttaggcatatactctatgagcatctcattgagtgtaacaatgttcttactccatctggaactcttctcaatctctcgcaccatgtaatagtcaaataggcaagtgtaggcaatgcactctcctccactttccactctgtcaagtaaggtagaaaactaagctcaagagattcaagtcgagggaaacctcctcttgagcacaccatctcataccccataaagctatcatatccaatgacaaggactcttaattttggtagcttttctaatgttggcattggatcatcctcaagtctgagatatctcaactgtaacttgatgagatttggggagaattggttgacttctggtaatcttactataggagagtctacactaagcttataaatgtgaggacagcttaatatcaaaggaacaatatctatcttctcaaatggattgcgtacttgtaaagagaaaagacgagtgaatgtgagagattggggattgtgtaagaatgtcacaaaatttcgatccacacgaatccctaatttcttgagactctccaactgtagaagatcactcagtagaagatccttagtactaatacctaccaatgtttgtaaatttctagacttagttgacctcaagaaattaccaaattctatgccattacc

SEQ ID NO: 348876 - DNA, 829 bp, Cannabis indica
aattaattagatctaaaaaaagaaagtctacctattagtaacctgctattacaggttaaagaaaatgtaaccatatggttacaataaaaatgtaaccattgaatagtcacccttttaaatatattgtactatgttattttgttaattttttgttatttgtatattattttaatgttgttttgttattgttttcacgctattttcatgtgtttttttttattttatttttcgtgtgtctttcataacataccgtaaaaatatatataaaaaaattaatcttaaaaagtgtaaatttttttaccaaaaataacgttttatataattttttaaatatatatatatatatatgtaagggtaattaagtcaattgaatacacccaaattctcctaacagttttgattatttagaagtttttttctttcttttttttaattatttattttttattttttttgaaaatgagagtcaaatagaataaaaaaggtataatacattacctaatcttttttttgcttgttctttttttcactttgcatatataagtacattttttagatttactcaaaatatgataaaaaagtatttagttttaaaaatatagaatactacatgcccgaaaattattttgtttaatagagagaaaatgtaaataatgctttccaatttataataattactttcctatatatcataaagtaataaattatttttatattaatatatcatacattagtaattaaatgtagttataagttaccctattattaattaataataatagatgtgaatgggagttactctattgataataataatagatatttagtt

SEQ ID NO: 348877 - DNA, 1013 bp, Cannabis indica
agttcatcttcgcactggtacttctcagactgcttatgagctatggaaagggagaccaccaaatgttagccacatgcacattttcagatgtacaagctatgttctgaatgatcgagatcacttagccaagtttgatcccagaagtgatgaaggaacatttctggggtactccatcaatagtcgtgagtatagggtatacaataaaaagactctctcagtggtcgaatcaatgaacgtaaaatttgatgacttagaaggacatgaagaaatgtgtgtcgaggatgatgcccctgtcctctctggacctagaccagtcatcactagaccgactcaagtatatcctgacactcctacagagtctctaaacacagaaccaggtgtatcaggtgacgatcaagcaaatgtcagtgacccagatagaggaaatgaagttaatagtgccctgaccaaagaaccccaacaagccaaattgtataaaattggaccgccctcctaggttcaaaaagctcatcctcaggccacagtcataggagatccaaatgacaccatggtcactagacgaaaactgcagaacctgttagcatttgcatactatctatcataaattgagcccaaaagtgtcagagatgccctattggatgagttctggttggctgcgatgcagaatgaaatgggaaactttaaaagacttggtttctggataacggtccctcggccagatggtgcaaatgttataggaacaaaatggctatttagaaacaagtcagataaatttgggacagtgactcgaaataaagctaggcttgtggctcaaggatacagtcaggtagagggaatcgactttgatgagacctttgcaccagtggccagattagagtctataagactgctactcatcattgcatgcttcatgaagatcaaactcttccaaatggacgtcaagagtgcttctctcaatggggtaattcaagaggaagtctatgtcaaatgaccgcagggatttgaagatccac

SEQ ID NO: 348878 - DNA, 630 bp, Cannabis indica
aaaaaaaattaacttatcattaataattttataattatttttagattttaaactattttttatttaatttttaagttaaaatataactaaaaataacttgaaccaatctcgaactgatatactaatttgacacttaaagtattaaaaataagattgagtgtagaattacctctacttatggtcattcttactattttattataaggttatgtgtatactaattttaaattataaagaattttgttacaaatattttaatagttaagtgcaagaaaaattaattgcttcttacttagtaataaattgtaaaaagttaattaataattcttagtaatttaattttaaatataattaattttaataattaaaattttataatgaaataagtatcaagttactatcaagttataagttaattattatttatttattattaatttctaaattaatcataaccatttaatagtaatccattgactaaaaataaaggtaaccatggtatttacatatttgatgtaactattaaaatctcctccacatatatatgggtccacttttaatgggtattactcatgagtgggtaatattagaaaaatttaaatttttatgattaatttttctatttaatta

SEQ ID NO: 348879 - DNA, 609 bp, Cannabis indica
attaattaattttaacgttaaatgaagtagtaaaaagtgatcagtcaatgatccgcttttcactgccatgatccaactcctccatgataatattaccatgataatattgtggaggaagattgtgaaggatgtaatgaactaggaaggtatcaggaatgataacatcgagcttcttcaaatgagtagtgatgtccctctttttagaaatgtattcttgaactcctttaacaccggtgagtttggtggacgagaactcttggatgaggttgttgaataaagatttatctgaagtgtcaaacaactcatccatttttgataaaatctttaaccttctcaggtggctccaccgatccacgcattctcaaaggaattctagacatgatgaacatgatacagagacgattggattgctcccacttttcacgcagtgcaatctcagcagcagtgatagttttagtgacagcagctggttcgtctctccttattgcataatccatgttgtgcaagctaggtggagaagaactcgttccttccagattttgaagttgtcactccgaagttcagggatttcactagtgattttagcgtatttagaagtggatgaaatag

SEQ ID NO: 348880 - DNA, 883 bp, Cannabis indica
ggcactaataatgcattttaacatttctatatatataacaaaaatgctaattattatatgcataaaactacaagaaatgtcacttttaccagcacagttcactactgcgctggtaaaagttacttaccagcacattttataaattggcaaaaaagtcaaagatttaccagcacacatttgcagtggctaaaatctaaattttactagcgcatttacgcgctaggaaaagtcatttttgtcagcagtttttattaagtgctgacaaaaattctaataccaacgttgatttgctaaccttttttgccaacacatcaaaagtaaatttcattttactaatgcaataccaaacttttgccagcacaaaaatatgttggcaaaagtgacatttgttatagtgaaaaaagatttagtaatacttttaaaagcagtgtaacaatatattatttttaaagcattaaatattatcataagggtacttatataagtgtcatcttatatactaactttttaacaactatatctaggagacaacactattgccttttaattttctttagttaaaaaagtgttgctaaaagttaattttgtagtagttgatgaatagagtaatcaaaaccaaaaacgattaaagcaataaataataaaatcaacacaagatataaactggttcaagtcttatagatcgatgtgatctatggttctagtccaattttagaacaaccattgaaattttctttattgattgagtaagaataagatacattgcacattaattatctgttggattctctcaaagtgttatctctcacactctcattcaatagtctttttcatttacagaagatatttcgatataaaacccaaatccaatctctctctctct

SEQ ID NO: 348881 - DNA, 522 bp, Cannabis indica
agcaatcataagcgatgaagggagtcacttctgcaataaacattttgaagcactcctatctagatatggcattcgccacaaaactgctctaccctaccatccacagagcaatggccaagctgaaatttctaactgggaaataaagatgatattggagaaaacagtgcattgatcaaggaaagattggtcacgaaagctagatgatgcactatgggcttatagaacagcgtttaaaacacctattgggatgtcaccgtataggttggtgtttggaaaagcttgccatctgccggtggaattagaacataaggcctattgggctatgaagaccctcaacatggacttgaaagctgcaagagagaaaagattgctgcaattgaatgagctggaggagtttagaaatgaggcctacgagaatgctaagacctacaaggagagaacgaagaagtggcatgaccaaagcttattcaaaaaggtgtttcaacctgggcagcgagttttacttttcaattcaaggttgaa

SEQ ID NO: 348882 - DNA, 506 bp, Cannabis indica
tctccgtaataggatctgacaagttgtatacaatacgacttttcctccaccaattcatttccttaatcacaaaaactcttgatattgtaaaattcctctctatatgtctactcctctagggatactggattctttactttttggcaactacttctgtgttagtcaggaataacactagtagttaataaattattggtacaacgccaaaaactgtatagaactttccatcgactaaataagtatctttcttacaactttaacatctagtcccactgatagagttagagatttcgaatcagtttttacacttctccaaaatcactactccacccccagagtagtcaccatctcttcagtagactttctagcatcaacgcaagtctagaaacctgatttggtgtagtctaacagtattaaaataccatcctaatcgactaacatatagttcctcttcttgatcttatgatttacttgattgtcttccaatgttcctttcttggatttaa

SEQ ID NO: 348883 - DNA, 1016 bp, Cannabis indica
tttaaaatatgagaaaaaaaataaataaatttaataaaacttgtaataataagttctaccggaaaagtccccggcaccggaaaagtcactgtcgccgaaagtcaccgaaaaagtcaccaaaagtatatgtctcagatataactaaaaatagaaccggttctatagcataatgaataaaaacaaataactataactagttctgtaacataatgaataaaaacaaaagacgcaaaattactcaaaccagttataattaaaatagaatcagttctataacagtactgcaatgaataaaaataaataacacgaaataactcaaaccggttatagctaaattagaaccggttatataacataaagaatacaaacaagtaacacgcaataactcaaaccgattacaattaaaaaataaagaggaaatcaattcctaaaacactgaaagattaattaaaaataaaattagttccacaacaaaatacctcataacacataatacctcaaaccgattataattcttttaaaaaaatatggggatcaattccaaaatatattgaggcataaatataaaaagaatcggtttcataacaaaataaataaatacaaagagtaatatacaatgactcaaatataatataaaaaaaatgattatattaatcaactagttaaaaatttaagacaaaaagactagttctgtaaagcaactaagacaaaaactcacacaaaaaaaaaccagttaaataaaataactcaaagaaaaatatctatttaacatgctccaacccgccaaataatattacacacataccagatttaccccaaaaatatctatttattatgttatataaccggttctattttagttataaccagttggagttatttcctgttatttatttttattcattataacactgttataaaatctgttcaattttaattataactggtttgagttattttgtgttattatttttatttattatgttacagaaccggttacatttcaattataaccg

SEQ ID NO: 348884 - DNA, 497 bp, Cannabis indica
aggagacagaatatggctttttaatagcattaaccaacacaagacaatccgactccaatattaccgctgtaggacaaaagccatcaacagtcttgctatcttcccaacaggatttaatccaactcaaagcctccttcatggacaacgcctcagcaacaacagggtcaatatctcctcggtgtttgacagctgccgcagcaacacacaacccagcatgatctctggcaatccaacccaatccatgactcctttctccagaaaacagagcagcatcacaattaaccttcaactctcccaaagatggtttaatccagtgctcaacaccagcacgaggctgaccagaagaagacgaagctcctccattgatattttgagcaaatttccaaagatcaaggtaagtaattgcagatgaaacaactctttccacagaaatagccttatcattccagactaaatcattgcgggccccccaaacactccaaagaatcattgccaac

SEQ ID NO: 348885 - DNA, 601 bp, Cannabis indica
tatgtctagtttgtgaattttcactaaggtatggcctaattgtgaagaaatatgattttagggtttatttattaattaagatactttatggagtctaattaataaatattatacatgaaaattttatttgataattattaaataaatagttttggcatatatagtgttgaaagtgtaaaaaatggtatttgtgaaaaatagataaaatagttgagaaaatggcaaaaatctaactagtttagggcccattatatggccggccactagtgcctaattttgctctatttttatcaattttttattccaaataattcaatcctaaccctaggtaaaattagtaaaaagaaaagctatggtctcattatccaactaatgcctctaaagctaaaaacctagttttctctctagaattacgagacctcttccttcttcttcttctctaattttgaaatcatatagccttcttcacaaactaaattcaagccttagtgatagagtacatgcccacacataaaaagttggtactcaatcatattgtgtaagactgtgaagaatccaattcaagtgaaggagaatcggactcagatcttagtgatactct

SEQ ID NO: 348886 - DNA, 536 bp, Cannabis indica
tatactatttttcgttcttcatatataaccccacataaaacaagtcagaatagttcaaaaatcctgacaaatttaaagcttaatgatggaaacaaggctattattaacacagagaaaatatagaaaatataacgaaaataactcattcacaatccagtcacaccaaatagaaaatatagtatagcattgaactcttttcctaatatttagaaaataacgtataatgggaataaaagagtacagatatataaaactgaagaaaatgtagcaaatacaaaggtagaagatctacgatggtaactggcaaggggcggtgacgatctgcggtggtaatactcaaggggtggcgatcggactggtagaaacgagatggtctagacttggtgctgagggagaagaaagagacgagtggtctggacacaagaaaatgaaaatagggtagaaagttagggtttattatctaaggttataattgtaatttcatcatcaaatttttaactgaatggtcattttgttaattttttataaaaagggac

SEQ ID NO: 348887 - DNA, 1001 bp, Cannabis indica
ttcatggaatccatttctgaatccatgccggctgaccattgtttccgttcgggacttgccattgcctatttataggttaatggatcgtcatcaataccatcaccaatgaccatattaatttcaccatccaagccatagtgagctagttttggggaaatcctcccactacgacgaggagccgtgaccttctgaacaggaacatttgtggtagattttttagttgtaacaacatgcgttggttcaactaagggagtgggattatcctctacttgagtagaagaggatggaacattagaaggagttacatctgaaagcatttcttctaacactactttaccttggggcttgaagttcttaatatattcttcttcaaggaaaatggcatttgtagaaatgaacactttatcacccttttgaccataaaatagcccacccctagtctctttagatttttcaacaaacaagcaaacctcaattcgcgcttctagtttgccttctttctttcttaagacatgagctaggcacccccagattcaataataccgtaaactaggtatacgaccattccatagttctacgggtgtcttagggactaatttagaaggaacaacatttgaaatgtcattagccatctgaatagcatatccctagaaggacggcgatagggttgaatagctcagcatagacctaaccatttctaaaagtgtgtgatttcttctttctacaactccattttgctgtggagtgctaggggcagtatactgcgattcaattcgaagttcaattaaatgatctttaaattgtatattcatatactttcaacccctatcagttcgcaagatctttaatgttttacctagttggtttttagccaaggcataaaattcctgaaacttctcaaacgcttcagatttcttttgcattaggtaaataaaactatatctagagaaatcgttaataaaagtgacaaagtactcataacctcctctggcttttacatt

SEQ ID NO: 348888 - DNA, 465 bp, Cannabis indica
aactatatctagagaaatcgttaataaaagtgacaaagtactcataacctcctctggcttttacatttagaggtcaacagacatctgaatgcacaaatctaagaggttctttggcacgctctccctttgcagagaaagaacgcttagtcatttttccttctacgcaagattcacaaactggtaattcacctaagatgatgtttttcaatggacaatctttggttaacctgcgaagtctatcatagcctatatgacctagtcgtaaattccatagatatatttcattattattatcaatctcttttatttttatggtctctaggtttagcaatattaaaaagtttgttattgttgctcctagaatcgcccaatatacgtggaccagtcaagagggaacacgtggatcaaattacttgggaagaactgctaagtctttctatgtcaccaggaagcgttattcgcatg

SEQ ID NO: 348889 - DNA, 874 bp, Cannabis indica
tcggggttgaggcttcgggttctcggggttgaggcttcgcgattgagagagggggcgtgggtgggttgagccttcgggtccgagagagacgaagagagagagggggttgggtgggttgaggcttcgggtccgacagagggggctgggtggtcctcgtcgtcgtcgttggaggtggtggaggtgttttggccgagagagagagagacaattgctttggttcaaatgtgaggggcattatggggataaagcaaaagtagtcatacattgcctatggtataacatttaggtttagggaaaaaattctaggattttttaagtatagaaaatcaaatttcccaatataaattaggaaccttatatttaataatgtttatttagtactctatattctaaaatcatacatatttagtattctaaatgtaattttttttaataaaattttatcaatacaatcaaattgcttaaaattttatgaattttaaattcaaatttaattatttaattacatataattaagatctctttgattaaattattaaaattgtattgattaaatttactttaagataataataatatggaaaatttctcaaaaaaaaaatttactttaagatactaaatattgtacaatttaaaaatataagatattattaaaaatactatcaaatatgtattttataaaaaaatattccaagaagaaaaaaagaaaattaaaaacaattatttaaatttgcattagaatttttttcaaaaaaaatatatatatctttatatattaaaagtgtctatctaacggcaattcttggtttaacagaatattcttaaaaataaaaagaatattctgttaaatttaacgattaggtttgatctcccg

SEQ ID NO: 348890 - DNA, 929 bp, Cannabis indica
atgcgatggatggctagtttgatcatatgggtaagtttagaactttatttcttagcggggaatattttagagaaaataattatcgggattgagcggggttatgggatttgaccattttacccctagcttttgatataccctagttttgggtcaaagggcattattgtcatttggttaaatggtgggataggtggctgccctagtttggtgacaccttgcaacctttttctcagccaaaattaagtagttaatttacttagttagaaagaaagaggaattagaaggaaataccaaaaatagaaggagaagctctctttcttctctctctcttctcgaaccagcaagatcaagggaaagggttgttgatttctgagtttttagcaaggaattcaagggagaaattaatctaaggtaagccctaatgaactcccctttagttttcaagtttttgcttagttagaaatggtgaatttgtgaaataggggctgttaggtttagaaatgtttagggttcggtttttatgttcaatattggttgtttagaggttctggtagttaattttggtgcttggtgttagttctaagcaagcttgagttttgaaactcaagctttgagctttaatggcaagttggaatttattggtttgttctgtgattttctggttggaaattgttgtttatgcattgtataggtaccctggaagttttaggaaagtttgggattgaattgagttaaggggttggttttgtgttcccagcacagaaccggtcgaccggctctgggggacctgaaccaaccggtcgaccggttggtgttccagaaatggacttccggtcgggaccggtctgccggttgggggaatttttggaaccctaagtttttccaaattttgagatatttaggatattgccatgatgtttatcgatggg

SEQ ID NO: 348891 - DNA, 563 bp, Cannabis indica
aatcaagcgtaatatagccctaaaactagaaacaaagagtgaaaactaaccgaaatatgacccgaatcttagactaattttagcctaacacctgacatttcaaattaacttctctcattttttgcgttttttcttcgggtttaccaattttttgtgatatatatttagcgatgtatttgcaatgttagaacaaatctgaagtcagagatgaagtttagtgatgattcgtgatatttagcgatgttcagcgatgatattcacgattttgcgatgtttcgcgacatcgtaaaaaaaccagtaaaaatgtagaaaacaagcgtttttgtgaattggagaaatctagagatgtttcatgatttcacgatgtttcgcgacatcgtcaaaaaaccagaaaaaaatacagaaaacaagcgctagatgggtcaaaaaccagaagaaaaaaatgtggtggtcgtggattgtcttgtgcttctcgtgggtcgtcgtggctcgttgcgagtcgtcatgggtcttctcgcactacaacatttgacttcattagctatagggtattagcggcggat

SEQ ID NO: 348892 - DNA, 1095 bp, Cannabis indica
agactttccaaatatctagttcaaaagacaaaaaataatattgaatgtgacatgtccttttctagtgtaattaaagaaatttgagaattagattacagtagtttttgaaaccctgtttttctttatgattgggctaggagttataatggggttaaagacggtgaatttggattcaagttggtggacttgaatcgaatcatacacaagtccaataggtttataatggtgtcccaagtcagtcaagtgttttacatgagggatcctttagatgcatgctggtcagttgtcttgacgacgcaacgaaaagattatgataatcaagagtctaatggcgataatctcatgcttagtgaccaaattcatcaaatcacccaacaacctgttgatgtcactgttggggatgatatcatatcatctcgtgatgatggtgaaggattatggttgaacgaatctatcaacacatgattcatatataaaacacgtattggtatttagtgtttttgatatatttacatttagctattaattttcctattcttgtatattctaatgtttgattttaaatttgtgtaggcttttatatcactgaacaaggtgaggacgatgagtggagtgtgtggttggattatgatggtgatggtggtccatctgtgccagaaggatcaagtgttgatcctgaacaaccatccatggaagaaggtagtggtgcttttgaacaacgaacagacaaaaatgctcacgggaaaagcaaatgaaacgatataacaaaaatggttagcgagggaaaaaagttagtagattctcgttgacactcctgatgcaaaaagacttagtagattcatctaatagtcatgcttcttagatctacgtgtcgttgtcatattggtccacatattttgggtgaaattaagggcaacaactttcttacacctgttggaaaacatttggtatgtttcaatttatttacttaacttattgtgtttattcgttaaagacattgctaactttatttactttttcatatatgtagacacaaccatccacccaccaagaaacttacagaagcaacctgtgaagagaagcacaaaaggctct

SEQ ID NO: 348893 - DNA, 619 bp, Cannabis indica
gtcacacaaacaagactaaaacagttaaaaacatattacagagacaagactaatcgcagtagcaaaaatcgaatgacagtagcaaaatacaactttaaccaagctacacctatgcccaaagaaggctagcgggcctgttcgaagaaaaaaggcgacttgcaatatctataaatttaggaacgagaaaccctaatttttttgttttaaaataaaatatcatgtattcatttatgagagaaacaaattaattattgtttataaagctaattaattaaatccacactataaattgaaaatatataatatgttgtaaatagaaatttaacatatatttttttttcgtacgtggtgaacagagtcatacatgattaacaaagtcgcaaaccacaatcggcctcctcgaaccaggatagctcattatctaaccgaagaacatgttttgccaaccatgagctgtagaaatcaaatcgcgagccacatgggacaaaactgctcccggaaaatatagacaataaagctataacgtcttcaaacacacaaacaccttctcataattataagttgtcactagagctagcaaatctaaaaaaaacatcgcaacaccaaaccaaaaaactac

SEQ ID NO: 348894 - DNA, 1829 bp, Cannabis indica
aacacttatccaaggtgtaagaataccaatcgctgattatcatgccagtctaaatccagtgaactgacaaatcatggaattaaactttttaacatttaacaatgcttatattccattgtgctgacaacactataatcataaacaaatacatatgttctggagttaatagaatttataatataatcataaaataaattatgcgaaccatgcaacatagaatgtgatttctgatctttattaattagtaaatcttattatattaaaatgggttttatttagggcacaaaagccaacacaaggttcattcttaactaagcattgggtcgcggttccacatccaaatttggagaattcttacaggctgccataattggtatcgcgtttcatcacaacagttggtgttgttcgtatcaatatcactttgttgtcctgggaggacaactttacagagtacaggctctacccaaaaggatttccttccctagcccgtgaaggagaagaagaggaaattcagtgcgtgtcgtgctgagggagctcatcaggagaatgaactcatttaactcaatcgtgaagctaagttgaagggaggtacgcgagccaagcaatatgctcaggagcgtcttgagcaggaagatgaggttgaggaagagccagagactcctctcaaaaggaagaagaaacttctgaccgagcacagtcctatcgaacatacgatttagattagggagcctagtttacctgctcggctctccactcctatggtaggaaaggggaaatccgtcctggatgagcaagaagactcgtcagatgatgatgctccatcaagtcttgctcgggcagatgcttctgttgatgtgcaagatactccatctttcctttaactttcctaattattaagccttcacatttctcatactttttcctaaccatgttgctttcatttcgtatagacatgtctcagaaaatgctcgaagctctgaagaagagagtaggaggaagctcgggcttatctcctccggccaagaagtctagggtcggtgagacaaccccatccagagagaaggtgccggccgaggcagttattgatctcttcgaggagccaaccgatacaacccttttgccccaaagactcccgaggagggagctcggaaaagcctgagcagtcgaagagcggatccgagcttgtcagaagcggatccgagcagatcagggcccctcccccacctccagtgctgcatccagagactaagagaggcaaagatatactcacccactacatgactcggtctgtccctgaggtgaatgagcagctagccggagccctcaactataggtcatgttcaaagttttcatggccttgctagtttttatagaaggtttgacaaggatttcagcaccatcgcagcaccgattacagaagttatcaaaaagaatgtttcttttgaatggggtgaaacacaagaggaggcatttcaactgcttaaacacaagcttacccatgccccagtactcgttttaccttattcttctaacacatttgaaattgaatgtgatgcttctggtgtaggtattggcactgttcttatgcaggaagagagaccccttgcatactttagtgaaaagctaggtggggctgcacttaatgaccccacctatgataaagagttttatgccttggtgcgagctttagaaacatggcaacactatttgtggcccaaagaatttgtgattcacactgatcatgaatcccttaaacaattgaaggggcaacacaagctcaataggagacatgcacgatgggttgagtgttgggttttacgcccttaata

SEQ ID NO: 348895 - DNA, 525 bp, Cannabis indica
cgagctcctcactcattctgaatccattcagcaaattccatctaaagagagttgagagagcgaggaagcccgaactccaatactgaagctatcgcagggattgaagctcaaagatcaatggctggaggtacatcgatcttttcattgcatatattattgatatgatttcattatattttccgcattttcatatcattgtatatgctatattatatacactatatatatagtctaacatcatgatcaccaagctgagttagactcctttgccgagtcattgttgatctaatatataataatattattattaataataattatgatcttacataaataaatcatgtatatatttatattgtaaaaataaataaaactagaaactagccactttgggatcttattaattattaggtattttatcacgtgcttaccttactttctgtttgtattcataataattagtactacgtccttacaaaaaaaaattagtaaccacgtgatcaattttatatatattaattattt

SEQ ID NO: 348896 - DNA, 533 bp, Cannabis indica
gtaaaaaaaaaaagttaaaaaaacagtacatagagtaattctcctataaatatttcataattgaatgtgatagttaaatatactaataaaataatagaaatgatataaatgtaaatgaaaaagtagtgtatttattgtggtgtaaattttacatcatagcaaatactatattgtgctaaatttagtacaaaatttgttatgtaccaaatttacatcactttctggcacactattggagcacatttttttgttaaataagctatattttattttttcaccatttatttatacatccattaaagatgctttaagaatcaaatgttgacgcttaatacaaaaagtccaattggtattttccataacttctcatttcactcaattttaattttttgtgtttggtattagggtaattactattttggaccttgtgttatgcaaaagttatcgattggaccccctattatgttaaatgacaaaatggaccctgaattgattttttgtcaaaataaaatttaattataatccgatctaaa

SEQ ID NO: 348897 - DNA, 696 bp, Cannabis indica
aggttagaatttttagaatgccgtttcaatggattagtaaaattactaaaatgcccctaggttattttaaaagttgttggaggggtagattcgtcttttagtaattgttggatttttgcccttttgacttttacggatgtctattataaaacagagtaaggaaaaaaaaaagaaactaagatatatataaattcataacttaggaaacaagtaaccaaaacactccattcttctcctctccttcgtgcaagccaaccagccagcaagagaggctctcctcaccattttcttttgcctttggagcatattattcaacccaagatcaacctagagtgattgaggtaagtttacaccttataggttgtgaattttatgaatttttgttggttttgtggtagggttttgcatttctgtggctgtagggattagactaagattagggtgtgtttagggtagggttttgagtatgttagaaatggttttaagtggtttctatggctgcttgattgagtttggtttgttgaagccaaagttgagttttcttctttttaatgtgtgaatttgattcaatgattgaattattgtgttttgaagcttggaatatgttgtattatggttattatattgatctgtgaagtttgggaacaattggtttggtttggagcaaattttgggactttgaagagcttaaatttt

SEQ ID NO: 348898 - DNA, 793 bp, Cannabis indica
tgtcactgtggctgacttcacacatatatatgtaccaaatttgggacatgagggtatgtctcacaatgtgtttgccacctatcctccactcacgtccccatctttcccaactccctcacttaaatctttgtctatctcaacttcttcacagccaacaacctcaattccagtttcaatccctaccctaccctcatctctatatcatgacatgcctactgattaccttgataaagagaataccccaccttccacaactaccaaaagacaaagtgaacccgtgtccatgaggaaattccttaaacgatgtcgtggtgttggtagtcaatcaacatcttttttcactcctgattctcataccgaatctctagtttcttctaatgaggattctcttgattctcttgactgtccggcgatggttgcttcgcaacctcgccactcatcatgaaaattctaagctggaatgcgcggggattggggaacccgaatgcattcagacacctccgattgcttgttcaacaacaatcgccccatgttctgtttcttatggaaactaaacttcctagtaattctatttctcgctttagacagtctttacacttcaataatggtattgaatcaccccgtgttggtatgagtgggggtcttttacttctctggcaagatggcattgatgttactcttcttcattatgggcatacttactttgattgttatcttaaaaatggcagtgatccgtgtcttcattttactgctttttatggatctccacatgctcaaaacaaagaggcttcat

SEQ ID NO: 348899 - DNA, 1151 bp, Cannabis indica
ttgatataggcgtgtaggggtgtttttgtaataaattgtgtaaaatggatttttcatgtaaataatttaatattaaaaattaaatttaattattaatctgtaactgagaattaaacttaagtatttatattgtaaattactcttatataaatcaaatttacattatttatgggttgaaaaatatcaagaaaaaaaaaaatcttaaataatgttttatagtcagctttttcaccggaatttcgtgggacctttgtccatttaaaatgatcgagttggaggttgaaggactcattttcgttatcaacatatattggttgtggttgatgtattttttttattccttttaattatttttttccacttttttaaatgcaaaatatatataaaaacaaaaaaaaatcataaaatgcaactcttaggagagaatatatcacttaatcctaaaaaaaaatacacattcttcaagagaatttcaatctccattgatttcacataaaattccaagactaaataggcattttagatgtccaagactaaatacgtatttagatgcacaacaaatggcataacaactaaggaaaatacaacgaaaacagcaaatttaattgctctaggtgcttcccaataaataaatgactcaattgtttttgctgcctaggagtattcgcagtgcgagtggtgcagattgtaattttttattcaaaccaaaccgtatatgtagtttttctaatttctcaaactgcaaccacaccgcgagattttaaaatcgcaaaaattacactgcaaaaatacagtatagtgcggtacggtttgagcggtttacactatcatcattatcgaacattataataaaaattttcaaacaatctataaagttttaacaatacaaaaaaaaaatcttattaaaattttaatattataatatatatatatactaattatcaagttgtggaattgtctctaagaaaaaaatgcaatgtatacatatattacatatattatatattacatatatttgttcttagataaaaaaaaaatgaataaaactcacattgtaaaaatcgataatttgtaatatataatgtggtgaccttttgaactataattattaaatttaaaatcgccaaccgcactacaccacggagttagag

SEQ ID NO: 348900 - DNA, 1024 bp, Cannabis indica
ttcaattatcaataaagaaacatatttaatttcattacttgtttaatttgttatttggttcatgtgatcatttatttatttatttgatttctaaattcatcaaaatccttatcacactgatattcttgtttactgtgttgtcaacaaagtggaaagtaatcaagattgtgtgattaaatgtattcatatgacttatcagtacacacggtgtaactgataggataatctacaatgtagtttacttgcaccttggataagtactatgtcctttacaggaattggttcaagtaagatggggttcgaagtatggagtatacatggaaagggaccgatattgaacttgaatcagatataataaacttaccgtaaaatctattcaattcaatatcacctagttgatcttagaataaattatcccaatctttagatggttaggttctagttcaattgtattatttttgttcttcaatctgtttcttaaattcgacaaatggatcttctcgtgacatatagattaaggtcatggtagttcaattgagtgggattgctaatcatagatatggaatctatagcttctatctggacatagaagtgaaacgatgatttccttcgagcttagcttaatagagataaatgatagagcgctcattttagtgattatattagttcactaaaatatcatttttaggtaactaagtattttaagaataaaatacgttgaagggtgtaatggtaaattttttcctactcaatgtaaatcatctatagaggatcattgattattaggattataacaaatgggtaactcataggggtgtgtgttggtcggtttagtcaggttatagcatatttttattaacccaatataaatatcgagttgtaaaaatttaatcgcaacccgcccaatgaaaatttagaaaaagttcaacccgcccaatgattttgtaggtttggtcgggttaacccgtccaaaccgttcttcattttttttataattattaattattgttagtttctagaattc

SEQ ID NO: 348901 - DNA, 852 bp, Cannabis indica
ggaggttcttcgaactattttccgcaagttggaagtagagaagaagtctaaggatgaggagcttaacgctgaggtagagaggctcaaagggaaggtgaacgccttagagacagccggtctcgagattttttacgacttttggaaggctaaccctcaggcaaattttgattacctgggcgagaccaaagacatgtatctgagtattgtgcttcccaagtggcctatggagagtccgaggtagccacttgtacctctggtctgaacgttgacatgcccccgcccagacaacagatcctccagctcctaccggcctagaagacccgtacaaggagcctgggactccaactgtctgaacacttatctttttctctttctttttttatctgtccggccataaggccttttttaagacatcgtgaccagccaagcggtctttaaacttggaattatttttcatttttgagacaacaggctgaccgggtagcttttaatcccgggtttacatgctttagttatctataatgaatttcattctctgtttataatcatcgtgcaattgtatttgttttatctttaccaaatactttgtacaggtataggtgccccccaagtgaccgagcagacttatgactcttggtcacttgttactttttgcaagtttgcttttttgtctgttcggggttttgggttcgaccaaaccttttgtacgcattggatggtaaattaacaacatgctattagtttcgactcaatttgaattttgaaataaacatctttattcatttattgatcgaaaatgtgtttgttacgtagtaacttgcatcagagctatttgatctaatctaatctttt

SEQ ID NO: 348902 - DNA, 1452 bp, Cannabis indica
ctcttgtacttatactttaaacattttttataaaaaagtattagggggtatatatgccataatgtactattgattatataaaggaaatgcctcatatttgttaattcttcaagtttaaacaaattttgtcaagtcttgtaaaattttctacttattacaccaagctgtaattaaagtcaaatatatatatattaaaaaacgcgagtacccgtgtactgcgaaaatgttaaacattaattatccccgcgaggatatgaatttgtccaaaataaattgcaaatatgtctaagtacagagtgcgagtacccctgtaccgcataaaaaactaactagcaaattcaaaaaatagtttaaacatagaagagaaaagtcaagcattgggagcagcaggagcagattcatccgcgactttgctgacggcttcattctcgacttcttcagcatccgcagcctcagcctccttgggaagattccctccaccaccttgagttttgtgggcgacatggcgcgaaaagcctcagccatttcagcggcttctgctccgaggattgagaagtcaaaatctggaattttggaaagagtggtgtaaatatagtcagaaactgcctgatcatactgtttcttcccattctccttctcgacctctaagtcgcgagccatctcctcgatcttcctctgagagttcttgacctcgagctcaacctgctccttagacttgcgaaggtcttcaagctccttgtccttaccagccgcgtcttgtttcagtttctttatgctctcctggagctgggcattttgcctcttcagcagttcagcttccttagaaccagcggcaacggctttcatgaacagagtcatcgactgcgaagccaactccacagagcgcggaacaagctcctcagaagggatcctctccgccttggatatgaactcctcgcccacgaacttctcctgcatagccagaaaatcgcgggctcggatagttggctcgatcatgactttcttccctttgtcttgcgtggtcttagccagcttcttggaagaatccgcggcaagagtagttataacatcgctcttcctcttctgggcaatgacgggcgatgtcgtcgctgttccactttttggcttgactttgaggacgggcgcggacttcaaaaaagtcatctctgcgaggacaaataaaagataagtatgaataaatttcaaggcactagtttataacatgagatatgttacctgaggctggtcgagaagtttgcttggagaggcgtttgtctatccgctcttgttgtttctcagatggttccttgtatactggctctctttgaagacttgcgttctctggaatcagcttgtgttctcgcacttagcagtcgtacataaaaaaccccagtcgcgatcttgtaccggaagactccctaggacttcggctgtctctctgcgagttgcgtc

SEQ ID NO: 348903 - DNA, 606 bp, Cannabis indica
gtaactttgtaaaacagagggtccaaaatggtatttatcctaaatattaagcacaatgtcaatagttacattaaatatgtaatcatgatggttatatttatttttagccatttaatcattattgtataattctgattaatttacaaattaaataaaaaataacatgtaacatgatagtaacctaatatttttttttatctttataaagctttaattaagaataattttatttaaaattaaattaattatacttattaattattatttttttttttgtcaatttgttagtaaacaagattttttttagtcaattaatttttttgcacttaaatcattttaatatttgtagcaatccttataatttgaaattataatactttgaaaataatttcacatataattttataatttgaaattattacacctataatcttaattttaaattattacacctaaatatttagttttatttaataatttatttaaaaatttaaaaattatatgtcatacaagtttaaaatttagtcaaatattaaaaaaaataattataaaactaatagagaacgctcaggtaagctgtacccttctatttttttattaagttga

SEQ ID NO: 348904 - DNA, 535 bp, Cannabis indica
tacaaagtttttttatttattcttacggttctttgataaatatttcatttatatataacattgattttttttttttacaaaaattacaactcatacgcaatcataaaaagaaccagtacaaatactataaaattactttagtgttatatgattgttatatatatatactttagcaaatctttttatatatacgatttatttatatatatagtatacaatactacatttatatgaagggtgatataacatataattattattcatgatttttttggctacttttaatgtttttatttggtcattttgctcttatttgattcttttgtcttttagccaagataataatttatttatatacagagaatgataaacatgttttggagtatttcacaatgttattccattttcgaaaatgagaatgaaataaaaatttatagcttaaaaaatcaaatgatgtatatataatgattataatttcaaataagaaatattgttgtatgagaccgagttgctttaaggtttgataatgtggttg

SEQ ID NO: 348905 - DNA, 622 bp, Cannabis indica
aatcacgtaatacgcctatgctagttagggtgttacaatttcacaaagttatttcattttcgaaaataagaattaaataaaaatttatagcttaaaaaatcaaatgatgtgtataatgattataatttcaaataagaaatattgtatgagactgagctggtttaaggtttgataatgtggttgttgtatatgaaatcgagttgtgctacatgttgtataagattggattggacatggttgttgtatgatattaggttgctaacatggttgatgtataagattagattactaacatagctattgtaagagttgctaatatagttgttgtatgagattgggtaactgtaagaattgctaacaatatagcttatgagattgtgttgctatagcattgctaacatagttgttatatgatattcatgagttgctataagggctgctaacatggttgttatgagattgagttgttgtaagtgttggtaacgtagttgttggtatgcgattgaattgttgtaattattgctataacatagttgtggtatgagattggattgctaacaaagtttctatatgagtgggttactaacatggttgttatatgagatttgctaacatgattgtt

SEQ ID NO: 348906 - DNA, 903 bp, Cannabis indica
gtctaaaaataggtgataatctccctttcttatttaacataactgtaagtatatccaatatattttaaaagcaaataattttatttttttaattaatatatgatttcgtcgtcacctttttcatcaagccaaattaaagtccccacacatttaatgaatttagacataaaaaatttagttatgtatgtaaaatttaatagctctcctctgaccttgaggtatcatgagaatttcagttaacaaaacattgtcaaaacaagttgagaggaaataatgaatgacctaccctctacataaatatataaatatgtatatttatttgtatgtaaatttataattccaaataccaaaatttaattttagctttctttgcttagtttttgaagtggttgtccaatattaaaaatggaccataaaaaaataaatttttaagagttgacagagtaggctcgtgcctagggcccccacccacaaggggcttcaaaaataaaaatttattttacttatatataataaatataatttatcattttttttcactagcgtagcacaactttttcactagtatatatatatatatataaatataaatatataagaggtatgagacgcggatatggtattttaaatcacttcaaatagctttatcttttctctccttagttctctcctttagctttatctattttattattattaagggcctttttattttttacactttaaaatattattttttttttggtatttttgtatttttacagaattctacatgaaaactcatattgcaactaacggagaaaactaaatcgcaaacaaaatccttataataacacacatagaaattaccggagaaaccaccttaaaaagtcaaaccgtaaatttagaaaataaaagttaaaa

SEQ ID NO: 348907 - DNA, 1106 bp, Cannabis indica
taaaataatttccaacatttggcacctggagcagaaccagtttctaaggcaccatacagaatggctccggtagaactttaaaaattgaaaattcagcttcagtggttgcttgacctagggttttcacgacttagtgtgtcccttggggagctcccgtattatttgtcaagaagaaagatggatctttgcgtatgtgcattgactactgaaaattgaataaactgactgtcaagaacaaatatccttacctaggatcgatgatctttcgatcagcttcaggggaagaccgtctctcaaagattgatctccaatcgagctaccatcagttgagaatcctataggacgacattccaaaaattgctttctgcactaggtatgggcattatgaatttatagttatgtcttttggactaaccaatgctaccgcaacgtttatggatatgatgaatagggtattcaaggatttccttgatatttgtgttattgtatttattgacgacatcctcgtgtactcccagtcagaagaggagcatgagtaatatcttcagattgttttacagcgactacgagaacataaattgtatgccaaattcaagaagtgcgagttttggctatctcaggtgtcttttctaggaaacattgtcagtaaagagggaatcaaggttgatccgggaaagattgaatccgtcagggattagccaagacctaagagagttacagaagttagaagtttcttgtgtctggatggctattaccgtcggtttgtagaggggttctctaagatttctacgcccttaagtgaactcactaaaacaaatcagcaattgtgggacagacaagtgtgaagcaagcattcaggagctaaaacaaagaatgattactgctccggtattagccttaccgttagagaaagaaaaaattgtagtttattgtgatgcatccatacagggtgtggggtgtgtattgatgcaggccgattgggttatcgccaacgcctcttctgacagtcagtagtcccgtgatccgtaaggggaaataccgggtaagctgtgcaatcccacatcgcctagggaaggtcaagtgggatgattctgagactgtgtagg

SEQ ID NO: 348908 - DNA, 555 bp, Cannabis indica
acaataaacacatagatataaagattcatttcataagagaagtcgttattctctaatgatgaatgtttgtaagttgtaagtattttattaaaaaaatcaatgaaaaattaataaaaaaaataattacttgcaacaattaaagtgtgggagaaaaaaataagtgattgagaaatacaaataaaaaattatttgagagaatgtgtagatgtatgttatggtgtgatttgagcttaaatgaactttcttatctacctttcgccctagccttacataataagcctataaagtcctcttgatctttggattgtgtgtaattacattagtgaaaaatagtttgataattaagcttatggggtgaattttcgtagaaatacacatttctttgagatgagcattgattgctggcatgtatgaattgatatgaatgttagtaatatgatgagttgattgaacatacacacacaaaaattgagtttgaaaataattatcttgagttgaaattctaatgattgaagagtttagattatcttgaaattataagtggatgtacattta

SEQ ID NO: 348909 - DNA, 999 bp, Cannabis indica
agaaaagggttgatgcttcttgaaagccaagacaacacggttaatatgtatactgctgggagacctctgactcatggccaaacagaaccgataatcttcttacctgcaccatgaagcacccgtgagtcatagtgactcagcaagaaaagcttatacacaaaagtatagcaagtgctagtgtacaacaaaatatacatataaaaaattcattacatatttagcatgtatatacatatcagtacgtctatgcgaacatattcacaacacatgataagaataatcatggcaactcataatttataatttcactgaataaacattcattcaatccatagttatataatcttagtgctttataaagcactctagtcatacatcattgcaatcacataatttcagtgctttattaagcactctacttacacaataccataatcacttgaactcagtacttcataatgaacccttaccacttgttatcaacgagctgtatatgtcactatcgttgcccgatagcgcgaacgataagtaataaaacctatctgcagtttcaacgagtaattactcataacggtaatgaccatatcttttactcgatcataatcgaggtgcaacgacaataattgtttaatatcattttctttgatcataatcgagtcacaacgatgataattgtttcataatattatccctcgatcataatcgagtcaaaacaatgataattatttcataatatttccctcgatcataatcgagtcaaaacgatgataatcgtttcataacatctttcctcgatcataatcgagtcacaatatacacttatcggaatctcgatcataatcgagactatcataattatcatcgttaactacaaacggtatatagtacttttcttacctcagtctagagaataagcgtgcatgccggcctaagtggataaacaaagcttgacgatcccgtgtaacaccctaactaccttaagcgtattacgtgattttt

SEQ ID NO: 348910 - DNA, 614 bp, Cannabis indica
tgtctctcttctctctctctctctctctctctctctctctctctctctctcattgattctcacacgccattcctctctagtggggaacttagtctattaatctcaattgttctgaatctgttctcaccattttaatattcaagagagtcgtagctagatattacaaggtctaaacctgtaatatgtacggtataatctctagaattaaaataataaaaaggggagtaggtcattacccgtcaaacaagggggccaaaattctataaattgttgtgttactttattatttgctattacaatttacacgtggtgattatcgataataaataaggctccgctatcagttgacccaaattccaagtcaacattaaatatccaaaataatttaattattttcattaaaataataatttgataatttatggtatatattgttgggttttatgccctaaataaaattccatttcaatgtaatctttatcctttaaatatcaataaagaaacagaagtattttcatcattttgtgtgtcatttggttcatgttatcatttacttatttatttgatttataaattcatccaaatccttatcacatttatgttcttgtttattg

SEQ ID NO: 348911 - DNA, 1314 bp, Cannabis indica
aaactaaacctaataggagtcagtatactataggttttattcaaccctaaaaattatatcgttctattctttccacccatttgaacaagactaaccctaaaaaatttcaagtcacctttccattacatctttagccaaatctatagcactcttccctctcatcttttatcaccatcatctcatgtctattgatctaagcagcttaaagtatttgaggtaataaactctacatttactcatttattgatcacaataggtgaatattcgtaggtctcattttcttatttttttctcaaaatgaaacatgtcttagtaaaagtagtgtatctctttaaatactcatctaattctcacaaccttagtgcctctagaaatcttattaaattttccataattcttatgaagaaagattttactgaattggaacttatctatgttgaaaattagtatttctacgttgtttgttgtaaatcgttttttcatatttttttatataagttgtcttagtaaaacctaaatatctctctgaatactgatccgattatagtgatcttagtaccgttgaaaagataattcaattttctaaatgttttatgaagaaatcattcactaattatttattattctaggttaaaattattgttttattgttgtagtctaaaatccatttgcttcaggatttctaaaaaactgtttcggttaaatatctatatctcctacattataagtctgattctcaagattttagtatcattcgaaagggaatttaattttccaaaacttttatgaggagagtattctatgatttggaatattttagtatcaaaattttatatttctgatgtctcctgtgattcgttactctatatttttttctcagaaatcgtttcagtaaaactatgataactctctcagttttaatctattttcaataatcagcatatctttggaaagataattgtattgtctataatttttatgaaggcaactttcattgaattcatttagttattggttaaaaataatgctctttctgttgtattgaaagagttagaattttaatgttaggaccttgacttatgtgttaatataaggagtagtgacgggataacaaggtcttaaatatcagaatttgaggtaaggaaattaggtagttctgtatgtgtttatttgcataaatttagattctttgtgtactggaatatgagttatgatttgttattataagtctatatacggtactgagaatgtgtggtatagacacaatatgaggttgtgaattgatatatatatatatagattatggttgttatg

SEQ ID NO: 348912 - DNA, 574 bp, Cannabis indica
tatggttacgtacgcggccattcgctcgccgcgtgtttggtattctcttgatatctggtttacaaccagctgggaatcactatagacttccactcttttggctcctacagcctttgctaatttcagccctgctattagggcttcatattcggcctcattgtttgaagctgcgaagttgaaccgtagggccgcctggagtcgcagtccggttggtgatatcatcgccactccggctccggaaccattttcattggaggctccgtccacaaatactctccatgtggggattggcggtaccggcatattcgcggttgcctcggcttcgttgcattcagtaatgaagtccgccaaggcttggccttttatagaaattcggggcatgtagtgcaagtcaaattgacttagctccattgcccacttgaggagccttccggatgcttcaggtttttggaggacctgacggagcgggtggttggtcagtatcttgatcggatgtgcttggaagtatggcctcaatttccttgatgccatcaggaggcaaaagaccagcttttcaatgattgggtacctcgct

SEQ ID NO: 348913 - DNA, 606 bp, Cannabis indica
tacatttaatcacataatcttgattactgtccactgcgttgatgacacaataaacaagaatatcaatgtgaaaaggattttgatgaatttataaatcaaataaacatataaatgataacattaaccaaatgacacactaaataagtgataaaatacttatatttctttattgctaatagaattataaagattatattgaaatagagttttatttagggcacaaagcccaacaatatgttgttgcttacccggatgagggcgccctgagagctagcacttttgaaagaggtaattgacccatttgcgtgttctataaccctagtcttcatctcgtatcctggatgtgttgggaatattttaccaggatgtagatatactaacaagtatgttgattaacatcctaaatatgaatatctctaaaacaatgaaataaacacataagagtttaagaaaaccttacattgattggagcgaaagataatggctccttccgtttaagatctctagcccttgattcctttttgtcgtagatcattatcaagatctaaacctggatcgctttgtcttcttcgggtttggttaccaccgtcttactcactatgattg

SEQ ID NO: 348914 - DNA, 929 bp, Cannabis indica
aaaaaataattaaagtttaaaatttgtggaaaaaaataaataaatttgataaaagttgtaataataagtttcgtcgggtaagtcactagcgtcgaaaaagttatcagaaaagtcgctggtattggaaaagtcgttggaaaagttattgtcagcgaaaaaattatcaccgaaaaagtcaccagaaatagatgtctgagatataaataaaaatagaattagttctataacataatgaataataataaataacgcaaaataactcaaaccggttataattgaaatataaccagttttgtaacataatgaataataacaaataacacaaaataactcctccccttctttaaaggtaaatttatacatttttttttttttacaaaaaacaatgttttgtgtaattatctctttttataaatacctaaaaatgaacaaaaataaaaaatggactatgctcctatttgttaaaataaaaagagaaaattatactcactatgggattttaaaacttgttaacttaaatataatacttttaaatttgaccaatttatatggctatttttttatttttaaatatttttaaggtatttgatatgtcatatatatgtaaattaggttttcaaagttaatatttaatgtttttatttgtttttaggaagttttatcacttgtgccgaaaaagtcgacggagtttgctgccggcgccagaaaagtcactggagtagctgcaggtgtcgggaaagttgctagaaaagtcatcgaaattggtattgttgccagaaaaattatcggaaaaatcactaaaaaaaattggtttcttcatcaagaaacgatgaagaaaccggtttgttcattaagaaacgagtttcttagtatttttttggtgatttttcagcgacaatgtcaattctgacgactttttcagcaccgac

SEQ ID NO: 348915 - DNA, 1025 bp, Cannabis indica
ttcagtggaaactgtattagtctctttctcattttccttttcttgattatgctctcttttcaaattctgcaatcccttattaagtgacctagcttattacaatgataacacttaatatctttacgagacttggatcttcttctagagccatgccgatatttagtataacttcatccctcctatcatgcttttcagtgacaagaaccccagaagaagaaggagattcaccttgtgctttccttctgtcctcttcattaagcaaactatctttgaccaaatccatagtcaaagtcccttctggcgtggaattagaaacaattatcaccaacgtttcccaactgtcaggtaaagaactgaggagtaatgatgcttgcatctcatcatccatattcatcttcatggcaactaactggtttgcaagactctgaaattgacttgtatgctcaaccatactaccaccatccttgtactttaaatttacaagtcttctaagtagagaaattttattaccagcttcttttggcaaagagattttttagctttttccaaacgacatcagttctggtttcattaaagatatgctcatgaagatttatatccatccatcgtctaatataggccatgccttttctatgttgaacttcccattcctcatcatctaacttagacggcttctcactacctttaataggtttgtacaaatctttataatagagaaaatcttccatcaattgcttccaagcgaaatagtttgataagttcaatttcatcattccatccgactcatccatttttcaacacactagaattcaacaccaatcaaccttggctctgataccacttgttgggaaaaaacctattgcaattaaccacaatattttccctctttgtatgtcaaaaataggatacttatcaaacaccacaatatgcaatatcaaatattaaccaaagcaccgcaaacaatataaaatacacaaatcaagcataaaagtgagacaccaagatttttacgtgaaaacccaatg

SEQ ID NO: 348916 - DNA, 522 bp, Cannabis indica
gaactctctcatctaggttgaatgaatagtcaagttgacaaaaggatgagatgagagcatcatgttccttttatattgtttaacctagggcatagggctaaattatatggattaaaatagaagaaaatattgggcaaaatacacttcatgaccatacacaataatggaccattctctacttacaattttgtcactttatttcaaccacttattcttctttcaagaatacaatattttccaattccatcctataaatgccaaaactatctatttaataattataattaattatcaaataaaattatcattacataatttattaattagaccgtacaaagtctcttaattaacaaattgaccccacaacctcttttcttacaattaagcccttgcttagtgaaaattcataaataagatatagttatgataaaataatataaagtagataagaagaaagatgaagaagatgaagagagaaagagaaagtgaatatttcttagttgtttattccaatggggtgaa

SEQ ID NO: 348917 - DNA, 540 bp, Cannabis indica
tttttaaactcttccaaggtcattacactgacatcccgggtttgacccttaatctcccactagacgcggtcatgatcttgaagcatgaaggctacacagttcactctctcaattcccgtcatccccatattatcaaggatacgggtaatagtactcatccactgctcgacctttattatataagtacctcccagtaaagtcggaggttgcatcttcacaaaccgctcaaatacagaatctctgtggggaaaaataaacccatggttacccaccactggcacaggtgctggtggtaacacttgatcaataggggcagctggctgccttaatctatgcaactcttccacctgacgaagtatgatacctcacatttcttggaacatttgctgtcagtcggcaggaggattagcattgccaacccccacattatcccctggaatcagcgaaggtggaggcggtgctagtggattggtttgggcaaccccaggcttaacttgctcgccctgtggtctagatgattgcggagggtccattactagt

SEQ ID NO: 348918 - DNA, 960 bp, Cannabis indica
agatctaaaactttcatgctgagatccaagtccatttatgcctctaaggttatcaaaatttgcaattaatttctaccttgtaaaactgagctcgtcgacttccactattttctactgaatatatgctaacatccctccaaatgacaccaaatacatgattagttttaaaaatatcctaaaaaatcaaaatcactataatcaataatttaaagaatcaatttaagaatatgaatacataaattgatcatatttataagataaatatgaactcatcaaattccaccacacttgactcttgctcgtcctcaagtaagttaatgataaaatgaatgatatttaaacaaatcagtccttatgaaaaataattgtagttttgaaaattgtacatccacttataattctaagaaaatccaaatcttcaatcattagaatttcaactaaagataattacttttcaaactcaatttgtgtgtgtgtgtgtgtgttcaatcaactcatcatattactaacattcaaataaattcatgcatcccaacaatcaatgctcatctcaaaagaaatgtatatttcaacgaaaatctactccataagcttaattatcaaaccattctccactaaagatcaataggactttataagcttataatgtaagactaggatgaaatgtagataacaaagttaatttaagctcaaatcacaccataacatacatctacaatattctctcaaataatttaaatttatatttctcaatcactctcctcaataattcaatcttgtatctttttttttataaaacttacatgtaacaccctaactagcataggcgtgtttacgtgatttttaaacgtactgtgcagctcgttgctaatcaacgaggtttatggaaatcgtgattaattaaaatttttcttatttaattaaatacttataataattcatacaaaatactttgggatc

SEQ ID NO: 348919 - DNA, 531 bp, Cannabis indica
tcatcgttttggtgaatgctgtacgttttgattattttatgaaaccttttgttccatgaacgagaagcttggttatgtccataaatggccctattaagtatgcaaactttctcttcctatcctagaagcacataaccttctggttgctccatatagatggtttcttcaagaattacgttaaggaaatctgtctatacatccgttttccaaatttgataatcaaaagcggtagctatggagagaataattctgatggatttaagcatggcaaccggactaaaagtatcctcatagtccacaccttctctttaggtataacccttagcgaccagtctagctttaaaagtgtcgacttcgccactagcacctcttttcttcttatagacccagttacatacaatttgatgataatcatcaggtgcgtctacatattcccaaaccttgttcttttttgtggaatccatttttgaatccatgtcggctgaccattatttctgtttgggacttgctattgcctgtttataggttaat

SEQ ID NO: 348920 - DNA, 515 bp, Cannabis indica
tcctcattctccagttcaaaagttaccattttccgtttacaatcaatactagtggagtatttggacaaaaagtccataccgccagtccttctgtggtcacagctcagcttcttatcaacggttttatttttactattttgtttgattcgggtgctactcgatcttatgtgtcatcgagagttcttaatcaacttgataggcctagtgatgtttttgagacggtatttggaaccctattgcctaacggggaattaattatttcaaggaagtgggttagatcagcgttaattagaattgaagatagagaattaagcgctgaacttgtggagtaaccattggccgagtttgacattatactcggtataagcgctgaacggaaaatggtaacttttaaacctagtagttgcctataaatagaaagtgatggctcagtctcataacatgctttcattagctttctgacagaattttctctcttcagaaaactgagccttcccactttctaccttggccga

SEQ ID NO: 348921 - DNA, 890 bp, Cannabis indica
aggaaagccagattcatttctttcgttttcctaaagcctaacccacccaatgacttggccaggcacagcttatcccaagctttaagatgaagtcctcggttccctttttgaaagccccaccaaaaatccctgactaaaccatctatacttgagaccatccaactagagagtttcgtggtttgcatggcataggtaggcatcgacagacccacagattttataagagtagctcgcctgccttggacgaagtcttagccttccaaccctgcaatttagaggtgaaattttccaaaataaagttaaaataagcatccttctgtcttgatctgaatagaggcaaacccaagtaatttataacacctttcggataattaatacccattgcttccttaatacctctcctcataccatcaggggtatttttactgaaaaagattgacgtttcgagtttattcactttctgaccagacaaagcacaaaaactctccaaacaattccaaaaacaattagcttcatttaaattggccttaccaaccagtataaggtcatctgcaaataaaagatgggtaagggtcggacctcccctacttagttttattccttgaaaattacctagtcccagagcctcttccaaaagtcttgaaaacacctcagcagcacaaataaataggtatgaggagagaggatctccctggcggaggccacacaatggcataatctttctgacttgacccccattcaggcggatgttgagagtggtggtggaaatgcattgtaaaatccaactgcgcagcctctgaggaaatccaaaacaatccaaggcgtggtcaatgtgttggaaatattttaccaggatccaaatttactaacaagtatgtttcattaacatc

SEQ ID NO: 348922 - DNA, 626 bp, Cannabis indica
attaattttgtgtttttcaattctattgattataacctgaaattgattgtgcatatctcatcaataattaatttaaaatgtttctaaaagtttaatttttgaattggatcaaatattcaggttactttgtttctttagttttcggattagctttaaattagatctacctaagtttatgtgtttttacatgaaattaataccgtacatctattagaaattgtaaaccgatcacaacccctcttatttccgtccgtttcgtcgcctttttgactggaatttcatcccgacccgatcggatcttaaccgggtcggacttgactagttttggggttgctggaggttgaagataacctgctaggacgaagcccactcgcggcttccagagagtgagagagagtgaggtagtttcgtaactccgttttttatgattctttttttcgatattattagagtttaatttctgattttttggtaatttttaattaatttttttgactccgtttcataattattattttttaatgataattatgtagttaaaaaattattaaaaataatttttgataatttttcgaaatctgtaaatcatagaattttttttgggtttcttctcgttctatatgaca

SEQ ID NO: 348923 - DNA, 680 bp, Cannabis indica
gggacggtttattagacattgggattgtcgggagtggtcgggaatttagaatttcccaaaataccctttagtaccccttttatgttattctagtgtggagggacaaaatggtcatttttccccaatgatattttgtcctttagtggactttattttaagttaataagttgatttttatgtggataataggctgattatagttggtgatctattcattatgtcattttatcaaaaaatttaaagaaaggaaaaaccaagttatttttcaagttttttctctatctctctctttcggtccctttgaagcagcaagagtttgaggttttctctgtgttttcaagctgattttgagggaaatccaagttctaggtatagctttgcaccctctcttttagtttcttgtgtcttaagaaagttatcgttttgcatgcttggtgtctttgtggttttattggctgtgattaattgttgttgcattcagagatttataggtatttaattgagtgaattcatgctatttttgttgttagttgatgggatttaaccttgtgtagagatcgtaactcaaaactatgatttctatggtttttcaaagtgaaaatttgtaatagttgttgtggttattaatgatgcttaagtttgttttctggagttataatatggttgtttatggtggatta

SEQ ID NO: 348924 - DNA, 650 bp, Cannabis indica
tcctttttttgactggaaactttgctgatcagctgttggcaatctgagaaaaccttggagagaggaagcttgacaatgctgcaccagtctaagcctagcctaagtgcccaagcctctgccaaaacaggtttgatcttggctgacataggcacagagaaaccagcaataacctgtccattccagtccttaacaactgcaccaagcccaatcttaccatctctatcttgaatggctacatctgtaaacaactggtaagatccttcccttgcttgggaggctgaagatgaaacacccggttggtaggctggctcaaaatcaatcctcttgacctgtgcttccttgtattgagacaaaaaagtgctgatccattggactacatcaccttcatctgggttagcatttctgaaaagttttttgtttctaaactcccaaatagaccagagtgtgcacataagtaaagagaaatcatcacttgtcaaatcagtatgtgcagataacattaaatctttaacatcagaattcctatgcaaaagataaaaatgatataaaggagaaagtttccaaacctctctcgccctggaacagtctaaaagtgcatgtgttacagtttctagagagcaaccacagaaggagcaagaaggagagggaac

SEQ ID NO: 348925 - DNA, 528 bp, Cannabis indica
tggattgttatataaattttagttgcgatttatattgtttcgttaatttatgtagaatttcgtaaaaatataatataaaaaaaaaaaaaaaaaaaaaaaaaacctaagctttggggtgtaaaaataaaagagtctcatgtaaatttttaaaaaaattcaatggacgactctctactttacactatggctagcttcaacgaatcctcaagttcgctcattgctacttttttagcccctcttgcaattacactctcttatgtgtagaaaattaactttaaataagttagactttttttaagagctttcttatgttctagatgaaaataaaattgccttagattttctttctctcttaaattcatatcaacctgttgtcctcaaaagtgagtgttttaatatttatactcgcaagtgcacgaatcgtttcggaatatagtgttcatgtaagtgcaaggtcgaacccatgggagttgactaacatcaaaagaaactatttcaaacaaaacaagaatattataacctagctcc

SEQ ID NO: 348926 - DNA, 774 bp, Cannabis indica
ttgaaataaattggcaaaattgtaactagtgggatccacaatagtggttggccacttaagtgttttttagccatttatttatctttttttttattccatgtaatttaaacctaagcctagatgaaagttgtaaatataacatgacagactcataacctaataactcatcataagcctattctgtcaaaaaatagaaaagagaggctcatctctctaatattcgagttctcttcttgttcatcatcaaaattttgtccctatagtgatagagtacatgcccactcatatcaagtcaagtattgaatcatagtatggaagattgtgaagaatccaacatctgaaagagatccaggctcaaatcttgttatttctccgcgatagaaataaacaagagttaaagatctgagtggaaggagccataaattctgctgccaccaatgtaaggttttctataaccttatatgtgtttaattcatttttttttaggaaattcatgtttataaggtgttaaattatagattataatcaacatacttgttagtaaatctagatcgttataaaattccttccaacagttgtaaggcgacttgcgataagtacatattttaaaaatacccgtatacagttagagtataattttcaaaggaaagaactgggcctaaataccataaatgagaatctcatcagaaatcctataagatctaagagttacatatttttattatccatctcacaacactagaattgtagaattaagaattgacttgatcagtg

SEQ ID NO: 348927 - DNA, 519 bp, Cannabis indica
tgaatctaagaaagagcaaatgtcaattgttttgagatttgttgataaagatggttatgtgcaagaacgttttttcgggcttattcatgtcaaagacactgctgctttaacattaaaagaaggtattttctctatactctctaattatagtcttgatgttcaatctattcgtggacaaggttatgatggcgcaagtaacatgcgtggacaatggaatggtttgcaagctttaattttaagtgaatgtccttatgcttactatgttcttgttttgcacatcgtttgcaattggcattagttgctgcatctagagaagttattcttgtccatcaattttttacaaagttgaactccattgttaatattgttggtgcttcatgtaagcgcaatgaccaactaaaagctgctcaagctgcaaatattgctcatttacttgagattgatgaactagaaagtgggaaaggactcaatcaaattggttctttacaaagggcaggtgatactcgttggagttctcat

SEQ ID NO: 348928 - DNA, 451 bp, Cannabis indica
ctaactgtattccttgacaccatttgaaacatgggacataaagtgcttgaatattctataaacccgctatgctcaaccatagacaagggatattcgtgcttaacgatcatttgagtcaatttgatccttgctaaatcaggatcaaaattaaaagaaactgaagggcttgcagttgcactaggattagcggcaagttgggcctttcttactggacacctatctacctgagaatctaaatgcctaatcccactagaacattctcccaccagcttacgctcaaaatacttgcaaactactttaatttttccatcaattttttgccgtgtgaaatgatcccatgcacgagaagttctttttctctgattcaaagtttcatctactgtattactaacagattgtacttcatttgtagttgatggcataaaatcaacatcatcctcaaaattagaat

SEQ ID NO: 348929 - DNA, 1311 bp, Cannabis indica
ttaactcagatgcaaagtccttggccttttgccatttggggaattgacttgattggacaattacccaagggcaaaggaggcgtgcagtatgcagtagtcgcagttgattacttcaccaagtggacagaagccgagctgttagcaaccattacgtccaaaaaagttcaagactttgttatgaagaacataatctgccggttcgaattgccgtacaaaatagtctcggacaatggcaaataatttgacagccagtcctttactgatttctatgcaaaccatggtatcatcaaaagtttctccgcagtggggcatccccaagcaaatggtcaagttgaagcagtcaacaagacattgaaggatacactaaagaaaaggcttgaggaggctaaaggaaactggtcggaggaacttcctaaagttttatggtcgtaccgaacaactgagaaaacggaaaccaaacagaccccatttgccatggcatatggatatgaagctatgctacccgtagaactcgaaccaccatcccacaaaagattaacatatagccaagaggctaatcatgtactccttgccgaatcacttgattaaattgaagagaggtgaaccacaagaaagttagaactgatggctcattagcaaaaagtagctcggtatttcaacaaacaagtgaagactcagaaattctttgtgggagatatggtcctaagaagagtattcttaaacaccaaagacagtacagcaagtgtgcttggacctaactgggaaggaccatatcaggtagtcgaagttctagaatcaggagcatacaaattgggtacgtatgatgaaaaaatgcaacttgttctggtaccacggtattggaatggagaacatttaagaaaatactaccaatagaagtaccaggtcggatgaccatatcaagtacgaaacacaagaacatttactcctaagtgaatggccttctgggcggaccacgcccaaaggttcggataaaatcttcaaaatactcaggtcagatgaccaccattgaaagtacaacttttaaatacctgcaatttgttttatttcatgttaagctaaagattagattagatcaaattaatagctttgatgtaagttactacggtaacagacatattttcgatcaataaatgaataaagatgtttatttcaaaattcaaattgagtcgaatttactagcatgttgttaatttaccatcaagtgtgtacaaaacgtttggtcaagcccaaagccccgaatagacaaaatagcacacttgtaagaaagtataagtgaccaagagtcataag

SEQ ID NO: 348930 - DNA, 259 bp, Cannabis indica
aaataatttccaacacttttaccttatctgtttcttttgtgtgcggaaggattctcaacattgataagagactatgaacggttggggaagattcggggtcgcaaagttactagaggggctcctgtgttatcacacatgttctttgctgatgattgttatgtgtttttgtaaagcatatgaggatagtgctacgaatatgattgagttattagaaattttccaaaaggcttcaggacaacaagttaatttgcagaagtcc

SEQ ID NO: 348931 - DNA, 486 bp, Cannabis indica
taacccgggattttatgtatgttatatgatttatgcttttcataatgagtctatcgactcacagtgctatgttcatgtgtaggtaagggcaaggctaaggaggaggaacagtgaggacgagaagatgaagattgtacatgtcggggcagttaggcctagagtgtacgatcctcgggacatcagggcttttgtagttagtcgctgggcgacaaatattttgtattaaatagcaactttttgtaaagtgttttgtaaatgggatcctaaagtattttgtatgctatattacaagtatttaactaaataagccaaattttaattaatcatgtttttcattaacctcgttgattagcaacgagttgcagagtacgttaaaaatcacttcaacacgcctatgctagttagggtgttacaatttggtatcagagccgccaggttgtctttcgaagatcgtcatgacctgtacaatcatcatcagcagttagc
